United States Patent Application Publication US 2005/0228172 A9 - sequence listing, part 111

SEQ ID NO: 516126 - DNA, 696 bp, Homo sapiens
tgttctctgctgtggtgaggcgcctatgctttgtatatgtctgaaattaattgaaaagctagtgacagattctgatgtcatttgccatgagctttattrttgtgcaggtaattttggatcaaatcaccctaacgtttttcaacaaagactttagaagaaataaagctgcattactttttcttggcgcattcttcctttaggacctatagtgaggtaagtgacacaaatatctctcattctctgtttccaaacagtaaatagaatataaatagttcacgaacaagattaaggaagtgataatcatcgttcctctaactgaaatgcaccctctgtttagatttatttacttttcacaattttgaaaattttcccatgcaatttttatcagtcataaggtaatgatagttttttaacaatgcaaatgggattaagtcagtcgttttttctgttccttttaatattattctaattcagcctcatgggcattccaaatagttatgagggatagaaatataacattaaattaagggatgagagtagagtgagaagagagtatggctcaaaattaatctcataaattttatttgtcaactgacgtgatttaacacgttagtggtagattttctagatatccctaaatttgtagctatgacttggaatatcaaaacatagctaggcagttcatttccatctgac

SEQ ID NO: 516127 - DNA, 510 bp, Homo sapiens
tgtccctttagagaaacctgactaatacaacagttaaacatctcatataggcaagtagatagatatacatgagtcatacatatgtgagggttatgcttgctcatgataatttctttttagtttctctgactttcctgctgtctcacgcttccaaaccctacacttcrtaggttcactgccatgccaggatataggaacaagtgcatctctattaagaaggaacttaataagtcatagaccaatagtccaggcagaaggaatcaggtcagactctgatgttctcaattttcccactaatgcctgctcttgaaattacattcccagcctgttccttggtacccaaattatttgctggtttccttcaaaaaaaagtcagatctatgaagtagtgatttttgtctatttattcactgatataatcccaggctggaggaaagccttgaattaggaggtgatccataaatatttgttgaagcagttcattaataaatattctgtccaattcaactg

SEQ ID NO: 516128 - DNA, 510 bp, Homo sapiens
tgtccctttagagaaacctgactaatacaacagttaaacatctcatataggcaagtagatagatatacatgagtcatacatatgtgagggttatgcttgctcatgataatttctttttagtttctctgactttcctgctgtctcacgcttccaaaccctacacttcgtaggttcactgccatgccaggatatrggaacaagtgcatctctattaagaaggaacttaataagtcatagaccaatagtccaggcagaaggaatcaggtcagactctgatgttctcaattttcccactaatgcctgctcttgaaattacattcccagcctgttccttggtacccaaattatttgctggtttccttcaaaaaaaagtcagatctatgaagtagtgatttttgtctatttattcactgatataatcccaggctggaggaaagccttgaattaggaggtgatccataaatatttgttgaagcagttcattaataaatattctgtccaattcaactg

SEQ ID NO: 516129 - DNA, 510 bp, Homo sapiens
tgtccctttagagaaacctgactaatacaacagttaaacatctcatataggcaagtagatagatatacatgagtcatacatatgtgagggttatgcttgctcatgataatttctttttagtttctctgactttcctgctgtctcacgcttccaaaccctacacttcgtaggttcactgccatgccaggatataggaacaagtgcatctctattaagaaggaacttaataagtcatagaccaatagtccaggcagaaggaatcaggtcagactctgatgttctcaattttcccactaatgcctgctcttgaaattacattcccagcctgttccttggtacccaaattatttgctggtttccttcaaaaaaaagtcagwtctatgaagtagtgatttttgtctatttattcactgatataatcccaggctggaggaaagccttgaattaggaggtgatccataaatatttgttgaagcagttcattaataaatattctgtccaattcaactg

SEQ ID NO: 516130 - DNA, 594 bp, Homo sapiens
ggtcacattcctctgattctctgatttcttatatgtaaagatgccatagtcactcatttccaatattcaatgatctcatcatttttctttctttttaatccatggggaaatttgaagcctgtttttaaatttttcaaatggttggacttgggagcatgtgtgtgtatgtgtgcgtgtgtgtgttttaattgcaatayggtcagagaatgtatcacatggtttcaactttgagaattttattgagattgtctttgtagcttaatatatgatcagtttttataaaagttccatagatatttgaaaaaactatatactttctgtttattggctataaagttttatatatatatgagatttagtttttgaactgtattcaaattctctatgtcttcatttattttcattggtttaatctgtccatttttgagaaagctgtagtaaagtgtgccttctattttaattgtgaattatgctacacttttctgagaaagaagaaacactatatagacctaaactgtgttctatttaaccaatgtttctgagttgacatataactagtgaaatctggagaaatttatttacataggatcacag

SEQ ID NO: 516131 - DNA, 593 bp, Homo sapiens
ttctcatttataaactggggctaatatgatgggtacctaagctctaatttattcctagatattgatcacaagctaagcttccataagttaaacctttattatctctaaggttattagtgaagacagtattcctggagacccgttttacactataaaataccaaaatcaatcatgcaaaaacaaagatatgcttttacaatgattttctaagtttaaaaagaaaaagtcaacgttgtacatgatcttttggaagatacttctttatcaactaactggctgacgctttcaaaaacacaaatccaaagaaattccaactaacgatattttatttttcggataaatctccccagagcaagtaaatgcttcagtgctctaaggactttcaaactgtgatcaaaattagggccatctgtccaaaatttctatccataaattcagtgggtagacatttctttgaatgttcaagttttccatgttgctgtgtcctcttccttttctccttctgtcactactcctcatcctcttcccatctctgcacccaattttattattaytgaatactcatagcatacaatagccttcatctttagcag

SEQ ID NO: 516132 - DNA, 483 bp, Homo sapiens
aacaaatcggatggcgagaggtgctatggaagaaagataagggcaaggatagggctggagtgttctaggcagcattataacctcccaaagggtcactgagaaaggctgtactgaggtgacagagggatacagactttaaagtgacgagaggctggcgtggtggctcacacctaaaatctcagcactttgggaggccgaggagsgaggactgcttgagaccaggagcttgagaacagtcagggtgacatagcaagatcctgtctctacaaaaaaatttaaaatgaaaaaattagcctggcttggtggcagaggtgggaggatggcttgagcccaggagtttgaggctgcagtgagctacgatagggccactgcactctagcctgggcagcagagtgagaccctgtctcaaaaaataaataacatgaagaggaagtgagcctggtacacacctgggggaagagttctaggcacacgagcagaagc

SEQ ID NO: 516133 - DNA, 483 bp, Homo sapiens
aacaaatcggatggcgagaggtgctatggaagaaagataagggcaaggatagggctggagtgttctaggcagcattataacctcccaaagggtcactgagaaaggctgtactgaggtgacagagggatacagactttaaagtgacgagaggctggcgtggtggctcacacctaaaatctcagcactttgggaggccgaggagcsaggactgcttgagaccaggagcttgagaacagtcagggtgacatagcaagatcctgtctctacaaaaaaatttaaaatgaaaaaattagcctggcttggtggcagaggtgggaggatggcttgagcccaggagtttgaggctgcagtgagctacgatagggccactgcactctagcctgggcagcagagtgagaccctgtctcaaaaaataaataacatgaagaggaagtgagcctggtacacacctgggggaagagttctaggcacacgagcagaagc

SEQ ID NO: 516134 - DNA, 583 bp, Homo sapiens
agctgaattttgcgggcaggaaaggaggcacagaggtcgctgggtttgggtattggcatgtgtgcagtggcggccaagggagaaaaagaggcaggaaaaaggctgttaaaacagcaggaggccaggcgccgtggctcatgcctgtaatcccaacactttgggaggccgaggtagcaggatcacttgagcctaggagttccagaccagcctggcaacgcggcaaaaccctgtctctagaaaagattaaaaaaaaaatcacctgtaatcctagctattcaggaggctgaggtgggaggatcatctgagcctggggaggctgcagtgagctatgattgtgccactgcattccagtgtgggtgacagagtgagacgccatctcaaaaaaaccacacacatacacacaaaaacaaacaaacaaagaaaaaacaggaagaaagcaaactaaggcaggactatgtgaatgtgaaaagggccagggcctaccaagtacagtgaaattccaatgactcgccagtcattcaccagstggaaacacatcaagtgacattgacgtgtcctcacacactgctttgggtcattttgt

SEQ ID NO: 516135 - DNA, 512 bp, Homo sapiens
gggagcattacatcaggagaatgttttgcaatttataatccactcagtctttttaaaaaaactctctgacatcagataaagaactgtatataatatattcttcttatatcacaagcaaaattctgaggccccaaaccatgtattacacatatttctcattctacccttaagattgtctctttgttgatattaagtmctgaaagcaatgcttacattcaaaaatagctatttattcatgcaatacatacacataaatagctaacatggcaacagtgataatccctcattagcctccaattaggttacatttcaatttcagaagcaaatggcaggcggtggggactgcaatccacacaaatagaaatgtgaaggataccacataaaaccataattacatgacttaggaaatatcttttccctgcatctagggaaattatgggatgctgcaggtgattatcagtttatgatctgaacctacagtctgtttccttgtgttttcttattctccaggc

SEQ ID NO: 516136 - DNA, 512 bp, Homo sapiens
gggagcattacatcaggagaatgttttgcaatttataatccactcagtctttttaaaaaaactctctgacatcagataaagaactgtatataatatattcttcttatatcacaagcaaaattctgaggccccaaaccatgtattacacatatttctcattctacccttaagattgtctctttgttgatattaagtcctgaaagcaatgcttacattcaaaaatagctatttattcatgcaatacatacacataaatagctaacatggcaacagtgataatccctcattagcctccaattaggttacatttcaatttcagaagcaaatggcaggcggtggggaytgcaatccacacaaatagaaatgtgaaggataccacataaaaccataattacatgacttaggaaatatcttttccctgcatctagggaaattatgggatgctgcaggtgattatcagtttatgatctgaacctacagtctgtttccttgtgttttcttattctccaggc

SEQ ID NO: 516137 - DNA, 612 bp, Homo sapiens
tatcttgtcctcgatttgtgctagcattaaatattagaagtatttacccttaggctggaatagtgagtgtaggtacttgggacagagtggcagctttgtgtcctagggaatgagtaaaaatattcaacacgatccaaaatgcctaaaaatagaggacagtccctaatggtgtatgtctactagcaacacatgcatttcctcccacagagtccatgaaggtaacctcaaaatacacagaaaatatgcacagacaggctaacagggattctcaagtggaaatataaacgtagaaacaaaaaccacaaaatattttaagaagagcaattaaggaagatcaaaaaaaaaaaaaagagaaagaaacacacacacaaaaaaacaaacaaatgactaaatggatgttattaaaaaacagaagacttcataatatgaataactactttctccagcattagaagatattgtatctcagagacgagaataatgttctgacaaaaaaaaaacaattaattgtcttgaaaasgaaaattactattattaaaataaaaaggaaaaatgggcacactgaaaatagtaggcagagtttgactcagtaaccttcactaggttttagta

SEQ ID NO: 516138 - DNA, 536 bp, Homo sapiens
cagggtcagcagctctccatgagccttgttgctcagtagcttcttgccaatggaagacttttcctcaagccatagattccagccattctcagagccctgacaattccagcaggctcattttctcaatgctgttttttcctgttggtttcaaaaaagcttagcgtgtcaaatttgccaagtatgcaatgcagttagaaggagttgccgatcataaggagacattttaatggggttttcactaacatgtccaaagtgatctttgaaataacaacttagagcagccaaaatttttaattctgtccttgcaaaccaacacctttgtgtgtttctaaacatcatcagaatataaaatgaatatttatcctaaattgttcacttcatcagtaactatcacatctagcaatgattaaacacctgtaataaccaaatktcttgagtcctcacaatagagcaaaatgggtgatttcattgtctttattttttaatgtataatttactgctgtctctctagccctgggccttgtgtttggcataca

SEQ ID NO: 516139 - DNA, 609 bp, Homo sapiens
ctgctgcctcctgtcctccggaatttgcagcccctcaaaaccccagaggtgggcgaagtggtatttaatagctgctgggagctgcccatatgtgtggccctcaagtgtcccaccatgtgctgggaaagagacctcagggccaggggctcagctaggagagagagaaagggagaaagtggaaggcgggcagaggaagtgggaggaggaccgagagtggcagggaggacggagagtgggaggggcagggagaagcccaggactaaaatggtggcccctacttgggcccactttcaagtgtggcactgggaggagagtgtattggttcagaggactgtgtgtgtgtgtgcgcacgtgtgcgtgtgtgcrcgcatgcaagcaaatgtgaccttgctgctggagtggaggttatgcgggtggagaaggagctgtgttgggtgagcattgtgtgtctggtgtgtgtatgctgcgtttgtgagctgggtgctggatgatgtgtatgttgggtgtggcagagtgcaggagcatgttctataccatctgtgtgatagagaaggactgtgggtacagcgactgtgtagtgatgggctgtgatggggaaagggtgtttgt

SEQ ID NO: 516140 - DNA, 666 bp, Homo sapiens
cacccagcacccagcacccactggcatcttccacagcagccttgggtctgcacaaactggctacaaacacatatgactgcatctcactccagtccacagccatgccaaggaggaggatgctactccctggggcccgcctgcagagagccccacgagatcttccttgaggatttgttttctaccttgaacwttcacaggcattttacttcctaccccatgctatgtccttgtatgttttagtatcaaaataatgctttccatcacttaccattggaaaaaaacggacactcgaagagataaggcaaattatcaggcctgagctgttcttgcccctcttcctgggtttggaaagagtgcagaaccaggagcgataggcctgggcccaggcttggcctgcagacgatgatggctaagtcatccatagaatgggctggtgagcctgccgtgccttgccttaggacagtggccaccactaaatggagcagtgggtgtgaagactaatgattcacacatggaacttgaggtgtcggctggctgtctgggggctgggcccctctccaggcccctctgagactggagaagctggagggagcctgaggccgacacccccagcatggccgccacccagattcccccgagcaggccggggactgggggtccaggcag

SEQ ID NO: 516141 - DNA, 615 bp, Homo sapiens
atctctgagcttgagaatatgtcaatagaaaccycccaaaacagaagagaaaacagtcttctttctgaagactgaaaacacacacatacatgcaccacacatgcacacacaaagcccagaatagaatatccaagaactgtgggacaattgcaaagggtgtaacatacacataatgggaataccagaaggagaagcaataaaggaatagaagaaatatttgaagccataatgactgagaatttcccaaattaaagtcaggcaccaaactacagatccaggaagaatttgagaacacgaggcaggataaaagcaaaaaaaaaaaaaaaagtctaagcatatcctatgcaagctgcagaaaatcaaagataaatacaaaatcttgaaagaaaccagaggaaaaaaccaacttcctcatagaggagcaaagataacaattacatctggcatctcctcaaaaaccacgtaagcaagaacagagtggagtaaaatagaatcatgcaccgcataaagacatttcgatcaatgatggaccacatacaatcgtacggtggtcccataagattattacaccataccttcactgcagctattctacattgagatatgtttagatac

SEQ ID NO: 516142 - DNA, 501 bp, Homo sapiens
ctctgagcttgagaatatgtcaatagaaaccccccaaaacagaagagaaaacagtcttctttctgaagactgaaaacacacacatacatgcaccacacatgcacacacaaagcccagaatagaatatccaagaactgtgggacaattgcaaagggtgtaacatacacataatgggaataccagaaggagaagcaataaaggaatagaagaaatatttgaagccataatgactgagaatttcccaaattaaagtcaggcaccaaactacagatccaggaagaatttgagaacrcgaggcaggataaaagcaaaaaaaaaaaaaaaagtctaagcatatcctatgcaagctgcagaaaatcaaagataaatacaaaatcttgaaagaaaccagaggaaaaaaccaacttcctcatagaggagcaaagataacaattacatctggcatctcctcaaaaaccacgtaagcaagaacagagtggagtaaaatagaatcatgcaccg

SEQ ID NO: 516143 - DNA, 662 bp, Homo sapiens
ccagcccagaagcaccccctgcacacaccatatccccagtgagcacacatgcatgtcacagacaggaaaatcacactcatgtagtacctgcacgacacaggctaagggctttttggtgtttcctgtgtgccaggccctgttgtaagttccgtgtaggcatgagctagatgcaaggccgcaacaatcctaggatgtaggttcctttcaatattcttatcctcattttacaaatgaggaaactgaggctcagagaggttaagtaatttgcccaaggtcacacagctaggaagttgcagagctgagatttgaacgcaggctttaaccactgtgctatggcccattctctaatattgattgcatgctactcattcagtcagtcatcaactattactgactgctgtgttgtgcccaactctgcacaggcccccgggacggctcttccctgccccctcctcctgacccagcctggtgtgtaccacatggtagatgggggctgtacctgctctcactctccttcttttccagagttcctcctcccccacaagctggcacatgtggatattggctctgttttgcctttgacccctagtgaaagaaaatactgaggtaaygcctgactggggagcatggacacagggagatgcaaatggggtgccagctgg

SEQ ID NO: 516144 - DNA, 375 bp, Homo sapiens
ctgcactccctcccctttcgcttcccctagttctttytcttcctctcacacacacccgctgggagttccctgaacatacctggctgttttacacctgtccaagcctccattcatccttcagatccctgcctaagggattccatgctctgcaaagctgccaggaccccgcctcccaaatcagcttccccctcttctgtaccaggtctgcagggcacccagggcatcttacagaatttccctccattgatagcaattgtgtgtcaaagccacactgacttggaacactcttctaggtggctgcaaggctggctccagctcctccctctccagttaccttattcaaaattacaaccacccttttcccttagtgtgctt

SEQ ID NO: 516145 - DNA, 613 bp, Homo sapiens
gctgcactccctcccctttcgcttcccctagttctttctcttcctctcacacacacccgctgggagttccctgaacatacctggctgttttacacctgtccaagcctccattcatccttcagatccctgcctaagggattccatgctctgcaaagctgccaggaccccgcctcccaaatcagcttccccctcttctgtacyaggtctgcagggcacccagggcatcttacagaatttccctccattgatagcaattgtgtgtcaaagccacactgacttggaacactcttctaggtggctgcaaggctggctccagctcctccctctccagttaccttattcaaaattacaaccacccttttcccttagtgtgcttaacttttctccacacctcttgtcaacatctaacatactatatatttactttatcttgttaattgtccttcagttgtgtaaaaggcaaactccgcgagggcagggatttttgctgcatcattgttgaaaacccagtagtcaaaatatttgcagaatgaatgaacgtgcattcatcaattacctagtttcatttcatcctggctgctcccagactgtgggggagggatgtaggtgccag

SEQ ID NO: 516146 - DNA, 605 bp, Homo sapiens
tgaagccattagttcattcagatcatatgtacagagagtctcctagcactggccaggctgctgccctcatccaccaaacctccccacttgacaggctcagccttcaaggagtacttgaaagtgaattcttctgtgttgtcttccctgacactgccccaaattgaggcaaagtcatggcttcctcctctcagctcccaaaacaagttgcatacactttgcactatggtttttaatgttaatttaactatgttctgtcttctaaaaatgagagacaaaaggtgggagaaagagagagagtgtgcgttaatgttatgtgtcawtatgattaggtaacacagtacccagatattatttggttaaatatcattctgggtgtgtctgtgagggtgtttctggatgagatgaattcatagactgagtaaagcacaatgcccttcttcatatgagtgggtctcatacaatcaactgaaggcctggatagaacatgaaaggggaataagaaagatcacctccctctgcctgactccgagttgccacattggtcttctgcctttggactcaggctcagactggaacttatatcgttagcttgtctggttctctgg

SEQ ID NO: 516147 - DNA, 627 bp, Homo sapiens
taagaaagatcacctccctctgcctgactccgagttgccacattggtcttctgcctttggactcaggctcagactggaacttatatcgttagcttgtctggttctctggcatttggactcagactaaaattataccattggctttcctgggtccagagagatcgatccattaatatataagtatataggatactattactaataggatatatattttacatatatacacacacatatatatatagtatgtatatctattagtatatagaatactattactaatggataaaaattagaaataaaagatatatttttatatatttatggatatatattatawtggatccattacaatatttataatatatacccaatagtaatagtattctatatactaatggatatacatatataatatatatccattatttaatagatacaacataactctgcatttaggaaggttccatatatctatatctacatgtagatatactacatatacactatatatacatatatggtattctatatactaatggatatccatatataatatataatgggtatatattctttctatattcatatatgctatataatggatatatattcattactatatag

SEQ ID NO: 516148 - DNA, 522 bp, Homo sapiens
acagtttcctttcatagagttaaggaaaatgtcatggaaacaatgatactttcaggcttggtcgaagaggatgcatggctgtttattggaagggaaggagggcagcttctacctggggcaggtagtggggagggatggggaagctggattgcactaacctttggtgaacagagctaattaagtaagttacttaataatcacatcatctggttaatgcaattcagaatgagtcccagatactctggtcattatgctgatggaaagctttttgaaaaaaaaaaaaaaaaaaaaaaaaaaaaarggccatctccctctgctcatcctgtaattatccatttcttgcctacctcttgctgtttttgataagagccattaggataataattacaggctcaactaatgtattaataactctatggatgtacatttcttgatgcctctgtgaaagactgaaatatgttaaccttttaaatgtcttcagtcacaggctgtgtcagacttttattaatggcccagttcagc

SEQ ID NO: 516149 - DNA, 667 bp, Homo sapiens
tttttctttagtgctttaactgccctacctataaagatcaccatttgtttcataagtgaggatacagaaaaacagtatgatttacacaaagttccataataactgtgggagctggacttttaactgcaggttatctggctaagcatagctctgtcaccatgcctggccccatgcattgactattagattaaatcatgaagaatgcgacctacaaggtgagccccaatcgtatcatggttatgccaaagaatgttcatgagcagtgaagtttgggatgccaagaggktcaaataaaagagaaatatattttccagttttctataaaaaatgtttcccaatagtgtgtcatcgtggttttattttctggcgttattgtaaaagcctcagtttctggtggagatgtttgcttgggtcgtaacagagtgcatgctctccttgcattgcgatggaactgagagctgtagcccaggagctgaaagcacaagtattggtttcaagccacttaacctcacatctcatcaggatacttactaactttgtggcattgggaaagttgtttaatctctctaagacttagcttcctcatatttaagataatagtatttatacctacctaataggtctcggcataggagagagaaggaataaagaaaataataaatgaaac

SEQ ID NO: 516150 - DNA, 549 bp, Homo sapiens
ctgggttttattaaatagtaaattaaaaaaaaaaacctgcatccagaatatycaacaagctcaacacccacaaattcactggctcatcttccagcatcatgtggtggttgataagtctgaagaacacacacacacctcatcagctcccatcaaactctctctgcacccacgggaaaagctccacattcatagaattcctcccacacatgcctgcaccccatcagcacaagcaaagatgaggatttactctgtgagtccaaagaaaataaattgctccatttatacatgacacatgaaagaaaaagtcatgcttatgtcaagctagaaatacactttttaaaagacaaaattgttacttaaaaaaggaaaagtgctttggctctggaatgcctggtgggtgcaataattcaattaaaattcattgttctgactctggcaagtattcatttgttcaccaatattttagagagatctattctcattggttcttcgagttcatggaaagcttcatgtcatcttattggattgtcttgtattttaaatgattac

SEQ ID NO: 516151 - DNA, 434 bp, Homo sapiens
ctgcccccagacagccctaagaaatgtgccactgtgtcggtggtrgggacaccatggaaggtgacatgcacagcttcacatggtggctgccctatgaagacgtgggacaagcagtatcttgattttagaaaaaaaaaaaaaaaaaagaaaagaaaagctgtgcttcttctcagccactggttcatttttgccttaaggaccagttgactttacaagtgataatatatgtagtttttctttgtcttagctataaaggagagaaaagacaaatgtgggtacaatctgtggtaaccctgtagaaccatatggcattcattctgcacactgactgtgctccagagtgtctcttctctgctctctctcttactttctctttattcccttatttttatcactagatttttaaaaatcttattttagtaaatggtccgctg

SEQ ID NO: 516152 - DNA, 434 bp, Homo sapiens
ctgcccccagacagccctaagaaatgtgccactgtgtcggtggtggggacaccatggaaggtgacatgcacagcttcacatggtggctgccctatgaagacgtgggacaagcagtatcttgattttagaaaaaaaaaaaaaaaaaagaaaagmaaagctgtgcttcttctcagccactggttcatttttgccttaaggaccagttgactttacaagtgataatatatgtagtttttctttgtcttagctataaaggagagaaaagacaaatgtgggtacaatctgtggtaaccctgtagaaccatatggcattcattctgcacactgactgtgctccagagtgtctcttctctgctctctctcttactttctctttattcccttatttttatcactagatttttaaaaatcttattttagtaaatggtccgctg

SEQ ID NO: 516153 - DNA, 592 bp, Homo sapiens
ctctctgcctagtgcaggtgacccagtccaactcctctcaatttgcctgcctttccgctctctctttcatcttcttcttccttttctaaaagcaggcactgcaataaattaaactttcatggttccattccctcttttcccattgaggaaccctaacatatttccttaaggaaatactttggaaattgtaattgaaacacaataattcataayggaagcgggaggaggagagtaatagatttagctcttgtttctggtggcagacatgttaattacattttctatttcctctcattaccagggagcatgtctccaacaggccagcctgctactctccctcctctccagccagccccaccctgcttcacaccctcagtgggcctggaggcaagtggaatgcacaactgaccatgtcactgttttgttctgagctccttggaagagttacaacccagcaactcaggtccagtttccttagtgggaatcagagagccccaaactctactctcctaccttaagggacagccagactgagatctctgaattcacatagcctcttcttgcttctgggagtctccatatgccaccgagg

SEQ ID NO: 516154 - DNA, 628 bp, Homo sapiens
cactctggtggaaacagaaaatcaaaaatcatagttaataaactaggggaaacagcagggacaggaaggaggactgcactcacttccaacttgcctgtgtccagcctctgctggcccatgttgcaaaaggcaggaagactttaacattaaaacaattttggagttttgatcattatctattattgtacacttataattactatactcagactatatttgtgacttaacatgatcgtaggactttacccaagagtggccagaaaaaatatggggtctacctgagttttaatccaagggtaggagaaagattgtccacatcaaggatcttaagtaaaattatgggaaacaaaaataattatttaaaatacctaatgctagatgacacgttagtgggtgcagcacaccagcatggcacatgtatacatatgtaactaacctgcacaatgtsgacatgtaccctaaaacttaaagtataataataataaaaaaaaaaagattaaaaataaaataccagttatgtagttaggtctatgataggtaagttttcatggcagttaagaagaaagagtaaataattccatgtaaccaatgtttgttaccacatataatagtatgttccatcacttac

SEQ ID NO: 516155 - DNA, 562 bp, Homo sapiens
tgtccaatgtagaggatcaacagtaatacctatactgtaggattatcatagagattaaacaagaatatgcacagaaaatacatatcatacagcctaagagctataagcactagctatttctattattcctggtattgtttggtaacaagcaggacattaatgatcttgtatataatagcctgagggaatcatagattttctagaaaatagaaggaggagagagtagctgatgaggkaaacaaagacaattattttatggaactttttccagaaaatgattttaaaagatagaggaaaagataatcattgattgtcgtgaatcttggaagagggttttttgttgttattcctgcttttgtttttttatttatttaaagacagatgaacttaaatgagtgagagtttgaagacagtgtgaaaaaaatcaataaaaccatggaacaatgaaatgacttcattatgtatttttcagaaggcaattttataccagttaaatgattaatcttagaaatgagtggagatgtctttgttatcctaccagaaaagagaaaaaaaagtatgg

SEQ ID NO: 516156 - DNA, 636 bp, Homo sapiens
cttgttttacttaacatgaagtcctccaggttcatccatgttgtcacaaattacaggatttcatttttttgtcctaatagtattccatcatgtatataccacactttttttacacactgaattatttatttggttgatgcagaagtaacggcagcttttgccgttgaatgtaatggcaaaatccgcaattaattttgcagcaacccagtatcagggcatgaaatcctagtatgtgaacttttcttaaatttaataccaaaaacaattttttgactgtataaaagggttggtgtgatagaaagtgaaaagtaaggaacaccagggtgtgttcctcactaaaatcactttactctccaaaactaagttgcaccttctctatatataaaaatttggggactatcggttatttccaaatagttctctagtgggtatsctccagatttgtttggagacaaatctgaatttcaaatctagcttaatttctttatctgtatcattcataatgtgacatcttccatgaaacattgctatgaaataaatttatcaataatctactttagcttatgacatatagatgatgctattactaaatgctcatttcttcaactttgttcttctttcctctggctcttcctt

SEQ ID NO: 516157 - DNA, 634 bp, Homo sapiens
tttcatgtgtacataaaacctcatggttgtcttcactatccaatcgctttaaggaaactttgatacagtcattcacttagcaagtatttattgagcaattactgacaccatgcaaatgctgttaatgcatcaaagaacaaaactgaaaagctcctcctctaaaatttataatccagtagtaaaagtataagattacctttctcctactttgctattttctgytaaagtgaaatagcaacatgctgagatgacatctctaaaacactaaaaattagctaggcatggtactgtgtgcctcttttcccagctaattgggaggctgagctgggaggatactttgagcccaggaggtccaggctgtagtgggtgatggagtgagaccctgtctccaaagacaaaaaaatcaaaaccagttatttttgtttttaatgttaatcttagcaaaatattaattaaatatttggcaacattagtctaaatttaaaggaaaaggattcattttgactctagacaaaggaggtgagaaaacttctcttttaattacaactattttgtttcacttctgctaagtgatatatatttttattgacaaacatcataatcagacttctcaggtcttcaacaataaaagtta

SEQ ID NO: 516158 - DNA, 564 bp, Homo sapiens
atttttcaaatgctgagtaaaatattagtatgtcagcacagcaggagragagggggtttactaagaatagcagcccagctacccagctaacacctcttttactttggagccctcataaagaaaatggtttctgacagagcctcgcaaattttcatcaattaatagaagaaactcaaatcctgaccctgaatcggaacacttttaataggcattttaaaaatttcctctagaaaccagtggcaacgtatttgagcatgtgcagtcttgctgataataatttgccctcttatagcttaacacaagagagcaggcaaatagtttgccttggattctggtcacacggccatttcttcccatgctactgggctggaataattttctatatcctgctataaatatcacttctccaggatgtgtcctgaagtcttcttaggttctactcctaacccccatttcttagtttgtttcttatatttcccatccccaaggaaagcctcactttctggagacttaataccatcataatccctgtgtcataaaagacaaaaccttcaataaatgctg

SEQ ID NO: 516159 - DNA, 398 bp, Homo sapiens
tgtcttctattaagattttcaaaaacaataccagccttcttgctaaaaacttttttgtttttgaaaatagagttatttttcctaaaactatgttacttattttaactacaaatccagtaaataccaatamaaattacccacatacacacaaaaatatttgatgtgttcagtaatttttaagagtgaaagggatcctggatccataaagtttgagaactgcaaatccaatttctcattattatataactgaagaagaactgggagatgatccccatcaaagtagcattccctctctgccatcctgtttgttaatgttggcctctcaacttgctatccctgtttctcttcatccatccagactctgcccattcttccaggcaaatctgaagtgttaccat

SEQ ID NO: 516160 - DNA, 398 bp, Homo sapiens
tgtcttctattaagattttcaaaaacaataccagccttcttgctaaaaacttttttgtttttgaaaatagagttatttttcctaaaactatgttacttattttaactacaaatccagtaaataccaatacaaattacccacatacacacaaaaatatttgatgtgttcagtaatttttaagagtgaaagggatcctggatccataaagtttgagaactgcaaatccaatttctcattattatataactgaagaagaactgggagatgatccccatcaaagtagyattccctctctgccatcctgtttgttaatgttggcctctcaacttgctatccctgtttctcttcatccatccagactctgcccattcttccaggcaaatctgaagtgttaccat

SEQ ID NO: 516161 - DNA, 656 bp, Homo sapiens
ttgtctccacattgcccatattcagacatactgtcactaaatgggacagcaatgaacatcaggactccaactaacatcttattatcttagcaacctgctggaaagagatcctatcccaaaagtctagccacatttccaaccacatgttgtaaaacatggcccccacaaattattgagctgagtgtcaattttcttttctgtaagttgtggataataataataatacatatttcacagaccactgtraggaaattttgattgatgtatctaaaggcaacttgtatagaatttggccaaaagtagccacttaatatttattcattgttaattttcagatataggtgagttgattgtagttactgctttagagagctattagaaatcaacatcatttatcaatgcttaagagtagcactctttgtatgttatcttgtgctttgattgttttatgagaataatttcttcagttatattgccaagttttccctgtgaaataaggtagataagagatggttttaaaatttggaaaacctagattcagagcctggttctgccaataaaacgtgtgggatcttatgcaaccaaattactttctatgagactcaacttacttattcataaaatgaggatagtgatacttaccttactggggttac

SEQ ID NO: 516162 - DNA, 500 bp, Homo sapiens
aaaactagaataaaattatgtataacaaaatatttataaagtgcattgagttttataatgcattttcaaatacattagcttatttattccttgcaattawcccaggaggaagatattatccctaatttacagttgaggaaactgaggctcagaaatggaagtgctttgtcctaaatcacacagaatagggacacttatcttctgattcacaatcctatgccatttccacaaaatcatgtaaaaaaaattgctaaacaatcaatagaagaaatggattaaaagaaagataggtaaaatgcccatcatccaagcacgctcctactgttgactacacttgtaggtccagtctggcctgtcatttgcccacccctgggctgcaatgcctgtaaactgagccattctcataaacatcccagagaaaagtagtagttagcacactggtaaaggcctctctctgcttaaccccagcagcaagtctgcctggactgagctgagaagat

SEQ ID NO: 516163 - DNA, 644 bp, Homo sapiens
tattccggggtggcatttcttgaactccttcaggccaataactttgtttttacttacaactaaaatcatcctaattgatatactctctctccagcttccctcccaatgcataacctgaatcccaaaaataaattgaacattttatggaagcccataaaagcagaggtttttgagatttttctaaggaaaataggaacatcagttaaagcacttaataacatttattaaccaaaactaaattattgctacaatcataatggcaagggagtaaccagaaattttgaggtgcagctcttgcaaaatacaaggaaattcacagagaaggagcaggatgcttgttgcatattaatggctctttctgagstaggaacctgcagtaaaccgcctcctggctatatgtggcttatctgtaagatgttgtgaaatactccctctacccctaaccccagctccaacctccaccccttccctgagcttcatcctagatgcaggggctagcatgaggtggggttctgtgatgaggtgagatgagtgttttgcacatgacttagtaatttttaggagttgaaaattaaattactttcaggccacctcaaaatatccctgagtcaaaacacctgcatccaagtagcagcttcaaaatg

SEQ ID NO: 516164 - DNA, 644 bp, Homo sapiens
tattccggggtggcatttcttgaactccttcaggccaataactttgtttttacttacaactaaaatcatcctaattgatatactctctctccagcttccctcccaatgcataacctgaatcccaaaaataaattgaacattttatggaagcccataaaagcagaggtttttgagatttttctaaggaaaataggaacatcagttaaagcacttaataacatttattaaccaaaactaaattattgctacaatcataatggcaagggagtaaccagaaattttgaggtgcagctcttgcaaaatacaaggaaattcacagagaaggagcaggatgcttgttgcatattaatggctctttctgaggtaggaacctgcagtaaaccgcctcctggctatatgtggcttatctgtaagatgttgtsaaatactccctctacccctaaccccagctccaacctccaccccttccctgagcttcatcctagatgcaggggctagcatgaggtggggttctgtgatgaggtgagatgagtgttttgcacatgacttagtaatttttaggagttgaaaattaaattactttcaggccacctcaaaatatccctgagtcaaaacacctgcatccaagtagcagcttcaaaatg

SEQ ID NO: 516165 - DNA, 644 bp, Homo sapiens
tattccggggtggcatttcttgaactccttcaggccaataactttgtttttacttacaactaaaatcatcctaattgatatactctctctccagcttccctcccaatgcataacctgaatcccaaaaataaattgaacattttatggaagcccataaaagcagaggtttttgagatttttctaaggaaaataggaacatcagttaaagcacttaataacatttattaaccaaaactaaattattgctacaatcataatggcaagggagtaaccagaaattttgaggtgcagctcttgcaaaatacaaggaaattcacagagaaggagcaggatgcttgttgcatattaatggctctttctgaggtaggaacctgcagtaaaccgcctcctggctatatgtggcttatctgtaagatgttgtgaaatactccctctacccctaaccccagctccaacctccaccccttccctgagcttcatcctagatgcaggrgctagcatgaggtggggttctgtgatgaggtgagatgagtgttttgcacatgacttagtaatttttaggagttgaaaattaaattactttcaggccacctcaaaatatccctgagtcaaaacacctgcatccaagtagcagcttcaaaatg

SEQ ID NO: 516166 - DNA, 632 bp, Homo sapiens
ctgggggatagaacgcatgtgtcagacccaaccatcccagtggaggccatcatagattacataatagccagatgatccccacacatgtgaatgagaacagatgaacccatctctgatcagaagagctgccagataacctgtagacttgtaagaaacaattgctttccaccacaattattatgtgaggtgatttattatgcagcaatagctaactgatacagataataataataatttattgagtatttagtatatgtcaggtactccttaatgcttctttcataaatcatttcatccttgtartaactctgatagtactactacagactcctttttaaaattcatattattgaggctaaagtataaaccttcaaaatgatttttcacattctattaacatcacaaatatcctgtgccatagacagggaaggtatgagacaagatcaagttgtctaatgtacgtgcagttggagtcttagatgatgaggagaaagagaataaagtagaaaaaaattagaagaaataatggccaaacatgttccacattttgtgaaaaacatccacccacagattcaagaagctcaacaaatcactagcaggataaatacagagaaaaccacatgtgggcacac

SEQ ID NO: 516167 - DNA, 540 bp, Homo sapiens
gccaataaaaatcttctagcaattttctggttatggctttttttaagttctttatttttagtctttgcattacctccttgtaaactaatgaccattgcccctatctgaaatataggaatatgaaggtagaggggatcgagggagataatctattctatgtcttatgctcttcatttacttaaaattagttaattagtgtttcattctgaactttctcttttcagaaatgctcaaaaggaaactaaggctattgcattggaatattcatgtctaccctttttatytctcatcatgctgtaatcagaactattttgtctatgtttaatatctgaaagatactctcagcatatatttatcacatatttatttattctcaacatacggttgtacagaaaattctcttgttttaccattgttgttttagcattattgaatcatatttagatatcttaattccttttccaatactttgttatgttaatttatttttcaaatacttttatgattatgtagtacatattatctgaagaaatcaaacat

SEQ ID NO: 516168 - DNA, 215 bp, Homo sapiens
gtttggtttcagcaacaagattaatatckctcctagttttttttttcattatgcagtaacccaattaaacaaagtaacagtatgctttcacagggaaattaccacatatttaagttttaagctaaggtaaattctgtccattaacattttttaagtctctcaacttctttacgatccatcagtttttgtgtcctggtaggttttcttgtatccag

SEQ ID NO: 516169 - DNA, 519 bp, Homo sapiens
aaagagctataattggccttattttaataaacctattctatcattttttaagaaattttattttgggtataattctcattctgctaacactactttctaaaattcatattgaagacaatgcaagttcacctgaagatgtctttcttgcagttgttaaaatatgaactaaattatgaatgactacagcagtgaatgaaagtacctttaacatgctactaaagcatgasaaaaagaagagcttctctgtagccttcataattctaacaaagacactaaaataatgaaagttttctttaaatcttttggtgtgtcttaatgatgccaatttataattcaaacaccttcactatcttgcaagcaatttagtatctttttaaatgtaactggtcatgtttactctttcagatttgggatcatctccttttctcctgtgttgatcgctcagtcttcaccattacactgactcaaaacatccaactctcatgggcgcaacccttagttccttccagtgaggcaaag

SEQ ID NO: 516170 - DNA, 610 bp, Homo sapiens
aattatggacagggtactggagttgataatatttgttcatgttggtaaatttggaattcataggaaaattaaaagaaatgcatatagcaaagaaggctatagcatagaaatttgctatttrcttataataacagaatacatcattatatctaaggaaagaattgtttatttcatttaatgttatttgtttaatgagcttttatatagtatgtagtttccttaacacataactgcaaatacatatagacatttactctctcactcaaatggtgccgctaagcttgaactattgatctatggtgttttaacaacagcttttgagtttactgataaaattatagtaagcatttagatttagtgtctacattgtgagaataataaaacatgaagatacctgtgaaattctttttataaatgtctttctcttaataagactagatagagaaaacatttctgtacagtgtctaaatgcctaaccacttagttccccaaagtctgtttttaggaatttgacatgctttgaacaacattatcttttagttcagcatttacttgaatgccttgatttttactttatatacgagttgaattccatgatttgactaatttt

SEQ ID NO: 516171 - DNA, 610 bp, Homo sapiens
aattatggacagggtactggagttgataatatttgttcatgttggtaaatttggaattcataggaaaattaaaagaaatgcatatagcaaagaaggctatagcatagaaatttgctatttgcttataataacagaatacatcattatatctaaggaaagaattgtttatttcatttaatgttatttgtttaatgagcttttatatagtatgtagtttccttaacacataactgcaaatacatatagacatttactctctcactcaaatggtgccgctaagcttgaactattgatctatggtgttttaacaacagcttttgagtttactgataaaattatagtaagcatttagatttagtgtctacattgtgagaataataaaacatgaagatacctgtgaaattctttttataaatgtctttctcttaataagactagatagagaaaacatttctgtacagtgtctaaatgcctaaccacttagttccccaaagtctgtttttaggaatttgacatrctttgaacaacattatcttttagttcagcatttacttgaatgccttgatttttactttatatacgagttgaattccatgatttgactaatttt

SEQ ID NO: 516172 - DNA, 611 bp, Homo sapiens
gctgtgtttcattgttataacattgataaatgtgaagaaagcagataagagttttgagagctggcaaaatagttttgcatgttgggccatctgaaaactaatatggcaaagttcatttctaatatttaatttggttgctatattaattgcataataaattatataatttaaaatgaggaatattttacatrtgagtattaagatgaaagaattattaatttttatatatagtaaatgacttagagatttctaatccagactttcaattcatagccaaggaaatagaagattagaaagagtaaaaataattgacatgtttaaataaagttgaaaatctgaaatttgagtctattcctcctgatgctaactttgtgtgctcttcttcgccaggtaagataactagtaaaagagtgcacgtcttaaaagaaaaagaaaatatgatagtaacacttacctctttaaattattaatattaccaagattaccaacaaaatcaggtagggtagtaaaaaaatgccaacacttcccggacaggctttctctattcctatctctaacaaaggagggcatgaaggagtatagttaggagtcttgttagtcaagggacgtta

SEQ ID NO: 516173 - DNA, 611 bp, Homo sapiens
gctgtgtttcattgttataacattgataaatgtgaagaaagcagataagagttttgagagctggcaaaatagttttgcatgttgggccatctgaaaactaatatggcaaagttcatttctaatatttaatttggttgctatattaattgcataataaattatataatttaaaatgaggaatattttacatatgagtattaagatgaaagaattattaatttttatatatagtaaatgacttagagatttctaatccagactttcaattcatagccaaggaaatagaagattagaaagagtaaaaataattgacatgtttaaataaagttgaaaatctgaaatttgagtctattcctcctgatgctaactttgtgtgctcttcttsgccaggtaagataactagtaaaagagtgcacgtcttaaaagaaaaagaaaatatgatagtaacacttacctctttaaattattaatattaccaagattaccaacaaaatcaggtagggtagtaaaaaaatgccaacacttcccggacaggctttctctattcctatctctaacaaaggagggcatgaaggagtatagttaggagtcttgttagtcaagggacgtta

SEQ ID NO: 516174 - DNA, 510 bp, Homo sapiens
actccaatagaatatatatgatttgttatggagaattgacttacacaattgtggagactaagaagttccayagtctgccatcagcaagctagagaaccaggaaagcaagtggcatacttcagtctgaatccaaaagcatgagaaccaggggaggcaatgccgtctcagtctgagggcaggagaagaccaacttcccagctcaaacaggcagataggagtgatgaattccctgttcctctgccttttgttctattcagacacttcacagattggataatgctcttccacagtggggacggtggtctaccttatggagtgcaccaatttaaataccaatctcatctggaaatactctcaaagaaataatgtttatctatatatctgggtaccccatgaaccagtcaagtggatacatagagttaaccatcatacacgtatctaccgtttctgacaactttcatttctttatatggatccatatttccatctaatataattttccttatgctg

SEQ ID NO: 516175 - DNA, 510 bp, Homo sapiens
actccaatagaatatatatgatttgttatggagaattgacttacacaattgtggagactaagaagttccatagtctgccatcagcaagctagagaaccrggaaagcaagtggcatacttcagtctgaatccaaaagcatgagaaccaggggaggcaatgccgtctcagtctgagggcaggagaagaccaacttcccagctcaaacaggcagataggagtgatgaattccctgttcctctgccttttgttctattcagacacttcacagattggataatgctcttccacagtggggacggtggtctaccttatggagtgcaccaatttaaataccaatctcatctggaaatactctcaaagaaataatgtttatctatatatctgggtaccccatgaaccagtcaagtggatacatagagttaaccatcatacacgtatctaccgtttctgacaactttcatttctttatatggatccatatttccatctaatataattttccttatgctg

SEQ ID NO: 516176 - DNA, 510 bp, Homo sapiens
actccaatagaatatatatgatttgttatggagaattgacttacacaattgtggagactaagaagttccatagtctgccatcagcaagctagagaaccaggaaagcaagtggcatacttcagtctgaatccaaaagcatgagaaccaggggaggcaatgccgtctcagtctgagggcaggagaagaccaacttcccagctcaaacaggcagataggagtgatgaattccctgttcctctgccttttgttctattcagacacttcacrgattggataatgctcttccacagtggggacggtggtctaccttatggagtgcaccaatttaaataccaatctcatctggaaatactctcaaagaaataatgtttatctatatatctgggtaccccatgaaccagtcaagtggatacatagagttaaccatcatacacgtatctaccgtttctgacaactttcatttctttatatggatccatatttccatctaatataattttccttatgctg

SEQ ID NO: 516177 - DNA, 613 bp, Homo sapiens
tgaaaaagatgtacaaactaataaaaattacgtgcttttttyccatttagaagctgagaattctgagtcttaaagatattccataaacttcttcaaaatcacacgctaggaaatgtcaggagcaggaactaaaatgaagttactttaattttcagcaaagaccttttctctcacattttattgattttctgaaaggctgctgggattggtagctcattagtctttatttaaaatggcctcagtgtgctatgattttagaggacttgcacgttttcccataatattcccgtttctctcatgggtggcaagttgtcgtttacttttcatatttttgtcactgtgtctctttatagtagttcctcatcatccctccttttaagtttctgctaccaatttgctgttagcttgaaatccaatcattaaatgtttaaaataagaatttgctggctatgagagatcattcaaaagtaaagtatatgagcttgcattttataaaagttatttgtttgttctctgtctttttttctgactgtaaaattagcatatgttcattatttttaaaattataaaatgtacatgagtttaaatatgcagaatacatgaaccttaatct

SEQ ID NO: 516178 - DNA, 586 bp, Homo sapiens
tgtctgatattaaaatataatccgtaactgtaacatagtgtaaagttaatgtgtccattttgttagtgaatctgttgggggaaaaaagagaactattataaaacataaccattttcaggatataaaataaaaaccctaaaaatgttggaaaacatgcacattcctcaaactacatattcgaatctaattacaacaaaagcacataagttgagctaggaaggcccccaaatactttattagaaagtamgtggcaggatagcattcctttctttatatttcaggctacagagtggacttgaatgcaagacctttcatttgtagtaagctgtgttgtcacagcaggcatggaacacttcaccagctttcatgctgatcttctctctgtagacccaatgctgttccaccttcactatattttacccaacatctctctgtctttttttttttttttttaacatcattcccaatgtttttatctctactggggaaattccacgtctacttcccatacttcctttttcagaaaaaccagcttgactttgtcaagtaatacagtcactggttcccttgaagacttattacctct

SEQ ID NO: 516179 - DNA, 596 bp, Homo sapiens
aaatgctatcaaacagcatcacatactacagataaatctttcacgaaatgaagagtcaatttatgcagcaaagtttattgttatcttatttgccacagtcactccaatctgattagtgatcagctagccatccatgtcagggcaagaccatccctccaccagccaaaacattatgacttgttgaaggttccgattattctttgcatttrctagcaacaaagtattttaaaattactatatatacatatatatatatatttagaggtaatgctattgcacacttacttacagtatcttgtaaacataacttttatatgtacagggaaataaaaaaattgtgtgattcaccttattgtgctgtttgttttgtttatggtggcctggaaccaaacccacaatatctctgagatgctggtatatgtagtaggcttgtgcttttttctgactattcagattgggtattaaatgttcataaaaatagatgtttaaggattcaaagataaaaatatttgtcatctgatatggtttggctgtgtccccacccaaatttcattttgaattgtagctcgcataattccttgttgtgggatggaccc

SEQ ID NO: 516180 - DNA, 415 bp, Homo sapiens
tgtacctacctggggctggccacagtgtcttccctgaggtgggatgaagacttcatctctgaaagttattgaaaccctgcttgccatgcctttcccaggctgggaatgctgcacgtgaattgcttggacaatgatactctttcctacacccactgtataaccatagctctatcatcttaatcatcaggggctttatgctatgagaatcttaagctggttttagctggcttcttctgacacttctactgaaggagggagtcatgccatctccttccttctagatgggaacagaartacaggcttccacttggtttctgctgatacacccttggctgggaagagtaggaatacttcacattactgccctcacttggcgtctactgacacaaagcggacagggaagagaggagaaagg

SEQ ID NO: 516181 - DNA, 428 bp, Homo sapiens
tattttacctgcctttcttttataacacattcttgccttttagacattccatgggaatttgggttgggccattctcttgagccatgtaatgaacattttgtgttggttgattattcaattacaataaagaagtgacaatccattataaagagttatgaatctacacattggaggggaatcctgtgattttrttttgcctatcagcctttccaactgcacttttattataatgaaacaaaatacaacttaatggttaggggaccacataaactgaagcaaacggtaaggatggctgatgccagagggtgaattttgccaagattcactcaacactcttttctctccctgggtgtcttggcctaatatctacttacctcagtaatagaaagcaagtttttaacaccattacctcctgctgaaccaatgca

SEQ ID NO: 516182 - DNA, 578 bp, Homo sapiens
gaacgtgttcacagctcccctgactgcatttgtcttttagtttgcgtatgatgtttacctggctgtggctggccagacatatattcctggccttgtcagtatctaaaattcgataaatgtttattacagaattggaacaaagaagagtaaaagggctttgaataagggctgaaggggtctcatctttgagtaacatctgtgactgataccaaggcatgccccagcaaacaactgaaagcagcttcctgtggggtgacgtgcytatctgatctgcccgctctgggtgggccctcagactttaacagctaaggtagatccgtatactctcgggtgtaataatacctggaagggttttaggttggaactttataaagatgacaaatttaaaactaaggaataatctgtatatgcagattactttagagttaacccacacatgaaatcaaccacaagaaagtcttcaagtgtattacaagtgcccctatctactaaggaatttgttctgttgaaaaaataaaatattctttggtgatttgggggtctaaatttctaagttgccaatggttctacatattttt

SEQ ID NO: 516183 - DNA, 578 bp, Homo sapiens
gaacgtgttcacagctcccctgactgcatttgtcttttagtttgcgtatgatgtttacctggctgtggctggccagacatatattcctggccttgtcagtatctaaaattcgataaatgtttattacagaattggaacaaagaagagtaaaagggctttgaataagggctgaaggggtctcatctttgagtaacatctgtgactgataccaaggcatgccccagcaaacaactgaaagcagcttcctgtggggtgacgtgcttatctgatctgcccgctctgggtgggccctcagactttaacagctaaggtagatccgtatactctcgggtgtaataatacctggaagggttttaggttggaactttataaagatgacaaatttaaaactaaggaataatctgtatatgcagattactttagagttaacccacacatgaaatcaaccacaagaaagtcttcaagtgtattacaagtgcccctatctactaaggaatttgttctsttgaaaaaataaaatattctttggtgatttgggggtctaaatttctaagttgccaatggttctacatattttt

SEQ ID NO: 516184 - DNA, 620 bp, Homo sapiens
tcatgccagatgaaggaaaccttttgtgaactggataggtaccccacacctggatgggaagttacctttggccaaaaccaaaagctgcctccaaggattgcacatactcctggaatagaagttagactgaactaatcagtagtcttcctggtttcaacaaacaacaaaaaattgtatagaaacaaagtgaccttcctgaaaatgctcatggtcttagcttctcacaatccattcagactgatgacataaaactacaycctccagctcttctgctcaggatctaagtggaggattccctagcaattcatggttatcattaagagataactgatgaatcttttcccattcattttaggaaaatcaactgagctaaatctgtcctatttcaagcatgaataatcaggacaagaacttaaatcctttaaaatgacacagaatagagagaaagagatattttaatagagcattaagaaaaagaaaaagattacaagaaatttggctgggtgcggtggctcacacttgtaatcccagcactttgggaggccaaggcaggtggatcacctgaggtcaggagttcgagggccgacatgacaaaaccccgcctctactaaaaatacaaa

SEQ ID NO: 516185 - DNA, 620 bp, Homo sapiens
tcatgccagatgaaggaaaccttttgtgaactggataggtaccccacacctggatgggaagttacctttggccaaaaccaaaagctgcctccaaggattgcacatactcctggaatagaagttagactgaactaatcagtagtcttcctggtttcaacaaacaacaaaaaattgtatagaaacaaagtgaccttcctgaaaatgctcatggtcttagcttctcacaatccattcagactgatgacataaaactacatcctccagctcttctgctcaggatctaagtggaggattccctagcaattcatggttatcattaagagataactgatgaatcttttcccattcattttaggaaaatcaactgagctaaatctgtcctatttcaagcatgaataatcaggacaagaacttaaatcctttaaaatgacacagaatagagagaaagagatattttaatagagcattaagaaaaagaaaaagattacaagaaatttggctgggtgcggtggctcacacttgtaatcccagcactttgggaggccaaggcaggtggatcacctgaggtcaggagttcgagggccgacatgacaaaacccygcctctactaaaaatacaaa

SEQ ID NO: 516186 - DNA, 518 bp, Homo sapiens
gcataataatgaagtggagttagacaaatcacttctctccttatctgaagaattgatacaatgatggtttccctgtaggataattgttggaattaacacatcacagataaacttctcggcacatagtaggtgcttcacacaasttagttccctcccgcaacaatcatttctttaatgggatttttttttttaatttcacactaggatactcccatacaaagacttcatggatttaaaagtttatacagatattgtctatttcatacatcgcacaaatgcaggaaatactgtagtataaaatgttgcatatattagtgtcatagcaatagcaaaacaatcctgtggtttcttgccaagacaaatatgattatacattactgtgttccctgtgataaattcctttgaggtttcagaatgctgtgcgtgagtaactctggcaatctatttaagattcagttgattttctataatgcaaatctttgttttacagagctgctgaactgtaatataaatgttat

SEQ ID NO: 516187 - DNA, 430 bp, Homo sapiens
tgcatgtattaatagcatctttgttagagcatgggctctgtaactgaactgcttgagtttgaatcccagcttcatcaccttttagccttaagtccatygataagttacttaacctttctgtgtctcagttacctctgttgttgagtaccaatgtcatggaattgtttggattacctgattgagtgcatgtaaagcaccgagcacagttcttgacacatagtaagcattcatgaaattttaacttttattatgattagctgttactgagagtgagccaagaaccataccaggcgctgaggttacaaagagaaaaggatattcctatcccatataagctagcatgggagaaaaagataaatatttttatttaaaaataactctttttataataattatgaacagaatactgggtagcaaagtgagaaagagt

SEQ ID NO: 516188 - DNA, 641 bp, Homo sapiens
tgacttagtaatctatctgaaagaggactaccatttttcttcactaaattctgtgtgccataatgaaattaaaagcaatcttcaatcttccccagtgttccaaaggggatctatttcaatgtatgaatgaaacagcgtagttaagagtaacaagtacttagaatcatttaaagtcatttacaaaatagccttaaacattaactcttactatcactgtcatttgcaaataaaacactttgtaaaaaatttccaaaggtgaattaaaggtgtattttatatctaagttccttaaatgattgaaaaaatgaatttatatacacaagcttcactgacatcactaatatttctgattgataaaatatattgctawatcaattatttcgacctttctcatattacagatgaagaaattgaggcccagagaatctaaacgacttgatccaattcacacagctaattacaaaatcaggacccaaactcaagtgttcagtcctctatttacagagctactacttaggctgataaagtaacaccagtgggaaaataagtttatctaggagattcctttataattttctggaagaaatctggctgattgggagaactgccactgtaattctttaaaatgccatgttgctagc

SEQ ID NO: 516189 - DNA, 641 bp, Homo sapiens
aagtatcaaaattaaatctgttcctttgactcactcttttgagcctcatgaggtcactataaatgttaattgataaaatatttagccatcatctgtattttaggaggtcatagaggactctaagtgtggatagatgctagattatttatttttttatgatttaaacaagaaaaagcctgacctataaatgctcacagttagttaacttatgcaatggtttaatttcagtagctatctaggctgtgcacttgagtaggtaacagtttatacacaatgaataaaggaggctttaaatgaaccctggtaatgagcaccagcaaaacacaggcctattctagagtttaatgatgtcttctgacatattttatcttaggatatattcttaccatagctaagactcttctcaatatttaatgaatattcaaacagtggaagacaaatgtaaatagaaatgtttaaaatctttcaaaataaaaatatctaagcacaggattacttatggcaaacagcatcaagaaagggtgctgataaaaatattaaaatacattataatgctttataaaatataatacattattactttagtgttgctaaaaatagtytcttttggctggtagaaagtaataaagaggacatttact

SEQ ID NO: 516190 - DNA, 648 bp, Homo sapiens
aactagctgaagtcctaactaaaagcaaacatcaattgccagacatgtgaatgaagacacttccagataattccagtctctcaccactgagtgaaccccaggctttgggtcttcccaaccaaggctttagatattgtcgaatagagggaacagacaagatgcccctgctgtgtcccatttgaatttctaacctatcaaacatgtgagtaaaataacatggctgttttatgacactaagtttgttatgatgatggtaaatggaacagatttaccagttgctcagaacaacttgtactcatctttagcttctccctgtttctcatacccaccttaaatctgttagcaaaccctatgaagtccagctctttctttgaaatacatccaggatcctacgacttcataccatyatatcttttgtctggactattgcagtagcctcttagccttcatgttttcaccttccctcccttattgtctactctcaacacaatagaaagagtacttctctaaaagtataaatcagttatgtcacttcaatgctcaaaactgtccaatggcttcctttatgatatagattaaaagcttaagtccttaatggcctagaaggcccttcatcctctgagcctccaccacctcactgaccttatt

SEQ ID NO: 516191 - DNA, 648 bp, Homo sapiens
aactagctgaagtcctaactaaaagcaaacatcaattgccagacatgtgaatgaagacacttccagataattccagtctctcaccactgagtgaaccccaggctttgggtcttcccaaccaaggctttagatattgtcgaatagagggaacagacaagatgcccctgctgtgtcccatttgaatttctaacctatcaaacatgtgagtaaaataacatggctgttttatgacactaagtttgttatgatgatggtaaatggaacagatttaccagttgctcagaacaacttgtactcatctttagcttctccctgtttctcatacccaccttaaatctgttagcaaaccctatgaagtccagctctttctttgaaatacatccaggatcctacgacttcataccatcatatcttttgtctggactattgcagtagcctcttagccttcatgttttyaccttccctcccttattgtctactctcaacacaatagaaagagtacttctctaaaagtataaatcagttatgtcacttcaatgctcaaaactgtccaatggcttcctttatgatatagattaaaagcttaagtccttaatggcctagaaggcccttcatcctctgagcctccaccacctcactgaccttatt

SEQ ID NO: 516192 - DNA, 594 bp, Homo sapiens
tgcatggcttcccctccccactttcaggagtctactccagtgctgccttcctaatgaggttttttccgtcagagtgctgacaaaacacagatgacaaactcaaagtagaaaaatttaagaaagatttaacaaaggtatgggcagggagcagagggagtctaggaaggatatgcatatcccaggcctgataaagcagagctgttaccactgctggacaagggctgggagcacttatagaacccggtatatgagatatgggtagacaggcctcccttgagaaaagcagtgacctttgaacttcaactggggatcctcattatgtgtaccaaatcrgaagccagagggcaaaggagcccactactacaatccacataacctcctgggacaaagagttcaagagaaatgtggagagcgtatctggtgatccaaataaaagacatcacatacaggcctccctcgcccaccgtatttaaaattacaaccagagtcaactgcatcatttgaggggtacagtgcaaaatgaaaatgcagaatagcttgttaaaaaattattaagctctagatggtgatggtgagtattaaaccaaatacgaa

SEQ ID NO: 516193 - DNA, 578 bp, Homo sapiens
ttttttcatatgtcttttatgttagtcaaatttttcttaggaatcagatagaatagtttaataatatacaatctgaagacagcctgcagggcaggtgttttataatgctgattaaggggagaactatacaggatcacacaattggtaggacttttattctatttatgcaaattatagagccagactggtatgctaggctagacaaaaggccagccccccataggtttcacctgatcaagaccagatattccccaagaaagaattttgagtttgctccagtacttggattrctgatgaattcaaacatcaagttagaacaaatcagacatagttttgtgtttgaaaatccttagagaaagtattacctatggcacacaaatagctatcccaaaagccttaatgatgaccctttgcaggtctccagatatgcctgccaggataagtgagctgctagatgttccccagacaattgaacacattgacctgttacatggtgctatttaatatcgatcagatgaatgtcagagaatgtctgacagagacagtggtttttgtttcatcaaggttaatgatgagtc

SEQ ID NO: 516194 - DNA, 533 bp, Homo sapiens
ttgtcttgatcttaaactgtctaaccaatgatcatagaatttttggttttgtcttttaaaaatatttctgtgtcctagattatgagacactataattaccaacttttctatttatatatacacatttatatatctaatgattttacttgctgtgtttaaaaatcctggttatgattatattaaacaatacaaagtcactgggacactcactctattgttttcaagtctagtattccagggtctttggattctctggccctccattactacggcagcagggttgttctgacatcatgaagatcctctgatacacatctcctactgcttcagggacaaactggtagaggcaggcaggccactttcagccaatcaaagaagaaacccccaaactctgaagggatgtkgggaagagaagagaaaacagcttgcctcaaagaagaggttgggttgacaatgtatcttgatggtcagcgggaaatagaaggaaacctgaatttgtagtaagcaaacatcacagattattgactattaca

SEQ ID NO: 516195 - DNA, 629 bp, Homo sapiens
gcattgatgaataagcccagaatgatatttataataaattgccatcccttatatttgtttatgaatatatgaacctttatcacatttctcaccaggctaatgcttggcattaaggccttcatagatttgatttttaggattttctgtgatatcttctttatgagtcactaaggtcattctagaattggtgaattttaaacaattaagccttgtgcttctccacggtatgaggacaatttttacagtgttatgaagatagggaaaattgctaaaaagcaataatatttatttttttccttaagaaaaatgactgtcaaaccaataaaaaaaactaataaatttcactggtttcattacycgagtacatgtcaagcaaatcaaaaatatccaagtacatagggtctggtatcagaagccagagcctggggaatctttcagtcaccccagccttcatctgtcccccatatcctcaacatggcctctcctgtcaccccagggtaggtacacagggttctacgttgctgacctgatagaaatggaagtggtttcagctttacgcatctcagcacattttcagggaaacaaactttttatgatgtcaagtcatggcacccataattgaagtttca

SEQ ID NO: 516196 - DNA, 629 bp, Homo sapiens
gcattgatgaataagcccagaatgatatttataataaattgccatcccttatatttgtttatgaatatatgaacctttatcacatttctcaccaggctaatgcttggcattaaggccttcatagatttgatttttaggattttctgtgatatcttctttatgagtcactaaggtcattctagaattggtgaattttaaacaattaagccttgtgcttctccacggtatgaggacaatttttacagtgttatgaagatagggaaaattgctaaaaagcaataatatttatttttttccttaagaaaaatgactgtcaaaccaataaaaaaaactaataaatttcactggtttcattacccgagtacatgtcaarcaaatcaaaaatatccaagtacatagggtctggtatcagaagccagagcctggggaatctttcagtcaccccagccttcatctgtcccccatatcctcaacatggcctctcctgtcaccccagggtaggtacacagggttctacgttgctgacctgatagaaatggaagtggtttcagctttacgcatctcagcacattttcagggaaacaaactttttatgatgtcaagtcatggcacccataattgaagtttca

SEQ ID NO: 516197 - DNA, 675 bp, Homo sapiens
cttcacaaattcaggtattgtttattataattaatcactttcaaactgaattaggctgtggtctgtttatccccaagcttcaaactctgccactgaggatatttgaggctcattaatcccatwtatgcctagtgttccattatcggaactctaagcatgtgggagttatttatatcctactgcttaaggtctgatggcaaagattcaaaaaattgcaacctcaggaataaatgggttaaggttcttaccataaccagagtactgacaagcagcttaaatgttcattctcatgtcaacaattcagctcttttcttaggctgtttaataactgacataccagaaaggggtcttatgcccccagtatattaagatgtttggaatgggtaacataatagctcctttagcaacacatgctatctgattataactatttcttcagtgacttatagctgaatttttctcactgaagaatttgaaatgttaagagtctttttactcaatgggccagaaatggtatcagcagccatatgtgaattctcttatagtcctttttagctgaatattgataaatgaattaaatgcagccattgtactgtttcaccaagttaaatgaaatcaagcaagtgagaagaaagaaattaagaggactaaacaagggataagcaaaacatttcc

SEQ ID NO: 516198 - DNA, 645 bp, Homo sapiens
tgcaaagggattaccttcggttcttcttttcaaagagaagccaaatgccccctgtgcacagccctggacagttgcttggatcttgtgccatatgttttatacagtactcctggagctaagtcaattaatagctcagaagacacaattagccttttagtgactgcattcattcataaagggctgcccaaaataaakaaactcttgattcccttctcctattataattgcagactgaagatttgaaatgttggatgacagcagatgtactgagattgttagcgcatggtggctgctctgctttatactgcctactaccaccaagccaaattcctaggtgtgggctagggtattggaacaaagtaaaaatgaaattatccttaacagaatgcatttaagttgaattttacagtccttaccatgtcctgagatagcttttatctttatttgaatatgtattttaagcagacactgagtattgaaatgtaattattgaaatgtaattactaaatgtaattattaaagtgaaaaactaatattttcccatgtactttccttccatggcaatctttttttaaggtaaaattttaaaactttgagaatattttagcaaactcatttgtaactttttcttaaaaaccttcaggc

SEQ ID NO: 516199 - DNA, 635 bp, Homo sapiens
attactattatggcatctcagagcctcttcaaacttaatgatgtacatgatagatttaaattattgcttcagtgctctctgatcctaatcctgtatttccagaattttctgggaaaatttgttgatacgtgtgttgcacaataaactgaaatcttctctttctcctactacactgtaaatcactgaaaggcaggacaatttcttattcagcaaaacctcaattcctggcaaatagtagatggtaaataaaagttgaactgcatacctgttttccccatcattttccatgctttcaatttatctgtctccttcttcctttgttatcattttatcacctaccttactttacatccagtcttggaactgcagtgatacctacaggcactaccaaccctagtggtaacatttcaggactaaagtgtggctgaccactcctgggcagtggtctgtgcccagagcagtcttcctgctatgggatcacagcaggcctttctctctctattctcatgaacactggttttcatattcctgtttagcaggagtagtgtttaaayacattaattaataaagattaatcaataattaaccattctaaagccacctagaggccatttcatggtgcagtgatgtattta

SEQ ID NO: 516200 - DNA, 544 bp, Homo sapiens
tttggatattaactataggattttaaaatattctctgtgattttctctgtttwtctctaagtttctttctgtctttcctgtattggtctctaactttcatgttaaatccttgcctccaagtctggtgattctggggtatccatttacatttgagttagatgctaaaagtctgattgcatgtggatagagctgatacactattagccctcacagaaaagttattgggtggggacattttgggtatgttcacaatggatatctcatctcaaaatgtctcatctcttgccttagtttcctcagaggaactctcatttccctttaacatgattcttgaaaataaacactgacgtctataaatattttattgctgttgttgtttaaatgttattaccatacttgaaactagcaggcctttaaaagttgagttttgaaatctggatggaaaacatcccaagtggaaaactggggaaggaaatttataacttgtcaaaaccttcatgacagaaacttttaacaaaaaagtactgtttataaggcggtaaca

SEQ ID NO: 516201 - DNA, 683 bp, Homo sapiens
ttactcactcatatcagctatcacagacaaagaagacagtaaaatcccaacacgctatgacatattacattgaataatcaaatatattcatcagcttcgtacatactgtgaaatggcggccagtgatatcttttattatcgataaaaattttaatattaaataagagtgaatttctctgcatttgtattatctttgtataattaaaatttactttctttttccattctggcctcatttttgtagccttttagggtgttcagatgttctactgactaactgggacgcctaagagccactcagcctgcctttgtagccttgtcctttcaattgctgacatttcttcctggaaaatgacttaagttcttaatgccaaagsgcacagacaaaacaaaattcacttacagaatctatcaaagcttttcagataaatcgtctgctaaatcaggagcattttacaaagtatcctggcctccacctgttcatgttataatctaaatgtgaaagcaggacacttttgttatgaagaaccatttcagctcagggagggcctgaaaatagcttcagtacttcctgtacactttcccttattcccattgtgaaaacatctgctggtctattaccacagagtgtgtacttcccactgtcgggctctcatggtgctccttggctgcagtgcccacag

SEQ ID NO: 516202 - DNA, 683 bp, Homo sapiens
ttactcactcatatcagctatcacagacaaagaagacagtaaaatcccaacacgctatgacatattacattgaataatcaaatatattcatcagcttcgtacatactgtgaaatggcggccagtgatatcttttattatcgataaaaattttaatattaaataagagtgaatttctctgcatttgtattatctttgtataattaaaatttactttctttttccattctggcctcatttttgtagccttttagggtgttcagatgttctactgactaactgggacgcctaagagccactcagcctgcctttgtagccttgtcctttcaattgctgacatttcttcctggaaaatgacttaagttcttaatgccaaagcscacagacaaaacaaaattcacttacagaatctatcaaagcttttcagataaatcgtctgctaaatcaggagcattttacaaagtatcctggcctccacctgttcatgttataatctaaatgtgaaagcaggacacttttgttatgaagaaccatttcagctcagggagggcctgaaaatagcttcagtacttcctgtacactttcccttattcccattgtgaaaacatctgctggtctattaccacagagtgtgtacttcccactgtcgggctctcatggtgctccttggctgcagtgcccacag

SEQ ID NO: 516203 - DNA, 567 bp, Homo sapiens
tgtcacagataactttccctgagctgtctgagtcaaactacccattacatggtctcagaacgccaataaccgctcattcacagcctttatcaatatcacaaatttggatatatttgtatgattaagatgartatctgtccccccactctatggtggcagggctcaccatctaatgccagcacactacctgaagcacaacaggagctcacaacatgtgtttaatgacacccaaccgatggaagaaaccagcagttattctaccttcacatccccaatacatcctgctgtctcttattcagccatctcaccgttcttcacagagctgttagataccatccttatatacctgttacccttctcttcctattgaagaccaatcccttcattatgctggggaggtgccgccctccttgttcttggagaaggcatatttactgtctcttctctgtcctgtattttttttcatctgccctgtatctttagacaattcctctctactttcctctttgatccacaatctttgtgaaattctacccaccttaaaataaaattctttccgctaaagct

SEQ ID NO: 516204 - DNA, 534 bp, Homo sapiens
tagacaattcctctctactttcctctttgatccacaatctttgtgaaattctacccaccttaaaataaaattctttccgctaaagctatttagtcactctgcttttcttttcttgttttttttttttttagatggagtcttgctctgtcacccaggctggggtgcaatggtgagatcttggctcactgcaacctccgcctccccggttcaagcaaatctcctgggtcagcctcccaagtagctgggattacaggcgcaygccaccacgcctggctaatttttgtatttttagtagagacagggtttcaccatgttggccaggctggtcttgaactcctgacctcaagtgatccacccacctcggcctcccaaactgctaggatcacaggcgtgagccaccacacccggccgtcgctgtgcatttttaaactttccctttagtcaacctttgtaaaagaagtctgttcctactgctccaattcttaccacacagtcagctctccaagacctaataatacaagtggagctcaacct

SEQ ID NO: 516205 - DNA, 594 bp, Homo sapiens
cctttcccttcagggccccatctactttgtaaagatggcttcactagtgtgattacttttttttttttttttttgagacagtgtctctgtcacccaggctggaatgcagtgacacaatctcagctcactgcaacctccgcctcccaggttcaagcgattctcctgccttagcctcccgagtagctgagattacaggcatgtgctaccacgaccagctaacttttttgtatttttagtagagacaggatttcaccatgttggccaggctaatctcgaactcctgacctcaaatgatctgccygccttggcttcccaaagtgctgggattataggcgtgagccaccatgcctagcccactagtgtgattacttgattaacatctgtctctccattagactaaaagtcctgggagaacatggacagtgaatatttttgctcactcatgtacctaagcacttaatcatcttggtgctcagtaaatatttgtagggccagagcatttctatgaacatgacatttctacagggaaaaacagggtccgtgaaggcaaagagtgggagcccttagaaactgaacagctttctctaataacag

SEQ ID NO: 516206 - DNA, 594 bp, Homo sapiens
cctttcccttcagggccccatctactttgtaaagatggcttcactagtgtgattacttttttttttttttttttgagacagtgtctctgtcacccaggctggaatgcagtgacacaatctcagctcactgcaacctccgcctcccaggttcaagcgattctcctgccttagcctcccgagtagctgagattacaggcatgtgctaccacgaccagctaacttttttgtatttttagtagagacaggatttcaccatgttggccaggctaatctcgaactcctgacctcaaatgatctgcccgccttggcttcccaaagtgctgggattayaggcgtgagccaccatgcctagcccactagtgtgattacttgattaacatctgtctctccattagactaaaagtcctgggagaacatggacagtgaatatttttgctcactcatgtacctaagcacttaatcatcttggtgctcagtaaatatttgtagggccagagcatttctatgaacatgacatttctacagggaaaaacagggtccgtgaaggcaaagagtgggagcccttagaaactgaacagctttctctaataacag

SEQ ID NO: 516207 - DNA, 528 bp, Homo sapiens
ttatcagtgtgtgagaagcacaaaattaaattgagacgcgaagsggggaaacatcttatttaaatttaaaaagccttcaaaagcagcaagtggctccgggtgtgatacttcaagattagcaagatcgtgtttgaatgcactccctgcccatataaacaagcctgaagtctgttccacgctcccaatacacggctcaggcatgggcttttcttttggaaagagagaaaattcttggctttcaagaggtctcttaatcatcgctgtatccccaaaattttaaatcacaacataaatatctgttctaactctccgccatctagttaaggaggccaatcatattttagacacgagcattttttccaaagatataaaacctaaattatgagaatattcccttccgagcactaatttagaataaattgctattgtctaacttttattctgttgttttcagtttcaatctgcaaaactgtttcctcatttttattcaaaagttatcatctaagtaataaaaaaagtgaaaaagaa

SEQ ID NO: 516208 - DNA, 586 bp, Homo sapiens
tgaagttactatgttcattgtattcactgaattataactagtaaaaaaatcacaaatacaaataattatgttgaagttgttcctatgattccctaaattgataccaacccttatgcagtttgacacttttagctaagtaaggcctatatatgactcaataacatgagaaaatataacaataactcatatgtgcaaataactgaataacaaatgcaattattttggataattcttctaaaaataataaaaatgtagtaaataacttcaggtcattgaaaagacagaatagctaaagattttcctaaactaatgtttcctttgtgccttgatgtcactctatatgggtatcatatgtaatgttcagcaagtgtcaaagagaaatacagttgtgggccttggtcttcttcaatgcaagctagagataaggagaaaaaatgcattcaatgtcagtgcttcgatgtaagttagaagctagaaaacatgaaaatgctgctgggaaatgtaatatatggaaattggtttgcataatcctactttctgacaaagaatgatggtttcyctacatttatctatttgatatcataaa

SEQ ID NO: 516209 - DNA, 551 bp, Homo sapiens
gccattaacctaatgaacaaatgtaggagcagaaaaccaaataccgtaagttctctacgttctcacttataagtagaagctaaacattgagtacacatgcacataaagatgggaacaatagataacgggaactactagagggggaagggtggatgtgggatgaggattgaaaaactacctactggatattatgttcactagctgcatgacaggatcatttgaacaccaaaccttagtgacatgcaatttatcaatgtaaaaaacctgcacatgtctttcctgaaacaaaaataaaagttgaaaaaaataaaaagatataattttggaatagaagataatagattttatgcctaccatcaggattattttttttatttttgacaatattattttcatactaattmctgattatactagagaatttcacaattatgttttgcttgtttgttatcacaacaaatcacttcaacaaacttggaaattttgacaaaaattaaagaaattcatttgttgtaattcatgtcaggggtgctaggaacacagccattata

SEQ ID NO: 516210 - DNA, 600 bp, Homo sapiens
catttggagttggcagttggtaaacttagtgatcttgggggcggggtgaaaaatcaatgactatgaatgactggtcaagccacaatagtttccatcaatttcacgcatgcatagagtgtaggtttggtcctgatattttttctattgcctctaattgctaagatacagtcagtgaataagaaagcaatggtactaaaactatttcttcaaaagtagtctctctcttcttcaaatcaagttttgtagacaccagaccactacatacactgttcctagaaaggcttcagtttccctagagctttctcaaggtggttgcatttgttgttgctgttagttattagactgtgcctttcccattagctagtgtagtttctccaygcttacttgtctcagcagattgagctttctgttgatttggtatgagctggaaattcctcaatgacctcttcgtatgcctcatattccttgacttctcccaaaccattctctcatgccctcttttgctctacatccaaagagtttctcttcttaatttataggaaactatctcttgccaaccttattattttgtagggctgggcttttggaaacaattttgta

SEQ ID NO: 516211 - DNA, 478 bp, Homo sapiens
ctgttctgagcattggaggaccacctcaccatgaatccttagcttttgtttatcattcctgcctatgtgtaataaatctgcttttcttcatttgttgtgtaaatgttctytctctctggattcatacaattagcaaagaatctttcattgccctggcaatcagtactcagtggccatgatgaataagtaggtcagcttcattgcttgatggtgtccaatatgtccctcaggctctgttcactttccttcaatctcttttctttttgttcctcagactcaataatttcacctctcttatcttcaagtttattgattcatttcactaccttcattgaattcatttttctgcattcaacttttgactggaagtttcatgaatttagtatgtacagcctggatcccattactctttttctttcaggtcaaaacatttccaacttcctaatggttcttttccaccctaaagaaaaatatgcaa

SEQ ID NO: 516212 - DNA, 540 bp, Homo sapiens
agctgcattgctccaatctcttgcctctgtcttcacactgccttctcctctgccccagagtctcagaagaaccatggccgtgctgatacatggatttctgacttctagcctccagaattgtgagacgagtttctgttgttttaatccacccagttttctgatactttgtaaagcagtttgagcaaattaatacaggcaggttactgaactaggtgtaggtaaatctagagctctaaagaacacatgtwaccattagagactgtttaggtgcatgcaatagaaaactcaaataacaacttttcttttaaatatatatatattttaaagctttatcacataagaggtccagggctgttatgatggctccagtttttcattaagtactcagggtaattctatttttacattctccatagggtgtggtccttatccacttgcttgtaggatagctgccaagtttaaatgacacacttcattttagtatgctgaaaacagaaaagagcaagtacaaaccaggggtgccacttggacttactacca

SEQ ID NO: 516213 - DNA, 546 bp, Homo sapiens
ctgccatagaggtcagcgcaacctaatcaggcactgattccaacaaaactaccctgcatttaccaaatatactgatgaaagtaacacagtccttggaatttggttgatttaggttggaatctcacaggcagaacttttttctcgggaaccgtattcataagtgagtagtttaataatgggttgactcagcaggtctgcggtattcaagccaagcatgttccaagagagtgtctggtctttgactggctgctgggaaataatatctaagcccttacaatattctgcctgataggagtgtctctctctcttgaccwgagatctttgatccatgccagatagtctacactaacaatgcagtttacagtggggacctgtggccaggctgcatctggttgacttcaggaagggctggagtctgagtaactaaggtcagccatgcaagcattccatgcttttgtgatcaaccctcaataaatccctggacaccaaggctacattgcatttctttggttggcaatattccattcattttgccaaatgtcattt

SEQ ID NO: 516214 - DNA, 654 bp, Homo sapiens
gcttgctttggtatcagcagccccaagtcaaacaccaaagatgttaaactttaaaaaaagaaaaagcacgtgttaaaaaaaaaaaaaaagaaacaaaagctgacatttatggtttcagggtttttatttccaacagaggtggatttctgccacggcccagcaacccccagagagctcagcatgccacacctccaaatcaccagcctctgcaaagacaggttcataaggcaatgaggaaaataaatgtccttccattggctttgccctttttggtgtattttggccaatctcttcatgctttcatttcaaggtactaacctgccaagacccataagccagggggtataatagtcactcttgtttcccagcgtgggacgaagccatcacatggacaaactagaaagctgtatttacagccccactgacttcctgggagagagttgtgaattcaatgtcacagtctcatttctaatcttgtttccaatttttcttgacatgtttatattctcatttcctgatgtgtgccaaacagcttcagagacccttccygctctgggcccagttttcatggtgtttgtcatggtgaactttaattatttgcttgaccccattaatgtttcttcactagaccgtctgctcccaggcacgtgacag

SEQ ID NO: 516215 - DNA, 599 bp, Homo sapiens
cagctggttccagcgtgtgtgcactccatttccggcctcgttgcacactccctcccacaggagttgagagctgagggctgagtaaatgaggcatccctatcrcaagtcctgggaaggggtcagggaaatatctggcttcatacacacatagatatataaatataggcatcaatgtggtcattgtgtatatatatatgtgtgtgtgtgtgtgtgtgtgtatatatatatatatgtatttgcctaagtgtattcaaatagatattatagacacttaatagactacagtagaaagaaaaaaattatctcaaaaaatgtctacaggaaatgagtctgtcccatttatagaacttttaaaaaacaaaaatatttaataataaccaattagagaaattaaaacatttcgtatcacgaaaaaagacccaaaatagcaggaagcataaagcatctttcatttgcattttcctttgtaaatatgacactgaaaacacagcattttaaaaatgcaagcagtgctttttcgaatcttttctggtttctattgcagtctgttgaaagtgagtcaagtgttctatcaagtcttcatatgattttgttgcatt

SEQ ID NO: 516216 - DNA, 588 bp, Homo sapiens
gacccaaaatagcaggaagcataaagcatctttcatttgcattttcctttgtaaatatgacactgaaaacacagcattttaaaaatgcaagcagtgctttttcgaatcttttctggtttctattgcagtctgttgaaagtgagtcaagtgttctatcaagtcttcatatgattttgttgcattaacacatagtatacctaacccatttctcacatgttcattgtagaaaaatattcacaaactacaacttttgcaaaaggtctacactctggatttggattcttgtgaagttcactgtttcatcttgggcagkcttcctggtggatgtctcagaaaccaaaaagctgtgatagctcctttttactcgatgagttcctgattgggtcttccttcaaacaccatttgaaaactacaagcttgtgtcacacatttttttcttttcttttttttttacatcctggaatctatggcataaaatgtatccataatgtaaatcagcattaaatactaaccaccaacctgtgattgtaggaaaaaatgcgtgcactgtttcagtgagggcaggagcagggacctgcatggagaggc

SEQ ID NO: 516217 - DNA, 644 bp, Homo sapiens
agccatcgcccatcaaagggcaggtcccacacttcccagcaattagatccaggtggaggtgagcctctggtggkgtggtgcggaagggcagagccaggtaaccagggtagtcagggcatgcctacctcgcccctaccccagagcctctcacctgcaaactgggtacaagcagttggtgtaaggtcaggaatgttgtcaaaggcaacatgaaagttatagtgtatcaagttcaagacctggacttcacagatttatggctacataaatacacacaatgtctttatgaatttgcccctgcttttaatttagtaagagaccttcaaagcaggagttcaaaaccaggggcaattttacttcccctcctcaggaacatttggcaatacctggggacaattctggttaccacagtgaggggatactacgggtatctgtcaatagaggccagtgatgctgataaatttcctataatgtgctaccctcactgacaagaagggattatccggtgcaaattgtcaatagtgccaaggttgaaaaactctgctttacactgaaaaaaagagagatgcaatttaggtagcattatgttctgtaagtagaaaagaaattggtaagaccagaatctcttaccactgaaatgtttctca

SEQ ID NO: 516218 - DNA, 619 bp, Homo sapiens
tgtcttagatccctcttgaggtggtaatcagtttctggatatgaaattctaatgatagaggcttttgtagttttacctttattttaaactgtgtctgaaacaagagccactggattatacagcattcgtgatgctctattatcttctatcactaaacacagaatgtgcatttagatgacggctttgcaatcagtgcgtgctggttccttacctttataggagatgactggatgctcggttctctggcactgagtcgtaccctgggcctctgggtgggcgagtctccacagccccaggcttgagaacagccatgctataacacaggttcccttcatggtgggcaaggggcctctgactctgggcacgtgtcttctaaacagaagctcytcttctcctcatgtgtggaaagtgcctaaaacacacaaaagagaagaatcagatgactgtgagttcgttttctggtgggtggtcttctggtaaaacttcctcactaactttaaggttacactttgtggagatagaggagagcttggagggcttagagcagcatatttttctagtcatatcccaggtcgtgtgtgtgtatgaatgcatgcgtgagtgcgtgtatctcaataca

SEQ ID NO: 516219 - DNA, 654 bp, Homo sapiens
ttataatttgtccaaagatatgaacacaacaggagacatgaacatggagacatgtttcagaaagaagtgctggaaaaaataaggcaagttccatctgtttctaatggtcactgtgggctgaacaaataygtcagattaactctaaaaaccctgagctattgacattatgaagaaagttggatctgaattaagaaaatatattctgaaatgttttttttttaaattaaatggtgactctgcacaggctttactcctgtgcagtttgtggtttgggtcctggcccctagatgagctggtttcctctcatctcagagctgcagccctctccattataaaacaaggatagcagggctattgccagaatgaatgagctcatacctcacataagaggcactaactaaagcaacagaatcactccttcacacaatttttcatagctttatacattaggtaattggggaactttccaaataaaaataaattctgtcagtgaataaacttagattctgtgcaagatactgtgtgaatgacagcaatcctaaagatcaactgaccatgacctttttcatcaggactttgtagccatgacccccacctcaccccctattcttacagttaaattaaaatcgctatgccattctacattggcctgat

SEQ ID NO: 516220 - DNA, 670 bp, Homo sapiens
gttgataagcaactgacactctgaccagcctttcttccaaatccttaggctgctggtttgccaatatgctccagcatttctggtctgcctggtcccaaaagacaagctgagaatatcctccaccttaatcaagagacagagctggccaggcgcagtggctcaggcctgtaatcccagcactttgggaggcagaggcaggcggatcaccagaggtcaggagttcaagatcagcctgggcaacacggtgaaacccgtctctactaaaaatacaaaattagctgggcgtggtggcacatgcctgtaatcccagctactcgggaggctgaggcaggagaatcacttgaacctgggaggtggaggatgcggtgagccgagattgtgccattgcactccagcctgggcaacaagagtaaatctccatctcacccccccccmaaaaaaaaagagcttcccaacagagcctgtcaccttgtattcccactggtgtttccgtgctcttctccctgtgccctgtcctgctatcctttgcactggacaacctgggacaagtactgcactactaagtctcaagttcctcaccagtaccagccttgcagagctgttataaggtctaaatgagatcatgtatgtaaagtactgcgcagagacggaagatgctactactatccca

SEQ ID NO: 516221 - DNA, 572 bp, Homo sapiens
agctgtgtcatgcatacaaattcctgaattggaagtgtctctcttgcctcagaacagattaagactcacccatgactgaaatgcagatcaaaggccaggcgcagtggctcacgcctgtaatcccagcactttgggaggcagaggcrggcggatcacgaggtcaggagttcaagaccagcctggccaacatggtgaaacctcatctctactaaaaatacaaaaattagctgggcatggtggcaggcgcctgtaatcccagttacttgggaggctgaggcaagataatcgcttgaatctgggaggcagaggttgcagtgagctaagattgcaccactgcactccagcctgggcgagagagcaagctccgtctcaaaaaaacaaaaaaaagaaagaaagaaatgcaaatcgccaggtgtggctgcacgcctgtaatcccagcactttggaaggccaaggcgagcagatcatgaggtcaggagttccagaccatcctggccaacaaggtgaaaccctgtctctactaaaaatacaaaaattagctgggcatggtggtggacgcctgtaatcccagc

SEQ ID NO: 516222 - DNA, 645 bp, Homo sapiens
tgtgctgttgtgagggttacgtgaggcagtgaacatttagacagcactaggggcatgatgctctctcaagctgacgcgaccaatgtaggccactgccaaggtggagccttcatgtggaggaggatttgcattgctcagtaggttgttacaagtaactaacagagaaaagcaggctatgcatgaccaatgcgtgtgacacacaccaaggattgaacacaatccaattctctgtcctgggggcctaagaacctgacaagcctctcacctgccagctcagaacttacatctagacaatttctgctccaacagtttcaaacgtggttcctcccaccttctggccaagtgctcttacccatctaggggggccagtggaacgccctttccctcttgctgagcacgtaggaggggctgtttcagkaaagttctcaccaccaaagccctactgctcacctcaccctgcctgtcccctgggcaggacatcctgccctacagtgacaagaagctctaatcctctactctgactcccgtgcagccaggatcctagacgtgaaccgagttccctcaaacagacacactcatgctactggcagggcaggggatggaggccgatttgagctgctgagggtgttggcactggcaggcaca

SEQ ID NO: 516223 - DNA, 607 bp, Homo sapiens
gggtttccctctctgtggggagtgggggtggggtggggtcatttagtgttcctggtctggtccagtgcaccctcagccctgggggagcccagtcccccacaggcccacacagtccactctcccagcttggctaccctgatgcctgcaagccagtgcctgctgagaatgcccacactcacgggtctcggcttggccacgaccgggactggttcgggcgctggaatggtgcggggcctgggggcagtcaggttgaattccttgggctctgtgaccttggccttggtctttaaaggagaggattgactggcagacacgccctccaggtggttgatcagctcctggacctctggctgccatcttgaaggcaaaagtggaaacacctcttatggtcactccctaagctgttcaataaggcgatggcctttaggatccagagggctcccgcagcgattgggtccaccttggggtggaggtgatagtgggatggacggcctcacttcacgaagtggcttctacttgtaggcatacacgctgtcaactaaacccctgaaacatatacagacgcagtccycttgtacagatacaggaaataggcccagaggcattg

SEQ ID NO: 516224 - DNA, 452 bp, Homo sapiens
gaggatcagacggacctcacctgtgggcctcgtggcctggtgggcaggtaggggtggctcaccttgcacatcttatccacgggctgggacttgatgatgttacagaatagctggaagccgagttcctccagcaggaatgtggctaggtagcagatcactagaaaacagggggtctgtcagaggctaagggacgtcacggggcaccaggcacacggcgggaccggacscgaaggcctccaccgtgtcagggcacgcagccacaggaaaacccccaccctattggcgcccacctgaaaatgataagcgaacacaaacaacattgtcttagagtgcaatgcatttgtggtttcaaagcactttgacaaataatcccatctgataagttctcagaatttgcaaaggctccccaggtaaaagtgaaatcattttggacttgtttgtcaatttctgag

SEQ ID NO: 516225 - DNA, 452 bp, Homo sapiens
gaggatcagacggacctcacctgtgggcctcgtggcctggtgggcaggtaggggtggctcaccttgcacatcttatccacgggctgggacttgatgatgttacagaatagctggaagccgagttcctccagcaggaatgtggctaggtagcagatcactagaaaacagggggtctgtcagaggctaagggacgtcacggggcaccaggcacacggcgggaccggacgcgaaggcctccaccgtgtcagggcaygcagccacaggaaaacccccaccctattggcgcccacctgaaaatgataagcgaacacaaacaacattgtcttagagtgcaatgcatttgtggtttcaaagcactttgacaaataatcccatctgataagttctcagaatttgcaaaggctccccaggtaaaagtgaaatcattttggacttgtttgtcaatttctgag

SEQ ID NO: 516226 - DNA, 464 bp, Homo sapiens
ccatctgcaaggtcctggtccgcctggtaaggaccaagtgaggtgaggagccgggaagcctccagtgcaagggcaggaaggaggagctggccccgcctgcccgctgcctgcctgccagggatttccgcagagagcctgagtgaaccgtctctacggcctggccctgggagccagccaggcacctaccctcgaagcggctgtggtcaacccgcaggcagagtcggccatcctccacgtagaaggcatccaccacgacggtcagcagcttccggtactcgaggcacccagacagaacctccaaaacaaagctctgcttctggggctcagagcctggaagagagacagccggtgggggccctggctgggccgggaggaaagggcggcggtgggggtgggacacttgggcaaaggcaggggtggagcggcccggggctgcraagggcctgttagtggggcccccaagg

SEQ ID NO: 516227 - DNA, 599 bp, Homo sapiens
gccccttcccagtgcaccaaagccaatgcttaaggaggacrctactcactcagatacaacactgtggcacttcagacgttaattcagttcatccattctacccccaaagtgccacagagaggtaggtactattattatcccgattttacagacatagaaagacataaaaagtcagtcacaggttaaaaaggtccctggatctcactgtaaagggtggggctggattgaagtcacaaccactcatcagattcacagaaacgcacaaactcggcagggtgtgggaatgccagctccagggccttccccagggcaagcccagaacggcaggtggacttgcaaaaggaggctggcgtggaagttggcagggcgggaacaatggagggcctctcaaaggaaagcaagtgctgtacatgctgctgggctgcttcagagtgagagcagaagggatggaaagaggaggagggagggcagagagaaaagcaacgtgctaaaagagctttcggagaaagtactcagaaatggtataaaacaccaacaacaaaaacagaagtggctcacggggtattccgagggggagggtgccgaaaactcaaggctga

SEQ ID NO: 516228 - DNA, 599 bp, Homo sapiens
gccccttcccagtgcaccaaagccaatgcttaaggaggacgctactcactcagatacaacactgtggcacttcagacgttaattcagttcatccattctacccccaaagtgccacagagaggtaggtactattattatcccgattttacagacatagaaagacataaaaagtcagtcacaggttaaaaaggtccctggatctcactgtaaagggtggggctggattgaagtcacaaccactcatcagattcacagaaacgcacaaactcggcagggtgtgggaatgccagctccagggccttccccagggcaagcccagaacggcaggtggayttgcaaaaggaggctggcgtggaagttggcagggcgggaacaatggagggcctctcaaaggaaagcaagtgctgtacatgctgctgggctgcttcagagtgagagcagaagggatggaaagaggaggagggagggcagagagaaaagcaacgtgctaaaagagctttcggagaaagtactcagaaatggtataaaacaccaacaacaaaaacagaagtggctcacggggtattccgagggggagggtgccgaaaactcaaggctga

SEQ ID NO: 516229 - DNA, 593 bp, Homo sapiens
taaattagatttacatatggagacaaagaaatccttccctccctgttccagttgtggtacatactggtcaccgttctgtgactggagagcattgctgtttggcrtgcttgtgggcacggtttaagggttgagaccacatcctaggtggcggtcacaaacccggcccagcggcatccctgctaggcagtcctccatcaatactgatgttaataattatgtaaaatcattcctgtccgcagcctagagtctcactggagaacaatcagacatgctttattttctacttgtaatcgtaatctgagtgcaatttcaggactttgttttccagatggcttattgtttcacacgttttcttttctcagtgaagcccaggtaacctgctgcttgcggtgtacgctggggggctctcgcagtgctggaagagagagtggacagattttacaccagcacctttcatctcagcgggtgcttgtgaattgattgcacccctcctgtggcgtggaggcggtgctggttaaagtggggctcagatgccccttggttgcatttaatgtgtgtgcataatcagagggcaaggacagcagtaaataatt

SEQ ID NO: 516230 - DNA, 581 bp, Homo sapiens
taaattagatttacatatggagacaaagaaatccttccctccctgttccagttgtggtacatactggtcaccgttctgtgactggagagcattgctgtttggcatgcttgtgggcacggtttaagggttgagaccacatcctaggtggcggtcacaaacccggcccagcggcatccctgctaggcagtcctccatcaatactgatgttaataattatgtaaaatcattcctgtccgcagcctagagtctcactggagaacaatcagacatgctttattttctacttgtaatcgtaatctgagtgcaatttcaggactttgttttccagatggcttattgtttcacacgttttcttttctcagtgaagcccaggtaacctgctgcttgcggtgtacgctggggggctctcgcagtgctggaagagagagtggacagattttacaccagcacctttcatctcagcgggtgcttgtgaattgattgcacccctcctgtggcgtggaggcggtgctggttaaagtggggmtcagatgccccttggttgcatttaatgtgtgtgcataatcagagggcaaggacag

SEQ ID NO: 516231 - DNA, 565 bp, Homo sapiens
ttatttaaactgcttagaaaagctggtggattttgaggaaaaaaattgcctttcatggattatcacagtcagtgctaggataattaagctcaaagtggcagattccaatgcttcaggaatgtctgayccctgtaccgagatggtgtggtgagcaggaagatggggtcccaaaagatactcaagttctaatccctggaattgacgaatattatattttgtgtccaaaatataaagggtctttgcagatgtggttaagaatcttgaatacattctgattgggccctgaaagcaattgcatgtatccttataatagggagggagaagggtccacgtggagcagaggagtttgaagatgctgcctggatgttgggactaacatggcccaggagtgctgccgccgcaggtgctgggaggcccacagataactgctcacctgtagtctctgggtccggcatggcccccagcaccttgtcagccaagtgatggcgattttggactttggcgtccagaactttgagaaaattaagtttctgttgggccactgggttcatgggaacttgttaga

SEQ ID NO: 516232 - DNA, 565 bp, Homo sapiens
ttatttaaactgcttagaaaagctggtggattttgaggaaaaaaattgcctttcatggattatcacagtcagtgctaggataattaagctcaaagtggcagattccaatgcttcaggaatgtctgatccctgtaccgagatggtgtggtgagcaggaagatggggtcccaaaagatactcaagttctaatccctggaattgacgaatattatattttgtgtccaaaatataaagggtctttgcagatgtggttaagaatcttgaatacmttctgattgggccctgaaagcaattgcatgtatccttataatagggagggagaagggtccacgtggagcagaggagtttgaagatgctgcctggatgttgggactaacatggcccaggagtgctgccgccgcaggtgctgggaggcccacagataactgctcacctgtagtctctgggtccggcatggcccccagcaccttgtcagccaagtgatggcgattttggactttggcgtccagaactttgagaaaattaagtttctgttgggccactgggttcatgggaacttgttaga

SEQ ID NO: 516233 - DNA, 565 bp, Homo sapiens
ttatttaaactgcttagaaaagctggtggattttgaggaaaaaaattgcctttcatggattatcacagtcagtgctaggataattaagctcaaagtggcagattccaatgcttcaggaatgtctgatccctgtaccgagatggtgtggtgagcaggaagatggggtcccaaaagatactcaagttctaatccctggaattgacgaatattatattttgtgtccaaaatataaagggtctttgcagatgtggttaagaatcttgaatacattctgattgggccctgaaagcaattgcatgtatccttataatagggagggagaagggtccacgtggagcagaggagtttgaagatgctgcctggatgttgggactaacatggcccaggagtgckgccgccgcaggtgctgggaggcccacagataactgctcacctgtagtctctgggtccggcatggcccccagcaccttgtcagccaagtgatggcgattttggactttggcgtccagaactttgagaaaattaagtttctgttgggccactgggttcatgggaacttgttaga

SEQ ID NO: 516234 - DNA, 635 bp, Homo sapiens
catcatccaaaaccttcttagtcttcttacaaatacatcaggctctctgtagcaagacaacgcaaccaaagacactgcctgyatctacaggaggtctccccaagccctagaccaccatccccctgaccagctcatccgctgttcccatgccccagcagtaacaccccaccaaagtaggagaaaagctggaggggaagggagggggcatgtagggacgtcctgcccgaccagttctttccctcctgcctccccgatccctcctgtgcgagcctaggtggggtgggggggggggatgtctgatgcccgtgtggtccaggccaccatctcctgcctacaccaccaaccagccacaggtatgggcacggggctcccctgtgctcctctcctctctaatctccagacacctgccttcaggagcttgctaaaaacccaccctggggttttcacatgctgactacatgttcaatttattgttgagcctctgagtaactgagcttctatctaaagtgggaagagcaataaaaatttaaaaattgtgataggtatgatgaataattatgcaaccatcaagctgctacaataacaagaacctgagaaaatgactgtaggaacacactgagcgccaccaccagaac

SEQ ID NO: 516235 - DNA, 552 bp, Homo sapiens
agctgatattatataattcttatttgcttcgatatttactggggaaggtagaggggaaaagctatctaaattactcttaataagcatacaaatctctaatagtgaatcaaatgcatcattaaatatactaaattcctcaaactgatatgtcagatgtcaggtagtcatgaagacccaaaatagtctccatgggttttttgttgttgtttttttgagacagagtctcactctgttgcccaggctggagtgcagtggcaccatctcgactcactgcaacctctgtctcccgggttcaagccattctcccmcctcagcctcccaagtagctgggattacaggcatgtgccaccacatttggctgatttttgtatttttagtagagacagggtttcactatgttacccaggctgttctcaaactcctgacctcaagtgattcacccaactcggcctcccaaagtgctgggatttcaggtgtgagccaccacgaccagccccttctctgtgttttaaaggcatttaagtataaattattaaactgcaggacagaaca

SEQ ID NO: 516236 - DNA, 507 bp, Homo sapiens
tgttgtatatgcctctcaacctgcttggcttgcacaacctgtaagcgcttttgtaatctgcgggcacggctctcaatgtcagcctgtcgccgcagtaaagctgttatccttgtgtcagaatctaaagcactgaaaagaatggaagacaggggagactttttaccctccaatttgacaccccccaagttagagctggagtctgtaccaggtgataayctactgcttccttgaagtgccggctgttccatggaattgacagaagatttgtttgcagtgctattattgctatacaaagttgtgtgttctacatcaaggcttctatgtggaagagtgcaattggtcataccccccttcaagtccccagattcagatcctcccatttcacccccatgaagagcagatgaagtgagagcccgttttcccccattgagggaagtggaattgtcatgatcagaatgtgttgaacttttagtcaatttcttagccaacccatttacaggtgcttgt

SEQ ID NO: 516237 - DNA, 397 bp, Homo sapiens
atgttgtatatgcctctcaacctgcttggcttgcacaacctgtaagcgcttttgtaatctgcgggcacggctctcaatgtcagcctgtcgccgcagtaaagctgttatccttgtgtcagaatctaaagcactgaaaagaatggaagacaggggagactttttaccctccaatttgacaccccccaagttagagctggagtctgtaccaggtgataacctactgcttccttgaagtgccggctgttccatggaattgacagargatttgtttgcagtgctattattgctatacaaagttgtgtgttctacatcaaggcttctatgtggaagagtgcaattggtcataccccccttcaagtccccagattcagatcctcccatttcacccccatgaaga

SEQ ID NO: 516238 - DNA, 628 bp, Homo sapiens
cataaatgaagatgagaactcagcctacatgacctaagatttcccacaagtccagatatwtaggttacacacactgcactattgtctgatttctcctctgcatcaatctggaagtccacagagcagattagcacccaacaatcttaactaagctagtatcctactctgaagaaaggcgaagctggtggagggtttccaagactccttatccttctctgtccttcctcccatcccctccttacgtcttttctgtttgtttttatttaatttttttttaatgtatttttagtcacaagaaaatcaaagaagccacctacttaagtcttaagctctgccctttgcttagtcctaatggagagttctttggccatctatgtacaagagattagaggagccaaagagactggagaaccacatcaatgggagctttttcatctaaaggtcatctgtccacactgtccaaatgaggtttaccctgtgaaataaaacttggtgtaagtgctacctgctgagaaaaatagtatgaaatgtcacacaaaggactggggtgcagcaggaggactctgaaagagtcatacgtgtaaaccagcaggtcttagaatgccctaatatactatatgaagtttca

SEQ ID NO: 516239 - DNA, 628 bp, Homo sapiens
cataaatgaagatgagaactcagcctacatgacctaagatttcccacaagtccagatatttaggttacacacactgcactattgtctgatttctcctctgcatcaatctggaagtccacagagcagattagcacccaacaatcttaactaagctagtatccwactctgaagaaaggcgaagctggtggagggtttccaagactccttatccttctctgtccttcctcccatcccctccttacgtcttttctgtttgtttttatttaatttttttttaatgtatttttagtcacaagaaaatcaaagaagccacctacttaagtcttaagctctgccctttgcttagtcctaatggagagttctttggccatctatgtacaagagattagaggagccaaagagactggagaaccacatcaatgggagctttttcatctaaaggtcatctgtccacactgtccaaatgaggtttaccctgtgaaataaaacttggtgtaagtgctacctgctgagaaaaatagtatgaaatgtcacacaaaggactggggtgcagcaggaggactctgaaagagtcatacgtgtaaaccagcaggtcttagaatgccctaatatactatatgaagtttca

SEQ ID NO: 516240 - DNA, 553 bp, Homo sapiens
gcgcagtgactcatgcctataatcccaggactttgggaggctgaggcgggtagatcacctgagatcaggagaccagcctgccaacatggcgaaaccccatctctactaaaattaccaaaaattagccgggtgtggaggcgcgcacctgtactcccagctacttggaagactgagacaggataattgcttgaacccaggaggcagaggttgcagtgagctgagatcgggccactgcactccagcttgggtaacaagagcgagactccatcttaaaaaaaaaaaaaaattaacaatttgcttaaaacacaaagcayattttaatagaggaaatagtagaatgaaggtggaaaggcagtttgaagccagatccttaacggacagcctttaatagccttaattcagacttaaagacagtagaggggccaggcacagtggctcacgcctgcaatccccgcactttgggaggctgaggcgggtggatcacctgaggtcaggagtttgaaaccagcctggccaacgtggtgaaaacccgcctctaataaaaatacaaaaa

SEQ ID NO: 516241 - DNA, 671 bp, Homo sapiens
ctgctcgggaagctgtggtaggagaatcgctggaacccgagcggcagaggttgcagtgagccgagatcgcaccattgcactccagcctgggtgacaaaagtgagactccatctcaaaaaaagaaataaataataaaaataaaaataaaaaatttagccgggcatgatggcagrtgcctgtagtcccagctactagggaggctgaggcatgagaatcacttgaaaccaggaggcagaggctgcaatgagctaagattgagccactgcatttcagccagggcgacaaagagaggctctgtctcaaaaacaaaaacaaacaaacaaagacagcagaggccaggtgcagcggctcagacatgtaatcccagcactctgggaggccaaggcaaaaggattgcttgaggccaggagtttgagaccagcctggtcaacatagcgagatcgagtctctgaaaaataaaaagtatatacatatatatatgcacacacatatatatgtatatgtatatataaaataatgacagcagagtatcattaaacactttttaaatgggagtgaaacatcagactgtgctttagagagatcagttgggtaggatggattcaaagtaagtaaaaaggcatctatagatggcaaagaccaataaaaaagctaccacaataatccagata

SEQ ID NO: 516242 - DNA, 671 bp, Homo sapiens
ctgctcgggaagctgtggtaggagaatcgctggaacccgagcggcagaggttgcagtgagccgagatcgcaccattgcactccagcctgggtgacaaaagtgagactccatctcaaaaaaagaaataaataataaaaataaaaataaaaaatttagccgggcatgatggcagatgcctgtagtcccagctactagggaggctgaggcatgagaatcacttgaamccaggaggcagaggctgcaatgagctaagattgagccactgcatttcagccagggcgacaaagagaggctctgtctcaaaaacaaaaacaaacaaacaaagacagcagaggccaggtgcagcggctcagacatgtaatcccagcactctgggaggccaaggcaaaaggattgcttgaggccaggagtttgagaccagcctggtcaacatagcgagatcgagtctctgaaaaataaaaagtatatacatatatatatgcacacacatatatatgtatatgtatatataaaataatgacagcagagtatcattaaacactttttaaatgggagtgaaacatcagactgtgctttagagagatcagttgggtaggatggattcaaagtaagtaaaaaggcatctatagatggcaaagaccaataaaaaagctaccacaataatccagata

SEQ ID NO: 516243 - DNA, 566 bp, Homo sapiens
tggcttctggagggagtgatcaattaggactctgggtatgcctcttttttaacttattaattwttaaattttttgtttttaatttgtggaagacagaagggaaaccacttttgcatagtagatctcaacacattttctaaacgtgcctagaaaaataggcatgtgattgttgggaccccagatggatttctattggggaaataaatattagtgcttaactcatactatttgaattctggggtgagagagttggaaggcattctggaaatcatctaattgaactatctcattgtacatttgtcaaaacaggccagagaagtgagaccttaggacaaatgtgtgtagagaagggactactgtgcccgaaaaccttgtaccccaggagacaccatgcaaatttcaccccttctatcaattttgttggagcaagtgatattttgtttatattccctcatatgcctagcaaagaaatcaatttttaaagagagttatattttctttagttttgtttattttagttttgcttattttctcataatacatcataataattaatatacattcat

SEQ ID NO: 516244 - DNA, 566 bp, Homo sapiens
tggcttctggagggagtgatcaattaggactctgggtatgcctcttttttaacttattaattattaaattttttgtttttaatttgtggaagacagaagggaaaccacttttgcatagtagatctcaacacattttctaaacgtgcctagaaaaataggcatgtgattgttgggaccccagatggatttctattggggaaataaatattagtgcttaactcatactatttgaattctggggtgagagagttggaaggcattctggaartcatctaattgaactatctcattgtacatttgtcaaaacaggccagagaagtgagaccttaggacaaatgtgtgtagagaagggactactgtgcccgaaaaccttgtaccccaggagacaccatgcaaatttcaccccttctatcaattttgttggagcaagtgatattttgtttatattccctcatatgcctagcaaagaaatcaatttttaaagagagttatattttctttagttttgtttattttagttttgcttattttctcataatacatcataataattaatatacattcat

SEQ ID NO: 516245 - DNA, 435 bp, Homo sapiens
ctgcactcctggggccaagccccaggcagcgctgcccacccatgaggaagagggctgatagcacagatgtaaaggaaaagaagcaagtctccagggtgtcaagaaagaggctgctcagattctgataataagaatctaaatagtaacacatggctccaaggacaattcattcaatgtmcagaactttaatggaaataggccctgaagacattcaatatcttttgatctgattctatggctaccacataagccccagcaacaggcttccatggagctgggtgccaggtgccatgtatgaaaactagataactcgtattagtaatgatgatgagggtgatggtaactctatggatcacttctcatgtgccccaaaactggctgagtgtttttatcattatgaatcttcacagtcactgcccttcaagagctcacaaa

SEQ ID NO: 516246 - DNA, 434 bp, Homo sapiens
gcactgcttcctctccacaatgctaggacatgcccagagaaggtgctacttgtaatgatgtctgtgagtagaagggtgttgtatatatttgtaaaacctgggtgttacaccaacaaaggagatcaaatatcgtcaaaagaaatttgatggagacagaagagtagtcctagagtgtcagatcagatggatgggtacaaaatggagtatttactcttgtttctgatttcttaatgatcatcattcaagatgcaaaccaagacttcaagctcaacaagatgaattcaacatgtaaaagcctgcttactctccccagaagctgsaataagtgatggcagaggaatgtaaaccccaaattaaaagagcacacaatagaagcagcagttgagggatatcaacaaaattttggaagtggcaactcacatgggttggtggca

SEQ ID NO: 516247 - DNA, 525 bp, Homo sapiens
gtatcccagtgcctaactgtcttataatgaatttaacttctcccttaatgatggacacttgggtttttctagcaatttactaacacaattaatgtcaggatgaactttctttcttgcacrcacatacacacatacaagttctttatttgccaccctcaagcacatgactgctgaattgtgctttaaagaactttccatcacaccacgaacatgtcacattgttaggttcgtgtgatcactatgaggaagaggagggggaggggaccatggaggccgtaatgtctagactctttcttccctgtcttcagttcaccaaatgtagttcaactgtggacaaaggggctctttgaagcgtcctctaaatgtttaaaattttgtttttagagataggatcttgttttgttgcccaagctggtcttgaactcctagcatcaagcattcctcccatttcatcctcccaaagtgctgagattacaggcatgagccaccacaccaggcctatatttatttatttattagtttttt

SEQ ID NO: 516248 - DNA, 540 bp, Homo sapiens
ggtgggtttgggggcaatcaatgtgaaggtaaatttgaggttgcacccagtgctgcagccgactctgcctccacactttggcatccttgctgtgtccaccagcagagaggtggtggctgggctgcctccacctaccttgtccacactttctccttccttcagggctacgaatggaaaatggtaggaaatctttagtgcttgatacactgctacattctgcctgcccttatttttttctgggcagaatatttagtccagagcaaggtgaacctggtgaatggctgggttttgttacactgcccaagaggctgaggactcctctcgagctgacagcgctgattcggcctcctgctaatctgttttattgagcagagcgaagtggactggtgaaagagggtggaataatagcaggtgtcccccatcgggtctattctgtgttccttcgtctttaaagtagcctgtcctgggaggtatcytgagggtgggtgcaggtctgcctccgtaggaacaatccccaccatgcacgtctctcacgccaag

SEQ ID NO: 516249 - DNA, 529 bp, Homo sapiens
atccaatgatcttagaatccaaatgatttaggatgcatccctaaccaaatagctactattaatttattagttattgagtacttacctttccaggaactatgctgagatattttaaaacatcatcttatttaatttccttaataactctataaggtaatatactcatttacagataagaaaactaagagatattaagtaacttaccaaaggtcacataattagaaaatggtgaacccaagatcttaatctaaatccatctgactccaaagctgcgtctttagcccctgcactgcttctctaaaagtctttcatggcctactagaaagaacaaaggactgggagtagagtgatctgggttcctcttgtcactgttgtgtttctagcaaagtgattctgggcacttgaattgtcattgttggatctcaacagactcatctataaartcaggaggttagcaggatggctgctgaggtcctgcacaatctccgtatcttttcacttataagcacaacgctcaactgccaaaagc

SEQ ID NO: 516250 - DNA, 473 bp, Homo sapiens
tttttaaatgtcatggtctgacctcaaggatcccttgactctttagctctatgccataatctaagctgcaggcatcctggaccatctcaccttcccaaggtcacatactggtctcctgtgttgatgcgcgtaatgctaaccatttctggagaccagaaaatggaaaggatcctatatgtcttggtaagaaatgttgcttgacaggacagaagataagttagcctagaatacagtgctgattgcttcaaagtccctagatgttcttaggtctagagcagaggttggcaaactatggcctgaaggccaaatccacccccttagctrgttttgtaaatagtctttttttgtttgtttgtttgttttgagacatagtctcactctgttgcccaggctggagtgccgtggcgtgatctcagctcactgcaaccttcacttcctgggttcaagtgattctcctgcctcagcctcccgag

SEQ ID NO: 516251 - DNA, 460 bp, Homo sapiens
aagtcttattggaacacagccatgaccatttgcttatgtattgtttatggctgctttcctgcaactgggtcagagaatgaatggcatgcaaagctgaaaatacttactctggccctttatagaaaagtctgtggagccctgatctacagcatgttggaagaaccccttgaaaatrgacagcttgctgacccctagcacctcctacatattagagatggcatatggttattacacttctgggtaaactgcaaagctatcagttacaagtaaaatctagagtaggagaaatctttctaagtgggacaggctacagtagtatggctcaactgcctgtgatcctggggcattaggatgctgcatatagcttgaggtatgtctcaatataatcagagcatgccccaaattctggagcaaggccagcctcctttatgcaggtatcattctttcagtagacaattcc

SEQ ID NO: 516252 - DNA, 597 bp, Homo sapiens
gattttaaatttgatttttttcttaactctaaatatttaagtaaaaagtaacaaaaactctgcaagcaagggaatttttttgtactgtaattttgaatggaactgaaaaattrtgcacgaataaagtacttttctcatgccataccactttactgtctcacaatttaaagttttaaacttttttttttaggaaggagataatttctgtaattattagggggaacatgctcaaatatttaacctacttttagagtaaacattagtagcatgacttcatgttcaggattctctcaaagagataaatcagtttgtaaagagtgacaagcttttatttttagaaccataggggcatttcccccccgataagtttggttccctctcaactttggcggtctcgtggaccaccatttgagttttcttcaacaatcttaggctgctttttattttggcctcacttttatagaattctatttattcatcacattagtctgtcaaatggatgagttgtaagagaaacaaattgtgatctcatgtgaataaataatgtgtgtagtggggtcaggattcaccagtttctgtttctagatcttctcaggc

SEQ ID NO: 516253 - DNA, 597 bp, Homo sapiens
gattttaaatttgatttttttcttaactctaaatatttaagtaaaaagtaacaaaaactctgcaagcaagggaatttttttgtactgtaattttgaatggaactgaaaaattgtgcacgaataaagtacttttctcatgccataccactttactgtctcacaatttaaagttttaaacttttttttttaggaaggagataatttctgtaattattagggggaacatgctcaaatatttaacctacttttagagtaaacattagtagcatgacttcatgttcaggattctctcaaagagataaatcagtttgtaaagagtgacaagcttttakttttagaaccataggggcatttcccccccgataagtttggttccctctcaactttggcggtctcgtggaccaccatttgagttttcttcaacaatcttaggctgctttttattttggcctcacttttatagaattctatttattcatcacattagtctgtcaaatggatgagttgtaagagaaacaaattgtgatctcatgtgaataaataatgtgtgtagtggggtcaggattcaccagtttctgtttctagatcttctcaggc

SEQ ID NO: 516254 - DNA, 574 bp, Homo sapiens
tcttcattccaaagaactacaagttggataatctgtytcttgataatcaatggttgataatatataaagtagttaactctatgtaggactcagagacagggccattttgggtaaagaatattctcaagcctgtttgtttgttttggaaagataaaattatactgtaaagaaagtttgaaatattttgttgaaataattttttgagctggtgtactgatgtgtacctgaagtcccagtgacttcagaggctgaagcgggaagattgcttaagcccaggagtttgagtccagcctgggcaatgtagtgagacttcatctcttaagaaagaaagaaagaaaaagaaagaaaagaaagaaagaaggaaggaaagaaagagaaagaaagcaaagaaagaaagagaaagaaagaaagaaagaaagaaagaaagaaagaaagaaagaaagaaagaaagaaaagacaagaaaagaaaagaaaagaaaaaagaaaagaaagaaaaattgttccgttcagatcctaattgccaggtctggtaaatatattatatggctggggggatgaaggttgctaatcaact

SEQ ID NO: 516255 - DNA, 487 bp, Homo sapiens
cttcatttagtaatcacctcacagtggttaaagaaactttttatttcttactgttgaaaagcacatacataatatattcagtgcatcargtaaacagagggtgctttgttttttaaaggaagtctcctggaaataccttgattacaagcattcagaccctatgtctttatgaactttaaatgaatcaaagaaaaattttgaaagtcaatattttttagccatcacttggcttctcaatacacatcctctgaatatttaaatttgatacaatattattaggaaaacactgatgccaataatcttcagatttttgcatttttttttcccattctgaactactcacttggctaaaggaatgccaggctcaggaatgccttcaagattccaagcgacacgtactagtaccaggaagtttactgataaacagctttttaatggtctgtcttggtgaatgttccatatactttgtgtagtctacatttgttgg

SEQ ID NO: 516256 - DNA, 602 bp, Homo sapiens
cttacattaacagaatgaagaaaaacaccatattgctatctcaatagagattcatattaaaaatgagcaaactagaaatagaagggagcttcttcaatctaataaagcatatatacccaaaacctttagcgaatatcacattcattgtggaaatgctaaactatttctccttaactttgcaatcaagttgaagatgttcatgagtagttctattcagcattgtcctaaaaggttttgcagtgaaataaaaaaaaaaataacaatatgtcccaaacttagaccagaaaaaataaaatagcactcaccaatgacattagaagcaccaatattattttaaatgtaaattaaatgcaattcaaattcacatatttttgtgatatatatacacatatctatatatcacacagtatagaaatattacatgcagacacatatacctattttgagtgtgagagaaatacagayttgacaaaataataccaaaatcttatcttgaaaaataaatgtgggaattggcaggagatttctaggagaaagaaaaagaacgagaaaacaaattattggtgactagatctaatatacatgttttcaaggtaaaataa

SEQ ID NO: 516257 - DNA, 611 bp, Homo sapiens
aagtgaaagtgttgtctcccaccactttcaaaacacaggctgaaaactgaaaaaaagtttgttgttcaatgtatgtggaaatggaaggatagcagcagccctgctcaggagtcagagaccaggctttggaatcagggaacacccccagctcccacccgcactcaactcggccccatcccacctccaccactgactgtagatcctgaagactaagctgaaataactaatcctcagttctaacctcgccaaattcagctaataatagctaaaatatygtactttgatttacaaaactcaacaaattgcatttgtgtataagaacaaggaagtctaagcaaataacctaccttctaactttgacaagaaaggataagtcacttcatagaaacccttaaaaaatctacagatttcctgcattaggtgatgtattctttcttcctcctctttgaatgcaatacaaaagctatcattttattttctaatgattatgcttttgtgtttccaactttaccttcccctgccttctgagaaacttctttctattatcatgttttctttgcacagttgaactttgagcaacatgagggttgtggggtctgaccgcctcatgc

SEQ ID NO: 516258 - DNA, 598 bp, Homo sapiens
ctgcttcaattaggaaagcaattggaggatattctctctactgagtgaaaaatatgaggcaggtgacagcacaacagactgtcttgacctcgttggcctaaaagctaaatttaaaggtgtgacaagtgttgtgtgaattgcatatgaagataaaacaaaaacacaagtgtgatgtttcgaaagaattatgggggaggggcaggcagaaatttaggcacaggtcagagagctgagcttctgtctgttttatctttggtcttatatctaggcaataaaacatccttgactgatcttcccaaagagttcttcaggaaggtaaatatactttaacaaccacctttgcatggtggaaaggactttataagagaggcygtagagcaagaaaaactgaggccaaacaatggaagagcagtttctagcatgcagattaatatattgaaaactagcatagcaaaatgggggcctttctgatattttgggtttgaatcctccctctagcataagtgaaaacatgtactgcttgggagtaatacagtcttgaaaattatttacctcccctggctaacatttgcatgacacatgcaagtcaatttatgaa

SEQ ID NO: 516259 - DNA, 534 bp, Homo sapiens
tgcaccttgccaggcagggctcgtaggcttggggtcccagcatagtgactctgcccctgccggaacactgtggtcagtcatggctctgcttttctctggtacaaaactccaagataacaggcaaggcttggcacctcctttgtgtgcctgcaacagtgaagtgggagagaaatgcaagtgtgtcacatgcctggcagccaccagtctctattggcatagctaaagggtcctgccctccccrgtaaaggcccacagcacagccaccctgctccatctgagcattttacctgcatcccagagcccttctgaaaactcaagccccaccagtctgtaatattccctcaggaggctcccactacctaagtatcctacttaaccctgcttgaaagttcagccagtgacctgaggaccagtccacccctccccatcacagccagcacctgaactttggaccagccggacctgggtccagctccttcaggacacatacacattctccagcgggccatgtattgtgctagggactgaggaact

SEQ ID NO: 516260 - DNA, 596 bp, Homo sapiens
tgctgatctaagatggcaatatcttcacatctgtgaacactgaaatggccatccttcatttaccaattcttctgtaaatttgcaagcacatcaggtaatcacagtaactggtaccgtttaaaaacagagagaactataaaatgtactgcctctatctggaatccactataaaatgttgtttcaaattattcctcagtgctttgaaagtgtttaggaaaacaggtgaaatggagatacgatcttttaaacaatcatcttgtaatgtgcatttttacatcagcaaaaaaaamcattaagctgtgggaaaataaggccttgaagaatgaaaaaagttctattaaaacaattctatttaggatctggttacacacattcataaaactaaagatgtatgattctgatttgattggtaaagtcagttagacacaaagtaaagaatcaaacttaaaggatacaggacagagactgaagatcattgttaagaaggcaatgaacacctttagtctaataaagacccagagcaagtaagagctctgtatcagtcttaggctttatacctagaaaaattctagttcactttattctcaataaaatga

SEQ ID NO: 516261 - DNA, 452 bp, Homo sapiens
tgatattcaatgcttaaattgattaattcaatggggattgcaaattagtgatatttcatttatataatttcccgcctatattttagttagaatattattataaagagacacgcttctcctctgttatttaktcacccagtagtataagataaatgctttttatttccccttattgatctgttgtcaatatagtatagtaatggatttaagtcaattgcaattatccttattaaagtacaaattattctatctttggctagtgggagcttcttcaaattgtctccttctgacataaatctactaatttttaacattactctagtaatctttgatagctttattaccaattggtataacaagatgttttagacttagcttggacatttgctgccgcagatacatcatgagacatttttcaagcaatcctagtattttcatgagaaatagtattt

SEQ ID NO: 516262 - DNA, 553 bp, Homo sapiens
gaggaaaaggaaaggatgcgtgtaatacaaggagaattatcccggaaggtgagaggtccaaaagtaaataaccaataggttgaccttacttttcaatattctcgaaccagcaggtttctttaacactagagggcatgaacgcaaacgagacagagagagagagacagggagacagcgagagagagagacacagaaaaagagagagagagaaagagagagagacggactgagactctgaggaaaggcagctttcacataaagctgaaaatattcaaggataccagaaatttcaagggggctttggcagccaagtgcctttagccttgcgaataaaacctctatgttgttatgttgtttcagggaaggctgaccacgatctctccaaggaaaccgctttcctaagcaatgaatgcatggtagtttaaggcasgcatacctcagtccccaaagctcctctcctctgctagcaacacctttgcctgaagaaagctcccaccctttcgaggttagtttccctgaaccccaaagcatctatgtttgcctgctcactgtc

SEQ ID NO: 516263 - DNA, 264 bp, Homo sapiens
gctataaaggttggggaggcagactctcctcctggaaattcaactaaccatagtcaaagaatcgggtatgcgggaggggcttgcgcasgtttcgctgtccagagtagcagcctcagtgcgctcaggttcgcagcagcgcagcgccctcggacccggcaaggggagcctgctgcggtgccctccactctaaccccttgcgcccctccttcaggtccacgacagcctggacaagggcaggctgtctcctccgcgtccccactgacc

SEQ ID NO: 516264 - DNA, 264 bp, Homo sapiens
gctataaaggttggggaggcagactctcctcctggaaattcaactaaccatagtcaaagaatcgggtatgcgggaggggcttgcgcacstttcgctgtccagagtagcagcctcagtgcgctcaggttcgcagcagcgcagcgccctcggacccggcaaggggagcctgctgcggtgccctccactctaaccccttgcgcccctccttcaggtccacgacagcctggacaagggcaggctgtctcctccgcgtccccactgacc

SEQ ID NO: 516265 - DNA, 611 bp, Homo sapiens
aacacattgaattgctagttatgagacacttcatttgctgttgcagacaacaataggcccatttttgcttctacaatgcacaaattcttattatctatataaaatgctaattcaagtgggataacatgtatacatcatttccattccttttgtaaggaaaactaacttccacaaatgtaaaatatttgcaaatatctcaaataattttgaacttcaattaatctttttttgcaaatgttaatcagttttctcattttccacaaamagaacaggatataaggcatttcaaacatgaaatcagtagtatcaattttaccctgtgtcccttaaggtctgtgcagatgggcaattcacatttatctcaacagagatccttatttgaatcattctgaagaacattattactatcatgattatggtgacatgcaatagtgtaataattttgttggctcttgggtttttttcatttagactttttaaagtatagcttcttcgttttcaatagatgagtatccattttaagaggaaggaataagaactatttttatctaaactatctcctgaaaactcattaagtcaagcattaaatggagggattaaaagttataaaa

SEQ ID NO: 516266 - DNA, 611 bp, Homo sapiens
aacacattgaattgctagttatgagacacttcatttgctgttgcagacaacaataggcccatttttgcttctacaatgcacaaattcttattatctatataaaatgctaattcaagtgggataacatgtatacatcatttccattccttttgtaaggaaaactaacttccacaaatgtaaaatatttgcaaatatctcaaataattttgaacttcaattaatctttttttgcaaatgttaatcagttttctcattttccacaaacagaacaggatataaggcatttcaaacatgaaatcagtagtatcaattttaccctgtgtcccttaaggtctgtgcagatgggcaattcacatttatctcaacagagatccttatttgaatcattctgaagaacattattactatcatgattatggtgacatgcaatagtgtaataattttgttggctcttgggtttttttcattwagactttttaaagtatagcttcttcgttttcaatagatgagtatccattttaagaggaaggaataagaactatttttatctaaactatctcctgaaaactcattaagtcaagcattaaatggagggattaaaagttataaaa

SEQ ID NO: 516267 - DNA, 498 bp, Homo sapiens
gctctaccaaaatgtggccagactgcctctttaagtgggtccccaatccattcctcctcgctgggtgggacctcccaactggggcctgctgctactccggcaggtgctctcaggctgacggagatttgaattctccctgggatragttccctgggggagaagggggccgccatctttgctgtttgggtgactcagctattccagtctgtgggctttggagagtccaaagtgactagggtggaggggatccccagaacagcacaactgctctaccaaatcatggcaagatcctttaagtagatccccgatccgttcctcattgggtgagacctcccaagtggggcttccacctcttagttctagagctgacagagatttacattctcccttggatagagttgtcaaggtcgtgccagttaagaaggaatgggtcaggaacctgctaaaagaatctgcctgaccaagattttgtagagtagctttgttgtgctgggagat

SEQ ID NO: 516268 - DNA, 526 bp, Homo sapiens
actcaggaaggttcctgctcttcagaggctcctagtcttggcttctactctggccactggctccgctcctgggctctaggcttctgctgctgctcccagggactgccggcacaggaggctcttagtagttaggggggaaaacactaatttgggtgaagaatacccaggccggacacccggccctgctctttccttgccaggtggctttggacaagtcatgccctttcatggacttggggctgtacctctggatggcctgggatttggactggatcatccagagttgaagatgagagctggtgagctckactccccttctccaggtgaagaatctattcattcattcagtcatttgacattcaacaaatatgtattcaacactgactttctgccaacttctaggcactaggttaccacagggaacaaacctagaagtaatccttccccctttagagctgatgttccaggagacccatgtgcacggcgtgacatcattaagcattctgagattagatggatggatgtg

SEQ ID NO: 516269 - DNA, 627 bp, Homo sapiens
gacccacaataacttcctcccaagaattctccaggcgcgttcctcctttccccagtcagctcggtttccagccaggaagccaagcagtaatgggatcaggatccctgcagtgcccagggtctcgggggccacgggaggctcatcccaaaggcactctgttatcttgaaaatgttgcatagccctgttcacagacacatggtacaggaaggctacaaacccacgcccgctttgcaaggagggtgtctgtcccctagctgcagaccacccccaacccccaaatctaaccccattaggtctgtgctagctctacggaagcagagtcaaagccatggcaaggggttattcccatctgccagttaacaacacagctcaggactcctacagcagaggatgcaaactggcaccccgagggcaaattcaactcatagacacatatatatacacacacatatatacatatataatacatatayacatatatacacacacatatatacatatataatacatatatacatatatacacacacatatatacatataatacatatatacatatatatacacacacacacacttctttgactacacaacgtgctaaaaccttatgatgtaaaaccaacgtt

SEQ ID NO: 516270 - DNA, 627 bp, Homo sapiens
gacccacaataacttcctcccaagaattctccaggcgcgttcctcctttccccagtcagctcggtttccagccaggaagccaagcagtaatgggatcaggatccctgcagtgcccagggtctcgggggccacgggaggctcatcccaaaggcactctgttatcttgaaaatgttgcatagccctgttcacagacacatggtacaggaaggctacaaacccacgcccgctttgcaaggagggtgtctgtcccctagctgcagaccacccccaacccccaaatctaaccccattaggtctgtgctagctctacggaagcagagtcaaagccatggcaaggggttattcccatctgccagttaacaacacagctcaggactcctacagcagaggatgcaaactggcaccccgagggcaaattcaactcatagacacatatatatacacacacatatatacatatataatacatatatayatatatacacacacatatatacatatataatacatatatacatatatacacacacatatatacatataatacatatatacatatatatacacacacacacacttctttgactacacaacgtgctaaaaccttatgatgtaaaaccaacgtt

SEQ ID NO: 516271 - DNA, 564 bp, Homo sapiens
gccctcaggatcctgcctccgaagagtcctttccttcctgtggaatctggagtctggtcctccttctccaaggcagcacctgccaggttcctcactggcagcaagcagccttgctaacagccttgctaatccrctaattacctgcttctagcagaagagctgttaattgaaaactccatcccctcctttaattgcctgcctgcctctggctgtctaggcttccctgggttctctccaggcccacagcccttggttctctgcctttgggctcctgacttcttcctggtcaataagggtgtctgtggctgtctctgcagtgctcattactggggttgccaggtgagaatccggggctacactccctagcctgcagctaacagcctctctcctgcctggcccactgtgggaggaaggaaagcatttaatgcaatttgccccagaaattaagggggagataacaggccagtgggaggattccacagggtagcagattttactgaaaccaaaggctgaactcctccaggtcagagctagccagaggggccggccacccagaggggctgc

SEQ ID NO: 516272 - DNA, 564 bp, Homo sapiens
gccctcaggatcctgcctccgaagagtcctttccttcctgtggaatctggagtctggtcctccttctccaaggcagcacctgccaggttcctcactggcagcaagcagccttgctaacagccttgctaatccgytaattacctgcttctagcagaagagctgttaattgaaaactccatcccctcctttaattgcctgcctgcctctggctgtctaggcttccctgggttctctccaggcccacagcccttggttctctgcctttgggctcctgacttcttcctggtcaataagggtgtctgtggctgtctctgcagtgctcattactggggttgccaggtgagaatccggggctacactccctagcctgcagctaacagcctctctcctgcctggcccactgtgggaggaaggaaagcatttaatgcaatttgccccagaaattaagggggagataacaggccagtgggaggattccacagggtagcagattttactgaaaccaaaggctgaactcctccaggtcagagctagccagaggggccggccacccagaggggctgc

SEQ ID NO: 516273 - DNA, 564 bp, Homo sapiens
gccctcaggatcctgcctccgaagagtcctttccttcctgtggaatctggagtctggtcctccttctccaaggcagcacctgccaggttcctcactggcagcaagcagccttgctaacagccttgctaatccgctaattacctgcttctagcagaagagctgttaattgaaaactccatcccctcctttaattgcctgcctgcctctggctgtctaggcttccctgggttcyctccaggcccacagcccttggttctctgcctttgggctcctgacttcttcctggtcaataagggtgtctgtggctgtctctgcagtgctcattactggggttgccaggtgagaatccggggctacactccctagcctgcagctaacagcctctctcctgcctggcccactgtgggaggaaggaaagcatttaatgcaatttgccccagaaattaagggggagataacaggccagtgggaggattccacagggtagcagattttactgaaaccaaaggctgaactcctccaggtcagagctagccagaggggccggccacccagaggggctgc

SEQ ID NO: 516274 - DNA, 564 bp, Homo sapiens
gccctcaggatcctgcctccgaagagtcctttccttcctgtggaatctggagtctggtcctccttctccaaggcagcacctgccaggttcctcactggcagcaagcagccttgctaacagccttgctaatccgctaattacctgcttctagcagaagagctgttaattgaaaactccatcccctcctttaattgcctgcctgcctctggctgtctaggcttccctgggttctctccaggcccrcagcccttggttctctgcctttgggctcctgacttcttcctggtcaataagggtgtctgtggctgtctctgcagtgctcattactggggttgccaggtgagaatccggggctacactccctagcctgcagctaacagcctctctcctgcctggcccactgtgggaggaaggaaagcatttaatgcaatttgccccagaaattaagggggagataacaggccagtgggaggattccacagggtagcagattttactgaaaccaaaggctgaactcctccaggtcagagctagccagaggggccggccacccagaggggctgc

SEQ ID NO: 516275 - DNA, 541 bp, Homo sapiens
acaactcccacagctgcctcctcttcccctcctcaaactcccayggccaccttcagctcccgcgccatgaggtctgctccatgaccgcaggagccagacagaggccagggtagcctcgggcagacagacacttttgtgggtgttcacccagagctagacctcagggaaaacaggggtggcctgggggctgagaattcggcagtcccagcacatccaggaccataaatacgccatgccctttgacccgctaaccccactgtttggaattcctcccaaaaacataattgcaaagggaaaaatagctatatgtgcacagctgtttatagcaacattatttatcatagtaaacaagtcaagtcagccaaaatactttgcaagttttgggagggggaactgtgggtcaataaggtgggatatttattatacttacaagaaaaatggtaaacttgtaaaattactcatacaataatgttaacagcagtgagaagacaaacttgcacatatctgttcgggcagcagacgatgactgagcaccctgggc

SEQ ID NO: 516276 - DNA, 541 bp, Homo sapiens
acaactcccacagctgcctcctcttcccctcctcaaactcccatggccaccttcagctcccgcgccatgaggtctgctccatgaccgcaggagccagacagaggccrgggtagcctcgggcagacagacacttttgtgggtgttcacccagagctagacctcagggaaaacaggggtggcctgggggctgagaattcggcagtcccagcacatccaggaccataaatacgccatgccctttgacccgctaaccccactgtttggaattcctcccaaaaacataattgcaaagggaaaaatagctatatgtgcacagctgtttatagcaacattatttatcatagtaaacaagtcaagtcagccaaaatactttgcaagttttgggagggggaactgtgggtcaataaggtgggatatttattatacttacaagaaaaatggtaaacttgtaaaattactcatacaataatgttaacagcagtgagaagacaaacttgcacatatctgttcgggcagcagacgatgactgagcaccctgggc

SEQ ID NO: 516277 - DNA, 541 bp, Homo sapiens
acaactcccacagctgcctcctcttcccctcctcaaactcccatggccaccttcagctcccgcgccatgaggtctgctccatgaccgcaggagccagacagaggccagggtagcctcrggcagacagacacttttgtgggtgttcacccagagctagacctcagggaaaacaggggtggcctgggggctgagaattcggcagtcccagcacatccaggaccataaatacgccatgccctttgacccgctaaccccactgtttggaattcctcccaaaaacataattgcaaagggaaaaatagctatatgtgcacagctgtttatagcaacattatttatcatagtaaacaagtcaagtcagccaaaatactttgcaagttttgggagggggaactgtgggtcaataaggtgggatatttattatacttacaagaaaaatggtaaacttgtaaaattactcatacaataatgttaacagcagtgagaagacaaacttgcacatatctgttcgggcagcagacgatgactgagcaccctgggc

SEQ ID NO: 516278 - DNA, 617 bp, Homo sapiens
tgctcactctgctgggagcacttctcaggccactgtggatctgggcattgtcctcagctaggtggtggctgcaggagcagcctgaggaatgaacccatgccagagcactgaagatgggcccctgccmcgcatgctccccacccaggtctcttcatctcaaaggggctctaatagagacccagagtggctggaggaatgcactttaatggtggaaatgtgggttccagagtctgctcaagatggggtcccagagcagggaaggagcctgcccaggcacaaggcaggggcacctttcaaagcttcatgtgctgcctggggcccttgacaacccaaggccttccggatgctttgaacacagtcttctcagccctgccgcagccccacttgacagaagacagacgaactgggaggtgagaggcactgcccgcctgaccacccaccacccattgcctctgccttttgacagcacttacgtgggcagagaggcgggaatgctgattgcaccatgtgggagggacgtggagggtggggaggtgactcacaggacagtgggggataggaagcagctccagagcctccctgacagtgaaagggaagggtgcctgtgactcagggac

SEQ ID NO: 516279 - DNA, 701 bp, Homo sapiens
tgtgttccaataaaagcttatcagacaagaagctggcccacaggttggggtttacccatacctattttatggtcatggttgtgtataaagacaattttatttctttttttaaacttggatgcctcttatttctttttcttgcctgactgcattaactagaatcttcagaacaatgctacaaacaagtagtgaaagcagacattcccatgttcttccgcatcttatgggaaatgcattcagtttttcactatgatgcacgttagctgtaggttcatcatagacgttgtttatcatgctgaagaacttcccttggattcttatgttactgagagtgtttcttctttgagacatcaggagtaaattttatcagatgcctgtgtctgttgggatgatcctatgggtcttctctttcagtttgttttgtggtaaataatgatgrtgtttcaatgttaagccaaccttccatttctggaataaaccccatttgtttatgatgtattaccttttcattatactgtcggatacaatttactaaagtctcatttagaatttattataaagacttttatttttagaccagttttatgttcctgtcaaaattgagagggaggttcagatatttttttgtatacccccaatccaatacatgtttagcctccttcattaccagtatccttcaccatagtggtagttgctatgat

SEQ ID NO: 516280 - DNA, 624 bp, Homo sapiens
gaagtgtcctgaattgatcaccttggatatctgtttgctgatacctagtagataatattcattatctctcacacccatgtagtgtaataatttgcctaagtttcatgtatccactagtttaggcttccgaaagtttcttcatccactcttggcaccaaaggataatatattagcctcaataaaaatatcatcaattatcaactttgacatgcttctacaaagtgaaatggctacaagcattagatattaatcagtttttcattcagaaatcactgcaatattcattgaaaatgaccattttaggagttagttagaattcaacatcattcttgtgtctaaaatactcttgttgggagtatcgtgttattctctaaagaagtytcattaaatagctattttatccaagaggtagctccttgaacaaggaaacaaatttattcatattcaagattatctcatttttataactaaaatcaacaaaacatgtatctctgatgcctcctagtaaccaagaggagtaatgagtcagtgtggtggtgtattccaattataccattgtttcctgcttccagtagttcctggagcagccaaaatcaaatatttgttatgaaaatattccaaatg

SEQ ID NO: 516281 - DNA, 598 bp, Homo sapiens
gagcccaacctggattagcatgctgctaagatattgtggttgtttcttgtgcagcattttatgagccatagggaactgctacaatttttattgtaggaaatttgattattatagaatagaatgaagaagaccaagtcatttgtagttgcattacccagagagcatctctgagcattctcgtgttttttcttctgctgtttttctctgtgtatgtgtgaatgcaactgtgagtctacaaaatgaaatcccactgcatgcatattttatggatgtgctcatctcattagtctcctccaccaccccagcatttccaccctcagtcatcaacaaggaatctcttgttgaatttcttcagatgcacccgcaccctcaggaccttggcacgtgttgcctggctgcctggaactctctcctacctcttctttgctggtctctcaggtcttgcccacttgarcgttgccttccctgatcctttcagtctgggctggagccctccagtcctcggtgtgcccatagctccctgtcctcatgatttccttaattacctgccttgtgtgtgcctggggacttgtccagatccttctctagactgtgagct

SEQ ID NO: 516282 - DNA, 533 bp, Homo sapiens
ctgaattcatcagcaggacaggaagggggctgggaagggctgtaactttcttgctctgtgatccaagctgagacagaaatgtttgttgaaaggggctggggtcaaacaagcctgggttcaaatcctgtcccacccttgcttgttctgtgacctcggaagtcagttcccctctctgagcttcctttgtctcatctgtaaaatggggacaaaatataaaatgtaaaaatacaaaccaggaagttggaagtcatacactttctgatttcaaaagttactagaaaactatgacaatcaaaacactgtggtcctgacctacatacagacagayagaccaatgggacagaacacagagcccagaaagaagccctttgacttatttgacattcaagtgtcttgagccaagacccttcagtggggaaagggcagtcttttcaaaaaatggtatttggaaaaccaaataccacacgcagaagaatgaagttgagcccttctcttacaccagatacaaaaaattaactcaaaaaggatcaaag

SEQ ID NO: 516283 - DNA, 532 bp, Homo sapiens
tgaattcatcagcaggacaggaagggggctgggaagggctgtaactttcttgctctgtgatccaagctgagacagaaatgtttgttgaaaggggctggggtcaaacaagcctgggttcaaatcctgtcccacccttgcttgttctgtgacctcggaagtcagttcccctctctgagcttcctttgtctcatctgtaaaatggggacaaaatataaaatgtaaaaatacaaaccaggaagttggaagtcatacactttctgatttcaaaagttactagaaaactatgacaatcaaaacactgtggtcctgacctacatacagacagatagaccaatgggacagaacacagagcccagaaagaagccctttgacttatttgacattcaagtgtcttgagccaagacccttcagtggggaaagggcagtcttttcaaaaaatggtatttggaaaacyaaataccacacgcagaagaatgaagttgagcccttctcttacaccagatacaaaaaattaactcaaaaaggatcaaag

SEQ ID NO: 516284 - DNA, 533 bp, Homo sapiens
ctgaattcatcagcaggacaggaagggggctgggaagggctgtaactttcttgctctgtgatccaagctgagacagaaatgtttgttgaaaggggctggggtcaaacaagcctgggttcaaatcctgtcccacccttgcttgttctgtgacctcggaagtcagttcccctctctgagcttcctttgtctcatctgtaaaatggggacaaaatataaaatgtaaaaatacaaaccaggaagttggaagtcatacactttctgatttcaaaagttactagaaaactatgacaatcaaaacactgtggtcctgacctacatacagacagatagaccaatgggacagaacacagagcccagaaagaagccctttgacttatttgacattcaagtgtcttgagccaagacccttcagtggggaaagggcagtcttttcaaaaaatggtatttggaaaaccraataccacacgcagaagaatgaagttgagcccttctcttacaccagatacaaaaaattaactcaaaaaggatcaaag

SEQ ID NO: 516285 - DNA, 532 bp, Homo sapiens
tgaattcatcagcaggacaggaagggggctgggaagggctgtaactttcttgctctgtgatccaagctgagacagaaatgtttgttgaaaggggctggggtcaaacaagcctgggttcaaatcctgtcccacccttgcttgttctgtgacctcggaagtcagttcccctctctgagcttcctttgtctcatctgtaaaatggggacaaaatataaaatgtaaaaatacaaaccaggaagttggaagtcatacactttctgatttcaaaagttactagaaaactatgacaatcaaaacactgtggtcctgacctacatacagacagatagaccaatgggacagaacacagagcccagaaagaagccctttgacttatttgacattcaagtgtcttgagccaagacccttcagtggggaaagggcagtcttttcaaaaaatggtatttggaaaaccaaataccacaygcagaagaatgaagttgagcccttctcttacaccagatacaaaaaattaactcaaaaaggatcaaag

SEQ ID NO: 516286 - DNA, 510 bp, Homo sapiens
aggctggaggggaggaagccagcacagggtagattactgaaccagttcccagcataggtcactggagctcaaactcaccgggaaaactctaaaagcagaaggcgaacattcacctcccaggtatccagagcagagagggagctggagtattgacactcattccatcagtcatcggtggggatgtttctgcaggatgagtattccccggcacctctggcctgcctggtgggcattatacccagctcaagggccttgactcttgtcaaggcaggcaggtgctggcccctgaagcaggtcaccggctcggaggggtaagggtgaggggatggggggagcaccaggaacatctgccaccaaaagggtaaaagaggatccgtttcataggatccctgcaggaaaaamaatgagataatatgtgctgagtgttacaagatactggacatggggaaaatgcaataaatggctgttcctaatttcgagagatggaggcacatcaggcagatgaccttc

SEQ ID NO: 516287 - DNA, 642 bp, Homo sapiens
acatggggaaaatgcaataaatggctgttcctaatttcgagagatggaggcacatcaggcagatgaccttcccctacttgtgccaaatgccttgcatgggctccyccaggcccaccccccacctgcttgcacctgctctcagtcatgggcagctcacttctgtggaggcagtaacaggcctccctggcctctggtctcccatggggtttggccaacgggagcacaggcaggctactgaaaggcaggaggagagggtgggggcgtttgttcaccaaggccctccctggtgggtcgctggggtttgactgcatccttctacaaagggctcctgccgggtgacccaccccaaacgcattcttgggttccagtggccctgtcccccaccctgcagagctgggcaccccaccttccctgcagtttccctgccacacttttcatacaagggtctccgtgtatgaagctcccctctgctgtctcctgatggaccattagctcacctctgcctgcagtgaccacctgtcatcctgtttggccacctagcaccccgtgtttcaggaatctccttccttttgtgttatgatgggagaaggcaatcgctatagaagtgaaaatcccaggtagctgctgtcctgacctccctgg

SEQ ID NO: 516288 - DNA, 594 bp, Homo sapiens
gaactggcatcaaatgttcaacagcactgatgtaaagtggcttactcccctgatggtcactggcatcagggagaaggtgtattagtccattttcacattgctctaaaaaaatacctgagactgggtaatttataaagaaaagaggtttacttgattcacagttctgcatggctgggaggtctcaggaaacttacaatcatgaagggcaaaggggaagcaaagcacatctatcatggtggcaggagagagagaaagtgcaggaaaaactgccacttttgtttgtttgttttttgagacagagtttgttttttgagacaggcaacagtttcttgttgcccaggctggagttcaatgatgtgatttcggctcaccgcaaccttcacctcctgggttcaagcagttttcctgcctcagtctcctgagtagctgggattacwcgcatgcaccagcatgcctggctaattttgtatttttagtagagatggggtttctccatgttagtcaggctggtctcgaactctggacctcaggtgatctgcccacctcggcctcccaaagtgctgggattacaggcgtcagccactgcacctggac

SEQ ID NO: 516289 - DNA, 385 bp, Homo sapiens
tttaaaacatcacatctcatgagaactccctcactgtaacaagaacggcatgggggaaacagcacccatgatccaattgcctctcaccaggtccctcccttgacatgtggggattaccatttgagatgagatttgggtggggacamagagccaaaccacagcaacaggagactttggtgagtatctgtgtgcatgggtggggaggtgaggagagtgaatttgaaaaacaatcatcactgctgatctgctcagagcaacattcagaggcagttgaattctgttcagatgcaaaagagagctgaatgcacattccaccagccacgtgcacctgcttcggtgtgaaacagatttcatagctggtgaaccaagcagagggttgccagct

SEQ ID NO: 516290 - DNA, 596 bp, Homo sapiens
taactgatgacattccaccattgtgatttgttcctgccccaccctaactgatcaatgtactttgtaatctcccccacccttaagaaggttctttgtaattctccccacccttgagaatgtactttgtgagatccacccctgcccagcagagaacaaccccctttgactgtaattttccattaccttcccaaatcctataaaacggcccaacccctatctcccttccctgactctcttttcggacgcagcccgcctgcgcccaggtgaaataaacagccatgttgctcacacaaagcctgtttggtgggctcttcacacggacgcgcatgaaaatgacagaggactttctgactccaaccacttctcagacccagccagcctgcatgggatgtcagctttaaagaccttaatccttttgaaaggaagagctgctttataratcagataattaagtggttttttctccctagaatgtcaaaacacaatgagctcaacatagttctgaagtagagccgttaaaaaattaccagaaggaggctacagagcattgctcacgtaggggtggcatgtcccaggcatggggtgctccgggccag

SEQ ID NO: 516291 - DNA, 502 bp, Homo sapiens
cagcctctgctgcgaatccccccacaccacacctctcaccccagaagcacaattatcattgcccagcccctttcagacaaaaggaagagcgcggtggggatgatcagagggaaccctgactcaattcatggtgtgcgtgcgtgcgtgcgtgcgtgtgtgtgtgtgtgtgtgtgtgtgtgtgattgattgattgatttttaactagaggggaaaaattcctaagaaaatgggcaaaaattacagattgtcccatttttgtccagtattatcattggaaagggaggaagatgaagaaagagccagtgtttgtggagtttgtttcaggctagaaatagaaaaaggctgcagttgattaaggaggtggccagagaagcaaagtttgttgaacgctgaagatcaccttgtaaaggtggagttcctcaggctttactccgggagccctccctggggagsaagagaaggcagggtcagtgctgagccatcccgggtgtgtggacctgct

SEQ ID NO: 516292 - DNA, 551 bp, Homo sapiens
ttgggatcgccaaatgcagcctgaccggggtccccctccagccctctgagcccgcttcccattggagggaccctggagactagattaaaataactaaayaggccgggcacggtggctcacacctgtaatcctgcactttaggaggccgaggtgggtggatgacttgaggtcaggagttcaacaccagcctggccaacatggcaaaacccagtctctactaaaaatacaacaattagctgggtatggtggcgtgcgcctgtcatcccagcttctcgggaggctgaggcaggagaatcacttgaactcgggaggtggaggttgcagtgagcggagatcatgccactgcactccagcctgggtgacagaacgagactccctctcaaaataaataaataataaatatttaaaaaacccaaaactaaaaaactaaaaactaaataaatattaatggggaaaaatacaggtagacgaaccacaaaaacccaggaaaaaataatgatccagcactggccgtttaggtctcctgactcctgcctgctccactgcagact

SEQ ID NO: 516293 - DNA, 510 bp, Homo sapiens
gttgggatcgccaaatgcagcctgaccggggtccccctccagccctctgagcccgcttcccattggagggaccctggagactagattaaaataactaaataggccgggcacggtggctcacacctgtaatcctgcactttaggaggccgaggtgggtggatgacttgaggtcaggagttcaacaccagcctggccaacatggcaaaacccagtctctactaaaaatacaacaattagctgggtatggtggcgtgcgcctgtmatcccagcttctcgggaggctgaggcaggagaatcacttgaactcgggaggtggaggttgcagtgagcggagatcatgccactgcactccagcctgggtgacagaacgagactccctctcaaaataaataaataataaatatttaaaaaacccaaaactaaaaaactaaaaactaaataaatattaatggggaaaaatacaggtagacgaaccacaaaaacccaggaaaaaataatgatccagcactg

SEQ ID NO: 516294 - DNA, 490 bp, Homo sapiens
atgttcctcctgctggctggaggccacctaaataggccaccgtgcccggcctatttagattaaaataactaaattttatttatggaaatgtttcaatatccagccctgcagggatgcccaccgcctcctgcaytggccctttctcacagtctgttgctgtctccccttggagggaaccaggggggacttcctcccagagcccaccctttggtgcaggtgaaaacatggtgcccagtgggatgagttcccggtgaaatgtagagcctcagtggagctgacaccagtctcttgaccacttgtccctctttacatgtaggaagcactttacagcttcacccctttgagctgtggactttatgtacattagctgatctcacccagccagcctcaatgtccttttctgcaaaatgggcatcataataggagtgttcaagtaagtgcttgaagtctgggaagaatcaggcaacatttcagagctctctggaatcga

SEQ ID NO: 516295 - DNA, 517 bp, Homo sapiens
ggggcaggtagagcaacatacttcactaataaagtacagaatttaaaaaagattagggcaggtgcagtggctcacacctgtaatccgaacattttgggaggccggggcgggcggatcacctgagttcaggagttcaaaaccagcctasccaacatggtgaaaccctgtctctactaaaaatacaaaaaattagctgggtgtggtgggaggcacctgtaatcccagctactctggaggctgaggcaggagaaccacttgaacccacaaggtagaggttgcagtgagccgagatcacatcattgcactccagcttgggcaacagagtgagactctgtctaaaaaacaaacaaacaaaaagattaaatgaggtagtgcatagaagtccactgaggcaaaaccaggcaagtcacacttatgaggatggttttctcattgcaaaccctaatccccacgtgtcagaggctccatacgcagcaagttttttcttcattacataacagtgcagcactgattttcc

SEQ ID NO: 516296 - DNA, 575 bp, Homo sapiens
ttggagccctctggatcccagagtctcacagtgctcccgggaaatttcataagggcaagcatgatgcattaggcttgggggaagggaatgagatccaaagcctggaagatgtgagaggtagcagacaccgtctaggaaagctggggtgatttccgagctttccgtgcagggtgcacggtgtggcggaggcagagctccaagagctaaaattcccagctcggcttggggccccgggttgtgcctaactagctgaggaccctcaggcaagctgacaccactcccttcaatggcttccaaaaccctggccaaggttctaaggtgtgcacagtgggcactgctcccctccccaccccgtctcccacctctgaccctcacccttcccagcgacagggttctgtrttccgtgcggcctgccacgggcccgcctcgggggtgccctgcagagcagcccgagcacctccctatgcacgtagctccctccctcgcggcaacaggccgacttcatctcccaccccgggaagccaggcaggacccgagactgagctctggccagcggacatgggaaagagtgccag

SEQ ID NO: 516297 - DNA, 435 bp, Homo sapiens
ggctgggatgagcagggcagggaccgccttatcttctgtgaattcccagggcctgactgcccctaacccagggtggggctcagtgaaggccactgtgaggaggctgggtgcacacagcgggggaaccggtacagagggggcctgggtcagagggggcctgggaggagggaagacggggatggggaagggatggttcccatctcttcgggaggagagccttgagtggcttgtcctttccattttaagagtctcttatctcagaggacattgcccagagcaagggacggcactcagaaactcataaaccgctttcccaccagctcttccagggaccctgagaaagaccctcactttgggattgaggggcrgagaccagggggattctccggactctggctctcctgggtctgagtgaaatttcagcctctggggtct

SEQ ID NO: 516298 - DNA, 523 bp, Homo sapiens
cacccactgtattgggtccatatgcactgtccctagctggcacccctcactccatggggggcgccccacgctgtactgtccactgtcccagtggtaagctcctcagctctcaccatcataaacgacaccatgagggacatggaggcacatgtcccttatggatgtgtgagaattccactagctgctcacccaggatgggatggaactgggctgtagggtgtgttaatcagattaactacaactagtcagacttttatgccctaattgtaagagaaaagattagtttagtaaatgcaagtatcccatgacgcaaatgcttttgggccccaaagggcagcacagagccttcaaaactggacacaatcccttctgactattcctctctgtgcatgtsggaaatagagagcaccgttcttgtccttcacactttagtttctgctcaaatatctaaaatcaaggtgaagaaaccctctctgtgagcaaatatggaagaggatttggggatccccagggggtgagctgg

SEQ ID NO: 516299 - DNA, 614 bp, Homo sapiens
agagctggaatttgaacccagaggtcctgacttcactcaatgctctttttactacaccatactatcttttatgttaccttcttgctgttgaaagaaaaacaaattaatataacctcacaggactaatgtctcatttgagtaagctgtgcatgaatggcagtgtaccttgaatttatctagcacctttatttacaaatcatttccacaattccttttatcctctttatactgaagagtattttctgagctaatagtcacataagacaaccttacaatttacacagtatttactgaagtccattcttttgtctccacagtccaattccctcaaccattttcctctgcaatcagattttattcattttatatgctgcaattcataaatrtctcatattaagtcataccctttgaacaaaaactgatactcctccatgagatgatgggcccacattcccgccccaccctctacctatgttttctctttctctaagggttttagtttcacatcacatcctattgttaatatctactttattgcctgctttcctggcctcctcactgtgttcaatttgtccttaattattttccaggttcagatttgtttttccttccca

SEQ ID NO: 516300 - DNA, 614 bp, Homo sapiens
agagctggaatttgaacccagaggtcctgacttcactcaatgctctttttactacaccatactatcttttatgttaccttcttgctgttgaaagaaaaacaaattaatataacctcacaggactaatgtctcatttgagtaagctgtgcatgaatggcagtgtaccttgaatttatctagcacctttatttacaaatcatttccacaattccttttatcctctttatactgaagagtattttctgagctaatagtcacataagacaaccttacaatttacacagtatttactgaagtccattcttttgtctccacagtccaattccctcaaccattttcctctgcaatcagattttattcattttatatgctgcaattcataaatgtctcatattaagycataccctttgaacaaaaactgatactcctccatgagatgatgggcccacattcccgccccaccctctacctatgttttctctttctctaagggttttagtttcacatcacatcctattgttaatatctactttattgcctgctttcctggcctcctcactgtgttcaatttgtccttaattattttccaggttcagatttgtttttccttccca

SEQ ID NO: 516301 - DNA, 614 bp, Homo sapiens
agagctggaatttgaacccagaggtcctgacttcactcaatgctctttttactacaccatactatcttttatgttaccttcttgctgttgaaagaaaaacaaattaatataacctcacaggactaatgtctcatttgagtaagctgtgcatgaatggcagtgtaccttgaatttatctagcacctttatttacaaatcatttccacaattccttttatcctctttatactgaagagtattttctgagctaatagtcacataagacaaccttacaatttacacagtatttactgaagtccattcttttgtctccacagtccaattccctcaaccattttcctctgcaatcagattttattcattttatatgctgcaattcataaatgtctcatattaagtcataccctttgaacaaaaactgatactcctccatgagatgatgggcccacattcccrccccaccctctacctatgttttctctttctctaagggttttagtttcacatcacatcctattgttaatatctactttattgcctgctttcctggcctcctcactgtgttcaatttgtccttaattattttccaggttcagatttgtttttccttccca

SEQ ID NO: 516302 - DNA, 476 bp, Homo sapiens
cttgtttgtagggatagtatagaacttgctcatcactttctctctctctagggcttaaaattatgtctgacacttagcaggccatccctaaatatctcgaatggatgaataaacagttttgcaaataatgccccattacattttttggtaaggttgcctatataaagggttcatactttgaagcaggcagcccttgcaattcgccatgtgaatgtaaaataccatgatgagttatggacattcctcttcaaattactctgaagatgccaaagaaattacaaacaggagcctcaaaattcattgcattaactcatatccccagacaattcattcccaagagtttgyttcaatgaaaagtctcccttaggaaaggacttctcacccttactctgggaattaaggatggatgtggctgtaatggagctcatagcttttcatcttcccaagatattaaaatgcaaattgggggaggacag

SEQ ID NO: 516303 - DNA, 232 bp, Homo sapiens
agtagatcaggctacacccacacaccaagctgcatcaaagaattcttttcccagacwttaggattggtttacgagaccataacatgagacttgaagcaattagtcttggatatcttaagctggtcttccagatagaagagcgaagcagagacaagagacaaaaagagatcactctgtgaggtcctaggatagggttctgcctaaagtctaactatatgtatttattacttgg

SEQ ID NO: 516304 - DNA, 496 bp, Homo sapiens
  misc_feature (1)...(496): n = A,T,C or G
tgcttgctttttccaaactctctgattccatgattaaatggagcctaatttgtgttgtgcaattcgaagttatgtataaatattagcttatgcaactggttaatcacttagtgtcagataaatatgcagagcaaggtgtttaatatgtttacataaactgtacaaaccacttttcattaattgtgcttttccagcgtcctagcagnagcgtgttgaagcagggaacttgacatgggtgcctgtccccctaacttttcatctggacctcgctttgatttattccatgggctccttcctgtgcacttgggaactggggctttgaaaatgtttrtgccaacagttcagcccttagaactggcagcacacaaggtgttatctctgtcttcagacaggctatgcttcttgtgggcacttcatttttcatccagtcagggaaaagatgggaattaccactagtttacacctggatgccaaacctccttgtttcctcttatcc

SEQ ID NO: 516305 - DNA, 496 bp, Homo sapiens
  misc_feature (1)...(496): n = A,T,C or G
tgcttgctttttccaaactctctgattccatgattaaatggagcctaatttgtgttgtgcaattcgaagttatgtataaatattagcttatgcaactggttaatcacttagtgtcagataaatatgcagagcaaggtgtttaatatgtttacataaactgtacaaaccacttttcattaattgtgcttttccagcgtcctagcagnagcgtgttgaagcagggaacttgacatgggtgcctgtccccctaacttttcatctggacctcgctttgatttattccatgggctccttcctgtgcacttgggaactggggctttgaaaatgtttatgccaacagttcagcccttagaactggcagcacacaaggtgttatctctgtcttcagacaggctakgcttcttgtgggcacttcatttttcatccagtcagggaaaagatgggaattaccactagtttacacctggatgccaaacctccttgtttcctcttatcc

SEQ ID NO: 516306 - DNA, 496 bp, Homo sapiens
  misc_feature (1)...(496): n = A,T,C or G
tgcttgctttttccaaactctctgattccatgattaaatggagcctaatttgtgttgtgcaattcgaagttatgtataaatattagcttatgcaactggttaatcacttagtgtcagataaatatgcagagcaaggtgtttaatatgtttacataaactgtacaaaccacttttcattaattgtgcttttccagcgtcctagcagnagcgtgttgaagcagggaacttgacatgggtgcctgtccccctaacttttcatctggacctcgctttgatttattccatgggctccttcctgtgcacttgggaactggggctttgaaaatgtttatgccaacagttcagcccttagaactggcagcacacaaggtgttatctctgtcttcagacaggctatgcttcttgtgggcacttcatttttcatccagtcagggaaaagatgggaattaccactagtttacacctggatgycaaacctccttgtttcctcttatcc

SEQ ID NO: 516307 - DNA, 172 bp, Homo sapiens
cattggcttgttgccagtgacagcttactgttaggagcaggttttcccacattttgctatttatagttttacatttcataataattaacatattgcagttaacctggagaacagaaagatacccactagrtgctattaatgctaactgtgtgtgcttgcccaagcagtgttc

SEQ ID NO: 516308 - DNA, 623 bp, Homo sapiens
ctactaataaaattcagaagacaaaaattggcatttgaagtctgtgaccgcaaaaacattatttcaatccaaaaatttatatgcctatttttaagagaagtatatgcttttcaagcaaaaactatattgcattaagataaaactctataataacagaaagagaaaaattagttcacagagaaaaaaataatgtaaaacttctgattgttaaaggagagcatgtgtatttttttaaatggatgacaggataataaaacakaattatgatcaaaacattatgatgggatatcaaaacattaaatttttcagataccaatatttctaatatgctggaaattacatcctttgcaactacttttaacctgtaaaaaatgttaatgggcaactaaaatacacaaggggatatacagatttccacattcttttacaaaatgtgtcattaaaacgtttagaaaagcattatattttagatctctaagtttttcataaatactgtggaggactggctattctttacgggagatactaaattacatttattttaccaatgtaagaagatgtatagaaactcaaggagtgaaaaactagccaaaaaaaaaaaaaagttccctgagcaataagac

SEQ ID NO: 516309 - DNA, 634 bp, Homo sapiens
ccaccatccaactgcaatttcctaagcactgattcataatactttatgctttacctgggaaggttttatcaaagatgttttaaaatttgtagattgtgttatctatccgataatagctgctgaaaaatcaggattatggcaagagaccagtaaatgtatgttctactcagttttactatattcttctcaatttattttaacaataacaaattaaaggaataataaatgaaaagcttaaagaataaagatataactagaaattattttacttcctatgtggactataacaagtcaattatagttacacctgatattatattaataattggaactatcagtggaaaagaataaaagataggagaatccctgaaaatacatgggtaaccccaatagaaagaaaaactatatttacaaattccaataaatgtgaactccttgtttctctaatggctggagaraaaagagttatcttgagactacgaccaacaggtcagagtcctcacaactccactggcatcagatgtagaacttccttcctcatgaaggataagcactgagtctgcttaaggtctggtaatattaataaatttcttttactttcagcatccacccacccattatatgccaagagggt

SEQ ID NO: 516310 - DNA, 314 bp, Homo sapiens
gctgggcgtggtggcaccgcctgtaatcccagctactcgggggctgaggtatgagaattgcttgaacacgggaggtggaggttgcagtgagccaagatcataccactgcactccagcccgggcgacagagtaagacttggtctcaaaaaaaaaaaaaaaagatagattaagttataattataattactagcagtatcaaattaagtctaacaacatcattgcaattcttatatataatgcataaccataaaatttgattagaaatatatctttkaatgcaatgagtgggacagtgaagcgttatcttaacacat

SEQ ID NO: 516311 - DNA, 524 bp, Homo sapiens
tgcctgcactgtgaaggctgcaacakaaatctgtctcttcacttctccccaggccttggaagggtccactttgctttcaatatcaaacagagcatcataaattcctgggaatgactcccctgcatacttgttgtggctgcttggagcatagatgacatgcctgttgataaaatcgtttgctgtttattaggtgcccaaatgatatacaagagaaacacaagagcactctgcaattcctggattgcatattcctataacaatttgaacaagccacttgtcaactgaacttccaagttcaatcatctctgaagactattatatgaaatctatagtaattaattatatttttatttcaaacaaataaattaaagtggttcagtgctacaaaactaacaatgatgatagtaaccacagcaatcattcttggtatttaatgtttacttgcaatttttctgatgtttagaaataaactctacacagttgatattagtatttcacagagaaggaaactgaggtctgagaga

SEQ ID NO: 516312 - DNA, 524 bp, Homo sapiens
tgcctgcactgtgaaggctgcaacataaatctgtctcttcacwtctccccaggccttggaagggtccactttgctttcaatatcaaacagagcatcataaattcctgggaatgactcccctgcatacttgttgtggctgcttggagcatagatgacatgcctgttgataaaatcgtttgctgtttattaggtgcccaaatgatatacaagagaaacacaagagcactctgcaattcctggattgcatattcctataacaatttgaacaagccacttgtcaactgaacttccaagttcaatcatctctgaagactattatatgaaatctatagtaattaattatatttttatttcaaacaaataaattaaagtggttcagtgctacaaaactaacaatgatgatagtaaccacagcaatcattcttggtatttaatgtttacttgcaatttttctgatgtttagaaataaactctacacagttgatattagtatttcacagagaaggaaactgaggtctgagaga

SEQ ID NO: 516313 - DNA, 521 bp, Homo sapiens
  misc_feature (1)...(521): n = A,T,C or G
tgctctaggtctcggcttggagcatgggtcccctgactcccaggccaggtctctccagctcgttgtgctgtcacagaaaccacaaaatatctgcttttcccttttctttgccaaatccaagagtgagaagctaaattgcgcattaaaattctactcaccaattcatgataaagcattaaaaatttaaattctatcccttttgtcaagcacctttccttttattaattatctaatcccaacagactcgattgataacccttgttacatgaatcttcagcttattgatracatccatctgggtactatcgtgcatatgaaggcaagtgtatttaaaaattattagagcatttaaaattagggtanataaaactagcccagtctcagcagaattgtgagaaatcatgaggggagataatacttttcatggtaaggttaagaagattcactccagcactgaggctacagaagataacatcttaaatacaaatttcattctctgatggcagaggaactggttaacc

SEQ ID NO: 516314 - DNA, 502 bp, Homo sapiens
tccttaaaatgtgataatcacacctcaaactatctattctagagtcattttcaaacttaattgaaatgtgtgacaggaaagaatttagaaaaggaaaaaaacccacatcattatcaagcctctctgttgaaatattgaggttctatttagtatccaacatagtatggagcattacaatctcccctcatttttttgtctctcatttcccccctactccttctaccgcccattctcagaagctcctctcttcctgagaatggtaaatactattgttgtgtagtcttctacatcagcccaccccttatttaactatttctcctttgcacaacgggatacattgattcttttcttaaccccctttcctgatccaacattggctcaacatttaataycgtttaatgcttcactcttgccagtcttcgcagtttaaaaaaataccaccctttcagaacctaaagtttcaggcagaatttctgaccttcctgtttctacttacccacat

SEQ ID NO: 516315 - DNA, 539 bp, Homo sapiens
cctgaagaagccgtggcagatttttatgccaagtctacaattaaggaggaagaaataataaatactgccccagctctcacacacactaaacacacattcatgtacatgtacatatacatcccccacacttcctctgtcttctaaataactcaaattttcaaaaggaaaaatgaatatgataagagagatcacattgtcttcaaagatgccaaggaaaaacctcataacaacaaatttaagtatataaataaatttataaaagaacataattttaaatgcaattaaattaatgagtgctagagtcacacagttcaaagatatagtcctgtaactgatttaagaaaggaattgccatgcatttttttcttatttttttatttccctccacatgaacgctctgaaatccatagcatacattatacctgttatatacaagcccctctagctttatattattttcttatgtgtcctctaacgtcaatatttttccttcgtattyataggcttccaccctagtgtgtctaatatgtggccttgga

SEQ ID NO: 516316 - DNA, 327 bp, Homo sapiens
acgcccaagtctttgagggctcaggttcccactttaggaggacaacaaaacttacgccaaaccgaagcgggccttgttcctgcatgttgggcctctcgtggcgcccagaagactgggccatcaagagtgttaaccgctgccattggctggtccttcactgacagcagaaacttggccaatggcaatcaatcagggggcccgcgctgccttaaataccagcagagcaaacrgcctcagacaaagctgcgccgtgtatcaattaccgagaggctgcgtgctcctctgggcggagggagccggagcgagcgggccagggctgctgcccca

SEQ ID NO: 516317 - DNA, 578 bp, Homo sapiens
tttaaggaagggcactcttccctgtttggagcaagggacttcccccttataaggctagggcagaggcagcagcagtgaatgaatgataatgctgattccgactcccagtaactagaaacagcgtgaatggggggcgctgtggtgccaccaggtgcaagcagaggagcaggctgcagtgtgtccaggtcaaaaatgcgcttgagacaaaggctgtttctccctagtacactggaagacattgatccttgaatggaaggaggcagggagaggaattagatcctgtttttacatggttaatggtccccaagaagctgaagtttataatwtcctcacctctctgagcccatctcttattatagtctctttgctcccagctccagccacattgggctccccattctcactcaaacatgcctgggaagcacccaccctgagcctttgcacttgtgccctccatctgggatgctcttacaccaagtatgtacatggctcaatctctcacttccttcaagtctttgctcaaatatcgcctttctcaatgaggctttccatgaccaatgtatttaaaatacaacact

SEQ ID NO: 516318 - DNA, 592 bp, Homo sapiens
ctgtgttccagatgatgtcaggacatcagaaagactgtggtacaactagcgccctggcgtaagtgcaggactgaagtcaaaagacagtttctgtgctaggtggctcacacctgtaatcccaacactttgggaggccaaggcaggaggattgcttgagggcggaagttcaggactagcctgggtaacatagtgagaccccatctttaaaaaaagtgagcagggtgtggtgacacctgcctgtagtcccagctacgtaggaggatcacttgagcccaggagttcaagactgcagtgagctatgatcgtgccactgcaatccagcaagaaaaaaaaaagaaaaagatagtttctggtcrtgccactaccagttagttacctgctcgcttgtgactggggcaagccatttaccctctctggatctgtttcctccattataaaatggggaaacttctctgtcttagggctttggaactcgaaggagccacggtgtgttccaaggtccaaaatcagggaattgctattccctgacattccagagtgggctgggcctccacgacctttttcacagaggacatttgaacatgtgacattt

SEQ ID NO: 516319 - DNA, 608 bp, Homo sapiens
gctgcctggcagggactcttggccatactgggtttctgggctggctcatttctggtgtttggtatctctctacttcacgttgaatggctcttccctgttgaaaggctctgccagtatcccttaatatcaggtaaaactgcacaattcaagatggtgccagcaagcatgatgtttcccccatggtgacacagggctgtaagtagggagatgaggagccaggcatctttggaattgagggctgacttatagggctgacttatctccgtaggtttggaatagtcataattaatggcaaagttaatggtccagccacttagggatatagcaaagcaagagaatcttggcttgttgtcttcarcttgttgaagaatatcatctccatttcatccacccattacttggcatcttgggatcatttgaaactgttccacctgtgaaaccttaatctttgtgtacctcgtatgcattccgtctcccatatctccaccatgtctgttcatagagacctcaggcccctgagccctagtttttctcctcactctgaatcaactcttgttcctattctatctgagctctgttgcttgtcacttcaactgcccaccattcac

SEQ ID NO: 516320 - DNA, 608 bp, Homo sapiens
gctgcctggcagggactcttggccatactgggtttctgggctggctcatttctggtgtttggtatctctctacttcacgttgaatggctcttccctgttgaaaggctctgccagtatcccttaatatcaggtaaaactgcacaattcaagatggtgccagcaagcatgatgtttcccccatggtgacacagggctgtaagtagggagatgaggagccaggcatctttggaattgagggctgacttatagggctgacttatctccgtaggtttggaatagtcataattaatggcaaagttaatggtccagccacttagggatatagcaaagcaagagaatcttggcttgttgtcttcagcttgttgaagaatatcatctccatttcatccacccattacttggcatcttgggatcatttgaaactgttccacctgtgaaaccttaatctttgtgtacctcgtatgcattcygtctcccatatctccaccatgtctgttcatagagacctcaggcccctgagccctagtttttctcctcactctgaatcaactcttgttcctattctatctgagctctgttgcttgtcacttcaactgcccaccattcac

SEQ ID NO: 516321 - DNA, 608 bp, Homo sapiens
gctgcctggcagggactcttggccatactgggtttctgggctggctcatttctggtgtttggtatctctctacttcacgttgaatggctcttccctgttgaaaggctctgccagtatcccttaatatcaggtaaaactgcacaattcaagatggtgccagcaagcatgatgtttcccccatggtgacacagggctgtaagtagggagatgaggagccaggcatctttggaattgagggctgacttatagggctgacttatctccgtaggtttggaatagtcataattaatggcaaagttaatggtccagccacttagggatatagcaaagcaagagaatcttggcttgttgtcttcagcttgttgaagaatatcatctccatttcatccacccattacttggcatcttgggatcatttgaaactgttccacctgtgaaaccttaatctttgtgtacctcgtatgcattccgyctcccatatctccaccatgtctgttcatagagacctcaggcccctgagccctagtttttctcctcactctgaatcaactcttgttcctattctatctgagctctgttgcttgtcacttcaactgcccaccattcac

SEQ ID NO: 516322 - DNA, 563 bp, Homo sapiens
ttgacttcgttttcaatttcctttgactagttttctagaataggaattaatgagtcaaagggctaaggcgcccatcatctggttttctctggaggaaggtagttctctgggctctacaatgctcatctgcctgaatctgaatttgaactctatcacttcttatcagtgtgactttcagcagattatrtataaccttttagttgcttcatttgtaaaatggggattataatagtacctaccttgaagtgttgctctgaggattaaatgggagaagtgatgtgtaattgttaagttgaataggcataggcatgactcatgagatgtaatcataaagcaaactttatttttgtctcccacagtctctttaaatttattctatagggctgttttcccttctaaaattatattaaatttagggtaagtcccatgacttttctgaccattttcaggtaaccagaggttgtcttgtcagtaattaatgcatcctgtctgctgtaataaaaaaaaaatcttgaaacgtcagagttacaccacctctttcccagcacagtctgctgtaggcc

SEQ ID NO: 516323 - DNA, 565 bp, Homo sapiens
tctttcagacactgaataatctacttgctagcaggtctatacctagacacacaccagctcacagtacatagaactgccctcacatgcagaaaggcactcaagaatccaggcacactcagggaagcccaccaccctctgctgccaggcactgtggtctatctcaaggatggctgggctttcccatttgcctgggaagggggcggggaggtggtctctggggggccctcacaggtgcaggtctttccctatccactctactccattctattaccrgggaagggagctcatcgccatggcagcgagtcacttcttggccacccattggctccttggttgccatgggctacggggctgtctctgtgtaaaatgggtgctggactcctaaggcccactgtgttattgtcgacccaggtgcacgtgctagcggacggcaggatgagatcctcaggtcccgccttgtaacacagcttgctctctgttagagcctcataccagtcactgatagaaaatagttctgacagggctcttctctgagtctgtccagacagcgtcccaaatggaaacc

SEQ ID NO: 516324 - DNA, 518 bp, Homo sapiens
cctgaaggcaggagcccatgtgccgcggcagggttagtgctgagctgggagagagtgcacctctcttcttccacatgggaatcccatcccccaatcagacgggatcatccagggaagatggacagccctgcccctctgccctcagagatcccagcccagactcttcccttctacccggccccaggcctactcacctgccgatcaagcttctgctgcctcaggtttctgccctcatcatctaagacactgcagagcgaaagaggggttttcagggcttgcccgtgaggtgccaggatacagcccagagcccacccccagcatatctgggcccrttaaacccatcccatcacggctgctgggactcagtgagcccacatggtagaaggaggaagggtggagcctgccatcttgaaaccagcttgaaccaaaagggctcgagctgccactttggaagcctgctaggacccctgtttccccagggactccccagtaaataccggatgagaccctcccctcag

SEQ ID NO: 516325 - DNA, 587 bp, Homo sapiens
  misc_feature (1)...(587): n = A,T,C or G
gccaggcccgagcagcgttcaaacaaacccagggggctgctccctccagctccctactgggatctcaccagccccagccttttccttccttcccaccattctagaggaggctgcgtcctctggggcagaccctttccccatccgtttgaaagcaaactcctagctttccaggtgggcagagtagagtcctgactttgtctactccccttccccacttaaagacggcagagggtcctccttctcatttgagagcatgaagcctagaggacaccagtccctcagcctacagggtttgggccacacagaggtgtctgcagggtgacacaacacatcaaygtacagcccagcaaccagctaccaggtccttcccggctgcagacatggcacaggcagccctggggacatcaaattcttgagccccaccagtcttgggacagggagcctcatctcacccgcacntgccatgcctctgaggaaggcagggcacaagtagggaactggtaactcaaatcacttagctttttgctagccagagacacatgcatgagacctaggcccaaatgctataaaggccaaggtgtggacag

SEQ ID NO: 516326 - DNA, 597 bp, Homo sapiens
ttgctttttctctacacaaaccacctactacaataacaacaattgcttatgctgaaaatcagcccagtctcatagctctggaacctctctttgtccccttccagataaccacaggacactttattttacacttttgtcataatgattttacactctcatttttaaatttagtattctttgtattctttcgggggggggggtaattaaccctaaattcttgtagagaaattaagttcttagagtagatttctgggttgcttgttttcttccattgacgtttcacatgacattcctgtccaccgtcacactgcttcagttgttgcagatgtgtattttcctatctaatgggattggtgctcctctcattagccgtcatcagaaatgtcttttattttcctatctaatgggattggcrctcctctcattagccgtcatcggaaatgtctttgcttttcttacctgttttgtttgtttttgttttttgctgttgttttttttttcttccagataatctatacctgggttatctagaggaattaggggcagacgagtagcttatcccagtctgccctaatcatgggcatccacacaggtcag

SEQ ID NO: 516327 - DNA, 597 bp, Homo sapiens
ttgctttttctctacacaaaccacctactacaataacaacaattgcttatgctgaaaatcagcccagtctcatagctctggaacctctctttgtccccttccagataaccacaggacactttattttacacttttgtcataatgattttacactctcatttttaaatttagtattctttgtattctttcgggggggggggtaattaaccctaaattcttgtagagaaattaagttcttagagtagatttctgggttgcttgttttcttccattgacgtttcacatgacattcctgtccaccgtcacactgcttcagttgttgcagatgtgtattttcctatctaatgggattggtgctcctctcattagccgtcatcagaaatgtcttttattttcctatctaatgggattggcgctcctctcattagccgtcatcggaaatgtctttgcttttcttacctgttttgtttgtttttgttttttgctgttgtttttttttycttccagataatctatacctgggttatctagaggaattaggggcagacgagtagcttatcccagtctgccctaatcatgggcatccacacaggtcag

SEQ ID NO: 516328 - DNA, 466 bp, Homo sapiens
tgaattggccactcttaattcatggctctgaaaatggtaaaaacggccattgattgagagaaacaggsaaaaaagagagtagtggggcaccaatgccctgactaccccaaactctcactgctgcccactaatctgccatcctgggatgtggggcaggatggccgcaccgtgtgggcatgctctcacgggacaatggaggtggtgttgctgatcgacacgtagccagcgaggcaacatggccacactggctttcttatcacagagcccacgttcacaaaccatcttggggctcgccctcctttccttaaatcatcaccacagggaagcataaaaaaatctctgtacattatcaagtttcagaatccccttggaattttgctttgaactaaatgaagtctcatttaggaagaatgactgtctttaaaacagtcttcctatcatatagaaatacattaggaatctccat

SEQ ID NO: 516329 - DNA, 526 bp, Homo sapiens
aataaaacttttctcagcacatggttaaatcaacacaataatgaataagaatctgggccagcttcactagatattttgtccatctggaattcaactgttaccatgaaatttcctgtcatcatcctcatagagattcctttactccattgttagatttttgtgttttctatattctcatatcttctttttttctctcattgattttggtgtgtcatattctacaacatatttctataaatgacaggtgaatattttgagacattggtggtcagaagatagctcaaatttatsttgacacttcgttgatatttcggctgcagtaaaattctgctcggttgatcattatttcttttcagaattttgaaggcatgacttcatagcttggttctttgtgttgctatttagaaggaagacattcttatttttgattttatatgagccttcctgtactcccctttctgtaagtctatagaatttcttttctctattatttggaaatgtcatagtgatgtaccttagagtacaa

SEQ ID NO: 516330 - DNA, 526 bp, Homo sapiens
aataaaacttttctcagcacatggttaaatcaacacaataatgaataagaatctgggccagcttcactagatattttgtccatctggaattcaactgttaccatgaaatttcctgtcatcatcctcatagagattcctttactccattgttagatttttgtgttttctatattctcatatcttctttttttctctcattgattttggtgtgtcatattctacaacatatttctataaatgacaggtgaatattttgagacattggtggtcagaagatagctcaaatttatgttgacacttcgttgatatttcggctgcagtaaaattctgctcggttgatcattatttcttttcagaattttgaaggcatgacttcatakcttggttctttgtgttgctatttagaaggaagacattcttatttttgattttatatgagccttcctgtactcccctttctgtaagtctatagaatttcttttctctattatttggaaatgtcatagtgatgtaccttagagtacaa

SEQ ID NO: 516331 - DNA, 526 bp, Homo sapiens
aataaaacttttctcagcacatggttaaatcaacacaataatgaataagaatctgggccagcttcactagatattttgtccatctggaattcaactgttaccatgaaatttcctgtcatcatcctcatagagattcctttactccattgttagatttttgtgttttctatattctcatatcttctttttttctctcattgattttggtgtgtcatattctacaacatatttctataaatgacaggtgaatattttgagacattggtggtcagaagatagctcaaatttatgttgacacttcgttgatatttcggctgcagtaaaattctgctcggttgatcattatttcttttcagaattttgaaggcatgacttcatagcttggttctttgtgttgctatttagaaggaagacattcttatttttgattttatatgagccttcctrtactcccctttctgtaagtctatagaatttcttttctctattatttggaaatgtcatagtgatgtaccttagagtacaa

SEQ ID NO: 516332 - DNA, 560 bp, Homo sapiens
gttattgaagaagtatttgctctaaatctctctggyattttgaagcacctacatgtacgaaggggagaggtgtgtctgcacatgtgtgtatgtgatgcgtacttatgctggccagcatagtactgtggtgtacgtatgctggccggcatagtacatatggtgtgctgttcctccaacacaccacgtgtcccctgggctcaggtctcttttgtttactttttctctgcctgcaatactcccctgaaggtgactatatggtttgttcctttcacaactttatgcattgctcaactgtcaacttcttagtgaggtgtcactggaccaccaaattttaaattacaaccccaccatcccaggactccatacccttctctgtttcatttttttcccatagcacttaatgccttctactgtatgacttattttttattttatatatttatattaaatataacattttgttctgttctctaacaccaatacacctggtacatctagatgcgtgtgaaaacattttttgaatgaatgaatacacttgaggatgatgcaaatgatgtcag

SEQ ID NO: 516333 - DNA, 657 bp, Homo sapiens
atgacaattattgtcttttggattatctgctgctgaaagaagtgtttttgtgggaagagggagtcagaaaatgtacggagatccatgtgatcctggacaagccttgtggtgtgtgacagtggggaaatcttggcaggcagaacactatcaacataggatgagatggtatttgagagagagtggtagagataccaaagatacaaacctatcaagtgccagctcggatctgctatgccacagaaaagaaagcttaaccttttttgaaagcaaagtgctacctatgccagagaattamaggacttttctgcagtaattctatctgccctaggtctcctcagaagcatgactttgtaaaatcattgcacaattattgggggtgggagtcgtgaggcagaggagaggtatcgggacagggaccactacatggcagcaaatttacttgtagattagattgcttaggcacctattgaagattgtacaactaaacaacaacgtaagtgcaccaagcaatctaaggcaacatttctcacagcatggccttggatcaaaactttgacattgacctgcaatttttataaacacttgcagcccagaggctactcaatctgtattcctacgggtgctacctgataagcaacatatttaacaaacttccca

SEQ ID NO: 516334 - DNA, 480 bp, Homo sapiens
tttgagagagagtggtagagataccaaagatacaaacctatcaagtgccagctcggatctgctatgccacagaaaagaaagcttaaccttttttgaaagcaaagtgctacctatgccagagaattaaaggacttttctgcagtaattctatctgccctaggtctcctcagaagcatgactttgtaaaatcattgcacaattaytgggggtgggagtcgtgaggcagaggagaggtatcgggacagggaccactacatggcagcaaatttacttgtagattagattgcttaggcacctattgaagattgtacaactaaacaacaacgtaagtgcaccaagcaatctaaggcaacatttctcacagcatggccttggatcaaaactttgacattgacctgcaatttttataaacacttgcagcccagaggctactcaatctgtattcctacgggtgctacctgataagcaacatatttaaca

SEQ ID NO: 516335 - DNA, 364 bp, Homo sapiens
gctggggtgcctggagcagtcggcagagggggtagagttcacagtggaagttttgtccccattgccagcaggggagggagaggcagcaatgacaggagcagtgaccttggctaccccccacaccagggcaatgggaaaaggaatgttgtgctgggaagaactattaataactcgtcacggtcacagaacgcaacacaaactcattggscagctcaattttctgcctgtttaaagtgattagtggttctgcgggggaagccagaaaaaaaaatttttatatggagcaataaattcctctataagccacaaaaccctacaaatttgcagctaataaacccacaaatgtaagatgattaagaactgg

SEQ ID NO: 516336 - DNA, 513 bp, Homo sapiens
gctgttaatctagtgaggagtggctcctatacccggcagctatggagggatgaagcaaaaggaaatgaaatcccacagacaattgctccctccacctatgtatcaacttacttgaaaaggtaccaggctcaaagggggtgggagatgtttctttcactctagccatgggaaatgggtaatgattgtatgcctttttatgtccaattaacaccgcagaaatgaatcaaaatgaattactttcaggtttcttagaattaacatcttgaataatttaaaatttattatcttaataattgaattaaagtaagctaatttcagattctcactacagatctggctttatactttatcctytccatcctattaaaactttcaatcagaagtggctttcagtaatctctgggcaagactgaatttaagttatccttgtccagtagctggttctccttatctgaaacagagtagttctcatcccatgtgctatttttggggggaggaagggagggacactat

SEQ ID NO: 516337 - DNA, 497 bp, Homo sapiens
ctttattacacaaaagaggtgtttcttgctttatgaggctatcacctatttgtcttaatggctaaggccttggtcttcctggatgcattattattcattatagttgaatccaagatcaagaaaacttttctaagaaaacaatgttctagatcaagggaagggagaaagctgccatttaatttccaggcatggagttattctgtggcgaggttgttgatttttgtgatccaaataatcagcaaatgggttgagaggcatttggtttgatagatgtagtttggcaaagttacggtgaacagtgaagggacaggctgcctctatttaggatcaaaagcatgcttaatgatatgagcactttttgaggaaaagatgtacaacttgcttcatatcttggatttccaaagcttttctcctgtaaccytaaagcattttttgattttataaaaacctcttatggtctttttaaaaggaaagaatcatatgccatcaccatttaa

SEQ ID NO: 516338 - DNA, 635 bp, Homo sapiens
ctgtgaggctgggctggttggcactgatttctctaggctcactttaggattatttaatatggaaagggcaacagtacttgttagtttgctgctcaaatatagttcctgagtgtaagtcacttaggctttaagagaaattagcactagttgggaatcagaaacagaaaagacttctaagacttccttatattccctgttttgtctaagtggtgtcacaaatcacccayggtcctaagctcttaacaatctccatgttatcctttctcaccactgacattctaataagtgaccctttctgttcattttacctcaggggtacttctcaaatccatgtcctccccagtgtcttagctgccagtaccttacttcaagacctcatcctctcttgcctagattacaatttcctcactggtgtctctcatgagtttttccctcccagtggttcaatcttcatattcctactgcaattatcattctaagatacaattctgttagtatcactctctggtttaaaaacctcaatacctccctgttgtcttcaggataaaggtgagactctttatcatggatggaatatagggaccttcatggctgtcaacgtatcctaccagccacaattccttctattttccact

SEQ ID NO: 516339 - DNA, 634 bp, Homo sapiens
tgtagattggtgccagtccatgatttgcttgttactggtctgtcaagagrtaagtatagaaattgagaggaagtgtttagaaacttttatagtagttggatagagtaattttatctttttttagacctagaaatcaaacatttgggcttgtgttttatatcttgggcttatagtaagacttttaatttcatttttctagttatttttactggttttaaaaattagcttatttctcattaatttttgttagcattttagtaaagtgtcagtatgtgatgacttggaagtaggaaaaactggttcttccctataggtagtttgagaagcagttctctggatcttgccactaatttaagagtaaatatttgaaggagacaagtgtatcacattcatgggtgatatgataatgttatatatactgagaagagccagggatcgtttagaaactagtagagctaataaaaattcagtcaagtgaattcccaagctaaagctgaagtgaatgcttcagtaggtcccatgaatcggcccagcccttgcgtgcaccaagtttggcccctctagcatcgccgccacgaagaaagtggctcaacagctttggctgaaggcccggctcaactgtgtaaaaatttcc

SEQ ID NO: 516340 - DNA, 600 bp, Homo sapiens
catatgtaggtgctttaaagtattatatacrtaagtaaataatcaattttcagcattacccagcatttaatatttgaaactttacagtcatacaagatagctttgcttctcctgatttgcctttgctgacctgtttgacacaagaccaagaatttgcgcctgattctttatttcatcaaagtgaactaagttttgcacctctgaggtaggatgatttatttgcatgtaacctttctcacttcttgttctatgtttttactaatattagtgacttcaggctaaggtgggactttgaggtggggcttagatactcttaggacacgccctgaaggtaacaaagtcctgtactaagacttgatgcatattaatttggcagagtaacgtatgtgtagagatgaaccagatgacagtagtttatttaaaaataattcctaatatattcaggcatttcaggcatattttaatttagaagacacactggattttccttcttataaacctccccatctgctgcccatcatctctctcctccctctcacccttattctgcaaaaagcatttatttcttgttcactaacttgtttggcactctcattttgt

SEQ ID NO: 516341 - DNA, 441 bp, Homo sapiens
tgcgcctgattctttatttcatcaaagtgaactaagttttgcacctctgaggtaggatgatttatttgcawgtaacctttctcacttcttgttctatgtttttactaatattagtgacttcaggctaaggtgggactttgaggtggggcttagatactcttaggacacgccctgaaggtaacaaagtcctgtactaagacttgatgcatattaatttggcagagtaacgtatgtgtagagatgaaccagatgacagtagtttatttaaaaataattcctaatatattcaggcatttcaggcatattttaatttagaagacacactggattttccttcttataaacctccccatctgctgcccatcatctctctcctccctctcacccttattctgcaaaaagcatttatttcttgttcactaacttgtttggcactctcat

SEQ ID NO: 516342 - DNA, 360 bp, Homo sapiens
ttattgaatgagactagttagctctccttaccttataggaggtgtcaatatgaagtaagaagatttttatgaacagacatatccaaatgaacagatactccaaattcatgtcctttagaatagtcataatgggagaaaagtctggaattttcaaaacatatttggaattattcaagaatatgttttcttcytttagaattgaaaacccaccttaaattaaaaactatagatgtttagaaagtaaaaagtaacctctgtccttatactatatatttacctgatatcacttttatgaaaagtgatctatacacattagatcatcaactaatgattaagttactgttgtgttttgggaataga

SEQ ID NO: 516343 - DNA, 492 bp, Homo sapiens
tttcaagagcacaataaatgatgactagtaaaaaagttaacgcaggttaaatgaaaaatcatggtaggcgtcattatgaaaatcacattctgtgtctattgttttaggagaagtctgagataatatcagggttatagggtggtagttcaccttttagttaaaaagaatttgctttrctcagtcattagccatcttagaagagtctgaaattaggagagctgtgtttttcaatacacttttcaaataaacttgatttcagtgacatatgtatttttgtgttagtacttaaaaattaaatgtttttaatgttatttatttatttatttttaactatatattttcaggggaattcctgataagtctgaagatactgaatggtcttctcgaccatcggaagttagtgaagctttattccaggctactgcagaagtagcttcagacttagcaagcagtcgctttagtgtatctcagcacccgcttataggcagcaca

SEQ ID NO: 516344 - DNA, 604 bp, Homo sapiens
aatccatgtggcagacagaactgatgggactattcttgattcctacacttcctggtgtttaaacctttgtataattccctccccttgcacgtgaactggacctatgacttgcttctaatcaatgaaatacagcaaaggcaatgggttgtatgtgattacatgtacacgattatgtaagaacatagcaccagttcacctttgatagactctcttcctttgctgactttgaagaagcaagctgctctgaacctaacagacacaaggaaataaattcagccaataacccaaggaagtctgggggcagacctttccccagttgagtctctagataacaacccagccctggccaacactttgactgcagtcttacagaggacacagctaagttgtgcccagcctcttgayccatagaagttgtgaggtaataaatgtgttgcttagaacagctaaatttgtagttatttgtgaacaagcagcttagaacatgaataaaataaaataaaaaaaaagaaaatgaataaaatcagaacctaaggtatttctgaactctttgttcacaaaaaggcctatgttttgtccaatttctaaacaaataaatgtcatg

SEQ ID NO: 516345 - DNA, 604 bp, Homo sapiens
aatccatgtggcagacagaactgatgggactattcttgattcctacacttcctggtgtttaaacctttgtataattccctccccttgcacgtgaactggacctatgacttgcttctaatcaatgaaatacagcaaaggcaatgggttgtatgtgattacatgtacacgattatgtaagaacatagcaccagttcacctttgatagactctcttcctttgctgactttgaagaagcaagctgctctgaacctaacagacacaaggaaataaattcagccaataacccaaggaagtctgggggcagacctttccccagttgagtctctagataacaacccagccctggccaacactttgactgcagtcttacagaggacacagctaagttgtgcccagcctcttgacccatagaagttgtgaggtaataaaygtgttgcttagaacagctaaatttgtagttatttgtgaacaagcagcttagaacatgaataaaataaaataaaaaaaaagaaaatgaataaaatcagaacctaaggtatttctgaactctttgttcacaaaaaggcctatgttttgtccaatttctaaacaaataaatgtcatg

SEQ ID NO: 516346 - DNA, 592 bp, Homo sapiens
actgcattacatgaaacttcatacacataaatgtgttttatttttctatttgtcttagaattattaaaataaattttcatacaaatactatatgtattttgttagattcattcagattctatgcatttttcttcctaatacataaggcatatttttaaaaaatgttttctgtttgttgccaaagaatagaaatgcaattgatttttgaatattaaacttatatctagccatggtattgaattcttctaattcctaataatttgtcaattattttattctttctaggtaaatactgatactataataaattttccttctgyttctttccttttcctattatttacttttcttgaattactaggctagtttggactttaataaaacgtgaaaaagcacatttatctttatcttgattttaaacagaacactctaaatactttattataggtaagactaatgactgctgaataattttacagggttgagaaaactgttatttctactgtgttacatgttttcattacaaatgggtgttcaattttatcaattttattttctgcatctaatgggatgatcataagattttttctct

SEQ ID NO: 516347 - DNA, 462 bp, Homo sapiens
gaaagagaaggaacttctgatgctagaaaaaagatgaatttttaaaaatacaatattcattagcagagagccaccacccctggcagtctttataagtgcctgtagaataaggtcacaactataggcttgtattgtaaagggagggcagcagaagaggccttgggtctatgcaaggtaagaagttggaattgagactaatacataaagctagggtcctcaaaaactatacctgcagtgctatggacttgagtatttgtgtccacctcaaattcatagactgaatctttaatccccagtctgatggtgtttggagggtgggcctctgggaagtaattgagtcatgagggtgaaaccctcatgaatgggattartgtgtccatattacaagagactagagagttgaggtctctctctaccatgtgaggacacagtaaaaaggcttctgtctgcaaaccacaaaaa

SEQ ID NO: 516348 - DNA, 633 bp, Homo sapiens
ctgggaccttgattttgaacagctcagcctccagaactgtgagaaataaattcctgttgtttaagccatcctgtctgtggtacttttgttataacagcccaaactgacttaagacacacagtgactaagaatacttcacctaccatctctacaagttgataggttatttttttattcccaagtttggggtgaaaatagtgctcacatgagaaactgaattcttggacttgtatattatttagacttggattcgaattttgtatcatttagttggtgtagaaattcccaaagtgagccaggattactaaacttccaataggaaaatataaatgtatcagattattcattgcaacattgtttgtaaatgcaaaatttaggaaacaacctaaatgcccagatataggagagtgactaaattacagtaaatccaaagcagaacactaggaaactaccagaaagaatgaggaaaatctctacraactgatatccagaataggttgttaaatgaaaaaaaaaagtgcaaaagactatctttaatacaagaagaggagatttaaaaaatatacatgtaacagttattagtactcaaaaaagcccaactaaatgaggtcaaccagaaaactagtaagattt

SEQ ID NO: 516349 - DNA, 628 bp, Homo sapiens
cattctctgcttaagtcccagaatttagcagagatgcttttttttttttttttwaaaaacagggtcttgctctgttgcccaggctggagtgcagtggtgcagtctcagctcactgcaacctctgcctcctgggttcaattgattctcatgtctcagcctcctgagtagctgggactacaggtgcatgtcaccacacctggcttgcttgcttatttatttatttgatgtagagatggggtttcaccatgttggccaggctggtcaactcctgacttcaagtgatcctccctcctcggtctcccaaagtgctgggattacaggtgtaagccactgcccccagcccatgtatttttttatgtatattttttctgtcctgaggagagatcccctaccttcactgcctggttctctattggagtccatgaaatacgtaatactcctgcctcgaatcctgattcctcctgatcatctcacagcttgaatgtcatgccagtgttggtcttccctactttttctgctgtttgtttgttcttttggaattgcaatcttaagtgcatttacagacagtgctgcagtgggggaaatgtgaatggcactctcatcaataccaaaggcacccaggagagac

SEQ ID NO: 516350 - DNA, 608 bp, Homo sapiens
gaaaaaggagatgtcctgtttccagctcttcatgtgcacgtttgatttgccagcttacactggaaactgttcaagggaggggaccattgcttcgttgaatctcttgcacagaataggtgtgtaatayacattgagtgattaattaattggctatttattggccatttttttgtgatggattatgtttttctagaagcttttctagtaaatctgtagcctaggtgcagtgaagaaaacataaaggcagacttcaggactgagagcgatcccctctcagttcacccttcagtcttcagataaatttttactataattagctgaacaataaaaaaatttcctagtgaaatctggcttttcctatttgtttcgtacataaatcttgactcaaacatcacattattataagttccagagcaatgtcctattccccagtctctggaaatattcatataataaatatccctaactattcaactctacaatttagaaaaatcttgttccaaaagcacatggagtatctgtgctccagagtgaaagaattatgacatgtccatattaattcactgtgactcaattgaatatcatgtaggattatgttctgtttaggc

SEQ ID NO: 516351 - DNA, 608 bp, Homo sapiens
gaaaaaggagatgtcctgtttccagctcttcatgtgcacgtttgatttgccagcttacactggaaactgttcaagggaggggaccattgcttcgttgaatctcttgcacagaataggtgtgtaatacacattgagtgattaattaattggctatttattggccatttttttgtgatggattatgtttttctagaagcttttctagtaaatctgtagcctaggtgcagtgaagaaaacataaaggcagacttcaggactgagagcgatcccctctcagttcacccttcagtmttcagataaatttttactataattagctgaacaataaaaaaatttcctagtgaaatctggcttttcctatttgtttcgtacataaatcttgactcaaacatcacattattataagttccagagcaatgtcctattccccagtctctggaaatattcatataataaatatccctaactattcaactctacaatttagaaaaatcttgttccaaaagcacatggagtatctgtgctccagagtgaaagaattatgacatgtccatattaattcactgtgactcaattgaatatcatgtaggattatgttctgtttaggc

SEQ ID NO: 516352 - DNA, 472 bp, Homo sapiens
gccgaggtctggattactgcagatctagggtgcagctaaagagcttggacttttcctgtaagacacagagaaatattgctgcctgacttgacctgacatatcagcattaatctgacacttccctggctacactcaatgacttgtcagagagtacatttccgaggctcctgcagtgatgaaggccagacatagcccargcctgacccagagagagggcagtggatggagggaaaggccagccttggtgcaaatgctgtgttctcacactgtgcacgtagttcggctcatgacctcttctgtgcaggggatgaaatactagccttgaaacaccagatcccttattagcctttgtccctgggcaagaagaatggagattccagggcatttgctttgtttggcttgttgagtgattatcagttttctgtttctgttctctcaccacaccctctgactcaccctgtgtgctataggc

SEQ ID NO: 516353 - DNA, 518 bp, Homo sapiens
ccaggccgaggtctggattactgcagatctagggtgcagctaaagagcttggacttttcctgtaagacacagagaaatattgctgcctgacttgacctgacatatcagcattaatctgacacttccctggctacactcaatgacttgtcagagagtacatttccgaggctcctgcagtgatgaaggccagacatagcccaagcctgacccagagagagggcagtggatggagggaraggccagccttggtgcaaatgctgtgttctcacactgtgcacgtagttcggctcatgacctcttctgtgcaggggatgaaatactagccttgaaacaccagatcccttattagcctttgtccctgggcaagaagaatggagattccagggcatttgctttgtttggcttgttgagtgattatcagttttctgtttctgttctctcaccacaccctctgactcaccctgtgtgctataggcgtggacttcttttcagagctttatagcaaatttctttttctt

SEQ ID NO: 516354 - DNA, 556 bp, Homo sapiens
gctgaaaaaaacacactagcaaggtggcagtgttatttcaacaggatctcccacaccttatggctacttttattcagagtatagtgcaatttctccttagtgaattaatcttttttttttttttttttttttggagacagagtctcgctatgtcgcacagactggagtgcaatggtgcgatctcggctcactgcaacctctgcctcctgggatcaaccrattctcctgcctccgcctcccgagtagctgggattacaggcacctgctggctaatttttgtatttttagtagagatggggtttcaccatgttggccaggctggtctcaaactcctgacctcaggtgatccacccacctcggcctccccaagtctagcattacaggtgtgagccaacacgcccagcagaattaatctttcaatagaacttcttctgtaccattcagcaaaataaccccactcagatccaacctaccatctataagtgattagagataagtgtgttttgtgcatttctgaatattctattctaatgtgctctctagtcacaaataagca

SEQ ID NO: 516355 - DNA, 440 bp, Homo sapiens
ctgttccctccggcagtatgttccattctccatggctcctaattagtgttcaacttggtctttttttcctaytctagcttaagatgcatctccttgactccatccaccccatccaatacatgtgtcactgcctctgctcctgagcctggctgtgtgtctacccattataggctggctcaaccaagctcaatccaggcactgctaaagaggccagaaacgatgccaatggacatgctatcaatggcacaaggtatgtcagagctagatttgtattcattttttaaaaatagatattacatttcttttctattatttaagaaagaaaactcaaagtgcttttcaaacagatgtataccccagtgtttattgaagtagaatccataaaaaaactacaaagctaaacttgtattatatttattttcttgagctggggggagtat

SEQ ID NO: 516356 - DNA, 440 bp, Homo sapiens
ctgttccctccggcagtatgttccattctccatggctcctaattagtgttcaacttggtctttttttcctattctagcttaagatgcatctccttgactccatccaccccatccaatacatgtgtcactgcctctgctcctgagcctggctgtgtgtctacccattataggctggctcaaccaagctcaatccaggcactgctaaagaggccagaaacgatgccaatggacatgctatcaatggcacaaggtatgtcagagctagatttgtattcattttttaaaaayagatattacatttcttttctattatttaagaaagaaaactcaaagtgcttttcaaacagatgtataccccagtgtttattgaagtagaatccataaaaaaactacaaagctaaacttgtattatatttattttcttgagctggggggagtat

SEQ ID NO: 516357 - DNA, 513 bp, Homo sapiens
tccggtcttcacccactagcagatctcactggggcctccaaatgttgtaaccaagcaagttatagagaaacgccacactctgagactaattcaggagttcttttattgccagtgaccgagagatggctagagctcaaaattctctcagccccgaagaaggggatagatttctttttataccgtggtctaaatagggcagggggagcctagctgaagcaatttttacagaagcagaacacgcaaaaagttaaaaaaaattaatggttacagagatagttacagaaaaatacacagttccaggtgcaggggcttaaactatcacaaagagataaatgcaggggcttgggtaccatccactgagcacgtccccaggagctgctggtacagcttgcctcaatatcttatcagtaagtgcattcctggatgtgcttggartcagcttgcactagttattcccttaagggagggggataaggggactgcaagtgaagaggctaaaatggagtctgtcca

SEQ ID NO: 516358 - DNA, 513 bp, Homo sapiens
tccggtcttcacccactagcagatctcactggggcctccaaatgttgtaaccaagcaagttatagagaaacgccacactctgagactaattcaggagttcttttattgccagtgaccgagagatggctagagctcaaaattctctcagccccgaagaaggggatagatttctttttataccgtggtctaaatagggcagggggagcctagctgaagcaatttttacagaagcagaacacgcaaaaagttaaaaaaaattaatggttacagagatagttacagaaaaatacacagttccaggtgcaggggcttaaactatcacaaagagataaatgcaggggcttgggtaccatccactgagcacgtccccaggagctgctggtacagcttgcctcaatatcttatcagtaagtgcattcctggatgtgcttggaatcagcttgcactagttattcccttaagggagggggataaggrgactgcaagtgaagaggctaaaatggagtctgtcca

SEQ ID NO: 516359 - DNA, 547 bp, Homo sapiens
gatcactacagctccccttgactaaytccctgccctacaagactcggcccagacatcagtgcccctagaaagcctaggctaacttttctgcacaacacacacctaggatgggtcagatgtgcctgctgcaggctcccgcccacctgtcacacctctctcacaccacacactttgcaagtatttgttcacctgtctccagtactagactctgagcttcttgaggtcaggcactgtcttaccacgacgtggcttcagtgccaaaaacatagtatattcacagtttacaattactgaagatttactctaagctagttgctgttctaagatgttctgcatatatcaactcattgaattttcatatcaagccaaaggaggtactattaatatcccacttttactggggaggaatctgagacagaaataggttttgcgacttctccagtgtcatttgaaaatggcagggaagttggggttcaaagccagaagtctgactccagagcccaccctctaacaagctagacatattgcctctttacagtgtatgata

SEQ ID NO: 516360 - DNA, 550 bp, Homo sapiens
ctggatcactacagctccccttgactaactccctgccctacaagactcggcccagacatcagtgcccctagaaagcctaggctaacttttctgcacaacacacacctaggatgggtcagatgtgcctgctgcaggctcccgcccacctgtcacacctctctcacaccacacactttgcaagtatttgttcacctgtctccagtactagactctgagcttcttgaggtcaggcactgtcttaccacgacgtggcttcagtgccaaaaacatagtatattcacagtttacaattactgaagatttactctaagctagttgctgttctaagatgttctgcatatatcaactcattgaattttcatatcaagccaaaggaggtactattaatatcccacttttactggggaggaatctgagacagaaataggttttgygacttctccagtgtcatttgaaaatggcagggaagttggggttcaaagccagaagtctgactccagagcccaccctctaacaagctagacatattgcctctttacagtgtatgata

SEQ ID NO: 516361 - DNA, 331 bp, Homo sapiens
atctctactaaaaatacaaaaattagctgggcgtgatggtagaagcctgtaatcccagctactcggaggctgaggcacaagaatcacttgaacctgggaggcggaggttaccgtgagcagagattgtgccastgcattccagcctgagtgatagaatgagactctatctaaaaaaaggccaaaattataatttatggaaggaatagatttcaggcgtctgtgctccccacttccacttgttcagggccccgttatagacctgggtgggatggatccatagcaaggtgatctcctaggacacggtggtgggaccatctgtccccagctgttt

SEQ ID NO: 516362 - DNA, 519 bp, Homo sapiens
cttcccaaatctctgacaaattcttctaaaatcatctgagaacttcatctgaagagaaaattaagaaagagcggagaattgtggtgaggtctgaacccagatygtgtggagctcgaaagcccttgagtgggtccacactggtagggggcccctgacgggcgctcatgccttgctcactgcttttctcaggagtctccctgagacttcccatggagattaggcagggcaccctgcactcctctgggaaagcaaggaacactcaagggttgatgtcttctttcccagagaaggggggactgaggtgagctgagacaaatttggtcctagtgacattcttccctccctattttatggaaaagggtgagatttgctccaaatagtggaggcagagttgatggcctgggcttccaccctgacagacacagtgtgaaagactcgatttatcaacttgactcacactaaccagcatagcaatgagcatacacctgagacgcagcatggcacagtgaggtaaagtaa

SEQ ID NO: 516363 - DNA, 519 bp, Homo sapiens
cttcccaaatctctgacaaattcttctaaaatcatctgagaacttcatctgaagagaaaattaagaaagagcggagaattgtggtgaggtctgaacccagattgtgtggagctcgaaagcccttgagtgggtccacactggtagggggcccctgacgggcgctcatgccttgctcactgcttttctcaggagtctccctgagacttcccatggagattaggcagggcaccctgcactcctctgggaaagcaaggaacactcaagggttgatgtcttctttcccagagaaggggggactgaggtgagctgagacaaatttggtcctagtgacattcttccctcyctattttatggaaaagggtgagatttgctccaaatagtggaggcagagttgatggcctgggcttccaccctgacagacacagtgtgaaagactcgatttatcaacttgactcacactaaccagcatagcaatgagcatacacctgagacgcagcatggcacagtgaggtaaagtaa

SEQ ID NO: 516364 - DNA, 440 bp, Homo sapiens
taactggccaataatgaaaaatacatttcattattgtgccagtgatcttttttttttttttttttgagacagagttttgctctgtcacccaggctggagtgaagtggcgtgatttccgcttactgcaacctccaycccctgggttcaagcgattctcctgcctcagcctcccaagtagctgggattataggtgcctgccgccatgcccagctaatttttgtattttttgtagagacagggtttcgccatgttggccaggctggtcttgaactcctgacctcaggtgatccacccgccgtggcctcccaaagtgctgggattacaggcatgagctactgcacccagccatgtgccagtgatcttgactgaacattctaactatccttgtgactgatggggtaggtaaaaagacagcacaggtgcatattattattttcctt

SEQ ID NO: 516365 - DNA, 440 bp, Homo sapiens
taactggccaataatgaaaaatacatttcattattgtgccagtgatcttttttttttttttttttgagacagagttttgctctgtcacccaggctggagtgaagtggcgtgatttccgcttactgcaacctccaccccctgggttcaagcgattctcctgcctcagcctcccaagtagctgggattataggtgcctgccgccatgcccagctaatttttgtattttttgtagagacagggtttcgccatgttggccaggctggtcttgaactcctgacctcaggtgatccacccgccktggcctcccaaagtgctgggattacaggcatgagctactgcacccagccatgtgccagtgatcttgactgaacattctaactatccttgtgactgatggggtaggtaaaaagacagcacaggtgcatattattattttcctt

SEQ ID NO: 516366 - DNA, 544 bp, Homo sapiens
cccactggtgcttatcaaaggaatttgaagattgctttgcagtagtcactaagcgtgtcttttccttgtatttgcagacatcctccgggaattcaacccttccctgaagggcttctctgttggcactgggaaagaaaccagtcctaatgccttcttaaaccaggctgtggcaggaggccgagctgagtaagcaggggtgaccggggcggtgaacagcacaggtcctctgaggaccaggggtgggcttggcctaaactgggtttatggctgaaggttgaagggctttgtcagaggaaagggtttcrgggccaaagcctggacagagctctcttggaggtgtcacagaaatctgtgagcctaccctaacacccacccccagaaactagtcacaatggactctgatgccaggcatatgctctgagcagattactttgcctgtctgtaaatctcacttaagacataggttataagcaggctcactctgcgtcccagttgtcactgctatgtcactgctgtttcagagtcctgctctccctcccttcct

SEQ ID NO: 516367 - DNA, 583 bp, Homo sapiens
caggagtttgagaccagcctggccaacatggtgaaaccccatctctactaaaaatacaaaaattaactgggtgtggtgacacacagctataatctcagctacttgggaggctgaatcaggagaattgcttgaacccaggaggcagggttgcagtaagctgagatcgtgccgctgcacttcagcctgggtgacagagaaagactccatctcaggrgaaacaaaaaggaaaatagtcacactgagaatcaccccctcctacgtgcagtgctctggccttcccaagcacagtcaccaccccacacccccgcagtggagcctgaatggggaagaagctctgcgacacggccttcagtccattttcctgcaggaggcccaccctgggccttcctccaccatacatttgattgctgttctctctgctaagggcccctgccagtccccactcctcacagcacttcctctggtatgtttccacagggatctacctgtccaggccaggaggctggtggacctgatgaagaatgacacggtgggtccctgggatgggaagtaggcaggaaaaatccctggacacagagaagat

SEQ ID NO: 516368 - DNA, 355 bp, Homo sapiens
gctgcatttcagcacacatgagccagtgtgaaacagagtgtagggagggaaggggcacggcctccgacagtccctggcactggaaacctactgtctgtcctttgaagaaggcatttgagttctctgaacagggacgtctctcagtgtgcctggcacttgcggggactatgtccccagaaatccactttgctgctgatctcccatgatgggcagagaagaggaacctggcccctccagcagggactgctctcccaagccstctctcagggagaggagggctgatgattccagctcagccaaacctctcctctcctgccatctttctcccaaccaacaaaaggacacctgtgacatg

SEQ ID NO: 516369 - DNA, 589 bp, Homo sapiens
gcagcagcaagggcaggaagaggcctgtctgataagagaagagatacggagataaggctcccagcgtgaaaggagcccttgagcaccagacagagaagctggagagggcaggtccagggagagggctggattcctatccctttctcctttcatcatgctatttgtccttgatattggtggcaatagcaataataaccacctttacagagctgccaggtgatggtcccatgcatacaaataaggtacaccccacgtacggtctcttaaaactactcgagggtcagaatgagcacgtacacaggaatggaaggtctcaccctcaaggccaaaggcctgcgacacagagagtgtcacaagggcttagaagaggaggaggatgtggctttcctaggtaagcagtgacctcactctctccacacccatacaagtccggtttcccagtgccagtgcaaaccccaagcttcctgcagcctcagccagcagggacatggggggcagggagagacaggataggagggggttccccaagcatccccagtccctcgtttcctcacaagcaaaatgccagaccatyccacagttcccggat

SEQ ID NO: 516370 - DNA, 586 bp, Homo sapiens
aacaaaacgcctgtgaacagtggggaaggcggggattgcttctccctggggaattgaggggaggcctcatggacgagggggctttgagcagaactgggaaggtggcgagacagggcattctacatctcctggctgtgtttcagtgcctgacatgggtaggccctcagtaacacgggctcagcactgaaagcggagccaatgctggggaagcacagattctgcgcagggcctggctggactctgagctgcccatcctggttcatggctcactactcacagtcagagagtcacccagggcggccaccactttgatgtctgctggtcggagctggtggactaggggagacaagcagagaggtggttgtgggggctgggggtatctacctcttaaagtacacattttaccagaagtctataactctgtcccactgctccccattgtacttattttcagcttaaggctttagcagttttgcccctcccattcattcagaycaaccaaggcactgcagggaatgggttccatggctatcatccaccctcagaagagcctgattgacattggggtggtccaggaaagttccag

SEQ ID NO: 516371 - DNA, 586 bp, Homo sapiens
aacaaaacgcctgtgaacagtggggaaggcggggattgcttctccctggggaattgaggggaggcctcatggacgagggggctttgagcagaactgggaaggtggcgagacagggcattctacatctcctggctgtgtttcagtgcctgacatgggtaggccctcagtaacacgggctcagcactgaaagcggagccaatgctggggaagcacagattctgcgcagggcctggctggactctgagctgcccatcctggttcatggctcactactcacagtcagagagtcacccagggcggccaccactttgatgtctgctggtcggagctggtggactaggggagacaagcagagaggtggttgtgggggctgggggtatctacctcttaaagtacacattttaccagaagtctataactctgtcccactgctccccattgtacttattttcagcttaaggctttagcagttttgcccctcccattcattcagaccaaccaaggcactgcagggaatgggttycatggctatcatccaccctcagaagagcctgattgacattggggtggtccaggaaagttccag

SEQ ID NO: 516372 - DNA, 551 bp, Homo sapiens
ttgtagtctggggtctgtgcttttgtgttcctcctagcaactgaacagctccctaatcctcagacctatctattttcttggctttgtaatttctctagcaagggattcatgtttcagcatttttttaatcttccagaaagtgttatgattatcaatatatttgagtatctgtaatgtttttctttctgcctcytttgaactgtatgtcttttcctctttaggttgggttcctgtatcttagtcattttttttttcttgtaaaacaccctcctcattccctacttacctatctgttttacaatcagttttcacataagcccagtcaagaatccaagtccccccagttgcaggtgaggagttagttaaagaaggaagaaggaagcagacaaagaagaaatggggagaaagctaatgagaaaatgtataaatgacagcaaagcaagatcaagttgataagactgagatcaggaaacagcaaccgggcccagggctgtgagcactctcacaaaatgtgctcagtggagtagtaagcccatggtctgaaaatgtga

SEQ ID NO: 516373 - DNA, 590 bp, Homo sapiens
taggctccctgacacccccatacaccctctgtgcctctctacttacagagcaattcataacgttagaattttttaaaatttggataaactttttaaaagattctcatcactaagacaagttttagaaatagtattcaaattgatcataaatcttaatttgaaaatattatagtgttctccctttcccctaaggttagagcaggattcaggaataaacatttttcatgactttttaaaacattttatataaggagaattttaaacatacacaaaactagaaaaaatagtatacacactcctcttgtacacatcacccagcctcaacaatcactagtccctggccagaccytgccctatccataccccgtccactttcttcctgtattgtttgaagcaagccctcatgtcattatcagttcatctgtaaatatttctttgtatatcactaaaagataagcctcccgcgaccccctgcttttgagaaagggtcttgctatgttgcctaggctggtctccaactcctaggctcaagcagtcctcccacctcagcctccccaagtgccgtgattatagacatgagccaccgtgcc

SEQ ID NO: 516374 - DNA, 569 bp, Homo sapiens
acttaaatttctgaagcacatttaagtttgaaaggctttcatacctcatcaaatyagtctgtagggaattttccaccagtaagacatcaaggagggtggaaaaagtatagtctatcaataatggggaaaaatgtcttgagttctcttttttgcagtaatggagaggatgggtttctccgagccacctccaggtgttgcacccaattctcttggggcccaaaagaagatctttgtgaagtagctgacagaatgaggggtatatttgggattagctgttgtccagttgacaccagagcccttcattggactgtaaccccctgaaggcagggagcagaccatagccacttctgtattctgggtcactggtggtggaaagccgtggaatggaccaactttttcaccgacacatatgactttggcccatgagataacctcttggctcctcagtttctcacctttaaaagaataacgatagtatctgcaatgacttatcaagagaattaactaagagaatattaaagcattcagttatttacctggcagtagaagctcttgatatgtgttagaat

SEQ ID NO: 516375 - DNA, 549 bp, Homo sapiens
tgctctgctctgggatggtttggaagattctcagccccccccgatttcctttctggtcccttgtttccccttcgcccagtsgcaaggcccaactgtaaactgagggaggtggcatggttccttcaactccttctcccaccacacccccagttcttgactcccagtttgggggaggagatgaggagggaagtggaagcctgtgcattatgtactcagattggaagagatgggggttctggggctgctcactgacccactaggaatctagtaaaggcaccaccgtcttcacctatcctgagaagggagacgtcatgcacacatgagggagggccaaatatgctcaagagaaagctctcaaagagttgggtgttgcagagtggaggaggagaaggaccgccataggtggatgatccctgtgtagagtgcctgcctgagaggccgggtgggggtgggggagcagaatcaagcccgcactttgccgtgagcctgggaggggctgcatctgcctgaggtttaagggctggctgtgagcctgggcagccacctgca

SEQ ID NO: 516376 - DNA, 549 bp, Homo sapiens
tgctctgctctgggatggtttggaagattctcagccccccccgatttcctttctggtcccttgtttccccttcgcccagtcscaaggcccaactgtaaactgagggaggtggcatggttccttcaactccttctcccaccacacccccagttcttgactcccagtttgggggaggagatgaggagggaagtggaagcctgtgcattatgtactcagattggaagagatgggggttctggggctgctcactgacccactaggaatctagtaaaggcaccaccgtcttcacctatcctgagaagggagacgtcatgcacacatgagggagggccaaatatgctcaagagaaagctctcaaagagttgggtgttgcagagtggaggaggagaaggaccgccataggtggatgatccctgtgtagagtgcctgcctgagaggccgggtgggggtgggggagcagaatcaagcccgcactttgccgtgagcctgggaggggctgcatctgcctgaggtttaagggctggctgtgagcctgggcagccacctgca

SEQ ID NO: 516377 - DNA, 613 bp, Homo sapiens
ctgctgatgttcccctatgggtacaaatgtaccaagttagatgactttgatgagctggtgagtttctgaaacttaatttcagccaagcaacaaacatccattgtgtggtcaagtaagtttcaggcataaagtcatgccctaaggtggaggtgtaccattacagcaatgaatgaaacataagttcaaccaccgagaagattatgatgcagccaaaggtttgaaagactgattttgaactttcctatattaagtttctttgggaaatagaattcatgaagttattgttaccttagtctagatgagcaggagcctggtttgagcataaattcccagaacatgcttttctgttgcatatgggggaaaaaacccttggatttggatatgaggcttttggattggtagtcaaatgctccaagctgagcaattctgcttctcagcaacttgtcttatacttttctgggatctttggctctgtgatctaccatgacgatgcactggtgtatgatgttgggggtaaaacactcacttccctaacttgatacsttctgtcacccttcctgtttcaggaataagccaactggccccagccttagatcagatggtgacatctcag

SEQ ID NO: 516378 - DNA, 664 bp, Homo sapiens
gcccaccaataaggtatgagactctgccattcacatcctctccaactttttgatttttgtaaattgaatgagtataaaatggcatctcattgcagtcttgatttgtgtgtcctcaatcactaatcatcctttcatatgttgatcagatatatctgcttcttctttttttttttttttttttttttggagacagggtcttactctgtcaccaaggctgaagtgcagtggtttgatcataattcactacagcctcaaactcctgggctcaagcaatcctcccacctcagcctcccaagtagctgggactacaggtgcacaccaccacacccagataatctttttccttttcttatagagacattgggggcggggtcttactatgttgctgaagctggtctcaaactcctgggctcaagtgatccttccacctcagcttcctgagtagctgaaactataggtgcttgccaccacactcagctaattttttatttttattttgtttttatttttgttgaaacaatgtctcactttgttgcccaggttggtctctaactcctgggctcaggcaatcttcccacctcggcctcccagagtgttgggattataggsatgtgccaccatgcacggcctgtgcttcctcttatgtgaaatgcttcgttatacc

SEQ ID NO: 516379 - DNA, 518 bp, Homo sapiens
tgcccggcctcttgttacatattttttaggcggttctctgggaagactgatctgctcacagttgctgagacttttttaaccatgttccacatgagattgtcctcactttcatcagggataccccagggagaagggccttctgagtggtggcagtggggacagaggatggacctagcttgagacatgatggcagcttaatactgaggaatgaatgcttttgcttggcagcctttgagtggaggctygagttcagagtgtcagccgaatagcattgtgtatccccgagacccctacataggtctcagccattttattacaaggaatctagcttttcatccaccttatctggaggtatttactagtaagatagaccttggaaggctgaggtttggtatgttttctttggtgaggtcacagaaatggaagagatttccaataagcaggtgtaggatttgctgtatgatcttttggagcccgactgtgaatggcccaccaagttctagccacatcattgtcca

SEQ ID NO: 516380 - DNA, 534 bp, Homo sapiens
ctggcctcattccagcttggacaagctctacctctaaggactagttttaactcagcactttttgcttcctgccccaggtcagtatgcagctctgggcagaacacctgcctcacyccacccaagagatggctgtatggttgtagtgggtgagatatttcctgggcagcttcccatctggaaagggctttgaggagctgtgctacagtaggtgtttggttcagaagttgttctttttttaaaaaaaaatttttttttttttgaaacagagtcttgctctgtcactaggctggagtgcaatggggcgatcttggctcactgcaacctccacctcccgggttcaagcagttctcctgcctcagccccctgagtagccgggattacaggtgcatgccatcatgcctggctaatttttgtatttttagtagagatggggtttcaccatgttggccgggctggtcttgaactcctaacctcaggtgattcacccaccttggcctccctaagtgctgagattataggaatgagccaccacac

SEQ ID NO: 516381 - DNA, 534 bp, Homo sapiens
ctggcctcattccagcttggacaagctctacctctaaggactagttttaactcagcactttttgcttcctgccccaggtcagtatgcagctctgggcagaacacctgcctcactccacccaagagatggctgtatggttgtagtgggtgagatatttcctgggcagcttcccatctggaaagggctttgaggagctgtgctacagtaggtgtttggttcagaagttgttctttttttaaaaaaaaatttttttttttttgaaacagagtcttgctctgtcactaggctggagtgcaatggggcgatcttggctcactgcaacctccacctcccgggttcaagcagttctcctgcctcagccccctgagtagccgggattacaggtgcatgccatcatgcctggctaatttttgtatttttagtagagatggggtttcaccatgttggccgggctggtcttgaactcctaacctcaggtgattcacccrccttggcctccctaagtgctgagattataggaatgagccaccacac

SEQ ID NO: 516382 - DNA, 527 bp, Homo sapiens
caggagaatcgtttgaacccaggaggtagaggttgcactgagtcaagatgacgccactgcgctccagcctaggcaacagagcgagtctccatctcaaacaaaacaaaacgaacaaaacaaaacaaaaaagtattatgacagctacaaaaaataggagagaagggattgaaaaaaatgtcagttaaaacaatttctggcggcctggtgcagtggctcacgcctgtaatcccaacactttgggaggctgaggcgggtggatcacaaggtcaggagttcgagaccagcctgaccaacatggtaaaaccccatctctactaaaaatacaaaaaattatccaggcatggtggcgggcgcctgtaatcccagctactcagaaggctgaggtaggagaatcgcttgaacctgggaggcggacgttgcagtgagtcgggaytgcaccactgcactccagcctgggtgacagagagagattctgtctcaaaaaaaaaaaaaaaaaaaaaaaaaaaaatcctttgaaagacaagaaa

SEQ ID NO: 516383 - DNA, 639 bp, Homo sapiens
gctgtggctcgtgcctgtaatcccagaactttggaaggccgaggtgggcagatctcttgagcccgggagttgaagaccagcctgggcaacatagtgagactccatctctaaaatamatgaataaataagtaaatgccaaaaaaatctataagtgaaacataaatgtacattttatctgtatacatatgaaatataaaatatgctgtaagatcaaaaatatagaataaatgtatttatcacttatataaacaaagtgtatatgactattgcaagtggactcctgtctccaggttcctagtaacatggcaatctcagttctcaaagtatgaagaaaacagcattaatctagggaaataccatacaataatgacaaatcctaagaaatcaaatttatcggcaaatttattagcttgacataattttccattagctattttaaggaagaaaatgaatatgataaattaaagttcagctccctctaatttgatgtaatcttaattctaaagtggtacttagtagcggctgtaaatgaaatgacgatgttaatgctgcaagtagaaaattacatagcctttttaagaaagagtgccttttaaaattgtgcttgctgactcatcatttctgtgataacccacaaaa

SEQ ID NO: 516384 - DNA, 597 bp, Homo sapiens
atgtagtttctttctgagagcatttagaactacagtttatgttgcattgtaaagcacaatgttaacgatgatgatttctgtggtgaggcattactgtagtctgtgaatagatcacttagaagagatacgtttgaaaagaaacggaaatgaaatagtgttgtaaatgactgacctctagtgtttcataaattatgttggaaaaagatcaactggatgtccttgggattatttctgctaatgcgaaacaattttgaatgaaatcagtacrttttctttcattaagtaccaaaatccaaagagtgtggtagcagaaggctagcacaggatctgtgctcaataaatcaatactgaaatctagctctgagcaggaagaacatcaggaactcatctgcagataatggaagaacatagtttgtttgtcttagctatgttccattctcccgtgcagataaatacttgatgttctcaattattgattatgtttcctgaaggagttaattgcagagcaaaatattggaagtgagcaatctattgtgttcccttgaaccttagttttcccaagaggaaagagtgtttgtctttagagtagtgactgag

SEQ ID NO: 516385 - DNA, 654 bp, Homo sapiens
tgtttattgtaatgtctagaatatgatgggctactgrgcatgaattaaggagaattagggcaagatgaatagcagtgtagaagttgaggtctgcaaagatgatagggattctgaggaaggtatttgttcagttcaggcaaatctggctgcaggatgctgttggaatgtgtacaactcatttttttgcgttcaagagcaaaaaaaaaaaagtgtccaaatgtaaggagaccaatacaaaaacatatgtgagtagtgctagctgtaatacttctggtgatatgtgtcggcttttatgtttccagaagccctgaccctgacttcagtcctagcagcttatctcttaagctgtttcggggtcttcattcttttgctccgagcctgcagcactccaggatactcaggctgtggtgaatctggcagtgaccttgttgatacctgagagtcccacctctctgctgctgaataatctgtcaaaggacagaccctcctaagaactacatcccttcttgcaattaaagggagagaaggagctaatttgaaggattgtttcccagacttttaactatttctgatttttacccagcatcttttgtgaaaagttctatagcaagagtctgcaaaagaaatagaacagatgatggaaactgatgacta

SEQ ID NO: 516386 - DNA, 423 bp, Homo sapiens
taaaccttaataaaataacaattgcaaagcaacacaaaatttgacagagaaaatatgaatacagtgtgcgacaaataaagatgcaataaatatgactatgaatagagggtcacattttaggcgggtcttcaagcagaggaagagtctgccaggcagaaaagaaaaatctaagtggaagaactaaaagcagagtatgagaaagcttggcaagtcccagaaattgtaaaatatcccgctrtattcagaacagagagaatgaagtcaaggccaaaaagacagggatggggtgaaggctcttgcaggaaatgcaaaggaattttgaccatgtttacggtgatagatgacaaccgtttaagtaaaaaattgatagaaccatatctctgctttagaaggctgtgttttccccctgaacatcattcaatt

SEQ ID NO: 516387 - DNA, 423 bp, Homo sapiens
taaaccttaataaaataacaattgcaaagcaacacaaaatttgacagagaaaatatgaatacagtgtgcgacaaataaagatgcaataaatatgactatgaatagagggtcacattttaggcgggtcttcaagcagaggaagagtctgccaggcagaaaagaaaaatctaagtggaagaactaaaagcagagtatgagaaagcttggcaagtcccagaaattgtaaaatatcccgctatattcagaacagagagaatgaagtcaaggccaaaaagacagggatggggtgaaggctcttgcaggaaatgcaaaggaattttgaccatgtttacggtgatagatgacaaccgtttaagtraaaaattgatagaaccatatctctgctttagaaggctgtgttttccccctgaacatcattcaatt

SEQ ID NO: 516388 - DNA, 473 bp, Homo sapiens
gagaaacaggtgtacaaagaatgagtacattgggctgcggacccagatcaaacttcagaaaatgcagattaccaagggttaatcatttttgagcaatcttatttccactgrgactgcatctgcacagcaaagcaagccactgaggcaaaaagaaaaaaaaaaaaaaaaaaaggaacctgcttcagtctcaaattgcctatctcttttaggccaaagcagatgaggctacctaatttagccagatatttcatctcgggtttccaccgaatttgccagtgtagacccggccagagtgcatggaagctgatgttcttgtctccctgtggctctgagtgtgcagcctacttctgtcttgtgaaacgtgagctcctcctgtccaggtttccatatttttagtgccaatgcgaacattaatgttttggtctactatggaatccatgtttctatttttttttttctgtgattgtgttcag

SEQ ID NO: 516389 - DNA, 636 bp, Homo sapiens
taacatcaaacactttgaagttcatttactagcagtgtgatcttaagtaaataatttctctaagtctcaattttctcagctataaaaatgaggatactaagacttcggcacacttgctcatagggtttttatgaggataaggtgattcatggaaagtgtctggtacagaataaacattcaataaaaaccattttttatgttgtcagccatcatcctccagctttttgtgtatactttaaaagcccagccagattctaggctcttaagggcagattacatcttacagatgtttaatacatacatgtttatagaatgtatgactaaatgatacaatgttttctaaataatgaagctgggggcaattatagaacattatatgaggctgaggagataattatcgcatgctggtgcatagaactagtccaggkgttaggaaacattaatttcacaccacctttgcagattatctcattatgggtcagttgttacttagtaggttgcaataattttcatggctgtgaatgcctcactccagaaagtatccaaacttacctgataaatacagaagctgtatattaatagatacaatgttgccatagattcttcctcaacagcctggtgtctcacagaaaggat

SEQ ID NO: 516390 - DNA, 592 bp, Homo sapiens
tagtcatacatatataaggaacataatgaacctggtttcatagttatgagaaacttcaatttggtatgatttttcccctgattatcaaagtaatatattcctactgtaaaaaaaattttttaaagtgtaaagtagacgaaatagcataccttccatatcatcctattgatctaaaattaatacatttttgtatattttctttcagtacttcaataaacatttattgagcatctattatatcacaaacacagtgcttgctgctasagatgctgcctcttctctttttttgcattctttgagtcattgcatatgcaatttttaaaatcctactttcctcgtatgtttttaaactttggaaagaattttagtggctctaccatagaagtcattatgaaagtaaaataaatgagacttagccgggcacagtggctcatgtctataatctttggattacacttggggaggccaaggctggaggatcacttgagcccaggagttcaggaccagcctgagcaacacagcaagaccctatctctaaaaaaaaaagttaaaaaactagctggacgtggtggtgtatgcctttggtcccagc

SEQ ID NO: 516391 - DNA, 631 bp, Homo sapiens
aaaatggagagaacagtgttcagaagggtagctaagaaatcgtagtcatacatatataaggaacataatgaacctggtttcatagttatgagaaacttcaatttggtatgatttttcccctgattatcaaagtaatatattcctactgtaaaaaaaattttttaaagtgtaaagtagacgaaatagcataccttccatatcatcctattgatctaaaattaatacatttttgtatattttctttcagtacttcaataaacatttattgagcatctattatatcacaaacacagtgcttgctgctagagatgctgcctcttctctttttttgcattctttgagtcattgcatatgcaatttttaaaatcctactttcctcrtatgtttttaaactttggaaagaattttagtggctctaccatagaagtcattatgaaagtaaaataaatgagacttagccgggcacagtggctcatgtctataatctttggattacacttggggaggccaaggctggaggatcacttgagcccaggagttcaggaccagcctgagcaacacagcaagaccctatctctaaaaaaaaaagttaaaaaactagctggacgtggtggtgtatgcctttggtccc

SEQ ID NO: 516392 - DNA, 588 bp, Homo sapiens
gaagtattagggtataactggctacagaaggctaggatcaaattgcgaagttttttttttttttttttcagtcaggctaaggaattcacacttcrtcctctatgtagtgggtactgatgattttttaagtctagggaaagacatattcaaagtagttctttagaaaaatgaattgatcccctcttaggtatagttggaagtaaaacaagacatactctaggcatgcatcatagagtaagtactcctcaagtatttgttgaatgaataagtgtaataataaggccatagcattgggattgaaatggaaaggctaggagagatatcctgaaagaacaatttataaacctttgaaaatttaaatggcaggtataagaagagttaaagatagagtatagagcataggtatctgagggaagagaattcccactattgttcattcattatatccagtaggaataagatgagcttagtttcatttggttgagaagtaagggctaggaagaaaggttagccatgcctctacagtaaaagttattaaagctagatagaccacagtcttgagagagataaggtaaaaataagaggaca

SEQ ID NO: 516393 - DNA, 518 bp, Homo sapiens
tttttacactgtagcttatttggttattccactgtatattcttgtctttgctactgtttagaatgtatacatatgctactgaatgtgcttccttgacttcttgttaccacaccaattcaattttgttatttgaccattgtttcaccttaagtgatagacttagacttgtgaagagcctatctcttatggtgctacacccaaattatgaaggtggccaactgtattaatctgtcacctgaaatctccaccatagtgaaagcatgtggaagacattcttctgtctacgtccatcactgtgccttcagggtcactggtatgagtcattccaactaggcttttcagataagaaatatgagtttgtctggtcaggaattataaacctattagtgttttgctattattaaccayagcatatacgttctgtttcagagtcttatttcaacaaacatgtgtgttcattcactttaatttccaatttccttcccaattaaaataaagtgtctaacaccagagactag

SEQ ID NO: 516394 - DNA, 518 bp, Homo sapiens
tttttacactgtagcttatttggttattccactgtatattcttgtctttgctactgtttagaatgtatacatatgctactgaatgtgcttccttgacttcttgttaccacaccaattcaattttgttatttgaccattgtttcaccttaagtgatagacttagacttgtgaagagcctatctcttatggtgctacacccaaattatgaaggtggccaactgtattaatctgtcacctgaaatctccaccatagtgaaagcatgtggaagacattcttctgtctacgtccatcactgtgccttcagggtcactggtatgagtcattccaactaggcttttcagataagaaatatgagtttgtctggtcaggaattataaacctattagtgttttgctattattaaccacagcatatacgttctgtttcagagtcttatttcaacaaacatgtgtgttyattcactttaatttccaatttccttcccaattaaaataaagtgtctaacaccagagactag

SEQ ID NO: 516395 - DNA, 573 bp, Homo sapiens
ttagaacaatatagtttttgtttcttgagacatgtcaaaatttctaagaaaatagaaatacaaacctaacgttgaataatcattaaaaaacagcaattagctaatgaaaattaaaggtccacttgatttagaatggaaactttaaagctttttagtgtttattgtttcactatttgtttaaatcgtaaccaaatttagtatgatgccaaaaagctttaatgggtgggaatttaaagtggacatttttagttcaacacaaaggccctattaagtacaatctaaagaacagtattacatgatgagatgttgctttaatttttacgtggttgtgggggggtgcgggaggaggcgkttcttaggcctaacagcaaactcttatggtcacagaaacaccctgccaagtccatggtataggcatagacaaaggctcataagagcagaaagctttattttgggttttcataagtacttacattgcactcagccaaggtaagcaaaaatgttcactttaacactgtgtgctcagcctaaactggctctgttgctctctgcctcccatatttgtggtctatc

SEQ ID NO: 516396 - DNA, 559 bp, Homo sapiens
gaaaaaataggattcttcttagttcgttggagcattgaagtgtctgctgaaaataatttgaaaataatttacagttttggcccaaacactaaataagattctttttttgagcacttgccaattcctctgtacctggttaatcactttttggaagacayagcatttcattaatggtttcccattgcccttggaatacataaatcagagaaagattaattcagttcttaaattttttggcatgcatataaagaaattaagctatgtgtgggatcattattattcttgcactctatatcattctggaatgggaaatcactctaaatatgtaatcactagaatctcctattttgactttcagccttaaaaatggttctattctataatatataatcagtcacatggtttaaaaagcaggtttagctaaaaaagttaaaagtttgccagaagtacatctggaaataatgttagaggcatgaatttctatgtgcagaatcttataagagaggtatattttcaaatgaaaaagcatacctttaatctattgctgttcaatttaata

SEQ ID NO: 516397 - DNA, 559 bp, Homo sapiens
gaaaaaataggattcttcttagttcgttggagcattgaagtgtctgctgaaaataatttgaaaataatttacagttttggcccaaacactaaataagattctttttttgagcacttgccaattcctctgtacctggttaatcactttttggaagacacagcatttcattaatggtytcccattgcccttggaatacataaatcagagaaagattaattcagttcttaaattttttggcatgcatataaagaaattaagctatgtgtgggatcattattattcttgcactctatatcattctggaatgggaaatcactctaaatatgtaatcactagaatctcctattttgactttcagccttaaaaatggttctattctataatatataatcagtcacatggtttaaaaagcaggtttagctaaaaaagttaaaagtttgccagaagtacatctggaaataatgttagaggcatgaatttctatgtgcagaatcttataagagaggtatattttcaaatgaaaaagcatacctttaatctattgctgttcaatttaata

SEQ ID NO: 516398 - DNA, 559 bp, Homo sapiens
gaaaaaataggattcttcttagttcgttggagcattgaagtgtctgctgaaaataatttgaaaataatttacagttttggcccaaacactaaataagattctttttttgagcacttgccaattcctctgtacctggttaatcactttttggaagacacagcatttcattaatggtttcccattgcccttggaatacataaatcagagaaagattaattcarttcttaaattttttggcatgcatataaagaaattaagctatgtgtgggatcattattattcttgcactctatatcattctggaatgggaaatcactctaaatatgtaatcactagaatctcctattttgactttcagccttaaaaatggttctattctataatatataatcagtcacatggtttaaaaagcaggtttagctaaaaaagttaaaagtttgccagaagtacatctggaaataatgttagaggcatgaatttctatgtgcagaatcttataagagaggtatattttcaaatgaaaaagcatacctttaatctattgctgttcaatttaata

SEQ ID NO: 516399 - DNA, 559 bp, Homo sapiens
gaaaaaataggattcttcttagttcgttggagcattgaagtgtctgctgaaaataatttgaaaataatttacagttttggcccaaacactaaataagattctttttttgagcacttgccaattcctctgtacctggttaatcactttttggaagacacagcatttcattaatggtttcccattgcccttggaatacataaatcagagaaagattaattcagttcttaaattttttggcatgcatataaagaaattaagctatgtgtgggatcattattattcttgcactctatatcattctggaatgggaaatcactctaaatatgtaatcactagaatctcctattttgactttcagccttaaaaatggttctattctataatatataatcagtcacatggtttaaaaagcaggtttagctaaaaaarttaaaagtttgccagaagtacatctggaaataatgttagaggcatgaatttctatgtgcagaatcttataagagaggtatattttcaaatgaaaaagcatacctttaatctattgctgttcaatttaata

SEQ ID NO: 516400 - DNA, 588 bp, Homo sapiens
taaaaagcaggtttagctaaaaaagttaaaagtttgccagaagtacatctggaaataatgttagaggcatgaatttctatgtgcagaatcttataagagaggtatattttcaaatgaaaaagcatacctttaatctattgctgttcaatttaakaatcaattctaagttttcaatgttcagtaacaatttaatatccattgtaactttgggggaggaaagtattgccattgcataatcaagttaattacagtgatggatcttggatttcatttcttggtactatccagttaagaaagagctaaattcagaatgtcagtttatggaaatcatgtacataacagtctgaggtttcctggtatgttcctactgtagccagttgaaatgcttccattcctcccttgagtgtaatgagagaacactttttgagctttgaggcttcaaatgaaaacctcttcagttgtatctttaaaaacaactatcaaataactctttggtatgttccattttttattttctactcagaatttttcctttccttatatcttttttatttagtttggcattctgcccaatatctctctcctcag

SEQ ID NO: 516401 - DNA, 670 bp, Homo sapiens
ctgctgacaacaccagagctaaattttgcctgcttcacaatttctctcagacctagcacaattaatatttatttcccaatacacctattctgtgctgaactgaggcctaaaacaggaaaaagtggattaactgaaaagaaataaaggaagctatctttgatttcaacaccattaacccatttatgctggaggttgcaattttttgaatttttgcaatcagaccttggcaatgaccttgagcagcaggctataaataactcccacatacttagcgttccaataagggaacactaggcataaatgggttaattcatatgtcaaaaacaggtggtagttactaactacaacaacccctatttttctagtcaaaaatgaactcaacagccaaatataattgaaaaacatggaccacattttattctgaatttgaaagatttattacataaacaggtaatcatttccgttgtggttaaagctayaaatatccagacattgtagaaagtttaagactgatattagggcttgcaaatcaggagcttatgaggttatttcttatggaaatattaatacaccttttcctttttgcatttttgtcactgtgtatgaattattcataagtaaaaatactgagatttatttttcagcatgaacacgagaaaaaggcaaatat

SEQ ID NO: 516402 - DNA, 576 bp, Homo sapiens
tattaagccactgaattggtgttcctgcatttctcttagccttttccttttagttgtaatttggcaactgacactccagacatcgcacaaccatattcatttagaaagcaaggggtaggtgatgtgttggtggtaaaatagcttcttcttcacatggctggctttctttttttaccagggagcagaatctttcccacaagagaatagttctcttcttcttacgatgtgttgcccagaataagtcaacgtgccctcccctagaccaatcactgacaaaaataaatagataaagatcaactcacaagactagcttaaatcaatcacaactagcccacaatggctggataaagagcctgaacatgttgctgctgaaaaagtaggaattaggttaggagggaaaaagggagcttggctggtgagtagaccaatgctttgggcastatataatgcatcaaaataatggggagcactgatttaaacacagattcttgggcccagcctccagtttcttcttcaggcggtctgaggtggaacttgagaatccacctttctcacaacacaccaggtaatgctgca

SEQ ID NO: 516403 - DNA, 481 bp, Homo sapiens
aacagaaaaacaaatacctcatgtcctcactcataagtgagaactaaccattgagtatacatggacataaagatggaaatgatggactcttgggattattagaggagggacagaaagagtagggcaagggctgaagaaacctattaggcactctgctggctaccagggtcacgggtgcaatcatacctcaaatctcagcatcatgcaatacaccttcataacaaacttgcacatgtacccccagattctaaaataagagctgagaaaaaagaacattctaaataacacaaattattttaatamatttaaatgcagtataatagcatatttttatctaaacttctaaatatgtaaaatgggaatgattatgttttacattgtctgaaaacatacatactggggaatagaatttttgcatgaatttagaatgtcaaaccaattagaaggctagaaaattagtctggtgtgcacattttaagga

SEQ ID NO: 516404 - DNA, 472 bp, Homo sapiens
tgccattgcatatttaattgttaatatatgtagccataccatattctctaaatcaaagtgcttataaattatgtttataratttaatcctcagcataatcattagagcaaactaaagttgttgtatcattgtaactttggtttgtaactccatttttttgttctctacatgattaacgagacaaaaaattatttatctaagttttggatatataatgcatacagatataattttgtgacagcagtaactgaaagggaatggagatggagctctgtaggagcacagtgtttgtttgcaattgaaattaagctggtataaattcaaataagagggttataactttaggatattaaatgtaatccccatggtaaccataaagaaaatagctacagaattcagaaaaaaaaggaaataagagaatttagaaagtttcgttatataaaatcaactaaacacaagacggtaatgcaga

SEQ ID NO: 516405 - DNA, 470 bp, Homo sapiens
ccattgcatatttaattgttaatatatgtagccataccatattctctaaatcaaagtgcttataaattatgtttataaatttaatcctcagcataatcattagagcaaactaaagttgttgtatcattgtaactttggtttgtaactccatttttttgttctctacatgattaacgagacaaaaaattatttatctaagttttggatatataatgcatacagatataattttgtgacagcagtaactgaaagggaatggagatggagctctgtaggagcasagtgtttgtttgcaattgaaattaagctggtataaattcaaataagagggttataactttaggatattaaatgtaatccccatggtaaccataaagaaaatagctacagaattcagaaaaaaaaggaaataagagaatttagaaagtttcgttatataaaatcaactaaacacaagacggtaatgcaga

SEQ ID NO: 516406 - DNA, 532 bp, Homo sapiens
ctgtcttaatagaagacaaaattggtgccttaaaggaatgtaggaaccgaatggccattttcctgccagtgggacaatatcaagactaaaatttggctatggaagacattttactcctaaatgctaaaggcagaaacttcctgttgctggaagaggtctagagcctgatttatttccatgaggtgatgccgtctgcttagaaatgctatgtattcgccagataagtggtagcaagtaacctcaccatggggagaaaggggaaaactctgttcctagactgtaaaaatctttgcacatttcacrcaaagaaagggtaagaggccgcggatagagaaggaagaagagtgttgcaacaggactgttgagtttctctaccaacacccagaatgggctgtcgggggctgtgtcccgtccagagccctttgaatcacaccacggtgtgctctggtcagaaattcccagttgcctcagaacttttctcagtctcgcgccatggtaaggttccccgtgaaaagaagctagttcaaacgtg

SEQ ID NO: 516407 - DNA, 308 bp, Homo sapiens
agataaagcagagatttgtcacttccaaatagagcctaaaatagagaagaaagtgcgttcttcaaggagaataaaaatgatccgagaatgaaatttggagacagaagaatgaaaagatatagaagataaatatacatacaaatttaaatatacatttattgtctaaaacatcaataacrtgttatgtggtttaaaatatatggagaataaaatatgtaacaatagcatattattaatgtaaaatttttctaagattcttgacttatttaggaggagtgtcaaagaatcagttaatattagacattgat

SEQ ID NO: 516408 - DNA, 308 bp, Homo sapiens
agataaagcagagatttgtcacttccaaatagagcctaaaatagagaagaaagtgcgttcttcaaggagaataaaaatgatccgagaatgaaatttggagacagaagaatgaaaagatatagaagataaatatacatacaaatttaaatatacatttattgtctaaaacatcaataacatgttatgtggtttaaaatatatggagaataaaataygtaacaatagcatattattaatgtaaaatttttctaagattcttgacttatttaggaggagtgtcaaagaatcagttaatattagacattgat

SEQ ID NO: 516409 - DNA, 627 bp, Homo sapiens
gcctatctaaattatccttatcattttaacaatttgtagattttgggggtggagattttaggtagacagtcatatcatttgcatattaagacagtttaattagcttctaattggcattttccagtgtttatgctttttgttggaagatttaatttatctacctgtgaatattatattcctgtacatgcagatttacatttttcattagtttagaatatttgaattctttgtcttttcaaayattgtctctcttttcttcttatgaaactctgattagatatacacatcctattctcattctatccttcatatcttttaaggtttgtacacatttgccattttctgaactttgtgtgtgatgcgttccgtgcaatttttgatatgtcttctatatcttctagttcactaaatgtttcatctatctctaaactactattaaccatctattgaatttttaaattcaaaattgcatacttgtggtttcctaaatattctattttaaaatcatgcttcctacttattcttgatgatctgtgttgcatgctcatcgagactgattcctttatttctgtaatacttgtaatactgtttacttgtaatactgtaatagctgtttgctattttgta

SEQ ID NO: 516410 - DNA, 625 bp, Homo sapiens
taatcagatgatcttaaaatcttgtattatccaggagggcccaatgtaatgacaaagggcctcaaaagtggaagaaggaggtgcaggagaaagaagcagagagatggaaggatgaaaagaacttgacctgatgttgctggctttgaagatggaggaagaggccttgagccaagaatgccagtagcctgtagaagctggagaaagcaaaggaatcagttctacctagcgcttctagaaagaaatgcagcctaccaatgtgattttacttggtgagatctgtgccagatttttgactgtcagaactgggagataataaacttatgttttgttagagcacygaattggtagtaatttgttacagcagcattaggaactaatccaagttccttgatctaacactcccctggctttgccccaacttctcaggaatccctatctttccaggcttttcctcttctctgaggtctttacagcctcatgctctgtgctaaatgcactttctacttactctgtgttaacctcacccagggctctaatcagcacttctatacagataactcacacattttcattcctagcccatacctcttgttgagttctaggtctataaatataaccgcttggc

SEQ ID NO: 516411 - DNA, 580 bp, Homo sapiens
gtccaaaaaccatgacatgattttaaaccacactgggagaggtctcccttcaaaaaggtgtttatcttgttatrgaagccccaggctctctcagcttcaggcaacttccatagggatattccaaacctagagactaagatgaaattccagtgaaagaaacactacttcttccaaaaacctatttcttagagttttaattttctgggctttgattaattttcactgtgactgttcttttccacccagtaattttttttcttgcagttgcaagacctcatttcctaatagataaaagtaccattcccacagttatgtctaaagaaataagtggaaaaataagaaactaaagcaaatgaattttagatcatcctatctagtgtctcttattatttcacatcacttataaagatgctagtccaaacctcattgacaaaatttctgctaaatattacttctttagtctttgtgaatagcagtcactgttgaaaatacatctgtatactaaagattagcatgatttaaggtaaactttcatttctctaacaaggtctttagttctccacaaagggcttgtgattca

SEQ ID NO: 516412 - DNA, 580 bp, Homo sapiens
gtccaaaaaccatgacatgattttaaaccacactgggagaggtctcccttcaaaaaggtgtttatcttgttatagaagccccaggctctctcagcttcaggcaacttccatagggatattccaaacctagagactaagatgaaattccagtgaaagaaacactacttcttccaaaaacctatttcttagagttttaattttctgggctttgattaattttcactgtgactgttcttttccacccagtaattttttttcttgcagttgcaagacctcatttcctaatagataaaagtaccattcccacagttatgyctaaagaaataagtggaaaaataagaaactaaagcaaatgaattttagatcatcctatctagtgtctcttattatttcacatcacttataaagatgctagtccaaacctcattgacaaaatttctgctaaatattacttctttagtctttgtgaatagcagtcactgttgaaaatacatctgtatactaaagattagcatgatttaaggtaaactttcatttctctaacaaggtctttagttctccacaaagggcttgtgattca

SEQ ID NO: 516413 - DNA, 580 bp, Homo sapiens
gtccaaaaaccatgacatgattttaaaccacactgggagaggtctcccttcaaaaaggtgtttatcttgttatagaagccccaggctctctcagcttcaggcaacttccatagggatattccaaacctagagactaagatgaaattccagtgaaagaaacactacttcttccaaaaacctatttcttagagttttaattttctgggctttgattaattttcactgtgactgttcttttccacccagtaattttttttcttgcagttgcaagacctcatttcctaatagataaaagtaccattcccacagttatgtctaaagaaataagtggaaaaataagaaactaaagcaaatgaattttagatcatccwatctagtgtctcttattatttcacatcacttataaagatgctagtccaaacctcattgacaaaatttctgctaaatattacttctttagtctttgtgaatagcagtcactgttgaaaatacatctgtatactaaagattagcatgatttaaggtaaactttcatttctctaacaaggtctttagttctccacaaagggcttgtgattca

SEQ ID NO: 516414 - DNA, 580 bp, Homo sapiens
gtccaaaaaccatgacatgattttaaaccacactgggagaggtctcccttcaaaaaggtgtttatcttgttatagaagccccaggctctctcagcttcaggcaacttccatagggatattccaaacctagagactaagatgaaattccagtgaaagaaacactacttcttccaaaaacctatttcttagagttttaattttctgggctttgattaattttcactgtgactgttcttttccacccagtaattttttttcttgcagttgcaagacctcatttcctaatagataaaagtaccattcccacagttatgtctaaagaaataagtggaaaaataagaaactaaagcaaatgaattttagatcatcctatctagtgtctcttattatttcacatcacttataaagatgctagtccaaacctcattgacaaaatttctgctaaatattacttctttagtctttgtgaatagcagtcactgttgaaaatacatctgtatactaaagattagcatgatttaaggtaarctttcatttctctaacaaggtctttagttctccacaaagggcttgtgattca

SEQ ID NO: 516415 - DNA, 412 bp, Homo sapiens
taaacagtttgaaaaactttacaaatayacaccaagagacaaaaatttattttcctaatctagtaaataaaactctaagagaaaaccagttgttattcagtaattctggtacatgacttatgtgtaactatagtatatttttaataatatattgcatctgaaatgctgtttcctaaaccttaacaattatcatatattattagtatttattattatttttattttggctgataattctaactctttgcaagtaaaagaatacaagtgactttgaagagctcaaaacaaagcaaatccaactaattattttagttcaatatgtcaggatgtcaatgattaatgcttttttcctccttaaattgttgaaaaaaaataagacaaacaaataggagtgaaatgttgtgtggggaag

SEQ ID NO: 516416 - DNA, 412 bp, Homo sapiens
taaacagtttgaaaaactttacaaatatacrccaagagacaaaaatttattttcctaatctagtaaataaaactctaagagaaaaccagttgttattcagtaattctggtacatgacttatgtgtaactatagtatatttttaataatatattgcatctgaaatgctgtttcctaaaccttaacaattatcatatattattagtatttattattatttttattttggctgataattctaactctttgcaagtaaaagaatacaagtgactttgaagagctcaaaacaaagcaaatccaactaattattttagttcaatatgtcaggatgtcaatgattaatgcttttttcctccttaaattgttgaaaaaaaataagacaaacaaataggagtgaaatgttgtgtggggaag

SEQ ID NO: 516417 - DNA, 412 bp, Homo sapiens
taaacagtttgaaaaactttacaaatatacaccaagagacaaaaatttattttcctaatctagtaaataaaactctaagagaaaaccagttgttattcagtaattctggtacatgacttatgtgtaactatagtatatttttaataatatattgcatctgaaatgctgtttcctaaaccttaacaattatcatatattattagtatttattattatttttattttggctgataattctaactctttgcaagtaaaagaatacaagtgactttgaagagctcaaaacaaagcaaatccaactaattattttagttcaatatgtcaggatgtcaatgattaatgcttttttcctccttaaattgttgmaaaaaaataagacaaacaaataggagtgaaatgttgtgtggggaag

SEQ ID NO: 516418 - DNA, 412 bp, Homo sapiens
taaacagtttgaaaaactttacaaatatacaccaagagacaaaaatttattttcctaatctagtaaataaaactctaagagaaaaccagttgttattcagtaattctggtacatgacttatgtgtaactatagtatatttttaataatatattgcatctgaaatgctgtttcctaaaccttaacaattatcatatattattagtatttattattatttttattttggctgataattctaactctttgcaagtaaaagaatacaagtgactttgaagagctcaaaacaaagcaaatccaactaattattttagttcaatatgtcaggatgtcaatgattaatgcttttttcctccttaaattgttgaaaaaaamtaagacaaacaaataggagtgaaatgttgtgtggggaag

SEQ ID NO: 516419 - DNA, 564 bp, Homo sapiens
gtcagaatggagctaggttgctaaatataaatgaaaatcagctatcaactaggtttagtaaatttaagtaaatcttaccaagtttgacagcagactttttgaattgagaaactgagtaaaaagccactttgatttttcaaaagataaggtctggaacatttcatctttaaacaaaattttttttttttttactgacgaagcagcagggagaatgattgaaataaagatgctaaactataaaagaaagtgatttcttagtttcctttctaccaaaacaaatacaagctttcatcagcatccaagatcttcaggacgttccaagatttattctagttcagagaaaaagcaygtgggaaagaattaatagaacctttgtcatttttaaccttttcaagtacaagggaggatgaacagatactaagtagtaaattataatagccaagcacttgattaatttgatatttttctctttcacatgacatgaaaagaaaaaaatatagctctgaaacttgtattactaacttttgctttaattataatttttctgtccataggaaccacttt

SEQ ID NO: 516420 - DNA, 519 bp, Homo sapiens
tcttactatttgtgaatcttcaattcatttaatactactgagtttctagcttgtcaaatctttaatggatgagaaaagcaacctctttacaaggttaaattaaatcatgcatacacaagtgcctgcctctcggtaaacactcaacaatattattattatcatcatcattaactttactgctattattatgacttatcctggtttaaacccatggaagtactacagattttctttcagtgttctttatcatctaattacgaacttctctagcctcattttcttatgctctttgacagaagccctgcttttagtgaggtgctttttcttcttgcttttctaaaataactactcaaattcttgttcttcttacataactactgaraaatctgtcaaaaacccatttcaataattacttattccagaaggactaacaagaaaagatgcacaaggaaacattgcaaagagacagaattttacagaatattgagacatatcttaattggggtggaggtttcacag

SEQ ID NO: 516421 - DNA, 536 bp, Homo sapiens
tgcttttattatcaccaccccttccagtgtctttttgtgtgtgtgtaaaaaggcagtggaagttccttgggataaagatatgttatgataaagattgtttgataattaaaacaattaaataaataaaactttctagcactattgtaaatctcagacactggcaggtactaggagttcaaatatgaacaagaagctcacaatctaatgggggtaaattgatgtgcacacaatcatartatagtaaggaaggacttaataacacaatttgtgccaaggggatagttaaagaaaggtatcacagagttactgacattagaattgagtctgtgggcccagtagagacaacgactttggcagatggagaagaagaggagcagaggttcaagcaaagtgaaaagctccgcttaaaacagagagcggctggaggggagtggtgtgaggaaggcaggtggcgccaggctttaaaggatcttctttgcatgctaagaaaagtgaaattcattgaacttattaaaaccatctagcaaggggagtgt

SEQ ID NO: 516422 - DNA, 658 bp, Homo sapiens
ctgcaaaatcagggaaaccattagtaacaacgtgaaagcttctcttataatatagcttaacagaatgaaaatggaagtggagtttttttatttagttttgttttattttgcctgtaaccttttcctatcgcatcgctgcttaaaaccacattgccatcttccttccttgaaaagacccaacggatcatatctttgctgttggcacttcttggagatgagcatttgaagataccagctagaacttcacctctgtcaattctaacctaagatttaaataccacatcaccacaggcaaatggtatacatttatgggaaagaaagcgctttatttatcttactaatgtgattttatggatgagtagaatgcatgcagtgcttgcagtcattctgtccaaggatctgtcatgttcagacagatatctggtgcttgacggaggatggcatccacgctgcattggcattttattaaatcctgcaaatagcactwtactctgcttaaacacaatggcatatcaaaagctgagcgactttcttttccaggagcttccattgatgttaaaaaaactaaaaatggctctaaccactgacagagtgatactaatgagaagaacttgagcattggcaagagtcagaatatgtcaagttatttccgtaatca

SEQ ID NO: 516423 - DNA, 592 bp, Homo sapiens
caaatgaaaaaatgtaatctttatcaaatttattttttacaacatttatatttattgatctgaggtaggcttttgttagaacaaaattaatagtaaatactgaacaatatgtcaggcatggggcaaattggtttctgttctttacaacaagccactatgaccctattaggaaatgttttaaaggcgtttcttagcattttcaacaaaatatttgtactccctactgaaaatagcttaatatgaagtcccaaaggaattctgtctgcctcataaaattgcttttggagttttcagtttctggcckcctccttccaaatgcacagtgaatatatggtggagttttgtctaattctttcagtagaggaattttgctacattaaaataatttgttaattcatcatttccatggtaaaatagaaattactcaccctgattcctaatacgatcaacataactttgcttttcatacataaagacattggtatgaaaaggaagcattctcttccttccatccatatgctagcctgcttgagcggtcgtgtactatgactatggaaagcatgacctcaaattccagccacaccacttccca

SEQ ID NO: 516424 - DNA, 520 bp, Homo sapiens
ctaatagaatgtgagaggtagtggcacctgttacttctggacccaggtaattaaacagctggtgtggtttttgcatcctttctcttgcctcttccatcagttggatgttgatttccatggcaacctctaaagccatgttttggagaacacatcacagctatcaacttgggtctctatatgactgcatgagacagatgcatcgtggccccagcagcagaccatgagcacctgtgctggactgttgcatgagcaagaaataaaattcaattgtattaagccattagaatgttgggatttatttgttaaagtgctaatgttaccctattgtgctatccattttttgtgctatccatttttcttatgcttgtataaaacatttattaagagaaatcttgttaatctcaacattacttgttcattgcagaaaatgttgactatgtcttatactgacacaacagcacaattctattattttcctatgaaggtwtgaaataatgaaattattatttcaataatagag

SEQ ID NO: 516425 - DNA, 587 bp, Homo sapiens
tttaaaaaagaatatggagggtctaattatatttgaatttcagataaacaatgaatttttttagtataacccaaatttttagtatatgtgccaaattatactaaatgattatttattgtttatctgaaaatcagtttaacgtgaagccctatattttatctggcaaccctaattgtaaytgatagtcattcatcatggctagctactgctaaaagtcaaaggaaaaaacaaagagtgaaaaacctcaaaacctaaatgctgcccaggcctcacatttatctctgctggaatgtgaactggaagcatgacctaaaactctatccacaggctcatctcaatttctggctagtagattttctgggctgttcagccaagcatcctaatttaaagtgctttctgtggttatagttggaggaaataattgtgcttataattcagtgtaaataataaaatcagtcccttaactgtgctctctgaaataaatttgcagtttctatctctgtatattttatgtttattcataatttattactaccgtattgataatgtaggagttagcagattagatgacagaatagttgtactta

SEQ ID NO: 516426 - DNA, 587 bp, Homo sapiens
tttaaaaaagaatatggagggtctaattatatttgaatttcagataaacaatgaatttttttagtataacccaaatttttagtatatgtgccaaattatactaaatgattatttattgtttatctgaaaatcagtttaacgtgaagccctatattttatctggcaaccctaattgtaattgatagtcattcatcatggctagctactgctaaaagtcaaaggaaaaaacaaagagtgaaaaacctcaaaacctaaatgctgcccaggcctcacatttatctctgctggaatgtgaactggaagcatgacctaaaactctatccacaggctcatctcaatttctggctagtagattttctgggctgttcagccaagcatcctaatttaaagtrctttctgtggttatagttggaggaaataattgtgcttataattcagtgtaaataataaaatcagtcccttaactgtgctctctgaaataaatttgcagtttctatctctgtatattttatgtttattcataatttattactaccgtattgataatgtaggagttagcagattagatgacagaatagttgtactta

SEQ ID NO: 516427 - DNA, 670 bp, Homo sapiens
gtcatggaatagtgataaaaaattcaaattgacttggataaaagcagagccttgtggatataaaactgactgaagtataacaaacaaaatgtcagmgtatttaatggagtgccacagggatcagtgtgagggctgatcttatttaacaacttaattaatgatctggaagatggagaaaacagtatgtaaatgaaatttgtagctgatatcaaattggaagttttgccaacaccaattaagatagcaaaattgttttaaaagagaagttacagaggttagaaatataaagaagaaaaagcaaatcatatgcttaatttattagaagagaataacaaataaactttgaaaaaaatgagtaatacttacctttaaaatactggaaacagaatgagaatgtaagagaattttaaaaacaaactgccaaaaaaatttttaaaactttgacatttcttgagggttcaaatactctaaaatgtgtaatctcttttttcaaatgccaaggttgatatatctatattaaagctcagaaaacaatataactaaagtaaatttaataatagaagtaatgctgaagttttataggacttacttctttatgacagacacagtaaatttgggaagaacatattggcaattaattcagtttaatatagctactacaatatgattt

SEQ ID NO: 516428 - DNA, 621 bp, Homo sapiens
tagatttattgagttatgaagcccaaaggcacttctggacattcatatacacacgttcacacatacacaccccattctgccttccccagccatatgtacacttacctaggaaatttgtgcacaaaagcttgtctaggaaaaaacaactcttycaatagacaaataatttttaaaaactggcagacaattaataccaaaatcctattagaaaaaaatgtgaaagaaagcaacaaattaacaaatttgtcaatagatgagcatttataagaaaaatgttgctacaggccagatatgaaagctgtcacctaaagttttactatgcattgaatattgtaataaagcttttactactatgaaggaagaccatgaatcataagtgcaagaactccagacagtgggaggaaatagaatttcaactggcagaattcagtgaagtggaagaaacaaactaaaaccacaaacaaaacaaactaaaatcacagaaatataaaagaattacacagaggagacatgagaatagacactgaagaaaacacagcaaggagatagaagatataaatgaggcaaggcaagaaatcaaaattaaaatggattatataaagaattagggaagaatgatag

SEQ ID NO: 516429 - DNA, 351 bp, Homo sapiens
aagaagccatccgtattactttgactgcataatgttcacattagtagccacatatagaatcagtgtcagttttaatactggcaatataattacgagattagatttctgttctccctgacaaagccatttttagatcccgtcaaccaaatcctmtgggctccatggagacatgtgctacataaatacaaagcattatttttgctcatatcacgttattgtggagattggtaaatggaggagcactatatcaaatattaatagtttttaagcattgaaagctgttttacaccataataaacagcaatctagcaaattgaaaaccaagatagaaggtcatctttcacttaatag

SEQ ID NO: 516430 - DNA, 618 bp, Homo sapiens
tgctaaatataggattgattttaaaaatatccaaaactaatraagcaccaccctaatagatgggctttagcagatactccaagtatagttgcatattaaaacctagaccattatccaaataggaagaaaggaaacaaactaaacgtgccatgaagaatgatcaaatacctcttgcctcactatagcacatcagtaacaaacaatctgcatcttttttttttttttttttttttttttttttttagaaggagtctcgctctgttccccaggctggagtgcagtggtgcgatctcggctcactgcaagctccgccttccaggttcatgccattcttctgccttagcctcccaaatagctgggactacaggcacctgcaccacgcccggctaattttttttgtatttttagtagagacgagatttcatcgttttagccaggatggtcttgatctcctgacctcgtgatccgcctgcctcagcctccgaaaatgctgggattacaggcatgagccactgcgcccggcccaaataatctgcatcttattcctccttaaaagagagagtcactttatactgaggattgctttcttagtcgatgctgatttatttaagttttttg

SEQ ID NO: 516431 - DNA, 521 bp, Homo sapiens
taaatataggattgattttaaaaatatccaaaactaataaagcaccaccctaatagatgggctttagcagatacyccaagtatagttgcatattaaaacctagaccattatccaaataggaagaaaggaaacaaactaaacgtgccatgaagaatgatcaaatacctcttgcctcactatagcacatcagtaacaaacaatctgcatcttttttttttttttttttttttttttttttttagaaggagtctcgctctgttccccaggctggagtgcagtggtgcgatctcggctcactgcaagctccgccttccaggttcatgccattcttctgccttagcctcccaaatagctgggactacaggcacctgcaccacgcccggctaattttttttgtatttttagtagagacgagatttcatcgttttagccaggatggtcttgatctcctgacctcgtgatccgcctgcctcagcctccgaaaatgctgggattacaggcatgagccactgcgcccggcc

SEQ ID NO: 516432 - DNA, 618 bp, Homo sapiens
tgctaaatataggattgattttaaaaatatccaaaactaataaagcaccaccctaatagatgggctttagcagatactccaagtatagttgcatattaaaacctagaccattatccaaataggaagaaaggaaacaaactaaacgtgccatgaagaatgatcaaatacctcttgcctcactatagcacatcagtaacaaayaatctgcatcttttttttttttttttttttttttttttttttagaaggagtctcgctctgttccccaggctggagtgcagtggtgcgatctcggctcactgcaagctccgccttccaggttcatgccattcttctgccttagcctcccaaatagctgggactacaggcacctgcaccacgcccggctaattttttttgtatttttagtagagacgagatttcatcgttttagccaggatggtcttgatctcctgacctcgtgatccgcctgcctcagcctccgaaaatgctgggattacaggcatgagccactgcgcccggcccaaataatctgcatcttattcctccttaaaagagagagtcactttatactgaggattgctttcttagtcgatgctgatttatttaagttttttg

SEQ ID NO: 516433 - DNA, 618 bp, Homo sapiens
tgctaaatataggattgattttaaaaatatccaaaactaataaagcaccaccctaatagatgggctttagcagatactccaagtatagttgcatattaaaacctagaccattatccaaataggaagaaaggaaacaaactaaacgtgccatgaagaatgatcaaatacctcttgcctcactatagcacatcagtaacaaacaatctgcatctttttttttttttttttttttttttttttttwagaaggagtctcgctctgttccccaggctggagtgcagtggtgcgatctcggctcactgcaagctccgccttccaggttcatgccattcttctgccttagcctcccaaatagctgggactacaggcacctgcaccacgcccggctaattttttttgtatttttagtagagacgagatttcatcgttttagccaggatggtcttgatctcctgacctcgtgatccgcctgcctcagcctccgaaaatgctgggattacaggcatgagccactgcgcccggcccaaataatctgcatcttattcctccttaaaagagagagtcactttatactgaggattgctttcttagtcgatgctgatttatttaagttttttg

SEQ ID NO: 516434 - DNA, 618 bp, Homo sapiens
tgctaaatataggattgattttaaaaatatccaaaactaataaagcaccaccctaatagatgggctttagcagatactccaagtatagttgcatattaaaacctagaccattatccaaataggaagaaaggaaacaaactaaacgtgccatgaagaatgatcaaatacctcttgcctcactatagcacatcagtaacaaacaatctgcatcttttttttttttttttttttttttttttttttagaaggagtctcgctctgttccccaggctggagtgcagtggtgcgatctcggctcactgcaagctccgccttccaggttcatgccattcttcygccttagcctcccaaatagctgggactacaggcacctgcaccacgcccggctaattttttttgtatttttagtagagacgagatttcatcgttttagccaggatggtcttgatctcctgacctcgtgatccgcctgcctcagcctccgaaaatgctgggattacaggcatgagccactgcgcccggcccaaataatctgcatcttattcctccttaaaagagagagtcactttatactgaggattgctttcttagtcgatgctgatttatttaagttttttg

SEQ ID NO: 516435 - DNA, 584 bp, Homo sapiens
attttaaatcacatatatgactctcattacatttctgccatagaccttaaagtaaaattttgtttgagattggggatcagggtctccatactaaaaatactctcacatgtggtttttgttaatgttgctttttcagtatttttttctaaacgaaatgattaaatctctaaacacaaaatatcaatgtaatttcctacatctcatatggctactatacaattaatttttatttgttattcagatataataagtctttagtatagcctcagrgtgtcaatgaaaaagaaagcagcatatatttttcttgggcagtccattcaagagttcaatatatttgtcattttgtacctcagagaccttaaatcactattccaagggtcaagtatttatattccacccaaaagtctcatgattgcaggataaatatattgaagtgataacacatatagaattttccttaaggagaatttgcgtttggtgatgggggagttattttatttgaattttaacaggactttgtaaaaacttgttaacttgaaggctctgtattttaacaatgtatacagagattcttttagttatta

SEQ ID NO: 516436 - DNA, 603 bp, Homo sapiens
actttaaccttctcctgcttctacctccaagcacaggatagaactcctctgtctctgaagttctcttatctgaagcttctccagaaggagcacaatggccttcagtctcctccctgaaatatcattgaccaggggcgattaaactcatactgtaggaaggaaaactgaagaatgtcatcacacctaggctttttcagaagctattgcctgccctccagtcccattyaatttccaaagagaatcatttacaaattattttctgcctattaaattatcctaaaaattgcttactactcctcaacattgcctttattttcccatctgcatttctcctatgaagagggtgttatttaagcttcagccatccagcccctctttgagtctcaaattttgtatgattcccatgcttacgcacattaataactttctatgtcttttctccttctatctgtctattgtcagtttatttccacagactcgaaccttcaggaggggagggaaaattctctttgcccctacacctgatatagccaattttgatttctgtatagatgaaagagtatggcagcaacttaagcaactaaactgcattgtaaactattg

SEQ ID NO: 516437 - DNA, 603 bp, Homo sapiens
actttaaccttctcctgcttctacctccaagcacaggatagaactcctctgtctctgaagttctcttatctgaagcttctccagaaggagcacaatggccttcagtctcctccctgaaatatcattgaccaggggcgattaaactcatactgtaggaaggaaaactgaagaatgtcatcacacctaggctttttcagaagctattgcctgccctccagtcccatttaatttccaaagagaatcatttacaaattattttctgcctattaaattatcctaaaaattgcttactactcctcaacrttgcctttattttcccatctgcatttctcctatgaagagggtgttatttaagcttcagccatccagcccctctttgagtctcaaattttgtatgattcccatgcttacgcacattaataactttctatgtcttttctccttctatctgtctattgtcagtttatttccacagactcgaaccttcaggaggggagggaaaattctctttgcccctacacctgatatagccaattttgatttctgtatagatgaaagagtatggcagcaacttaagcaactaaactgcattgtaaactattg

SEQ ID NO: 516438 - DNA, 666 bp, Homo sapiens
tgagtcagaaaacactatagtatacactgagggcctgacaagtgggtgaatggagttaggagtcaaagtgggaattttggaggtcaggaccctgtccattcattcataatctttgaaaagccatacccagggtctggcttagacatttctgtactagtgccaaacaaccaaaatacaaaagagggaakaggaaagacaggacatagatagtaagtatgcccaagctcacatctaagttacttggctgtctcaccaaagataaacaatgaattgtatagctctaaccatctgatataaaattatgcaggatctgagaagagacaagctttgtcctagttttgtaccatgagaataaattttgccagatttttagagttcattttaatacctttggaaaaaatgggcatggagaatgtaaatattatgaaggagataatggggaaaactgtgcttatttaagtttctgacattttactaggaataaatatatctcaagaaagcagatgctcattctatttatacatcatcataattactaaatatccatttattcaataaatttcagttgagcatctgtgtctcatgccctgtaagtgggccatgagcatgttcctacattcttggatggttacatgatgtgattacaaaggagatcaaaggaaccta

SEQ ID NO: 516439 - DNA, 666 bp, Homo sapiens
tgagtcagaaaacactatagtatacactgagggcctgacaagtgggtgaatggagttaggagtcaaagtgggaattttggaggtcaggaccctgtccattcattcataatctttgaaaagccatacccagggtctggcttagacatttctgtactagtgccaaacaaccaaaatacaaaagagggaataggaaagacaggacatagatagtaagtatgcccaagctcacatctaagttacttggctgtctcaccaaagataaacaatgaattgtatagctctaaccatctgatataaaattatgcaggatctgagaagagacaagctttgtcctagttttgtaccatgagaataaattttgccagatttttagagttcattttaatacctttggaaaaaatgggcatggagaatgtaaatattatgaaggagataatggggaaaactgtgcttatttaagtttctgacattttactaggaataaatatatctcaagaaagcagatgctcattctatttatacatcatcataattactaaatatccatttattcaataaatttcagttgagcatctgtgtctcatgccctgtaagtgggccatgagcatgttcctacattcwtggatggttacatgatgtgattacaaaggagatcaaaggaaccta

SEQ ID NO: 516440 - DNA, 632 bp, Homo sapiens
ttggtcataattcaagctgacacaatcaatccaaattagtcatgatctctgtcatgaagaaatgtggaataagggcagtggggcataactgatgttctctccactgaggatgaattattgtaaatgtctataaataataacacaatattttagatttctttagtcctgtatttatgtgagttaktttactttattatgtgggtcaaatttaaatccaaacaaactgtcaaaaactgtttattattttatgctgaaggtagggctaataattcattttctaagtttgattgattagaaaagggagaaaatatttgcagaataaaatcaattaaaataattaaggctcagtaacattttcctaaggagactggatttcaaggaataagtgaacataataatacctaaactgtaatgtaaagagaaagtaggatccaaatccatcccagatctaaatcttgagtgactagtaatcaaattcagtgatgtcaacaaccaacgcatgacacgatttcattcatttgtatgagtaacacaacagtcagtacttccaagttctttttcttcaatgtgtatattttgaattcttaaacagagacgtttaaaagaattaagagcaagtatgggcaaatagg

SEQ ID NO: 516441 - DNA, 271 bp, Homo sapiens
cacacttaaaagcattcttaagattatttaataaaagataacatgttctaaggcagatgaattgcaaattagatcatattacacacccaggtgtgaataagtaggtttagaagatcacgttggaaccatagtttgatacttatgctatattatttagatatggayaaagagaaccaaaatataaatcacatagaagccataagtaaattgtacagagacaaaatgattgctaaaatttagaactactggaacaattgtgcaatgtttttta

SEQ ID NO: 516442 - DNA, 634 bp, Homo sapiens
aaactattgcagtaatagcctcttctgttcaagaaaactgctaacatccrttcatgaaaattctgttctttttattgcttcaaaagatgtcgtggccatccagttatgggcacaaaaagtactgcatacatggatgaattttccagtagttaatttatttattcattttccttaaggacttaaaaaatctctagcaacttgttttcttttcagactttgaatctacacaggactctgcagcacatctcttctcactgtgtttgtgactaatatatccagagtattttccttaactccagaagtttctcgtatgcatcttctgaagaatcctatttatcccgagtattcagaaaactataatgattgaagatcttgatgttttttatgtttcaattttcagaatacagtgataagtggatcattgcctatttttcttgtagttgtttctgtcatccatttgcttattttcaaagattaatcccttattgagaagtggcagtgacctaaacttctggagtaaaactccatgtttattatctgaaagccataaattgacagattccttaagcatgagaagtgaatgcttgatttgttgttggaacagtcttttgaattgttgacaagttggtcaaca

SEQ ID NO: 516443 - DNA, 587 bp, Homo sapiens
aaatatatgtctgtgatttctagcatttaattgccaaaatgtaattaacaagcatttatttaagaaaagtttcttatttttttccccaaaggcaaatgaagtcctggaatgttcttatttagtttacagcaagaagagtgcaaaaaatctgcagtaaatattttactcaatattatgagyattacaatttatgactatggtaaatcattgttatagcatatgtagtttacaaattgaatagtaaaagtcaaaagcaggcattaactttatgtcatcgggaacaatgactttctttctggaaaccaagatattactttaaaacttgatagtctgagtataatttgaatcctattactccataaatgtgaaatttgtttcccagaggtgtgaaataacattaaatgacatgaagcctcttgccctttaatatctatccctggtttaatcttaacattattccattttttatttgctttgtctgtatgggtcactgggagatagatatcaaaaggaaaaaagaatcattttctcagagtaatcgcattcctaggataattgtgtacgtgtgttagagtgtggttgtctat

SEQ ID NO: 516444 - DNA, 587 bp, Homo sapiens
aaatatatgtctgtgatttctagcatttaattgccaaaatgtaattaacaagcatttatttaagaaaagtttcttatttttttccccaaaggcaaatgaagtcctggaatgttcttatttagtttacagcaagaagagtgcaaaaaatctgcagtaaatattttactcaatattatgagtattacaatttatgactatggtaaatcattgttatagcatatgtagtttacaaattgaatagtaaaagtcaaaagcaggcattaactttatgtcatcgggaacaatgactttctttctggaaaccaagatattactttaaaacttgatagtctgagtataatttgaatcctattactccataaatgtgaaatttgtttcccagaggtgtgaaataacattaaatgacatgaagcctcttgccctttaatatctatccctggtttaatcttaacattattccattttttatttgctttgtctgtatgggtcactgggagatagatatcaaaaggaaaaaakaatcattttctcagagtaatcgcattcctaggataattgtgtacgtgtgttagagtgtggttgtctat

SEQ ID NO: 516445 - DNA, 535 bp, Homo sapiens
agtgaggggccagatttttctttagcatgttccagggtccattttgcaattaagcagggaaatgggggcagagccatcaagtgttgatttagtgcttactttgtctgtcactgtgcttcatcttgtcagggatacagagtggaagacctgatctctgctttcaaagcagcctacattctgtctgaagaaactaggctagtatagccgggcatggtggctcacacctgtaatcccagcactttgggaggccgaggccgacggatcgcttgaggtcaggagtttgagaccagcytggccaacatggcgaaaccccgtctccactaaaaatacaaaaacttagctgggcgtggtggtgcgcgcctgtaatcccagctacttgagaggctaaggcaggagaattgcttgaacccaggaagcagaggttgcagtgagccaagatcgtgccgctgcactccagcctgggtgacagagcgaaactctgtctcaaaaaaaagaaactaggctagtatgatacaaagtagtaaaccacataaga

SEQ ID NO: 516446 - DNA, 535 bp, Homo sapiens
agtgaggggccagatttttctttagcatgttccagggtccattttgcaattaagcagggaaatgggggcagagccatcaagtgttgatttagtgcttactttgtctgtcactgtgcttcatcttgtcagggatacagagtggaagacctgatctctgctttcaaagcagcctacattctgtctgaagaaactaggctagtatagccgggcatggtggctcacacctgtaatcccagcactttgggaggccgaggccgacggatcgcttgaggtcaggagtttgagaccagcttggccaacatggcgaaaccccgtctccactaaaaatacaaaaacttagctgggcgtggtggtgcgcgcctgtaatcccagctacttgrgaggctaaggcaggagaattgcttgaacccaggaagcagaggttgcagtgagccaagatcgtgccgctgcactccagcctgggtgacagagcgaaactctgtctcaaaaaaaagaaactaggctagtatgatacaaagtagtaaaccacataaga

SEQ ID NO: 516447 - DNA, 549 bp, Homo sapiens
atggcatttcatttttgaaagcattacatacttaccaaggtgtaccagagcttctgtattaatgacattaattctgtcttaatgatctcaaaacccttgaaagtaagatccatattaatgttactaaatgggaaagatagcctccatcccctttttgtgaggacattggagcttagagaggatgtggctcaagaaaatggcggaacaagagctagagttcagatccttggtgctcattacattgtcctggaagtccaaggatgagggaggttgggaagggtgggaaaattagtatttcatcaggacacttgtgtttgcaaaagaaaaatgcccaattcaaatttacttatgaaaaataaaagacaaagattttactggagaagtaactgggagtttcagggaacrtttggcttcagcaatgttgaatttagggattcagtaatgtcattaagactcagactctctttctatcttgttctatcttgttcttttgctttcttccatgttggttacattctcagatcatctctcttcttactgtggttctgg

SEQ ID NO: 516448 - DNA, 464 bp, Homo sapiens
tgacttgatgcagacccttccctattaccacaaaacagaagagctttcttacagccaggagtcttacataaagaaaagaaaataattatgcatgtctggcagaagagggagttgtagcaatggcttgctggtaaaacggaatatgagcgagcaatagaacactaacttaaccacactcttggtttgataagaagcagagagtgcccaaaagattgaaattttgttagagtctcaaaatgttttatttgaaaatgagcaatggtccttgttctcacaaggtttggtaactaaaagacagcaataatttctcatcttaaagagattctgtggaaaagagtccttgatttagctaattttagcttgaactctaccccattgcaagcacagtatcttcagtgttaaacaagtttagaygttgctaaggagtgcaattttctgcccccattctaagctctaaaggcccc

SEQ ID NO: 516449 - DNA, 622 bp, Homo sapiens
gctccagctgaagtgatgtagcctaataagtttgaaccacctcccacattcccaccccmaccaaatggcaagtctgggcagcttctccattaggttgtgcagccatttaatttaaacacacacacacacacacacacacacacacacacacacacacttctctttttcttttttttttgagagcagaagtcaccttttccctgagacatcttgaacaaagtgtgccttttgatctattttcagagatagttttcagttcaagtctattagtaacttgtgggattcagtttttggatggccagacacccaaaagtagagtagagattcaacatatagctttaaacagagttttacatattgaaacaattgatactattacaagaacgatattcactagcatgcctcatttagcaccatggtctatgttacagtgctactagatgatgctttgaaatcacaacttattttgccaatacaaataccatatactttgcccatgaactaaagttctggagccagatggaaaaaatatgctttgatatgtctccttcttcttaactgctgaaggttttaaagaaataactacatagctttttttgctttcactattgggttgtacagt

SEQ ID NO: 516450 - DNA, 622 bp, Homo sapiens
gctccagctgaagtgatgtagcctaataagtttgaaccacctcccacattcccacccccacsaaatggcaagtctgggcagcttctccattaggttgtgcagccatttaatttaaacacacacacacacacacacacacacacacacacacacacacttctctttttcttttttttttgagagcagaagtcaccttttccctgagacatcttgaacaaagtgtgccttttgatctattttcagagatagttttcagttcaagtctattagtaacttgtgggattcagtttttggatggccagacacccaaaagtagagtagagattcaacatatagctttaaacagagttttacatattgaaacaattgatactattacaagaacgatattcactagcatgcctcatttagcaccatggtctatgttacagtgctactagatgatgctttgaaatcacaacttattttgccaatacaaataccatatactttgcccatgaactaaagttctggagccagatggaaaaaatatgctttgatatgtctccttcttcttaactgctgaaggttttaaagaaataactacatagctttttttgctttcactattgggttgtacagt

SEQ ID NO: 516451 - DNA, 622 bp, Homo sapiens
gctccagctgaagtgatgtagcctaataagtttgaaccacctcccacattcccacccccaccaaatggcaagtctgggcagcttctccattaggttgtgcagccatttaatttaaacacacacacacacacacacacacacacacacacacacacacttctctttttcttttttttttgagagcagaagtcaccttttccctgagacatcttgaacaaagtgtgccttttgatctattttcagagatagttttcagttcaagtctattagtaacttgtgggattcagtttttggatggccagacacccaaaagtagagtagagattcaacatatagctttaaacagagttttacatattgaaacaattgatactattacaagaacgatattcactagcatgcctcatttagcaccatggtctatgttacagtgctactagatgaygctttgaaatcacaacttattttgccaatacaaataccatatactttgcccatgaactaaagttctggagccagatggaaaaaatatgctttgatatgtctccttcttcttaactgctgaaggttttaaagaaataactacatagctttttttgctttcactattgggttgtacagt

SEQ ID NO: 516452 - DNA, 622 bp, Homo sapiens
gctccagctgaagtgatgtagcctaataagtttgaaccacctcccacattcccacccccaccaaatggcaagtctgggcagcttctccattaggttgtgcagccatttaatttaaacacacacacacacacacacacacacacacacacacacacacttctctttttcttttttttttgagagcagaagtcaccttttccctgagacatcttgaacaaagtgtgccttttgatctattttcagagatagttttcagttcaagtctattagtaacttgtgggattcagtttttggatggccagacacccaaaagtagagtagagattcaacatatagctttaaacagagttttacatattgaaacaattgatactattacaagaacgatattcactagcatgcctcatttagcaccatggtctatgttacagtgctactagatgatgctttgaaatcacaacttattttgccaatacaaataccatatactttgcccatgaactaaagttctggagccagatggaaaaaatatgctttgrtatgtctccttcttcttaactgctgaaggttttaaagaaataactacatagctttttttgctttcactattgggttgtacagt

SEQ ID NO: 516453 - DNA, 538 bp, Homo sapiens
gctggttggatatgggcagtggggtagagaattcagtggaattatcaaatggtaatggaaggttgtaaattgctacaagcatttcgaggggcaactcaccttatggtctgctaagtgccttacaaatattttttcaaggtattgttgtctccatcctgcataagatggagccacagctcagaatggtatggtgatcaatttgaagtcacatgtcagagcttggtttagaactcacatttgcctgrtttcgatgcccttgttccttccattgtatctaactctcagcaaagccaagatacaaacataaattatgcaaagttatggtgctcgttttgcttatgtaaaaatgagatctttttattatgcaaagacaagtcaccagaaactcatatccatgatagaaatggctatttaatatgaacattgtttgtattcatctaagaaatgacattgtgatgggaaaatggatttagtcatggtattttgattccattgtaataatgctttatgtttttaaatgtgtttgtatttgtgatgg

SEQ ID NO: 516454 - DNA, 607 bp, Homo sapiens
ccatgacttcaacaggaggagatccatgaagctctaaattggagatgctgaggcaagcgaggggggaactgccatttgataggatgcccctggggcaggggaggrtgatggaaagggtgatgggggcctggagagacagccagttagcaaaatggttaagagttaagctctggggttcaaattcttgctctaacgcttgacatcggggtgactttgggcaaagtaccgtgacttccctgggtctcagttcctcaccacaaaaatatagcaacacctgtgctgttggggtcttgggtggattaactggaatgatctggacagagcccttggcacagtatttggctcataagcagcatttaataactttctagcttctaagaaattaccacccaatatacaaaaatcaacacaaaatggatccaaaatttaagcttaagaaaaaaaagaaattaccctccattatctcaactagactttacatcaaccctatgacttggtaggtatttgccccattttacagataagaaaactgaggcacagagtgtcctgtgcatcccccaagatcacaaagccaggtaagggcagagccaaggtttgagccctggca

SEQ ID NO: 516455 - DNA, 437 bp, Homo sapiens
gtgattttggttagttactttgtttgtggcccattaaaaaaatatctgtacaatgtgtttaatgacgctgatctcataaggccattgcaagaattaaatgaagcaatttagtgcaactaacaatgaatgcttccgtcacttaggggaagagcctggagaactctgtctccagcagattctggtgttgaatgtatctcacyccgaacacatcttttctgaaaacttttatgccagtcgttaccacttttgtgatagaggagagtgtgaattctatttatttgttaatgcactgaattatgggctgttaggagctgttactgaaacatggagtatttaagaatcatttttatgcccttcttattcccatctcactatttcatgccctgtgccccaaataatcttggtgcaatgtgtttgtatagcttatgtctgcatta

SEQ ID NO: 516456 - DNA, 505 bp, Homo sapiens
tgttttggagtgacatgagtgcttaccaaggatgyagaatctcaccacgccttgcagacaggttgagacaggtgttcaccaaacaaggaaacagggatgcaaaaagatgctgaagccatctgggcaaagggcagtttggagaggcaagaggaaaatcctgttgcaagatcccaagcctctaaaaccctggtgtgcctacctccacagtggctatatctcatccagtgatcatgacaattattcaataaattactatgtgttcaataagcattagctacataccagacacttgacatcatgaacaaatgtaattctcgcagcaactctataaggcttactgaggaatcttaggataaagagcttgcccaaggagcttatcaagttaatctcagaggttcccaagggggaacttggaggaataaggtgagggaacatttggggttgtcacaacacacaggtgactgctgaaatgtagtaggcagggggcaggaaagccggagatcta

SEQ ID NO: 516457 - DNA, 505 bp, Homo sapiens
tgttttggagtgacatgagtgcttaccaaggatgcagaatctcaccacgccttgcagacaggttgagacaggtgttcaccaaacaaggaaacagggatgcaaaaagatgctgaagccatctgggcaaagggcagtttggagaggcaagaggaaaatcctgttgcaagatcccaagcctctaaaaccctggtgtgcctacctccacagtggctatatctcatccagtgatcatgacaattattcaataaattactatgtgttcaataagcattagctacataccagacacttgacatcatgaacaaatgtaattctcgcagcaactctataaggctyactgaggaatcttaggataaagagcttgcccaaggagcttatcaagttaatctcagaggttcccaagggggaacttggaggaataaggtgagggaacatttggggttgtcacaacacacaggtgactgctgaaatgtagtaggcagggggcaggaaagccggagatcta

SEQ ID NO: 516458 - DNA, 635 bp, Homo sapiens
tgatttattagcattatattaggtttccctgcgacatcatcattaaacataatttattaaacccatatattttaagcacctaatgcatgtaaggcactgtaggttatgatgctaaaaacacaacacaatccctcttctccataaattctgtcaggtggggaaaaacacacatataaattataaatagaacaatacagtaagaccaatatatgaagtactgcaaaagtacaagaagggtagatgtcattacctccaacaggctaaaaaaaataagggggttcttatcattgctggaggatgagtacatggatcaaatcgagttggaaatgaaaatgccacctcccagtctccttcccctcaaccctccacccagccttgggcaccactcttagctgtttggaaaaaggcatgtgacctaggctcaatcaattagatgctcttgagtagacctttgattcttgagagagagagatgccaagttgctggaagagtcagagatattcttggccccccatrgcagaggccagaggctagtggccagcagtacactggtgtgttgccagaagcagcacttgaaatggcagcaggaatagtgactgatcctcaacagcctgcttcaatggtgtgagctcagc

SEQ ID NO: 516459 - DNA, 443 bp, Homo sapiens
ccaggcaagaactgcttctccaaagcctgattttacctactaggaaattgaaaaatattcttaagaatagtataaaacagttgttctcataaatatcacccaaataactcaatctaaaccttaaggtctaattattacaaaaatgacttgaatcagatttcactctgatgtgaaastgcttcagctcagtattcagtcaaattatggaagatattaagataagaggggttctgccttttcctagagatgatatgccagagtgtgaaatggccttaacacccattgagaataaaaatgcccttagatagagcaatgcatgtgtacatgatgctttactcatccaagccactctttttgggtttctattgtgttgtaggttttgtgttaggtgctgaggacacagtaacaatcagatcgatccagaccacactgtgctctcattc

SEQ ID NO: 516460 - DNA, 604 bp, Homo sapiens
gttcatttaaccaaattttatgtggatatctgcacagcattaacaataatcgctaagtaagtggttttgaatgtggaatgtggtgacctattttcaccaaataggttcctgaggaagctgactctgagccagagatcgrcatgcaggatatttatgagggtgagctcttaggatcaaaatctatattactcagggttttctagagaaatagaaataatgttttacctgttatctgggcatcccttagcccagtcaagttgacacataaaattaaccatcacaacagcgacaggaagcaggactgggctaagcccccaaagcttccctcagccagggctgtggggggctctgagattgggatgactctcagcatttccctggtttgggccaatgggactggcctgtattcttctgtatccatcagtttttggatacaggctgccccctgggaaaggggttgtgactttggctgaggaaattctcagagagggctgagagtgtctgccagtagccagacatgtatccttctgttctgaagggaggtctgagtgtcaaggcagagcatccatgacacctgttcaggaagcaggagtgtctatgagca

SEQ ID NO: 516461 - DNA, 601 bp, Homo sapiens
gttcatttaaccaaattttatgtggatatctgcacagcattaacaataatcgctaagtaagtggttttgaatgtggaatgtggtgacctattttcaccaaataggttcctgaggaagctgactctgagccagagatcgacatgcaggatatttatgagggtgagctcttaggatcaaaatctatattactcagggttttctagagaaatagaaataatgttttacctgttatctgggcatcccttagcccagtcaagttgacacataaaattaaccatcacaacagcgacaggaagcaggactgggctaagcccccaaagcttccctcagccagggctgtggggggctctgagattgggatgactctcagcatttccctggtttgggccaatgggactggcctgtattcttctgtatccatcagtttttggatacaggctgccccctgggaaaggggttgtgactttggctgaggaaattctcagagagggctgagagtgtctgccagtagccagacatgtatccttctgttctgaagggaggtctgagtgtcaaggcagagcatccrtgacacctgttcaggaagcaggagtgtctatga

SEQ ID NO: 516462 - DNA, 534 bp, Homo sapiens
cggatgactgaaatataatgatttgttattrgagaatcagggttgccaattaaactcatactacattgagctgtgcaaagggcttgtagctctattttctacagaagatattttatctcctttgagaacctctttctgtctaattagtgagaggggaataaaatatctaaatttaatcattctgattcaataatttaaatggtctcttaaggtaaatcagtttcttttagatcaaatcctaatctttcagattgttacttcctcactcatattttcttcccatatgatgttgggatgtatggaggtataagtgatttggcatgattgggttggggaataatgatggggcctccaggagccatgagcaggtcctggcactgcctcctcttcttgtggtagcagtttccctcattctacttgtctgctcaggtcaagtggagttctctttgctcatgcctcagttatatcccagaggacctccctgaagattcagcctcagcttacctttgatgggcttctggacctccctgaaat

SEQ ID NO: 516463 - DNA, 534 bp, Homo sapiens
cggatgactgaaatataatgatttgttattggagaatcagggttgccaattaaactcatactacattgagctgtgcaaagggcttgtagctctattttctacagaagatattttatctcctttgagaacctctttctgtctaattagtgagaggggaataaaatatctaaatttaatcattctgattcaataatttaaatggtctcttaaggtaaatcagtttcttttagatcaaatcctaatctttcagattgttacttcctcactcatattttcttcccatatgatgttgggatgtatggaggtataagtgatttggcatgattgkgttggggaataatgatggggcctccaggagccatgagcaggtcctggcactgcctcctcttcttgtggtagcagtttccctcattctacttgtctgctcaggtcaagtggagttctctttgctcatgcctcagttatatcccagaggacctccctgaagattcagcctcagcttacctttgatgggcttctggacctccctgaaat

SEQ ID NO: 516464 - DNA, 495 bp, Homo sapiens
ctggcagtccatccatggtatgaaacttggctaccctttgatttgtcactcagccctccatttactcagctccactcacacttagatgattatatattatacattatattgtattccttgatttcaatagaatattatctagcagacatactaatattttggttatttactatatatgaaagacacaacttctttcttttcttttttttttttttgaggcggagttttgctcttgttgcccaggctggagtgcaggggcatgatctcagctcactacaacctctgcctcctgggttcaagcgattctcctgcctcagcctcccaagtagctgggattgcaggctcccaccaccatgcctggctaattttaaaaatatttttagtagagacggggtttcacaatattggccaggctagtctcgaactcctgacctctggtggtccacccrccttggcctcccaaagtgctgggattacaggtgtgagccactgcac

SEQ ID NO: 516465 - DNA, 551 bp, Homo sapiens
gcttttgtgcaggaaggctggcctctcaggattatttcccatgttattatgatcaaatttcttaatgcrataggagggcaacaaagcacagcatttatatccatcagtacaggctgtgaaatgttacctggacacacacacaaaggataatgatatagaaaaccttgataaggaacttcatgtgttatgtttatccacagtatattacatgaagttttattagaacataaatttgctgatcttattccagaaatattagacttaggtaagaaaataacattcacaaaatataaataatatattgaacccaatctaaagattaacaaactttctccagtattatgtattattagaaaaacaatatacataacattgtattctgaaatacaataaagtattctgattttagttcaggagttttaatatctagaaacagaaaagaaaacagaattataatttaaacaacaaaggcaatgttctaaatctaatctttaggtggtagagactactgtatttatcatacaattcatgtgccttggaaaagaaaatgg

SEQ ID NO: 516466 - DNA, 596 bp, Homo sapiens
atatcaaatcctgacaaagttagtatacaaaaaactttctaagctaatttcacttgtaaatgcagaggcaaagattccacatatcagcatatcaaatcagtagtgcactaaaagaattaaaccaacaacaaggtaacatttttaggaatgtaaaatagttgatattaaataatctactaatatactttacctaattttagattaaagagaaaaaagaatctcacaaactgttcagtatatgtcaaaaaggtgtttggyaaattcgtcactgttgacttacaaaacatcctagtgaaattaggatcaaggatacatccacagcaagactgagtcttaagcatagacccctgagtggtctgaggcctggttgccaggcccttaaaagaccttcctgatttatgcatatttaatgatttacaattaaagctggttatgagagtacaaaaggcatatttctccctactcccattatataaaaacagtcctattgatgcagtggcgggctgtctggagtggccactgccatcagtaggacttctgcctattgatgtcctattctgcagtcctattctgcctattctgcagtggccttctgc

SEQ ID NO: 516467 - DNA, 611 bp, Homo sapiens
tgaaaaaatctgggtcagactttcctctctccagtctccctgtctgtcttaacctgatctttaatcacagttccactgctcagggaaaatgaggaggaggtgaatgactacagtagaacaaggatagaggagagagaagagaagagggagaacagcagaacattttccaggattcctaatgcaaatcacaggtgccgtctgatggtgggaagaatgcaagttgagaggaaacttgaagagaaaaggaatgaggattatccatgggatatggactgagtagatgaaatgaaggctttggatttggggatgagcagaggaaagccagtgctttcatatctctcttctatcttcgctctctacctgcaagctattggaggctctagtcttctcttctccttatgacccaggtaatgggcacatacaagtgggtctgggccttgatagggcaggaaattgtcttgyctctcttgtgttgcatgcaatactgtttactcaaagtagggagaaacaggatattcataagcacctacatgaaccatcatacacaaacccacacattctcacttcccactccctcataatgggaaaccaacattttgatctttatattc

SEQ ID NO: 516468 - DNA, 582 bp, Homo sapiens
gtacaagtgtggtgaaagattttatacagcagcaatccctgaataaaccaagtaaaataataacagataaagaacaaggcagaatctgaaaatgccatgttgacacatttccatctgatcctatccagaacagagaaaggaaggagaagggagagctatatgtgtcattcttaaattcacaagagatacwgtcttctgcacaggtaaaactctaggaattttcttacatgatctcccttaggtaataagtctacactgtaaggtaataattattattttcattttacagataaagagatcaagactcccaaagtaattgagacacagcataatttataatttgactatcaatttactaatgcatagaattattattcaaacatggaactcacactctcaaccatgagtgtatattaatcccaaatgtgagaatttcaggggaattcttctgcaagcaccccatagcattttcctcatctggggttgcttgagagaaagttttgtcaattaacttgggccatggaaagtctgagaaagcatttcctacccttaaatttcccataagattcactttcttactct

SEQ ID NO: 516469 - DNA, 617 bp, Homo sapiens
tgtggaggtgggtggagaggaggcgggtaattatgcaggaaaaatagttttcttgatattcttctggaaatatgcgtggaacagagggagcagcaggagagatgccaggcaaggagaaaatgtatgaatagcagaatgcatggtgcctctccaaaggcagacagaggcagcgctgctttgaccacagcatccttttgtggggagcatctgggactccatgagacacttccgcagggactcttcaatgtaggactttattcatgggtccattacagaatttgctgggaatgattgagcctttcttccccctgtaatcccagcactttgggaggctgaggtgggaggattgcttgaggccaggagttcaagaccagcctaggcaacaaagtaagatctcgtctctacgaaaaaaaaaaawtttttttaattagtcagaaaaaaaaatgggagaggcgtgagggataaaagactacacattgggtacagtgtagactgcttgggtgatgggtgcatcaaaatctcagaaatcaccgctaaagaacatatccttgtaaccaaacactacctgttcccccaaaacctattgaaattttaaaaaataataaccaagtgtggtg

SEQ ID NO: 516470 - DNA, 587 bp, Homo sapiens
ctgctgacacccgctcctaaagccccttgacaccacctgttggcaccaccactgcctacatccccaaatgccaggcctgacttttccaatcaaccttggctcttgtcccttactccttggacccctttcttaatttctggtcctgagacatagaacacaaagaacaagagctcttctctctcagggttgttgtgaaaattaaacgaaataagagtttaagagcataaactgggaaataataaagataatagattgtttgacctagatgcaattgtagatcatagaaaatatcgatgaatgtagaccggagataggatcttgttctagaaagatgcatacgttttgaattgacacaagaataaagtacattttaggccaggcaaagtggctcacacctgtaatccctacgctttgagaggcagaggtgagaggatcacatgagaccagttgttcaagaccagcctgggcaacacagtragatcccatctctacaaaaaacctttttaaaaattagccaggtgtggtgttgcacactcatagtcccatctactcaagaggccaaggcaggaggatcatttgagcccagg

SEQ ID NO: 516471 - DNA, 587 bp, Homo sapiens
ctgctgacacccgctcctaaagccccttgacaccacctgttggcaccaccactgcctacatccccaaatgccaggcctgacttttccaatcaaccttggctcttgtcccttactccttggacccctttcttaatttctggtcctgagacatagaacacaaagaacaagagctcttctctctcagggttgttgtgaaaattaaacgaaataagagtttaagagcataaactgggaaataataaagataatagattgtttgacctagatgcaattgtagatcatagaaaatatcgatgaatgtagaccggagataggatcttgttctagaaagatgcatacgttttgaattgacacaagaataaagtacattttaggccaggcaaagtggctcacacctgtaatccctacgctttgagaggcagaggtgagaggatcacatgagaccagttgttcaagaccagcctgggcaacacagtgagatcccatctctacaaaaaaccttttwaaaaattagccaggtgtggtgttgcacactcatagtcccatctactcaagaggccaaggcaggaggatcatttgagcccagg

SEQ ID NO: 516472 - DNA, 486 bp, Homo sapiens
aggaaatgcttgtgttcagcttttgagcttagggaaactcgtcaaacctaaggaaaattgtttccataatttttgggtaaatgaaaataatttctgatcccatgatacaaagctccatgaagttcaygttttcatctgactcatagaaatacaaaaacattttatttttgccttctttttggtgggtacagatttctttggtgataaatgacaaaaagagaggaaggaaaatatctgggctgtgatggggactggtctctacctgtttttctgagggtgtggcttcaaaagagttaaatcacacacaccactacaaaaattaggaataccaatccctttcttttaagataataaaatggaaaatacccaatggacacaaacatgttcaaaaggtttttttttcctctcaagccaatttccaccctcataaaaagagacaaatgattatatgattggatgctaactccattggacattctataactc

SEQ ID NO: 516473 - DNA, 454 bp, Homo sapiens
ctagctgtgttctgtctgttatattctgcatatagtactcttcattgatgtctgactttgccaagtcatcttttraagacaattctgtatcatgaacctgaatggacaggccatactcaaggactaagaggcaggcctggcagatgttcctcaatgtcctgcaggcttggcacacttcagtcttcttgaaatgcatgtggatcccagggtaccaacaaaacactgtgtatggcctggaatagattttccattttgtctcatacttttctttggtcattcagatatacaggttttctccaagacatgtctggcacagaatggagaagtttacgtcttcccagttttgcttattttaggtattggaaccaagaaatgtcaccgtcttgagagggtctagaggcagtggtagcattcgaggtggtagccaggaccgccacacacccatcagcccaac

SEQ ID NO: 516474 - DNA, 461 bp, Homo sapiens
tcacctggagacagaacttgcctaagcctgcttcaaggacaactcccaggagagtttcaatacccaacatgtgctgtgggattggggctcactagagccaaattccaagcagttccaaagcagacaaatgaatcgttcttcccacatgagcctctagtctccctcagtggccttacactgaagggaaccttggactttatgtcacatctggggctgtggttctcttttaactctctgtctctttgcttccaacagttggaacccagagctcctactgcccaaagcttccctagtgccaggactggaggccatgggctccccacatgcytctccacagagcccctcttttttcaccttaccctccatgtgggcagctaacagagtggcccatggtggaagagtacaggtctttctggagttgcaattccttctgtaactcatgaccttgctctcagccacca

SEQ ID NO: 516475 - DNA, 653 bp, Homo sapiens
ctgtatgtggtataaaaatgggtggcaccacattttcaagaaatctccacctttttccaggaatttccatgaatatcccaccccttggtcaaagaaacccctaaaggtggaaaccccaaacctcttggcacatctctcttgagtgcacctgctctcctctttctggagtgtgtactttttgctttgcaataaatctctgtactttcactattttctgagtcatccttgaattccttctcacaatggtgttaagaatctggatactggcatgtttgggaccttccacagctcactggtatcagaaccactccccatgagatggtgtagacatgatctgatagagctgcaggctgtgggagcttgcagagcctggggaagtcaagccagtcttcayaaatgaggcaggatattcatgctggcagttctgggaggatagactagcttgagtctagctatagactcaagtcatgctagctatagactagcatggaggtgtgggggtgcaaggttgtgtgcaggggaaccgcgaggagtctgcgtagcctaggaataagcccataggccaaatctggctgaccacctgcttttataaataaaatttcactggactacaaccatgcgcactcctttatatacagcccatggttgctttt

SEQ ID NO: 516476 - DNA, 637 bp, Homo sapiens
gctgcaggctgtgggagcttgcagagcctggggaagtcaagccagtcttcataaatgaggcaggatattcatgctggcagttctgggaggatagactagcttgagtctagctatagactcaagtcatgctagctatagactagcatggaggtgtgggggtgcaaggttgtgtgcaggggaaccgcgaggagtctgcgtagcctaggaataagcccayaggccaaatctggctgaccacctgcttttataaataaaatttcactggactacaaccatgcgcactcctttatatacagcccatggttgcttttttcatgcacattcctttatatatggcctgtggttgcttttttttttttttctttgtgaggaagttttgctctttttgcccaggctgttgtgcaaaggagcaatctcagctcactgcaatctctgcctcctggattcaagtgattctcctgcctcagccttcccagtagctgggactataggcaagcgccaccatactcagctagttttggtactttgagtagtatcgggggaaccagcccccaatatttcaacgtacgttctttctattttccctaagtgtcagccagtctgagaaataaagagtacaaagagaggaattttgcag

SEQ ID NO: 516477 - DNA, 637 bp, Homo sapiens
gctgcaggctgtgggagcttgcagagcctggggaagtcaagccagtcttcataaatgaggcaggatattcatgctggcagttctgggaggatagactagcttgagtctagctatagactcaagtcatgctagctatagactagcatggaggtgtgggggtgcaaggttgtgtgcaggggaaccgcgaggagtctgcgtagcctaggaataagcccataggccaaatctggctgaccacctgcttttataaataaaatttcactggactacaaccatgcgcactcctttatatacagcccatggttgcttttttcatgcacattcctttatatatggcctgtggttgcttttttttttttttcttygtgaggaagttttgctctttttgcccaggctgttgtgcaaaggagcaatctcagctcactgcaatctctgcctcctggattcaagtgattctcctgcctcagccttcccagtagctgggactataggcaagcgccaccatactcagctagttttggtactttgagtagtatcgggggaaccagcccccaatatttcaacgtacgttctttctattttccctaagtgtcagccagtctgagaaataaagagtacaaagagaggaattttgcag

SEQ ID NO: 516478 - DNA, 637 bp, Homo sapiens
gctgcaggctgtgggagcttgcagagcctggggaagtcaagccagtcttcataaatgaggcaggatattcatgctggcagttctgggaggatagactagcttgagtctagctatagactcaagtcatgctagctatagactagcatggaggtgtgggggtgcaaggttgtgtgcaggggaaccgcgaggagtctgcgtagcctaggaataagcccataggccaaatctggctgaccacctgcttttataaataaaatttcactggactacaaccatgcgcactcctttatatacagcccatggttgcttttttcatgcacattcctttatatatggcctgtggttgcttttttttttttttctttgtgaggaagttttgctctttttgcccaggctgttgtgcaaaggagcaatctcagctcactgcaatctctgcctcctggattcamgtgattctcctgcctcagccttcccagtagctgggactataggcaagcgccaccatactcagctagttttggtactttgagtagtatcgggggaaccagcccccaatatttcaacgtacgttctttctattttccctaagtgtcagccagtctgagaaataaagagtacaaagagaggaattttgcag

SEQ ID NO: 516479 - DNA, 637 bp, Homo sapiens
gctgcaggctgtgggagcttgcagagcctggggaagtcaagccagtcttcataaatgaggcaggatattcatgctggcagttctgggaggatagactagcttgagtctagctatagactcaagtcatgctagctatagactagcatggaggtgtgggggtgcaaggttgtgtgcaggggaaccgcgaggagtctgcgtagcctaggaataagcccataggccaaatctggctgaccacctgcttttataaataaaatttcactggactacaaccatgcgcactcctttatatacagcccatggttgcttttttcatgcacattcctttatatatggcctgtggttgcttttttttttttttctttgtgaggaagttttgctctttttgcccaggctgttgtgcaaaggagcaatctcagctcactgcaatctctgcctcctggattcaagtgattctcctgcctcagccttcccagtagctgggactataggcaagcgccaccatactcagctagttttggtactttgagtagtatcgggggaaccagcccccaatatttcaacgtacgttctttctattttccctaagtrtcagccagtctgagaaataaagagtacaaagagaggaattttgcag

SEQ ID NO: 516480 - DNA, 595 bp, Homo sapiens
agcaattaattggcacctcttaaatctcccggagctctagcaagaaaggtacttagggctgtcagatgcagccaggaggagaatagaaggtakctcttgtgtccccagtgggagacgaacatacaaatccatcagctctggcatctgaaaggataaacaagtcttttaaaaagccatgagcaccatttaaagtccacctgagagttgtgagctgaaggcaaagctagcccaggagctcaccagaaggaggggggctggaggggcagttcctccaaaccctgtcagcttctaaagacaactaaacccagtagaaggaccactctcttctttcagcttcatgaatgggtcatcactacctatctccaagggcagccaagcacaccctgcttcagagacgatgccaagaggttctcctgcccctgcacctactccagaggatacaggaccagggatcaagttgtccacaggtctgaccatacctaggacggctcatccacacacagataattctgagcctggagaaggatcagcacccccatgcatgatctcattcaatcctcggcaacggaagtcctgtaaggagactctagcatca

SEQ ID NO: 516481 - DNA, 602 bp, Homo sapiens
attctccaggggagcttggaaagcaattaattggcacctcttaaatctcccggagctctagcaagaaaggtacttagggctgtcagatgcagccaggaggagaatagaaggtagctcttgtgtccccagtgggagasgaacatacaaatccatcagctctggcatctgaaaggataaacaagtcttttaaaaagccatgagcaccatttaaagtccacctgagagttgtgagctgaaggcaaagctagcccaggagctcaccagaaggaggggggctggaggggcagttcctccaaaccctgtcagcttctaaagacaactaaacccagtagaaggaccactctcttctttcagcttcatgaatgggtcatcactacctatctccaagggcagccaagcacaccctgcttcagagacgatgccaagaggttctcctgcccctgcacctactccagaggatacaggaccagggatcaagttgtccacaggtctgaccatacctaggacggctcatccacacacagataattctgagcctggagaaggatcagcacccccatgcatgatctcattcaatcctcggcaacggaagtcctgtaagg

SEQ ID NO: 516482 - DNA, 418 bp, Homo sapiens
ccataagattataatgctgtatttttactgtaccttttctatgttgagatatgatacacaaatactaaccactgtgttacaaatgcctaccagaytcagtaaaataacatgctgtagaggtttgcagcctaggagtgataagtacaccataatatagcctaggtgtgtagcagactataccatctaggtttgtataagtgcaccctgtgatgttcttacattgacaaaatcaaccaactatacaattctcagaacacgtccccgtcattatgcgacatatgacagtacactgaagcacttgcctccaggagagaagctcgggccctgtagaacttctacgtctgctgtgcttcaaaccaaaccacagggaaggagagaaggggccaactgtgtgaggagcagctttttcattgtgtat

SEQ ID NO: 516483 - DNA, 665 bp, Homo sapiens
tggatggatagataggtgggtggatggatagatgggtgggtgggcaggtggacgaatgaatggatggttgagtcggtgaagggatggttgagtgggtggagaaatggatgagtgggtgaatgggtggagggatagataaatggatggacgggtgggtggatagatggttagatgagtgaatgggtggatagatgcatgggtaagtagatggatagatggtttggtaggtggktaggtggataatagctgggtgcacaagagagtggattggatggatagatgggtgggtgggtggatagatgggtaggtgggtggatggatgtatgcatgtctggatggatggatggatggatggatggagggatggatggatggatggatggatggatggaaggaagtgtggacggataggcgggacagatgagcaggtggacttgagcatttatccggggtcctccaaagaattgagtgattttcctagggtgtgtcatcacctgcaggtgggtgggcaagggggcttgcctctgtaatactcatgattatgggtaatggtcagccttagtcaccaccctcagaacactttattgactaggaaagtcaaaactggcattgacaactaatgcaaattacagctataactaacagaagatgttgatctgatgaca

SEQ ID NO: 516484 - DNA, 576 bp, Homo sapiens
tgagtgggtggagaaatggatgagtgggtgaatgggtggagggatagataaatggatggacgggtgggtggatagatggttagatgagtgaatgggtggatagatgcatgggtaagtagatggatagatggtttggtaggtggttaggtggataatagctgggtgcacaagagagtggattggatggatagatgggtgggtgggtggatagatgggtaggtgggtggatggatgkatgcatgtctggatggatggatggatggatggatggagggatggatggatggatggatggatggatggaaggaagtgtggacggataggcgggacagatgagcaggtggacttgagcatttatccggggtcctccaaagaattgagtgattttcctagggtgtgtcatcacctgcaggtgggtgggcaagggggcttgcctctgtaatactcatgattatgggtaatggtcagccttagtcaccaccctcagaacactttattgactaggaaagtcaaaactggcattgacaactaatgcaaattacagctataactaacagaagatgttgatctgatgac

SEQ ID NO: 516485 - DNA, 665 bp, Homo sapiens
tggatggatagataggtgggtggatggatagatgggtgggtgggcaggtggacgaatgaatggatggttgagtcggtgaagggatggttgagtgggtggagaaatggatgagtgggtgaatgggtggagggatagataaatggatggacgggtgggtggatagatggttagatgagtgaatgggtggatagatgcatgggtaagtagatggatagatggtttggtaggtggttaggtggataatagctgggtgcacaagagagtggattggatggatagatgggtgggtgggtggatagatgggtaggtgggtggatggatgtatgcatgtctggatggatggatggatggatggatggagggatggatggatggatggakggatggatggaaggaagtgtggacggataggcgggacagatgagcaggtggacttgagcatttatccggggtcctccaaagaattgagtgattttcctagggtgtgtcatcacctgcaggtgggtgggcaagggggcttgcctctgtaatactcatgattatgggtaatggtcagccttagtcaccaccctcagaacactttattgactaggaaagtcaaaactggcattgacaactaatgcaaattacagctataactaacagaagatgttgatctgatgaca

SEQ ID NO: 516486 - DNA, 594 bp, Homo sapiens
acttgcagttcaccccaaaaggctcaccctcttcgctccacctacacatgaccttcagctcaaagacatttccaggcctccaggtcagcccttcttccagcctttgaattaatcctaatgactgcctgcccactgggtatcttcacctgtcatcacacagccttttccaacactgtccttcaatccagccctcactaaacgctggaactgttgttgacaaaatccagaacaagctgggtgggggatgcaggtgggaagcaggctgtagtaatggggaaaatttctaagcaatctcgaayagagaaaagaaactgaacaggtaagagagaggcagtcaagagaagtgttaattttgcataactgaagctgaagatcggggggcatggcagaccacaagataaatatgatacagactcctttttaaaaaagtgtaaacatccaccctttcctactgacaactaaggtctttactaaaggcgagtcagaaaaactggtattttatggaatacagtaagaaggcccacagacaagtatgttcctgacaccatcttctagcataacccctgggattctgggtacacctgtcctaaagtt

SEQ ID NO: 516487 - DNA, 594 bp, Homo sapiens
acttgcagttcaccccaaaaggctcaccctcttcgctccacctacacatgaccttcagctcaaagacatttccaggcctccaggtcagcccttcttccagcctttgaattaatcctaatgactgcctgcccactgggtatcttcacctgtcatcacacagccttttccaacactgtccttcaatccagccctcactaaacgctggaactgttgttgacaaaatccagaacaagctgggtgggggatgcaggtgggaagcaggctgtagtaatggggaaaatttctaagcaatctcgaacagagaaaakaaactgaacaggtaagagagaggcagtcaagagaagtgttaattttgcataactgaagctgaagatcggggggcatggcagaccacaagataaatatgatacagactcctttttaaaaaagtgtaaacatccaccctttcctactgacaactaaggtctttactaaaggcgagtcagaaaaactggtattttatggaatacagtaagaaggcccacagacaagtatgttcctgacaccatcttctagcataacccctgggattctgggtacacctgtcctaaagtt

SEQ ID NO: 516488 - DNA, 594 bp, Homo sapiens
acttgcagttcaccccaaaaggctcaccctcttcgctccacctacacatgaccttcagctcaaagacatttccaggcctccaggtcagcccttcttccagcctttgaattaatcctaatgactgcctgcccactgggtatcttcacctgtcatcacacagccttttccaacactgtccttcaatccagccctcactaaacgctggaactgttgttgacaaaatccagaacaagctgggtgggggatgcaggtgggaagcaggctgtagtaatggggaaaatttctaagcaatctcgaacagagaaaagaaactgaacaggtaagagagaggcagtcaagagaagtgttaattttgcataactgaagctgaagatcggggggcatggcagaccacaagataaatatgatayagactcctttttaaaaaagtgtaaacatccaccctttcctactgacaactaaggtctttactaaaggcgagtcagaaaaactggtattttatggaatacagtaagaaggcccacagacaagtatgttcctgacaccatcttctagcataacccctgggattctgggtacacctgtcctaaagtt

SEQ ID NO: 516489 - DNA, 640 bp, Homo sapiens
agggggaacccgggcgcaatggagggagatgcctttcacaggcaggagaccgatgaccagtatcaacctgatgatattaacaatggtagtaataataaataacagtgaagttaatatttatgaagtccttactctctgataaggggcattcatgcatactctcatttaatatgcactacagtcctagaggtaagaagcataattatccccattctwtgtagagaaaactatggcaaccagatgcctcccatcctggtactgacacccttgtacaacctcttccctgttaatgtgggtggggcctatgactttcttataaccaagagaatatggcatatggcagaggtgatgggatgtagtgattacgttagataggatgttaagttgtcttgctaggagactgtctgtcttgctggctttgaagatgtgagctgccatgtcatgagcggccagatggagaggcccacgtggcaagaagctgagggcagcaagaaaccggggccctgagtccagcagcctgcaaggaactgaatgctgccaacaaccagatgagcctggaagcagatcaatcacccgtcaagcctccagatgagaaccgagccctggctgacactacggctgcagccttgcactgaaccca

SEQ ID NO: 516490 - DNA, 537 bp, Homo sapiens
ctttttaaaaaagtgtaaacatccaccctttcctactgacaactaaggtctttactaaaggcgagtcagaaaaactggtattttatggaatacagtaagaaggcccacagacaagtatgttcctgacaccatcttctagcataacccctgggattctgggtacacctgtcctaaagttgtctctcactcctgctgttggagaactactgtgagagaagaaccatggtgaagtggttaagagtgtgcacccagcgaccagccaggtggcttcaaaccatcactatctaatactgagcaagttacataatgttcctgagcctcaactttctcatctgtaaaatgggcatgccatcytttattaatcaaattctaggtgagcatatactaaacactagagacacaaatgagaatcagaaacaggcatggacctggccctcacagtgaccacagtcttgaaggggaaggatgacacacacagaagtaggaagctgtacctgagctagtgtctaccacagagaggtacctggtgtcatgaaa

SEQ ID NO: 516491 - DNA, 470 bp, Homo sapiens
ctggacacatatacaccctcaggctcagkatacccaggacagagtcctagatgcttgaagtcatgataagtatccagaatgacacagaattccagccaggcatggtggctcacgcctgtaatcccagcactttgggaggccgaggtgggtggatcacctgaggtcaggagttcaagaccagcctggccaacatggtgaaactccctctctactcaaaatacaaaaaaattagctgggtgtggttgtgggtgcctctagtcccggctactcaggaggctgagacaggagaatcgcttgaacccgggaggcagagactgcagtgaaccgagattgcaccattgcactccagcctgggcaacaaaagtgaaattcagtctcaaaaaagaaagaaagaaaaaaaaaaagaatgacacagcatttgctaaaggggagaaagggctttcttccaaagctgagcctggtttctacag

SEQ ID NO: 516492 - DNA, 470 bp, Homo sapiens
ctggacacatatacaccctcaggctcagtatacccaggacagagtcctagatgcttgaagtcatgataagtatccagaatgacasagaattccagccaggcatggtggctcacgcctgtaatcccagcactttgggaggccgaggtgggtggatcacctgaggtcaggagttcaagaccagcctggccaacatggtgaaactccctctctactcaaaatacaaaaaaattagctgggtgtggttgtgggtgcctctagtcccggctactcaggaggctgagacaggagaatcgcttgaacccgggaggcagagactgcagtgaaccgagattgcaccattgcactccagcctgggcaacaaaagtgaaattcagtctcaaaaaagaaagaaagaaaaaaaaaaagaatgacacagcatttgctaaaggggagaaagggctttcttccaaagctgagcctggtttctacag

SEQ ID NO: 516493 - DNA, 470 bp, Homo sapiens
ctggacacatatacaccctcaggctcagtatacccaggacagagtcctagatgcttgaagtcatgataagtatccagaatgacacaraattccagccaggcatggtggctcacgcctgtaatcccagcactttgggaggccgaggtgggtggatcacctgaggtcaggagttcaagaccagcctggccaacatggtgaaactccctctctactcaaaatacaaaaaaattagctgggtgtggttgtgggtgcctctagtcccggctactcaggaggctgagacaggagaatcgcttgaacccgggaggcagagactgcagtgaaccgagattgcaccattgcactccagcctgggcaacaaaagtgaaattcagtctcaaaaaagaaagaaagaaaaaaaaaaagaatgacacagcatttgctaaaggggagaaagggctttcttccaaagctgagcctggtttctacag

SEQ ID NO: 516494 - DNA, 470 bp, Homo sapiens
ctggacacatatacaccctcaggctcagtatacccaggacagagtcctagatgcttgaagtcatgataagtatccagaatgacacagaattccagccaggcatggtggctcacgcctgtaatcccagcactttgggaggccgaggtgggtggatcacctgaggtcaggagttcaagaccagcctggccaacatggtgaaactccctctctactcaaaatacaaaaaaattagctgggtgtggttgtgggtgcctctagtcccggctactcaggaggctgagacaggagaatcgcttgaacccgggaggcagagactgcagtgaaccgagattgcaccattgcwctccagcctgggcaacaaaagtgaaattcagtctcaaaaaagaaagaaagaaaaaaaaaaagaatgacacagcatttgctaaaggggagaaagggctttcttccaaagctgagcctggtttctacag

SEQ ID NO: 516495 - DNA, 640 bp, Homo sapiens
agggggaacccgggcgcaatggagggagatgcctttcacaggcaggagaccgatgaccagtatcaacctgatgatattaacaatggtagtaataataaataacagtgaagttaatatttatgaagtccttactctctgataaggggcattcatgcatactctcatttaatatgcactacagtcctagaggtaagaagcataattatccccattctatgtagagaaaactatggcaaccagatgcctcccatcctggtactgacacccttgtacaacctcttccctgttaatgtgggtggggcctatgactttcttataaccaagagaatatggcatatggcagaggtgatgggatgtagtgattacgttagataggatgttaagttgtcttgctaggagactgtctgtcttgctggctttgaagatgtgagctgccatgtcatgagcggccagatggagaggcccacgtggcaagaagctgagggcagcaagaaaccggggccctgagtccagcagcctgcaaggaactgaatgctgccaacaaccagatgagcctggaagcagatcaatcacccgtcaagcctccagatgagaaccgagccctggctgacactayggctgcagccttgcactgaaccca

SEQ ID NO: 516496 - DNA, 601 bp, Homo sapiens
ggttttgtaagctgtgcgaggtgagatcccaagcccttgcctggagacccatcttaggaaaatgttagaacagggcaacaagttgccatttcctccctcctttctcttccccatacaaaaatcgaaaagcaccctagcccagtgcccagccacatggtgaggaaaccccactcaaaatcctgggttrtgcccctgataccaaagacctgcagaattgggactcacctgctccaaccctagcccagacctgtgtacatttcaagggtggctggactcatggccgcctgggatgtcagggtggtacaaagtcctcttaacctaagactgtcggggtacaaggctcagcattttttttgtttctctcgagggccagatggtaaatagttcagcattgcaggccataggtctctgtcgcaactattcaactctccaatgtagcaggaaagcagccacagacaatatgcactgaaataggtgtggctgtgttccaataaaactttatttgtatgaacaggcagggggctgtctctggcctgtgggctgtagcctgcctcctctgctacagcgtgatctccaaggacccatccatcttgtagaccag

SEQ ID NO: 516497 - DNA, 601 bp, Homo sapiens
ggttttgtaagctgtgcgaggtgagatcccaagcccttgcctggagacccatcttaggaaaatgttagaacagggcaacaagttgccatttcctccctcctttctcttccccatacaaaaatcgaaaagcaccctagcccagtgcccagccacatggtgaggaaaccccactcaaaatcctgggttgtgcccctgataccaaagacctgcagaattgggactcacctgctccaaccctagcccagacctgtgtacatttcaagggtggctggactcatggccgcctgggatgtcagggtggtacaaagtcctcttaacctaagactgtcggggtacaaggctcagcattttttttgtttctctcgagggccagatggtaaatagttcagcattgcaggccataggtctctgtcscaactattcaactctccaatgtagcaggaaagcagccacagacaatatgcactgaaataggtgtggctgtgttccaataaaactttatttgtatgaacaggcagggggctgtctctggcctgtgggctgtagcctgcctcctctgctacagcgtgatctccaaggacccatccatcttgtagaccag

SEQ ID NO: 516498 - DNA, 360 bp, Homo sapiens
aagtgcaacaccccagtggtcagcacacaaaggggtccaaatgtgaaaggaaagggcaaatacaggggaaacayaggggtgttcagaaatagttcctaggtcactgcctgtttcaatatgtacagtcctcggccccacccacaagattctgacttggcaggtcagagttggagatggggagctacctggttacgagggatcccagtgcattttgaggcagccggttgttagactgcattgtaaaaattacccctcaaagatgtgaaggtaagcagaaaggcataggcaggctagaaaaggacacaagtaaaacatgaacaagttcattccagaaggagattctcaaccacagctgcacac

SEQ ID NO: 516499 - DNA, 360 bp, Homo sapiens
aagtgcaacaccccagtggtcagcacacaaaggggtccaaatgtgaaaggaaagggcaaatacaggggaaacataggggtgttcagaaatagttcctaggtcactgcctgtttcaatakgtacagtcctcggccccacccacaagattctgacttggcaggtcagagttggagatggggagctacctggttacgagggatcccagtgcattttgaggcagccggttgttagactgcattgtaaaaattacccctcaaagatgtgaaggtaagcagaaaggcataggcaggctagaaaaggacacaagtaaaacatgaacaagttcattccagaaggagattctcaaccacagctgcacac

SEQ ID NO: 516500 - DNA, 553 bp, Homo sapiens
ccgggcctgcgctgcgctcacctgccccggcccaggcggtcgctctcccctacccgtggccagacccgctccggccaggccgtgcacctcctccccgccccagccaggttgcaccccgatggtctccctgcccaaggaggagagaagagaagggacgccccgagagggtggacatgggccacagccaccttgtctttgctcttaccctgtgtcttgcatgatttggaggtagtgggaaaaccgagtggagaattccgcctgcaggatgacatgaatgcaccttcccattgcctaccaacagatcttttttgagcatcactgtggaccaggcgtggtgatgggggaggggatattgtggtgaacatgacaggcattgccttcacccagtggggctcagcgctgggtgagaaggcattgagaatggacattgtcaattgggcaaaaggaggccaaggagaagtgctgggtgcatgggaactgaaaaagacaggaggctcggcaggtcttggagctgsgagagggacaacagcagcggctgttccaaaggaagcaa

SEQ ID NO: 516501 - DNA, 625 bp, Homo sapiens
ctgaggctgcagcaggtcccacaaatgctgtacactcatgtcaggaagccaaggctataaaagccacaagtgaattaggatggagtccaaagtgttgatgtcatgtgagaacatcttcgcatagtgtcgctgcctgggaatggggctggcacttgtgtccaggacagccagagatctcagaccctgatggagcctcccactggcaaaagaagacagagaacaagcaaaaatgaactctggagtcactgcttctctcaaggaaatcagggtggctggggaacatgaggaagccagggtggcatgtgttggtctgtggctgacatccccatkagcaacctgatctgtcttggagaagtctttggcagggtgcaaatcccgagcccattctccaccaccagctccactccccagatactcatgaaaccaaagggacaagatcttccctggtaccacgggagggaacaaaagacctgggctcagccagtcagatgtttgctaccagggttttgagtctcaaaagagagttgcaaagatggagtcagctctatccctgcctggatagctcccaccagatggctccaaccctcccacattcctcctgcccattcctcaaacctgatcttgc

SEQ ID NO: 516502 - DNA, 674 bp, Homo sapiens
ttagaggctctttgaaacaaaacgagtgctgtctcggctctgcagaaggaggcccagggaggttgccgtgatgtgccaagagtcaaattaccgagcacttgtgcgggaaaatagcctcttcttatttacagggctgttgggtacacttgataacaagcaagatagaagttaaggtcggccagagacacaaagccactaatcctgaggtctcttggtccctttcagcaaagccttgagcataacagggtccctcctagggagtgagctgagagggtcactgtgaggttcctttcagaggggttgtgacagatgcccacagctctcttaatgggactgcggtggaggaagtacctggggaggtcacaccctcagcaatgaagctccattctgcaggtacactttgctccccatacctgtcaacatctgccctgcagaagggaaagcaactgcctgtctgtacatcactgtcaggcaggacagagaagagccctcctccggcaacaaaaaggctaacgtgagagcataagctggagtattcgttttgattactgaggattcttagaatcaatcttattccaacaggggagggggygctctggccagcctgggtttggaatgatgtcagtcaacccacagataatgggatacaggcgagaaggaaccctttgttctca

SEQ ID NO: 516503 - DNA, 673 bp, Homo sapiens
cagagaagagccctcctccggcaacaaaaaggctaacgtgagagcataagctggagtattcgttttgattactgaggattcttagaatcaatcttattccaacaggggagggggtgctctggccagcctgggtttggaatgatrtcagtcaacccacagataatgggatacaggcgagaaggaaccctttgttctcacccaaggcttggtgggctgctggggagaagaactgaaatggagagtcagtaaacagttgtaaaagactgtgtgccactgagtgttcttgataaatgttaatgagacaggagcaggcattgagattgggcagtattgattatgagcagaaataaaatgagctgaacagttcttcacaatcaaagccatgactgtgttgtgttttgagtatctcttgccggagtgtgcgtcctaataaatctcgggtgtgaaatacgctgttttctcctttctttcctctcccgcttccacgcattcattcttctgctcatttgttcttgcattcactcatttgttcattcattcaccaaatgtttgagtgcccactgcgtacccacacagagctaggcaccagagttaaactggggcataattagacacagttgttttcctctcagagtttatgtacggcagtgctgggagagaggctttaaaaggt

SEQ ID NO: 516504 - DNA, 583 bp, Homo sapiens
accagcctgggcaatatagtgagaccccccctctctgcaaaaaataaataaatacaaaaattaggcaagagtggtggcacatgcctgtagtcccagctactccagagggctgaggtgggaggactccttgagcccaggagacagaggctgcagtgagccatgatcgtgccactgtgctccagcctgggtgacagagaaagatcctgcctcaaaaaaaaaaaaaaaaactgaacatttccatattaccaacacccagttcaagaaacagaacattacagccccttccaggatattcctggggtctcttccatctctactaacccctgactaccaacaacctccacctatttcacctgacattgtcctttatgagagcagcagttctcagatgggggctattwtgcccccgggggacattaggcaatatctggggacactggtggttgcctgtacttggggggagttgtgttactgcatccagtgagtccagggatccagggatgccactcaacattctaaaatgcacagggaacccccacacatacaacagagaaactgctgagccaaaatgtcagcagtgtca

SEQ ID NO: 516505 - DNA, 415 bp, Homo sapiens
agacctaagcaaagccccatgtaagctgacctctgggtcccagcaaaatgcctttttcttggacttttcctgatgggaaagccttccagsgtttttacattgattaatttcaagtctgtgatcttgtttgcattgccttaatattataaagttgcactagtgcctacaggccattctgccaggagcagaatttctattttaaaagaagaagtaataaaccactctggaatggtgataacttcatagcctcgttaggtccagtgtctcacttgttcatttggtaaatgcagagagttcttgggttctgtaggcaggaagaagtgaagtccaacgtgtgcctggcgaacactttttgagtgattaatatgcacaggcctgggaatgtgtgattggaagtgtgggaagtgtattgtgg

SEQ ID NO: 516506 - DNA, 668 bp, Homo sapiens
tgtttaatatgggtaaagatggaacttcttagctgtaaatccagaactgaatttaagatttttttttattcctcaaggagacctttgtgctgaggacaccaactatctagacttgagtgaaatgaaagcctgcttcattgctgctgtctgccacttccagacccagtgggaagaaagagatgggtctctgcaccaggcaggaggggatgggatttgctgtccatgggttggggtggggtggtcatctccacagcctgaaaggcccyagaaggagggcaagtcagactgtctggtcagggaggtacagttgttttacaggagggtttcagcaagcataagggccacagaacaggctggaatgaagacttcctttcctaggggtgttgtgacaatgaccacaccttgatggcttaaaacaatagaaatatattctcatcgttttggagaccaggagtctgaagtcaagatgttggtggggtcatatacccactgatggctctaggggaggaggcttccttgccccttccagctactggcattccttgacttggggcagcatcatgccaacctctgcctccatcttggcatggctttgtactctgtgtctctgtggtcatctttctgtctcttacaaggatactcgtcattggacttaggacccacctaat

SEQ ID NO: 516507 - DNA, 520 bp, Homo sapiens
gggggtggccaaggtgtttgttgtctttgttgttgttgttgttgttgttggtggtggtgtgtgtgtgtgtgtgtgtgtgtgtgtgtgtgtgtgwgagagagagagagagagagagacagagagagagagattcctatgaggaaggagacatctttcccagaatttcccaggagtccttcctttgtgtctcattggtcaagactgggttacatggccacctctagctgcaagggaggctgggaaaacaagcatctcttttgttcagcctctgtacaggcaggtgagagagaatgaaagagctcaggaggaaggggcttcaataacctatggacaaatagccctgcaactcttccctgtccatcccaaatgatccatatgctcttccatttcattacattcaaacccttgcactgccaagtctcattatcttgtttatcattcaagacctaggtgcatcagctaatgccagggacagtctcatttcaaggcagtgtttggagggcttgttccccatgagaga

SEQ ID NO: 516508 - DNA, 508 bp, Homo sapiens
cattatcttgtttatcattcaagacctaggtgcatcagctaatgccagggacagtctcatttcaaggcagtgtttggagggcttgttccccatgagagactttctagagaaacactattaaatcctttatccctcygctgtccccactgcacaattacagcaatgctgaaatgaacaacctggtccataactatttgtacatccacgcctatactctggtaggttggactttctggatgtgggatggctatgtttgaaaaccccatacatgcttgttgggagctttctctagggtggtgtgaagatcccacttgctcatcttcaagctgacggtagctcacagttttcaggcaaaactgggcaggaatatgcatttctatcccttccccctgtaatccactatctcagcccaccgtgctgtccctgttttggcagttaggttctctgatgactgttgggctgttgtatacattattcatatgtctttttatatcacctactggggcac

SEQ ID NO: 516509 - DNA, 551 bp, Homo sapiens
ctggccagtcctgctaattcagaggcggcttttctccgaaaatcatggctgcttcactaccagcctctccccaacccctggaaagagcagatcccaggagccctggctgattttgtgagggaaggagtgtgtgtctgatgctgcaatggagagaaaaataattttttttaaatgcattatcctgcttcaataagtggggggaattatttctggctctgtctttcagaagctgaaaagaggaggaacttgttggttgttgcttatttatttttttcctcccattttgttttattttctaattcaggtataacctttattcagtaaaatgtattcatcttaaaggtgcaatttgtggcgttttctttaacctatgtatacacctgtggttgtgagtggaatttgttcccccaaaacatgttgaagtcctaacccagtgcttcagaatgtgacttattctaaaacaggatcattgcagacayaattagttaagatgaggtcatccaagcttggtggctcatgcttgtaatcccagcactttgggaggctaagtt

SEQ ID NO: 516510 - DNA, 534 bp, Homo sapiens
tgcccaaaaagagggacgataacctctggtgagacaataggcaacgtgaagtctagaggcacgtattaaagaagttaacacctggcctgtggacctttaatgaaaattaggtcccatgctattgggaatagaaaatcatcccatgaaaccctctgcctttrtagactctgagacccatggcacctcctcaaggtgagaaggaagaatggtaggggcagagttaccaatatagcagccatcaaaagtccccattaactctataatgagttgacttttaattttgacgtaatgatacatagcagcatggttaccctctggatcagcatgtcatgaacacctgtttgggaaagctgaacttgccaagcattgatttttttttttaagtcagccaatacagttccacatctagaaatctaccccgtagataaacttgcatttgtgagaaatgacacagtcatgtctgcaagagctaactattgggagctgcccagaaatccatccataggaactggtgcaaagatatatgcatgctca

SEQ ID NO: 516511 - DNA, 534 bp, Homo sapiens
tgcccaaaaagagggacgataacctctggtgagacaataggcaacgtgaagtctagaggcacgtattaaagaagttaacacctggcctgtggacctttaatgaaaattaggtcccatgctattgggaatagaaaatcatcccatgaaaccctctgcctttatagactctgagacccatggcacctcctcaaggtgagaaggaagaatggtaggggcagagttwccaatatagcagccatcaaaagtccccattaactctataatgagttgacttttaattttgacgtaatgatacatagcagcatggttaccctctggatcagcatgtcatgaacacctgtttgggaaagctgaacttgccaagcattgatttttttttttaagtcagccaatacagttccacatctagaaatctaccccgtagataaacttgcatttgtgagaaatgacacagtcatgtctgcaagagctaactattgggagctgcccagaaatccatccataggaactggtgcaaagatatatgcatgctca

SEQ ID NO: 516512 - DNA, 633 bp, Homo sapiens
catcgtgattagctacagtcaccatgatgtccaatcgttctcttgaatttattcctcctttctaactgaaatgttgagtcatttgaccaacatttccccattgtccctcaacaactgctccatcctgacattgatattctctgagccagtggcaggacacgtgtgtgtktgtgtgtgtgtgtgtgtgtgtgtgtgtgtgtgtgtttttacaggtaaaccaacagtcaatttggaagaacagggaagcatctgagaagagactgttttgctgaaccagcagcttaagccacatccaaagctctaagtccatcctcagcaccactggtccaaggagactcaaggaggcagaccacgcacaactctaggagcttggccagatcataatctctccactccatggtggctaagaatacgggctccgcatctaaaatgtctgtgttctattcctcgctctgccacttactggctgggtgacctcagacaaagtacttaacctctctcggtatttccctgtctgttaaatgaagataataataatatctatttcctcgagttgtgctgagtattaagtagtttaattcatatataggacttagcatcacgcctgacttgttgtgatggttcagtcaataa

SEQ ID NO: 516513 - DNA, 632 bp, Homo sapiens
gtgattagctacagtcaccatgatgtccaatcgttctcttgaatttattcctcctttctaactgaaatgttgagtcatttgaccaacatttccccattgtccctcaacaactgctccatcctgacattgatattctctgagccagtggcaggacacgtgtgtgtgtgtgtgtgtgtgtgtgtgtgtgtgtgtgtgtgtgtktttacaggtaaaccaacagtcaatttggaagaacagggaagcatctgagaagagactgttttgctgaaccagcagcttaagccacatccaaagctctaagtccatcctcagcaccactggtccaaggagactcaaggaggcagaccacgcacaactctaggagcttggccagatcataatctctccactccatggtggctaagaatacgggctccgcatctaaaatgtctgtgttctattcctcgctctgccacttactggctgggtgacctcagacaaagtacttaacctctctcggtatttccctgtctgttaaatgaagataataataatatctatttcctcgagttgtgctgagtattaagtagtttaattcatatataggacttagcatcacgcctgacttgttgtgatggttcagtcaataacag

SEQ ID NO: 516514 - DNA, 309 bp, Homo sapiens
ccactggtccaaggagactcaaggaggcagaccacgcacaactctaggagcttggccagatcataatctctccactccatggtggctaagaatacgggctccgcatctaaaatgtctgtgttctrttcctcgctctgccacttactggctgggtgacctcagacaaagtacttaacctctctcggtatttccctgtctgttaaatgaagataataataatatctatttcctcgagttgtgctgagtattaagtagtttaattcatatataggacttagcatcacgcctgacttgttgtgatggttcagt

SEQ ID NO: 516515 - DNA, 309 bp, Homo sapiens
ccactggtccaaggagactcaaggaggcagaccacgcacaactctaggagcttggccagatcataatctctccactccatggtggctaagaatacgggctccgcatctaaaatgtctgtgttctattcctcgctctgccacttactggctgggtgacctcagacaaagtacttaacctctctcggtatttccctgtctgttaaatgaagataataataatatctatttcctcgagttgtgctgartattaagtagtttaattcatatataggacttagcatcacgcctgacttgttgtgatggttcagt

SEQ ID NO: 516516 - DNA, 431 bp, Homo sapiens
acataatgcaataatgaaaagctaaatgacatctaggaattagcattgaaaagtaaaaaagaactgtggtgagaattctgtgagttcccaatgttcaaagagggtgggatagtctgccccctccctcatatccatccgatgtggctctctgtctggtgcagtttgctctgaacgtaagcagttctgatttacatgatagatagaaaccatttatacagttaaacacggtaggggtctaaatgctgttccccgcagaacaccagatgtgaatagatgaatatttgattgtcctcgtgcctgtttctgacaagctaacagataagaaaccatcccrctgaattcccagaaaactggagaccacgaatacagatagcaacacgcaggaagagctaggatttattaaggcagatttctaaatattaaagagatgg

SEQ ID NO: 516517 - DNA, 431 bp, Homo sapiens
acataatgcaataatgaaaagctaaatgacatctaggaattagcattgaaaagtaaaaaagaactgtggtgagaattctgtgagttcccaatgttcaaagagggtgggatagtctgccccctccctcatatccatccgatgtggctctctgtctggtgcagtttgctctgaacgtaagcagttctgatttacatgatagatagaaaccatttatacagttaaacacggtaggggtctaaatgctgttccccgcagaacaccagatgtgaatagatgaatatttgattgtcctcgtgcctgtttctgacaagctaacagataagaaaccatcccgctgaattcccagaaaactggagaccacgaatacagatagcaacaygcaggaagagctaggatttattaaggcagatttctaaatattaaagagatgg

SEQ ID NO: 516518 - DNA, 625 bp, Homo sapiens
gactcaaggctctttatataagtctagatggaatgaaactaaaagagaattagattgtttcttatattaacagaaattactaaattatatgctagttgatcaagatagcaattgggatggcgagaggctagaacttgcagaaaagcatgacagtaagtaaagtaagcaattcccagtggcgggaaacagtcaatgaatcacaagactgatgttcaacactttttgcaattaaccacagtttatcctagacctttttcacatcacagcctttctgacaggataaaaggaaaggtgctactatgtcccatttgtggtgatagatcctaggaggcagaatagtgagtaggtagagggaatttactaactcgacagatatctttgtagggcactgaactactcatggattaagaaatagaagctcaagctatgttaaccgcaaaggcaggagcgttcccaaagattgtcaagatgagaaagctagagtaacacagtcagaaagaaaaaaaaaaamaaacaactaaaaggaagtgcgctaaaacattggcagtagttgccattaagtaatggaattgtgggttgtttctattttccctttatttgtacttgtctatgctttccaaaattt

SEQ ID NO: 516519 - DNA, 625 bp, Homo sapiens
gactcaaggctctttatataagtctagatggaatgaaactaaaagagaattagattgtttcttatattaacagaaattactaaattatatgctagttgatcaagatagcaattgggatggcgagaggctagaacttgcagaaaagcatgacagtaagtaaagtaagcaattcccagtggcgggaaacagtcaatgaatcacaagactgatgttcaacactttttgcaattaaccacagtttatcctagacctttttcacatcacagcctttctgacaggataaaaggaaaggtgctactatgtcccatttgtggtgatagatcctaggaggcagaatagtgagtaggtagagggaatttactaactcgacagatatctttgtagggcactgaactactcatggattaagaaatagaagctcaagctatgttaaccgcaaaggcaggagcgttcccaaagattgtcaagatgagaaagctagagtaacacagtcagaaagaaaaaaaaaaacmaacaactaaaaggaagtgcgctaaaacattggcagtagttgccattaagtaatggaattgtgggttgtttctattttccctttatttgtacttgtctatgctttccaaaattt

SEQ ID NO: 516520 - DNA, 567 bp, Homo sapiens
ttcatttagattagttaacttaaatttaaatagccatgtgtaactggtcagtggctatcgtactggaccatgtggctcaaatctaatatctgtggagaaccaccgtgggccaggcaccgttctcggtgctggggaattgaaaatgagcaaaaccaacaggagcatgtctgccctctggacactcacaggccactgggggagacagatgttagttaaataattacacaaacatgcctgcaatcccagcacgttaggaggcagagacaggcggatcacttgaggtcaggagtttgagaccagtctggccaatatggtgaaaccctgtctctactaaaaatacaaacattagccgggcgcggtggygggcatctgtattcccagctactcaggaggctgaggcaggagaatagcttgaacccgggaggtggaggttgcagcaagctgagatcgcagcaagctgagatcgcaccgctgcactccagcctgggcgacagagcgagactctgtctaaaaaaaaattacacaaaagaatgcaaagttgcaattgtgacctgggcagtgatgggc

SEQ ID NO: 516521 - DNA, 554 bp, Homo sapiens
ttaacttaaatttaaatagccatgtgtaactggtcagtggctatcgtactggaccatgtggctcaaatctaatatctgtggagaaccaccgtgggccaggcaccgttctcggtgctggggaattgaaaatgagcaaaaccaacaggagcatgtctgccctctggacactcacaggccactgggggagacagatgttagttaaataattacacaaacatgcctgcaatcccagcacgttaggaggcagagacaggcggatcacttgaggtcaggagtttgagaccagtctggccaatatggtgaaaccctgtctctactaaaaatacaaacattagccgggcgcggtggcgggcatctgtaktcccagctactcaggaggctgaggcaggagaatagcttgaacccgggaggtggaggttgcagcaagctgagatcgcagcaagctgagatcgcaccgctgcactccagcctgggcgacagagcgagactctgtctaaaaaaaaattacacaaaagaatgcaaagttgcaattgtgacctgggcagtgatgggca

SEQ ID NO: 516522 - DNA, 554 bp, Homo sapiens
ttaacttaaatttaaatagccatgtgtaactggtcagtggctatcgtactggaccatgtggctcaaatctaatatctgtggagaaccaccgtgggccaggcaccgttctcggtgctggggaattgaaaatgagcaaaaccaacaggagcatgtctgccctctggacactcacaggccactgggggagacagatgttagttaaataattacacaaacatgcctgcaatcccagcacgttaggaggcagagacaggcggatcacttgaggtcaggagtttgagaccagtctggccaatatggtgaaaccctgtctctactaaaaatacaaacattagccgggcgcggtggcgggcatctgtattcccagctactcaggaggctgaggcaggagaatagcttgaacccgggaggtggaggttgcagcaagctgagatcgcwgcaagctgagatcgcaccgctgcactccagcctgggcgacagagcgagactctgtctaaaaaaaaattacacaaaagaatgcaaagttgcaattgtgacctgggcagtgatgggca

SEQ ID NO: 516523 - DNA, 641 bp, Homo sapiens
ctgaggagactctcctgcaggctgtagactgaaagaccctgggtttggctccaaggtccaagccaggctcaagtcagctccacgtgtgtacattctggggtccaggccgaagggrtagcagctcccctggggaagttctcatagaaaatcacagaaatgatataggacaaatccaatcatgcaagcccatctcaagcctctgtttatgtcacatctgctaacatcctgttgtccaaagcaagtcatgtggctaagcccaaagtcagtgagggcagggaaatatacttcactccaaggaagaaggttgtgagagtgattccttgctgaaaaatgatttgatctagcgcaaggtcaagaaattctgttatccaagcaccttgtatagccagtgagatcaggttcgaagaaaaaatattgcagggagaattggaacccaaggctctcgaccaccagttcaatgctctctctactttacccttgattcctagggtcattgcaaggcaacagggtgttaacaaccaagaacaacattaatgtaacctttggttgctttataaaaactatgatgtcagaagaagaggaggtgagagtcctgctgtgttgttgagaatagttctggatgtgacaattgaggagggact

SEQ ID NO: 516524 - DNA, 699 bp, Homo sapiens
ctgctgcccagtctgagtcactctccattctgccttccattttcgttttcttataacgctggcctctagaatagtaatacctggcctggggcgggggagatcaagggtctctgttaagtgattagccaaggatgcggcagttaacagggaacttggaattcagcagtggagatgcggttgccttgtggagtgaggggtgctattccactgttgggtggggtagggaactacggggtccctgttgtggaaagactttgctgagttggtcaggagttggacagggaaagcaggaaggagaaggaaaggggctcctggtaggggaccagggaataaggagcgcagcgggtgtgaggtgtgaggaaggaagagaggagggagcatggagtgccaaagctggagaggtgcgcaggcctcatagagcacgtgtgaggctgagtcccatcccaagggggatggggcaccagggcaggcrgtggttgagatgggacttgataaaatcacccacagctcagaaggctggtttttaggatgtgttagaggctggagtcagggccaaagggaggtctatctgagggaggatctctgagtctacctgaggagtgagtgttgccagagaagaagacacagtgacctggactgcctgctctccctccctcagcatccacatctaggactcctgtcctgctacagcccctccag

SEQ ID NO: 516525 - DNA, 614 bp, Homo sapiens
  misc_feature (1)...(614): n = A,T,C or G
gggaggatctctgagtctacctgaggagtgagtgttgccagagaagaagacacagtgacctggactgcctgctctccctccctcagcatccacatctaggactcctgtcctgctacagcccctccaggccgttggtctggtcggcttcctggaggaggtgacctgagcagcctggacccattgaaaaaggctgaacagggaggccttggtagaagcccccgtttagctgtaagtgggctgtgtgaggttgggcacctctctgagtctcagtttcttcatctgtcaaatgggaacaacagaagtccctgtctgctgggtttcgtgacaggtcaatgagacgtgtcaagtgctggcacaaggaccagcacccaaggagtggcgattcastgattattaggggctggctttttcccaccagaggcccatttaaggaaggtggggacagactagnaggagagaaaagttgctggagatttgggggagtctaaggcattaagagacatatcttttggggaggcttaaggctgacctgtctcctacggggctcctaaccctcagggcagctcttagaaggacagtcctgaaactgggagggggatcccatcttcagagtt

SEQ ID NO: 516526 - DNA, 571 bp, Homo sapiens
gggtaaagttggcaagaagagccacccgtgcagggcctgtctgagaagccagcatcgaggcatgccaagccacagagcagtggacacaggatgatcttttcaccttgtgggggaagtgcccaatgctcttggcaactgaagtcaattcgaggttgctgtcattcagcggggctataccctgcccaccattctccaggcacagagaagctcaggcgacgttgcacgggtgaattgaaggggtastcccgacacaggcatagacaggcctgctgacgcttgcattttagttttcatttgggcagagaggggatgaagtggctctaactgggtttggcattggggctgtggctgaggagaggggctgctggggcgggggtggtagtcaaggggaaggtgggcccattttgggctaggcaacagggatgggcttctaaggacaaaggagatggacttcaggatgcaggtggctaaaggtggtggcaaggctgaatcaacggtcattaacactctgcctgagacccatagacaagcaagagggtggaaaagacatctccaaattccaagtagcatg

SEQ ID NO: 516527 - DNA, 522 bp, Homo sapiens
ctggctctgtccttcacaaagagtcctgtggatgctgctcccaagtcaggtgcagtgaggatcagaacctccaagatgagcagggacttgcccaaggtcactagagatgtgggctaacacatcctactgccaaatgccrgagctggcaggacctatagaaagctggctaacacggggcacatgtattacccttaagtcctgagcccagggcagacgtcactaagcaccgaccattctccttcccacccagcccagccctggcctcagaattctcagcacagcagtcaagtagctgctgcagcaatggatcagcgctggcatgcaagacagacctatttatcatttcttatctaccccaaccctgttattttacagatggagaaactgaggcccagagagacgatgcagtagaatgaagtgcacatggggcctgggagtccgatgacctccaggtcttagctctctgctgtcttgctgtgtgactgcgggcaagcccctctacctctctgaacctcagacttt

SEQ ID NO: 516528 - DNA, 596 bp, Homo sapiens
ctgctggaaattgagccatggaggccacttgatctagacagctattgctcaagagttcctgtgcccacatctccaggacatgagcacctattcccatcagccacggatgggtggccagaggcagagggagaaagccaggaggggcctgcagagagtggccccacggcaggcctgaggggttagaagggacacctacaggtcctgagggccagggagcctattctcccataagtgccagggacgtgctcttcccaataacccctcccccaggaagtgacctgagccagcggctggccatgtcctactgaggtagaaatgtcccaggactccttctgggggtgggcaacttagaatttgggatctcataaaaggggaagtagagcytcaggctctggagccaggtttgtatccaaccattgccacttactggctgggtctcagttttctcatctgtaaaattgaaacaataataacagtactgacctcccagggctgtaggaaggtttaaatgagttcatacaaataaagtgactagagcagggcttggcacatatcagggacttactgagtattagctgctattgtagttcccccct

SEQ ID NO: 516529 - DNA, 587 bp, Homo sapiens
ctgtgtcaggcagccctctcctagagctacgaccacttttgcaatgctccaaacgtctccttcccttggtccacttaaatccatgcttgctgacctcagacacctcatcatcctcttgttaaatgctcctcaatttcctcctgtgtgtgcatcttctatttcccaccagraccctgcctaatatactctcttgtggagctgatgggaagattaaataaaatcccacatgtagcacactcaacacagtccctggtacatggtcagtactgggcagaggttcactgttactattggctacctagctgcaaaggcccaaagctctgaaccattatcctacactgccacacccctcccaacacacacatgtgcatgcacacatgcacacacatgcgccccactgtaagacaaacacgtggtttggtggagtgcaaagaacaaaagacctgtagggagtgaagtttggaacctaaattgtccctaaagacctcttgtttccagcccatgggctctgggccactctctgactctcactggaaatttatctctcaggcttggttctccgtatccttgattctcttctgggaaca

SEQ ID NO: 516530 - DNA, 490 bp, Homo sapiens
tgtgatcacagacatgaaagcaagccccgtgcagaagatgatcagaagccttgtgacaacagttgtccctcagagtgctgctttcaagaggcctcgggccatcccagggagtccttctcatcctcctccagcccctgggctgcagagcccaggccatgacactcttactcaaaaacagcacacagtttctgaaataataacacagagatgaaggctcccctgctctgaagtgggggagactcacagccgcctatgaagacaccttaggggtactggtcaaaaatgtggctgacagatgatgaaacstaccccccatcagagcattttgaatcaagcatttttttctctctcctcctctgtctctctgcctttgtgttgcaaattgcgaagttagaaaggaaggaagataggaggtgaagggagagaaaaatgaaggaagggaagggaaaagaataaaagaaatggaagacccttgtatgagcatcaacta

SEQ ID NO: 516531 - DNA, 490 bp, Homo sapiens
tgtgatcacagacatgaaagcaagccccgtgcagaagatgatcagaagccttgtgacaacagttgtccctcagagtgctgctttcaagaggcctcgggccatcccagggagtccttctcatcctcctccagcccctgggctgcagagcccaggccatgacactcttactcaaaaacagcacacagtttctgaaataataacacagagatgaaggctcccctgctctgaagtgggggagactcacagccgcctatgaagacaccttaggggtactggtcaaaaatgtggctgacagatgatgaaacctacccccsatcagagcattttgaatcaagcatttttttctctctcctcctctgtctctctgcctttgtgttgcaaattgcgaagttagaaaggaaggaagataggaggtgaagggagagaaaaatgaaggaagggaagggaaaagaataaaagaaatggaagacccttgtatgagcatcaacta

SEQ ID NO: 516532 - DNA, 490 bp, Homo sapiens
tgtgatcacagacatgaaagcaagccccgtgcagaagatgatcagaagccttgtgacaacagttgtccctcagagtgctgctttcaagaggcctcgggccatcccagggagtccttctcatcctcctccagcccctgggctgcagagcccaggccatgacactcttactcaaaaacagcacacagtttctgaaataataacacagagatgaaggctcccctgctctgaagtgggggagactcacagccgcctatgaagacaccttaggggtactggtcaaaaatgtggctgacagatgatgaaacctaccccccatcagagcattttgaatcaagcatttttttctctctcctcctctgtctctctgcctttgtgttgcaaattgygaagttagaaaggaaggaagataggaggtgaagggagagaaaaatgaaggaagggaagggaaaagaataaaagaaatggaagacccttgtatgagcatcaacta

SEQ ID NO: 516533 - DNA, 697 bp, Homo sapiens
tgtgtgacccgggtcaggtctagtgccctctgccactcggtttatgcttcctcctagcgggtcatggtgaggatctaatggaagttctcatcaggccctcagcacagtgtcttcatgtgcaagtgctcagctaaaggccgcggctgttattcacagaggggagtcacactcaccaggggaacgctgggttgatctgtcatggtgagcacatggactcctgggccatccctaagaataacttctgggtgaagcaacaaygtcagctactggcccctacagcatttacctatgagtggtctcacgttcaaagcaggcttttctgggcatctctgagaagaggctcccatgatgatattggcacctttgggcaccatgtgcaccagcctgggacttctatgtgtgcccctcttctcattgtccctgctgggcttgcaggttaggagaggttctccatgacctccaaattaagaccatctgataaaaccatatttttctcccccacctcccatagccatcctgtcaaataaataccttcttatgtatcttgggaaggtaacattaggtatttttctccccatatacacaaaattaattaatttaaaaacaaaaaaaagaactgttgcctagaaacaagaataggttttgtaagaaacatggaaagaaatgagggaactcagaatcactaaaagcaactgat

SEQ ID NO: 516534 - DNA, 697 bp, Homo sapiens
tgtgtgacccgggtcaggtctagtgccctctgccactcggtttatgcttcctcctagcgggtcatggtgaggatctaatggaagttctcatcaggccctcagcacagtgtcttcatgtgcaagtgctcagctaaaggccgcggctgttattcacagaggggagtcacactcaccaggggaacgctgggttgatctgtcatggtgagcacatggactcctgggccatccctaagaataacttctgggtgaagcaacaacgtcagctactggcccctacagcatttacctatgagtggtctcacgttcaaagcaggcttttctgggcatctctgagaagaggctcccatgatgatattggcacctttgggcaccatgtgcaccagcctgggacttctatgygtgcccctcttctcattgtccctgctgggcttgcaggttaggagaggttctccatgacctccaaattaagaccatctgataaaaccatatttttctcccccacctcccatagccatcctgtcaaataaataccttcttatgtatcttgggaaggtaacattaggtatttttctccccatatacacaaaattaattaatttaaaaacaaaaaaaagaactgttgcctagaaacaagaataggttttgtaagaaacatggaaagaaatgagggaactcagaatcactaaaagcaactgat

SEQ ID NO: 516535 - DNA, 426 bp, Homo sapiens
gtctcttcttccccattaccacgatctatggtccacctgttcacctgtctcccccaccagacctcaggggccgtgagaacaggagccagcccttgtttggcttcatgccctcagagccaattcagcacctggcayggggtgggtgctcggtgcacagtggctggcatcattacctcgcccagtcattgtcacattaatgagagtgataatcagtgttggagcaaataaatggtacggtgcttcccagtttccacctcacttctccccactcggagaaaccaggcgctgcagtaagcagggcctcattaagcactgattaattagagtctctcgtcacagtcttgtcacatacaaatttgggggttagcctgatgcgttaaagaggctaacggacagaattccaagaggagcagatgttggcacggg

SEQ ID NO: 516536 - DNA, 499 bp, Homo sapiens
gctgagctcacacattctaggacatcactaaactcaatcatcatggatttgtatgctacagagctggtctgtggtcatttcttcatcccatgaagatggaccacatacctcctgcgtgccaagccctgggccagaaactgggacccagcactggacaaagccrgttggactccctcccctatggagatcacactccacaggatttaacttacgtttatcaccccctactgtgcaccagccccactcccctctttttttaattgtgagtccacaaaacatgctatgaaggcccaaagaaagaatgagaccattagaaagggcttcctgaaggaggtggcatttgatctgagctttgaaggagcttaccaggtgaaagggaatagcatgtgtagaggcacagaggtgaggctgtcccttggtctgtccaggagggactgtgggaagggagatgaggccaatgaggagggcagcagccgtgactagcaggctgaaaggagcc

SEQ ID NO: 516537 - DNA, 499 bp, Homo sapiens
gctgagctcacacattctaggacatcactaaactcaatcatcatggatttgtatgctacagagctggtctgtggtcatttcttcatcccatgaagatggaccacatacctcctgcgtgccaagccctgggccagaaactgggacccagcactggacaaagccggttggactccctmccctatggagatcacactccacaggatttaacttacgtttatcaccccctactgtgcaccagccccactcccctctttttttaattgtgagtccacaaaacatgctatgaaggcccaaagaaagaatgagaccattagaaagggcttcctgaaggaggtggcatttgatctgagctttgaaggagcttaccaggtgaaagggaatagcatgtgtagaggcacagaggtgaggctgtcccttggtctgtccaggagggactgtgggaagggagatgaggccaatgaggagggcagcagccgtgactagcaggctgaaaggagcc

SEQ ID NO: 516538 - DNA, 499 bp, Homo sapiens
gctgagctcacacattctaggacatcactaaactcaatcatcatggatttgtatgctacagagctggtctgtggtcatttcttcatcccatgaagatggaccacatacctcctgcgtgccaagccctgggccagaaactgggacccagcactggacaaagccggttggactccctcccctatggagatcacactccacaggatttaacttacgtttatcaccmcctactgtgcaccagccccactcccctctttttttaattgtgagtccacaaaacatgctatgaaggcccaaagaaagaatgagaccattagaaagggcttcctgaaggaggtggcatttgatctgagctttgaaggagcttaccaggtgaaagggaatagcatgtgtagaggcacagaggtgaggctgtcccttggtctgtccaggagggactgtgggaagggagatgaggccaatgaggagggcagcagccgtgactagcaggctgaaaggagcc

SEQ ID NO: 516539 - DNA, 499 bp, Homo sapiens
gctgagctcacacattctaggacatcactaaactcaatcatcatggatttgtatgctacagagctggtctgtggtcatttcttcatcccatgaagatggaccacatacctcctgcgtgccaagccctgggccagaaactgggacccagcactggacaaagccggttggactccctcccctatggagatcacactccacaggatttaacttacgtttatcaccccctactgtgcaccagccccactcccctctttttttaattgtgagyccacaaaacatgctatgaaggcccaaagaaagaatgagaccattagaaagggcttcctgaaggaggtggcatttgatctgagctttgaaggagcttaccaggtgaaagggaatagcatgtgtagaggcacagaggtgaggctgtcccttggtctgtccaggagggactgtgggaagggagatgaggccaatgaggagggcagcagccgtgactagcaggctgaaaggagcc

SEQ ID NO: 516540 - DNA, 448 bp, Homo sapiens
ccaccaggtacccaggatcctggtgcttggactctggttggctctggttctctgtggcttatcttggtctatactggcctcttcttactcttcagggattccttggccttttcccactgttggtagaccttctgctttcacaccatgcagcacaggaaggggttcagggctcaggcactatgatcttgggccagttctgcccctgaggctcagttttcccctttgtaaaataacagtagtcatcaacatgtctccaagtgggaggaagtgtaatcgagcagcagcctgcatggtgcctggccttccatagacaaccacctcaggtcctcctgctccccaagcccaacaggtgggtgagggttgctgggctcaktgatggtcactcctgccatgagtgtggcttgggaatggatgcctctgcaggcccctgctctgtagcagccctgcc

SEQ ID NO: 516541 - DNA, 582 bp, Homo sapiens
tacaaattcacttgagaaggtattcactgtcctaggcaaagagctaagtaacaattaatctatttctgaggaaaagaacacataagttagtcatatagtgccagcatgtctgaggaaaatgcttttaatcaaataatactgaaatgtataataagaaatatgatgagaagagactgggattccactaagatgcttcccacccatcaaattattactaaaatatgatgatctaccaaagtgctttatgcttcaatcacagaaaccaattcaagcttagacccagacttaaggatggtccaaagattatgccactagccatatgtaaagttaaataaaagtacaaatcctgtttctcagttgcatgagctgtttccaatactcagtagtcacatgtggctgatagctaccatattagtgcagatatagaacattctgtcatcacagaaagttctaytgggcagcactggtccaaaccatggaaagcccctgtggtttactccattttttaaattgttactggtcccagggaagcataaagaaatatgaacttgtgctgtaacctcagaactaccttggacttcc

SEQ ID NO: 516542 - DNA, 503 bp, Homo sapiens
ccacttcagtgttcttattactaaactgctttgatgccatatttaccgagtttgttgccttaacttctatgcatttctatttaacaccatctacacaccaggatagtatataccagatctctcctctctctctctctctttttttttttttgagatggagtttcactcctgttgcccaggctggagtgcaatggtgcaaccttggctcactgcaacctctgcctcctgggttcaagtgattctccttcctcagcctcctgagtagctgggattacaggcatgcaccaccacacctggcaaattttgtattttcagtagagatggggtttcttggtcaagctggtctcaaactcccgacctcaagtgatccgcctgccttggcctcccaaagtgctgggattacaggtgtgagccaccacacccaacccagatmtcacttttaataggcattgctatttctctgagattcaaccatgtgctccttacctgctctatatcaaatt

SEQ ID NO: 516543 - DNA, 534 bp, Homo sapiens
ctgctaactcttgagaatttatgctaaaagactgtaagagatgaagtcagagggtagctctgggacctgaaaagtcatgtggagtcagggctggggaggcccttgggagacatagttagccatattcagtatgactaagtagagaaagccagccagggagcagcagaggagtaagcctgaagaggaaataaagcagctacgcagagagaaaccatgaaatgargaagccgactgagatacagcagttcctgaaagacagggttcctgactttcctgttcccagagtctccaagaagcctggctataaatatttccccagggttctctaaggttttcaggtactctttaaataaccatcctttatgggagctagcttgaaagggtttctttcctgtgcaagcaaaaaagcattgagtagagtgctactgacattacactgttgatgtgccccaggcggcctcttcagccctggctctatatgtcttctttgctttctgagctgcagagacactttggtctgacatcattgctcag

SEQ ID NO: 516544 - DNA, 657 bp, Homo sapiens
acttttccaagatcataaacaagaaaatataccccaaagattattcttcactccctacttttgccctgccagatttgcttttgtccaaaacgtatttgatggggggggaaaagttcaatctacaattaaagttaaggatggaartgaaaagggcctagaaatggcagcactgagttttattgacttggaaagctgtaatccaatagatggaaaaagcacaaaaatacaatcctattccatcatacaggacctgagtacctatatgtactcagcagggaaatataacctgaaagtaccaaatatttggttcaaaacaattcattctaactcctacaaaaacatgtcagtactgagattgatcgtactgatttccttctttctaccatagctaaggacccagatagaaaccacataaaaaatattagcagcacttttcatgtatccttccactaaagtataatctggccaaatgtgtttcaaaagcattttaggaaattttagtatttattaacttatactattgacatattgtcaagttatacaaaagaactattccaaatattatcatgatagcttataattacaaatattagaggaatcttaaaaaataacattgccttttccaataccatctttctctctaaaatggtaccaccc

SEQ ID NO: 516545 - DNA, 657 bp, Homo sapiens
acttttccaagatcataaacaagaaaatataccccaaagattattcttcactccctacttttgccctgccagatttgcttttgtccaaaacgtatttgatggggggggaaaagttcaatctacaattaaagttaaggatggaagtgaaaagggcctagaaatggcagcactgagttttattgacttggaaagctgtaatccaatagatggaaaaagcacaaaaatacaatcctattccatcatacaggacctgagtacctatatgtactcagcagggaaatataacctgaaagtaccaaatatttggttcaaaacaattcaytctaactcctacaaaaacatgtcagtactgagattgatcgtactgatttccttctttctaccatagctaaggacccagatagaaaccacataaaaaatattagcagcacttttcatgtatccttccactaaagtataatctggccaaatgtgtttcaaaagcattttaggaaattttagtatttattaacttatactattgacatattgtcaagttatacaaaagaactattccaaatattatcatgatagcttataattacaaatattagaggaatcttaaaaaataacattgccttttccaataccatctttctctctaaaatggtaccaccc

SEQ ID NO: 516546 - DNA, 637 bp, Homo sapiens
tgtgcaacatgtgcagttgtacagagccccacacttagaagaaccccacacttggtttaatactctgccatccgtccttagaaattcttaagacttttttttaaaaggagttcacttttcattttccactgggatctgtaaattatgtagccagtcctgccagaaggactttagagtcctgcccctactgttctaagatcctgacattttatttgaaatagtaaaacaatgattaggaatagactttggtcatcttaatggactcttttttaaaaaatatcaagkcatagtattaagaaaattctattaaaatgtctaaacatttgtctcattgctaaaatatacaagaaaattaccattttcacacagattggcattggtgtgagttgccatatctatggtaacttgcagtgttaacctaactgcaaacaaactgtgagctctaagagcctttggtacatttcaatcaattaaaatgatttattcgtcatataaagctatatttgtaagtagtattattgagttccttatagtttataactttggaatttcaagcctagtatgcaagatttgttcattttcttcatatagtttgcatatttaatcaacttatttcccaaactaatgacattggtgt

SEQ ID NO: 516547 - DNA, 494 bp, Homo sapiens
gcaacatgtgcagttgtacagagccccacacttagaagaaccccacacttggtttaatactctgccatccgtccttagaaattcttaagacttttttttaaaaggagttcacttttcattttccactgggatctgtaaattatgtagccagtcctgccagaaggactttagagtcctgcccctactgttctaagatcctgacattttatttgaaatagtaaaacaatgattaggaatagactttggtcatcttaatggactcttttttaaaaaatatcaaggcatagtattaagaaaattctattaaaatgtctaaacatttgtctcattgctaaaatatacaagaaaattaccattttcacacagattggcattggtgtgagttgccatatctatggtaacttgcagtgttaacctaactgcaaacaaacwgtgagctctaagagcctttggtacatttcaatcaattaaaatgatttattcgtcatataaag

SEQ ID NO: 516548 - DNA, 494 bp, Homo sapiens
gcaacatgtgcagttgtacagagccccacacttagaagaaccccacacttggtttaatactctgccatccgtccttagaaattcttaagacttttttttaaaaggagttcacttttcattttccactgggatctgtaaattatgtagccagtcctgccagaaggactttagagtcctgcccctactgttctaagatcctgacattttatttgaaatagtaaaacaatgattaggaatagactttggtcatcttaatggactcttttttaaaaaatatcaaggcatagtattaagaaaattctattaaaatgtctaaacatttgtctcattgctaaaatatacaagaaaattaccattttcacacagattggcattggtgtgagttgccatatctatggtaacttgcagtgttaacctaactgcaaacaaactrtgagctctaagagcctttggtacatttcaatcaattaaaatgatttattcgtcatataaag

SEQ ID NO: 516549 - DNA, 591 bp, Homo sapiens
ggtagttgcctgatcctgtgaaatgcaggggccctttggaactcccagctctatctacagggtctgaacaagtcccctgaacaatgcctggtgtcccaggtccatagatttcmtgggacttgcttcctgttggcactcttcctgggtggcctgtaagctttgtttcatcttctacatcaggagctactcctccctattctccctaacacgtattttccaaaaacgtgttaacatctgtggtccattgtttttgcttctccttgtatattgcctcctcaggagggtgactaaaacctgttatttgacactgacttttctttattgatttgaatgctatattatttagaaatagcatacttcagtgcaagttgtggctatgaaggcattctctactgcataataaaaccaccataaaatgttctttgacctttcaaatattagagtttacttttaagggcaataattaaagtatgtcatactgaaaagctctaatgtgtctaaatttcctaatcaaaggtttttatgtattgaaaggaaataataaagaaaataatacttcccagtgttgcttatgtgtgcatcactgaacag

SEQ ID NO: 516550 - DNA, 591 bp, Homo sapiens
ggtagttgcctgatcctgtgaaatgcaggggccctttggaactcccagctctatctacagggtctgaacaagtcccctgaacaatgcctggtgtcccaggtccatagatttcctgggacttgcttcctgttggcactcttcctgggtggcctgtaagctttgtttcatcttctacatcaggagytactcctccctattctccctaacacgtattttccaaaaacgtgttaacatctgtggtccattgtttttgcttctccttgtatattgcctcctcaggagggtgactaaaacctgttatttgacactgacttttctttattgatttgaatgctatattatttagaaatagcatacttcagtgcaagttgtggctatgaaggcattctctactgcataataaaaccaccataaaatgttctttgacctttcaaatattagagtttacttttaagggcaataattaaagtatgtcatactgaaaagctctaatgtgtctaaatttcctaatcaaaggtttttatgtattgaaaggaaataataaagaaaataatacttcccagtgttgcttatgtgtgcatcactgaacag

SEQ ID NO: 516551 - DNA, 591 bp, Homo sapiens
ggtagttgcctgatcctgtgaaatgcaggggccctttggaactcccagctctatctacagggtctgaacaagtcccctgaacaatgcctggtgtcccaggtccatagatttcctgggacttgcttcctgttggcactcttcctgggtggcctgtaagctttgtttcatcttctacatcaggagctactcctccctattctccctaacacgtattttccaaaaacgtgttaacatctgtggtccattgtttttgcttytccttgtatattgcctcctcaggagggtgactaaaacctgttatttgacactgacttttctttattgatttgaatgctatattatttagaaatagcatacttcagtgcaagttgtggctatgaaggcattctctactgcataataaaaccaccataaaatgttctttgacctttcaaatattagagtttacttttaagggcaataattaaagtatgtcatactgaaaagctctaatgtgtctaaatttcctaatcaaaggtttttatgtattgaaaggaaataataaagaaaataatacttcccagtgttgcttatgtgtgcatcactgaacag

SEQ ID NO: 516552 - DNA, 591 bp, Homo sapiens
ggtagttgcctgatcctgtgaaatgcaggggccctttggaactcccagctctatctacagggtctgaacaagtcccctgaacaatgcctggtgtcccaggtccatagatttcctgggacttgcttcctgttggcactcttcctgggtggcctgtaagctttgtttcatcttctacatcaggagctactcctccctattctccctaacacgtattttccaaaaacgtgttaacatctgtggtccattgtttttgcttctccttgtatattgcctcctcaggagggtgactaaaacctgttatttgacactgacttttctttaytgatttgaatgctatattatttagaaatagcatacttcagtgcaagttgtggctatgaaggcattctctactgcataataaaaccaccataaaatgttctttgacctttcaaatattagagtttacttttaagggcaataattaaagtatgtcatactgaaaagctctaatgtgtctaaatttcctaatcaaaggtttttatgtattgaaaggaaataataaagaaaataatacttcccagtgttgcttatgtgtgcatcactgaacag

SEQ ID NO: 516553 - DNA, 263 bp, Homo sapiens
accaacactataggagggcacccagtggcaggcagcaagacacacaggatgtcccttccaggctgtaaagatcccatctccaccccagcgmcctggctcctacgctccactgctggctttggaggcctcctcgactctgccacccgtggcctcaggaacctctggttccaagttaatgaggcaaagcctccaaaaagggaaaaaacaaactgctcatcactcattattgcctccattctggcttactacctgggacggctcca

SEQ ID NO: 516554 - DNA, 524 bp, Homo sapiens
atgctatcgggttttattggagctgtgtttatcttgagctctgcaggagtcaaaagctcactggaacttttaggtaaaacctgtgtgtgtgcagatgggccacaccttccttggtttcaggacaacagttttgctcggctttaaaatcgcaagagctctcatttgggatccatacctttggagaaggtcctgacaatttgactccacttaggtttttcatgttggaatcttaagtgttttgatagatgggtccctttctcagtgctgtgtgtctgcatgaatctcgctgacctttgcttctcatggctgtcacagagcagccctgctgacgacgggactggtggggtattttgtcccagctattccatgcataaggtgtagagartatgtcttctgccatggctagagttaaataaaggaaaattcatgccaggctgagttcaggattgatgtttgctctgtgtctgcattaaaaaataaaccacaaacatggttgtcctccagcagggctggtgttgagttag

SEQ ID NO: 516555 - DNA, 551 bp, Homo sapiens
tccacccagattcagcggttgttgatagtatgctgttcttgcccccacttcctctctgctccttaaatccatattttataaaaatttgttgctgaggctgggcacggtggctcatgcctgtaatcccagcacttggggaggctgaggcaggtggatcatgaggtcaggagtttgaaaaaaaaaaatcagctggcgtggtggcatgcgccggcaatcccagctacttgggaggctgaggcaggagaattgcttgaacctaggaggtggaggttgcagtgggccgagatcatgtcactycagcctgggcgagagagcaagattccgtcttgaaaaaaaaaaaaagtgttgctgaacagtttgaaaataagttgttgacatcatgacatgcccctgccccaaatatgtgagcatccatctcctctaagaaaaactgtcattctccataatggcagcaccattcttacatggaacaaaattaacagcagtcccatgatatcgtctaatggttacttgatattcacctttctccagttctcttcagaatgtgttta

SEQ ID NO: 516556 - DNA, 409 bp, Homo sapiens
ttccatatgtgagtctcaagaatcaactgcttcccacgtccatgctggcatgtcagaagggaccagggggccaggatattttcaggatgtgctcattttagacaataacttattaaagataggtaactttcaccataacttgagcacagaaaaaaagtaacaagataaattacatcttggtcggtccaactgtagcatatgttttatttaagcagatgttgcacacccctttacatcttccttctctctgaagggaaagggggatgatcagaagataaagtgctgtcacatcactttagcggacrggcttcttcaagtggcaagtttaaatggacacagtactccccttagccaggaagttttatactttgcaaaatgctcacctcaacagcaaagtcttcaatagagt

SEQ ID NO: 516557 - DNA, 459 bp, Homo sapiens
gcactgatttttgcaggacagcttgagctagtgtgtagaatatttttatacacctggcaaaaatattttagaataagtcttttctagtgacactcacagagtcaagaaaactcaacacatgatcttcctttagtttctggaatgctatcaacagagttcacattaagtaaaaacataaacgcaaagaactgctaataccagcattaaaaatagtattgttctacagatcaaattactctttaaagcaatgccttccaggaagaggcagaaatgtccaggtttagggactctcctgaccaaagaaaccctcggttattttaacatggtcttctctagagctgaggacagcttrggatgttctgtcccatcctgttcctcaaaactctaacatgcagcttcctctgctgtctctcctctgaagagtctcactttctctgtttccatgttggtctccttcca

SEQ ID NO: 516558 - DNA, 582 bp, Homo sapiens
gttacgttaatttcctctggctgctgtgaccaatacacacttagttgcttaaaacaagacaaatttatccccttacagttctgcaggccagaagtctagcctgggtgggtgtggcctcacagccccacagcctcttcccatttcctggccttctctggcttccagacccacctgggttcatggccccttgtccatcttcagagccagcagcatggtttccctgtctccttccctttgcttcagcgtcacagtcttttcttgtggtcctgaaggacctttgtgggtactttgggcccacctgattgtccagggtcgtctcttcatctcaggattcttaatttaatcacacccacaaagtcccctyagccatgtaaggccacatggtcacaggttctggggattacaatgtggccatcttgggtggatccttactctgtcttccacactatattaggaaacataaaataacataagttatgatttctaactatattagcagggtttaaggtgagggtatggggaaatgggcattttaataaactgtggagtatagattaccacatccactttggaggacagtca

SEQ ID NO: 516559 - DNA, 583 bp, Homo sapiens
ctttcattgctaggaaaaaaaacaccctagagtagcccttagatgggatacattcattaaattcatttaatctgcacactgatgtggggcaagggaaatggcaggaagcaggtaagaatgaaagaattttgcctcaacagatcaaaattgcgccctccctttcctgggcttcagggtcctgggctccttcgcacctccatggcccttcttctccacctggtgargatgattcacccctcatggtcagctcctgaggccagactcttcttctgcaaagccttcccagccttgcctggcagaagtgggttttttctttaggtcctcatggtgtttcatgcaaacccacctgagagcatctcccaagttattcatttcttggactcttattataaaatgtagtttcctaaggacagagtctgggtttattcattgtcagtaatcccagaagctccccccttgcacatccagtgcctggctgggctcaaattggtccagttcacctctttggaaagccacttggaggctgaagccaaaccatagcccatcattctctgagaagcacactcagcggaaagagccctta

SEQ ID NO: 516560 - DNA, 604 bp, Homo sapiens
aagatctcaccatatccggattttgcgcagccaacagaagtgtgaataatcacttgacagtttcttatacctcaaaagtgcctgctcacatcagcatgtttcttactctctctgcttctggttccattagagaaattgcctcactggacaccaagaaataagagacttatctgccccgttccccttacaagtttaaacgtcataaactagatgggagaaatgttcacatgtatgctgtaatccctttkaaacatacttctaagggcacttttttttccatttgggcttagaactgattaaacaaaacaatgttctgtccaaacctgcattttccttattactttctaatcattttaccaccaacataaaggcctgttcttttccaacactgggctctttaatcattcctgacaggcctctgctttctgcttggccaggccccagcaaacaccgttgggctccaccgccctcggctgctctccctaagtcctctctgcccggtaacacagctcatttaaagagcgagtgggagcaaagggaaggaaggggaaggcccatgctcctcgtgaaagctcctcttccgtgttcggtgcaatgcagcact

SEQ ID NO: 516561 - DNA, 367 bp, Homo sapiens
ccctgtttggaaaagtttaagtctcagccagtcgggatcagcttagactgtgtggtccractgcagccaataggagaaggaaacagaaacagaagctgcattagggataaaaaccccttctctcctttgttcagtgtgctcttgcaagcgtgacaaacacaagcagcactcttctgcagaagtaaatgtgccttgctgagaaacttcctatttaagtgctggtttttctttgcagcactgggcacttgtttctaacacacaccagaggaatgtaaagctgcaaaagtgagttcatcatgggggcaagattgacaaatcactgtgtcaggggaagtcaaagagaaaggacagaaatgctggctacaga

SEQ ID NO: 516562 - DNA, 490 bp, Homo sapiens
aagacaacaggacacgtcccactcgacatcccactctgagaatctacagtgcccgggctgatgctgtgacagtagcrcatgaagagccgagttggtcaaattttcatgcatgaatattcaactcggcctgatggggctgtgggcagcaaggactgtgggaaatggcagagagacatgaaatctaaaaggaagcagcaagctgtgagcagagtgagggtgcatgagacgctgaggaacaaagtgttccttggccaatatctgtaatatttccatcatagattgggctccccaagaagtcaatccagagtgcatttgggagatgaagccagggggccctgaagtggagtaggaaggagaggagaaggggaagaggcccagaggtagtgcatgagtaggttcctgctatgggcaacaccacgcaagacactgggcccctgtgggaggccacacagaccctacgtctcagagctgcccacccccataggcaagg

SEQ ID NO: 516563 - DNA, 537 bp, Homo sapiens
tcatgacccaataacctcccaaaggctgtacctcttaataccatcacattagagattagacttcagcataagaattttaaataggtggaaacattcagactatagcattaagaaaatagattagtttcaaaaaagagcagttacatttctagctgaagtatcaagagaaaggatggaagctaaaggtaataaaatgatatcttcaaagagctgaaataaaataattgcaacctgaactatatctggagaagatatttttcaaggatgagggtaaaatgaagacattttgaaattttttttaaattggcaaatttaccattacagcccctaacgtcacaaagtgtcaaaggcagttattcaggcagaaaaacacaaagagagagaatagaatacaatcatgtttggaacggtctaatggaagttaatgtgttctaaagtccttatgttatctgggaggagggtaaaataattgactagcttaagtcagaaaagtgtrtggtaatatcttaacaactaaagagaattagattgtttaac

SEQ ID NO: 516564 - DNA, 581 bp, Homo sapiens
tctgctaattaaatatcacaagtgtctgaatctgtgggaaacattggacatctagaaatgaaaaggcagatgcagttactgcaaattatggtaccccatggtaaatgcaatgtagggagattacaaggtgctaygagaacatgtatgaaagttacttaacccaggcttaatggttaggaaatgccttccagtgagagagaactaaatcaagaacagaaagaaaggtgggggttaagctaaaaggataggggttgggggttaaagtttatgataaaattaacggcatgtgcaaaaacctgtaataaggataatatgcttaaatcactaaaagaagttagctttgatagactcctaagaggaacagggaatgagagtgatgagacacatagctgaaaaatgatccaatgacacttgaatttgattataggaactgtggatagttattgaagtctagatgtgatcatccttgggttttagagaggttcctttagttcattgtggagaatagattagaggaagtctcaaacggagggagggagagctttcagtagtccacgtgactctagaaaagggtagaggcc

SEQ ID NO: 516565 - DNA, 581 bp, Homo sapiens
tctgctaattaaatatcacaagtgtctgaatctgtgggaaacattggacatctagaaatgaaaaggcagatgcagttactgcaaattatggtaccccatggtaaatgcaatgtagggagattacaaggtgctacgagaacatgtatgaaagttacttaacccaggcttaatggttaggaaatgccttccagtgagagagaactaaatcaagaacagaaagaaaggtgggggttaagctaaaaggwtaggggttgggggttaaagtttatgataaaattaacggcatgtgcaaaaacctgtaataaggataatatgcttaaatcactaaaagaagttagctttgatagactcctaagaggaacagggaatgagagtgatgagacacatagctgaaaaatgatccaatgacacttgaatttgattataggaactgtggatagttattgaagtctagatgtgatcatccttgggttttagagaggttcctttagttcattgtggagaatagattagaggaagtctcaaacggagggagggagagctttcagtagtccacgtgactctagaaaagggtagaggcc

SEQ ID NO: 516566 - DNA, 643 bp, Homo sapiens
ctggaggctgtctgaaactttctttcatgcaactaaaaaattaagagtcctgagaactttagaactatgactaagtttgagtgtggtgcgttggccaaatgcatcagactgaaacagcactagactgtggtctagcagaagatgggaagattgatccatgtcttgctgctgcccagcttttggttcctggagaatttcctgtaagatctcgggagtcagggtaggtatgaccyggacagagaatcataaaatcccaagttttagatcctaaagagatatttgagttcatttgtttaacttctcttaacattttagtcaacagcacagagatttagaaacttgctccagttttcatggtcagttaatgggaatattagaactagaacccaggtttcttgatttatgaatcttctctttgttctctgttggtgttgcattatctgtttttcccagagcccagagcctttctagccaagtgccatggtcagtagtgtgttgacaaactggatttctctttcaaacaaaaacaaaaaaccctggtctgtagtatttttagatttccatggtataaatacttctaccatggccaatttcaagctaccaacatctaacaaccagcttgcaagtttcctgaaaaagttaa

SEQ ID NO: 516567 - DNA, 515 bp, Homo sapiens
gctgtaattatggaaggagctgccaattattgtgccaattattgtgtattgctccagtgttcacaggaatgagtgtgaaacccaggttgggccagtcactgaaccctaggagccccttggccacagtgattggtctaggaagagtcatatggtctgggttgaacaaatcagaatgcctttccttccatagctttttcctttaaaagttttaaaattaattttaaatacataaattatacctgaataygttatcactgaaaaagtttaaacctgacagtctccttcaatctcaacacctaatcttagcttcaccagagataaccaaggtaatttagtgaatctagaccttttctatgcattttcatatatttagaaatatgttataaacatatataaatatatattattatttcaaggttttgttttggttttggtttatgcttgagtgataccatattgtatctatatactgcaaattacatttttcatttaccaagatgtcttaggggtttatg

SEQ ID NO: 516568 - DNA, 572 bp, Homo sapiens
tatctgggagcttggctgtccatatggcctctctctctagcagagtagctgggctaccagcagggtacacagtgactgacttctcagggaatattttgagatcatgaaagcagggttgcagatctcttaaaatctagcttcaraatttgcacagcatcacttccatggtgttttattgatcaaaggaatcatgggactaacccagattcacaggaagggtaaatagactccacttcttgatggcaagagtggaagagaatttgcagccatctttatttttacgattctaaaaatatttttattttctagagtcaagatgagggagagagccatctttaaactatcacagctatagtagattcagtactttgcagaggagtaaatataaaagaagtgggaacacatttgcactaaataaagcagattttaaaaaaaactatataattttctgtgtttctcttaagtgtcagagaaagtactgagggaaggaaatggcttaatctttcctaaacaacttgttcaccttctgtttcttttctttttacctttccttggctttccttcttttgcgg

SEQ ID NO: 516569 - DNA, 552 bp, Homo sapiens
tttgtgtaaggctgtgactttctcagctccttcctcctgtgtaaatttcactgtcttcccttcttacattttgattcccccctccccttttagtaggttttcctgctattcctcgtcaagtcctcttgtttttttatcttgcccaaagagctccctctcaaggccaactataggctcckcttgccctgtacaaaactaagaaacctctttggttgtcctttccttcctggggtatagaatgttcttggaagctccattgatttagtagctgctccatcatctagcttgtgaaaccattccaaactaattttttaaaaccataactgatttgtcattttgtatttgtgatataacaagtctagaagttagaactgttgtcattcacataataagattactctgtctccttgggaaaaaaactttatggaggctgtttgtcctctcaatatggttttaagattgaaagtaagaaaacggatttaggatgaaaactctagaactaccctatgctgtttatactgggaaatgctttgtaccaagtagcagtgacta

SEQ ID NO: 516570 - DNA, 496 bp, Homo sapiens
gaatattagagtatactttcttgttttggacttatttctacattttttttgcctgctacaggctaaagtacatggctatctaaatccaatttaaatgtgcggttttgcacagtgatatttatctcatgatattacagtcaggtttcagtacgcataggatrtcataaggaaatttaaatatttgttaactggctgggccagtggctcacgcctgtaatcccagcactttgggaggctgaggtgggtgaaacacgaggtcaggagttcgagaccagcctggtcaacatgatgaaaccccgtctctactaaaaatatttttaaaattagtggctgggcacagtggctcacacctgtaatcccagcaatttaggaggccgtggtgggccgatcatctgaggtcagcagtttgagaacagcctggctaacatggtgataccccttctctattaaaaatacaaaaattagctggacgtggagcgagtgcccgtaatcccag

SEQ ID NO: 516571 - DNA, 485 bp, Homo sapiens
tgggaccaataatttacctgcacagtttgccactccatcatcagggaatctccaccacccccggccccmtcaactaggggagaaaactaaggctcttccagtgccccaaacatgaagccgcttctctgatgctcattaaagaaactttcacaatttaaatagagaatctcactgctgcctactctaatacaggaaagagactctaaactctgcatctcattttaattcaacttgaaattgccaccagtttctacccttccatatttgccttcatgaacatttcagactttaacaaaaatctgatctttttactgatattaaaaagacatatgaaaatgtgtttagcattaagcatttattttcaagtctaagaaagataaagatgcacaaagcttaaagaagttgctgccagtgactcagtcattattaatattgctctaggcacaatgaattggaatggtgttagaaagattttctctagggaa

SEQ ID NO: 516572 - DNA, 438 bp, Homo sapiens
cactgtatagaacagtacttggcaactttatgaatcattagacaaattacaattttgccatgtttaatcataaatgtaatgttttgtcgttttcaaagaaacacactcacatrtcaattattcagaacctactacaaggtattgaagtctttggacaggaaataatgtccagtgctttactatttgtgattacttaagaaaagcttttgctagagcagacctgtatttttttaataggaaagtcttttattatttacaagaggaattttattttcttgtttgtaaactgcaagtcttgaaacacagtcaaacaaagtagaaagtgaggaatgcccataaaattattcacccagagataattagtgttaacatcttagtgtcttgtgctgatctgatatcttcggccagaaaactgcattgttgatttttattgtgagt

SEQ ID NO: 516573 - DNA, 625 bp, Homo sapiens
agttgttataactatttgcagttatttggagataggttgaagctgtgcacaccccacaattctaggttgtgatttcccttctggttttatcccctgggaaaaactttgcatctgtgtaaaaggaaattaatgcaagagtgctcatcataacattgtttgtcatggaaacaaacaaaaaggaaacacacatactgacatggagaaataacttgtagtattttgcgtgcaatggaatactatatgagggtgaaaatgaatgaactagcaatgcgtgtatcaacatgaataaatccccaaaacataataatgttgaatggaaaaggtgagtttcagaaggatatatatgccctctaaatccatttatgtaaacctttaaaaaactacattatttatggtcataagyccatccagaaaatatttaaaaacctacatgggattgataactactgatgtcaggatagtggtttactgtgaagtggaagggtaggtaatggggccagggctttgcttggatctttaatgtttcatttcttgatctgagcagtaggtatatgggtgcctgtaacattattatctaaactgttttgtatgcttcaactatttcatagtttaataataaaaaaga

SEQ ID NO: 516574 - DNA, 625 bp, Homo sapiens
agttgttataactatttgcagttatttggagataggttgaagctgtgcacaccccacaattctaggttgtgatttcccttctggttttatcccctgggaaaaactttgcatctgtgtaaaaggaaattaatgcaagagtgctcatcataacattgtttgtcatggaaacaaacaaaaaggaaacacacatactgacatggagaaataacttgtagtattttgcgtgcaatggaatactatatgagggtgaaaatgaatgaactagcaatgcgtgtatcaacatgaataaatccccaaaacataataatgttgaatggaaaaggtgagtttcagaaggatatatatgccctctaaatccatttatgtaaacctttaaaaaactacattatttatggtcataagcccatccagaaaatatttaaaaacctacatgggattgataactactgatgtcaggatagtggtttactgtgaagtggaagggtaggtaatggggccagggctttgcttggatctttaatgtttcatttcttgatctgagcagtaggtatatgggtgyctgtaacattattatctaaactgttttgtatgcttcaactatttcatagtttaataataaaaaaga

SEQ ID NO: 516575 - DNA, 529 bp, Homo sapiens
tcaatggcccaaatttgcatccctgggtctagagtcctgggaccatcctgcttttcatgtttactcacccagttcattaatcttcctagacaataaaaacttacattattgcctttgtaggaggactgtgcttaaggctgctttacctagtctttaagagcctagaaggaaacttggcaatgtctttctgtctaggctgcaagatttggtaggtggttgagacctgaataacggaatccctggcttcttagttttagtgtgttggaagttcttcagaactcccagagcacttcatgaatatctactcagagcaagcattacatttctatcctacagaaagagatactgaaacaaaacaagaagacacattttgmaacaccatttagaagaaaatggagcaatcactgatcattagggaaatgccagtcaaaaccacaaatgagataccacttcatactcatcagtgtgactatctgaaaaccagaaatagcaaatcttggtgaggatgtggggaaattgaagaccttgt

SEQ ID NO: 516576 - DNA, 499 bp, Homo sapiens
aatattccatagggggaacagcctggtaaggttagaagatgagccctttttttaaggtgaacctagagaggtggccataccagtttaatctagtcattgtggttataattggggatagaaatgttttagcaagaaagtggtttgtaggttggctggagatggactttgatgtctggctcctcctgtctcttttgagaaacctggtataactggaaatgtrgggagccttaggatcaagcatattgaacgtggttttcctttggccagaattaaaatttgattttgcttttctagattgtccaagttgctgtgattatcaaactgaaatgaagtaccattatattataaaataccattatattataaaatatttgctacatagatctgttataacttttctgtactgtttatcaattagtaaatggtattaaatttatttagataatcagctactaaaataaactagtcatgaggaaggacctgttttcattgaattttt

SEQ ID NO: 516577 - DNA, 580 bp, Homo sapiens
ccagaattccagtttggcctgccttggagcatctatttgggaacaggcatatgtgaccttccaattcaagactttgcttctgttgttgctgctgggattggcaggcttctgtgttctaattactcttttaaaattccatttaaaatgcaatttcatgtaaatgtgtgttttcacatttagtttttatagcatttcttttctttcccaactatatcagtgataggtattaactgtaagatgtggtatatacagatgagcaaaagaaaaaaggagaaaataacttgtaatctaatcactaagacataaatactactgacttggtcttttttctcttactcttcctctttatgtatgtatgtacayatttacttaaaatatagacttgctatctcattgtatatgttacttaatgcaacaaaattctttttgcatgtttgccaggtgccagacactaggctaggccttggatatagttttgtttactgttttttttaaattgtcacttaatgctatatgataaatatttctccaagtctttaaaaattatttgaaatgacatttttaatagctgcataatatc

SEQ ID NO: 516578 - DNA, 524 bp, Homo sapiens
tctcccttatagactgtgccccattctgcttctctgataacacccagcctttagatcgggttctgccttctagagacacatgaattaacctacaccatcttccacatagtcatttttcagatacttgatgttactagtactatatcccttcaaaggtttttcttttccagcctaaacattcctgttcttataaactagaatttgctaactggagcctgcgggctacatccggtccacagatgtgttttgtttggcctgtggtgtttgaaaaatattgaataagttgccaacatttaaaaatcagggcatttcactgaaacgtcyggagctctggcatctcttgaaaactcaaaagatctggagccacaattttatctttggacaggacataaattctccagattgttgcagccttcaccactctatgctcttgtctagccccctacctgaatcattatgtcacatgtttccagacccttcgttattctcattttcttttcctagctgtgatgcaaagtgtcagt

SEQ ID NO: 516579 - DNA, 649 bp, Homo sapiens
caaaaggtcaattttaataagtaaaatattctgttttatgtatcataattttttttattgtggcaaaatacacctaacatgatatttaccattttaaccattttaaaaggtacattcacagtgttgtgcagccattattactaattccagaacattttcaccaccccaaatgaaactctgtatccatgaagcagtcacttcccgttccctcccgatccctggtaactgctaatcagctttctgtttctatgtgtggctatttcatataaatggaatcatacagcctgtggccttttgtgtctggcttcttgcacttagcataatgtttccaaggttcatccatgttgtagcatctatcattatacrctgttccttttcatggctgagtaatattttactctacggctgtaccacatttggtttatccattcatcagttgatgccggttggtggacacttgggttgtttctaccttttgactgttgtgaatagtactgctgtggacatttaggtacacgtttttgcttcaacacctattttcagttctttgggatatacacatagcagtggaatttctgaattatatggtaattccatgtttaacttattgaggaactaccaagctaaatagctaaataaaattccacag

SEQ ID NO: 516580 - DNA, 524 bp, Homo sapiens
taaaatcccattttctgataataaataacgataatstcatatatctgtatctgtacctaccaacaagaacacgggctgttcacatttgtggtaggaaaggttattaagttttttctttatctgtttttgtattgttgcaacaggaaacctactaagattaaaatccagcaaacataagacaaagataaaatgcacaggggttttgatgcattaggtgtttcccatagtacttcctatttttcaaacttcgtgtgattaaaaaagtaagttttatccctgactaaatttcagtgtggaaataaagaaataaagatagcatgtacttggcttaggtatacttgttttgttctttcagctcgttacgtaaagatacattttttttttctttctcatgacatgaagataagctttcttcttaccaaaacctaaactgtgaaggcagcacccaagccaaaagcctcgaggctctggtttctgtggtgggatggggagagaagtaggttgcacagatgtaggatgccagc

SEQ ID NO: 516581 - DNA, 569 bp, Homo sapiens
tctttttcttcttgcccccaaaggatttttkttttttttggtaaaacaaacactttttgggttattttaaaatagtttagtagaattgggatgtgcacataggatagggcagaatatgcaaaggagatggcccttgaggagttttcacaccttcagtcgtgtttaccaggaggtgttcactaaaccctagtttgtcaattatgtttattctttccagaatctgggaaggggccagcgatgcaatgggacacccaatacttaggagcctcacctgcttccaggtccctgctctaattctgcagtcctcggtccagctattgctgaaagcaaagcttcagaccacctgtcagcaaattattccttcctcaagaagttgccctgaagccatttctttatatgaaggcttttagttcatcactacactggaaattcagtttaccaccgaatgaagttttttagaagaggttgttattatttcctttaaagagaggtatcagaggacaggggttggtagaagcaataaagaaaaccattaatatagattgagaattaagatgctgttttctgct

SEQ ID NO: 516582 - DNA, 669 bp, Homo sapiens
gcatactttataatctcgtagtctacaaaaattttatttattgctgcaaatggttggrttcctgcttgtatgccatgggaactgaatttttgccctaatgttttggcacatcttcagtatacttaccactgtaggagtggtgtgtatccacaattatgttatttgaaaagaatctttgtactggaaaatcccattgagatgtagcattgcatttccaagggtgccttgggacaagaaagaatggggcagcgatatacaaccatttggttacatcattcataccagagaaattgtcatcctactgctgacggggaacacttgcatttctctattatcaaagattttgcagaactgctcacccccctctattcatttcattccagctgttctaacacaaggaatcaagcagattgtttcatttttttgagcatacattaaaaaagacaaggccatcatttggggggcttttgaagggttttttgctcagtttggactgtgtgtgggcaagctcactgccttataacaaaagcataaaactccgtggtgacaggcaagtcaaaggctaaagaacttgttaaaaggaagaactcctaaatgttaagcatttaggaataacaagagaaatgagaaaaaaagcagggaaaaggtaaacgagaacatcagaaggaa

SEQ ID NO: 516583 - DNA, 675 bp, Homo sapiens
tccagtttcaatatctgttcaatttttaaaaggaacataaaagttaggacaacatgacccataacttgtgattatccaaataaaattaaatgcctttaaaaagttttctactagggtggggtgggggggaactaggtcaaaaataacgtgtattcactgggcttcattttatgaaaggaaatgctcttctgagaaaataagtaattccattccatgcaggtttcatttttgtaaacatcaaattggcaaatatgcatttgctttcttccctaagatttgccttacaaaatgttaaggaagaactgactttactaagactcctccatttaattattgcatccaaaatttattaaagacagaaaacaaaaacatttgtaagccatggggacyggtggtaattcaggtacagtgaaaccaggaggatctgctgattccagatggagtggatatattcccatggcacctattacttgccaaatgtttcgtaaagcaaacacatgacctaaaaggttttgcaagtgtggggtcttcaacaaaaaaaaaaagaaaaaaaagaaaaaagaaaaaaaaagtatacacttgcaaaaaaaaaaaaaattctgttcttatttaaaagtcatttcttaattcctaaccataagttgtttttaaaaacacacacacttttaatatttt

SEQ ID NO: 516584 - DNA, 599 bp, Homo sapiens
acacatatacagctattctacatatgaataatatatcctgacaaaatagttggagttgctttaagagtgtccttcaatagctatgagagttttgaaatttagttagattttcaggtttacttggggtgatattcaaaatatttaaccactgataacagcacatgtaacaaccaatccaaacagatgccacccttggacctggggcacagtcctgcagtctccctgctgtgctgatatratctttccgttgctggatcataaagatatccagatgatttctaaggagaagcccttggagctagagtgtagggataatgcctgaggactaattaaccagttatataagtaggtcaatatttttaaaattaatacaactagacatggataaatgatttgttcagactaacatttatacaatttggaatatgtccatgaagaaaataaatacaaattgtcttactttcacaaataaagaaaagaaaaaaacaggaaaaaagattattactagggcctctaccaggatcctaagtataaataagtttcatatgatcagtttcatgaaaatctacctctggctatgggtgtactggaacatacca

SEQ ID NO: 516585 - DNA, 483 bp, Homo sapiens
ttgttttttttttttctgagcaactgagtagatgattgttcatttacttagatggtggccactatgggaagaaatcaattggtgccataagtaagcattgaactattgccaatggttcatctgtggcatgattatgttttcagatctctcctgatccagttrtggctctacttttgcttattagtgctccaccatttagttggggtcaaaacaagtacaaaacaagaatctgacatgccagagtgccaaaagagagagagaaaaaaggagaactggaaagcataagattgtaggattgagaagcaatgattatggtgtttgtctttttttttttctggaatagttgcaacaaagcatacgagatgttctgcccttctataaggaatgtagaaaatataatacaagggttcttttaaattctataatgttccccatttttattgatattttcctaaaatgaaatagaaatgaataatgcaaata

SEQ ID NO: 516586 - DNA, 367 bp, Homo sapiens
tacttttgcttattagtgctccaccatttagttggggtcaaaacaagtacaaaacaagaatctgacatgcyagagtgccaaaagagagagagaaaaaaggagaactggaaagcataagattgtaggattgagaagcaatgattatggtgtttgtctttttttttttctggaatagttgcaacaaagcatacgagatgttctgcccttctataaggaatgtagaaaatataatacaagggttcttttaaattctataatgttccccatttttattgatattttcctaaaatgaaatagaaatgaataatgcaaataacttttctgattgcaattttcatttctattcctcaaaatacagtgcttcacc

SEQ ID NO: 516587 - DNA, 483 bp, Homo sapiens
ttgttttttttttttctgagcaactgagtagatgattgttcatttacttagatggtggccactatgggaagaaatcaattggtgccataagtaagcattgaactattgccaatggttcatctgtggcatgattatgttttcagatctctcctgatccagttatggctctacttttgcttattagtgctccaccatttagttggggtcaaaacaagtacaaaacaagaatctgacatgccagagtgccaaaagagagagagaaaaaaggagaactggaaagcataagattgtaggattgagaagcaatgattatggtgtttgtctttttttttttctggaatagttgcaacaaagcataygagatgttctgcccttctataaggaatgtagaaaatataatacaagggttcttttaaattctataatgttccccatttttattgatattttcctaaaatgaaatagaaatgaataatgcaaata

SEQ ID NO: 516588 - DNA, 645 bp, Homo sapiens
gtgctggttttcaaattcttgcttcagcagttactccgtatgactgtgacataatagcataatattggactgccctctctctcagggtcctcagttattattttataaccttactttggcctagaattggcctaatatggctgttgtgatgattggataaattagtgtttgtataatgcttagaacagtrcctggtactcagaatgtgctatgtaagttttagcttttgtgtcatcatcaccattattattcaagatattagattgacattaaacacttggtgtaaattagtcttgtctgaaattatcttctatgtctgggactgtatgttttgaaaaaaattaatgtccaaacaaaacaattcatttgtttttatttcacactttattaatcagacacatacatagttgccaatcagagactctgatcagcatgaggtaataagagtcttcataggaaattgataagattttgccccaaagcaaagtaatttgacattctagctttagtagccttattattggtgaatgtgctattcccttaggccttctgaaataatgaaactggttaatggaacccctcattacagccttccatgggtccccatgggcccatgctgccatgataggtaaacctgagccaaaa

SEQ ID NO: 516589 - DNA, 402 bp, Homo sapiens
ctttcagaaatccctgcggaaagaggcaacagaagcagcagtagactatgaaaaatggggtggcatgytgggggttatagctagtggtagggaaacttagcaagtgccagaaaaaaaatgtacaccttctatataggaactatgtattctttggtgatagtggccatgaggacactacagagcatgggaatgaatgtaaaagcactgatgtagtggattaggttctgaggaaagcatgggctacagaaggggtcatactaagaaaacgttcatcagtagacagtgaagtttctaagaggttttagggtgttttcactcagcagtctcatagggagcctaagataaagggttaatctcaaagagatttgtagacatggcttttctctaaaggagtatattatt

SEQ ID NO: 516590 - DNA, 611 bp, Homo sapiens
gcttacttacagctgggcagcttagtctgtttgtctcattctagcttcaggaatgatcatcaccaaaaacacgtattgagcattttttccgatgacttttgctagtcaaagggaaaaaagctaaaaggtgaaattactgccattgaactgccattacttgaactgccattacttgaactaccttcatccactggatcaaaaccattttcataactgggtattgttaagctcttcagaacataggcttttggaccattagaagggctttcacatcgtctagtccagttctgtaactgtacacactggagcaaatgacacctgaagaggttctatacatatgtattatcttactcattcaatacgtttgtttagtctgttcctgtgggacarcttgacattatccatttcctgaagtgctgcaacaagaaataccgtacacaccatcacttatgttcttaccaaaaattttaccctgaatccaatttcagacaaattcagaatgtaggacattcaacagggcaactatcttgggctcttcaaaaaggtaaatgactagaaaaacaaaacaaaaaagaagtgaggaattgttctctctttgattaaaagagaag

SEQ ID NO: 516591 - DNA, 788 bp, Homo sapiens
agttataagaatggaaacaaagaggccagttaagaggctagtgtctgattcaggccagaaatgaggttgctcagaccagggtagtagcagtaacaggcagtgagaaatgtgtccagggtctggatagtttccaggcccacccctcagcctcttcctcattcccatagctgcttctggggacctcccggaatccctgagacttccaggagcacagtttgcaaatccatgggtctgatgacctgcaagtctcccttctggttctggactccagctccaggggagccagagcactagtgttcaaggagctacacragggacggtgtgatctgctgggcctaatttttctttccaaccaaaacatttacattttgaataatcagaaatattttggcttataaatcatcatcagtttctagcccaagcccattttcacatcagccgttctggcctcacgttttggctgcaggcaagaagtccagtgaaggcctcaaatgtgcagtcatttccttatgcccatgttcaactctcttctctggatgacagaaagagacgagagaccacttgggaccccaacacccaaatccctccacaagatgacctctgtgctgtctgcactgtgatattcataacttaggattttacacacagtgggttctcaaaggaaataggtagcgttgattcaaatctatgacaataactccacataaaaacaatattataaacagcaaaattgcaaagagttgcaaggtggatgtatgtttctattcactttagccaaaccttatagg

SEQ ID NO: 516592 - DNA, 788 bp, Homo sapiens
agttataagaatggaaacaaagaggccagttaagaggctagtgtctgattcaggccagaaatgaggttgctcagaccagggtagtagcagtaacaggcagtgagaaatgtgtccagggtctggatagtttccaggcccacccctcagcctcttcctcattcccatagctgcttctggggacctcccggaatccctgagacttccaggagcacagtttgcaaatccatgggtctgatgacctgcaagtctcccttctggttctggactccagctccaggggagccagagcactagtgttcaaggagctacacgagggacggtgtgatctgctgggcctaatttttytttccaaccaaaacatttacattttgaataatcagaaatattttggcttataaatcatcatcagtttctagcccaagcccattttcacatcagccgttctggcctcacgttttggctgcaggcaagaagtccagtgaaggcctcaaatgtgcagtcatttccttatgcccatgttcaactctcttctctggatgacagaaagagacgagagaccacttgggaccccaacacccaaatccctccacaagatgacctctgtgctgtctgcactgtgatattcataacttaggattttacacacagtgggttctcaaaggaaataggtagcgttgattcaaatctatgacaataactccacataaaaacaatattataaacagcaaaattgcaaagagttgcaaggtggatgtatgtttctattcactttagccaaaccttatagg

SEQ ID NO: 516593 - DNA, 788 bp, Homo sapiens
agttataagaatggaaacaaagaggccagttaagaggctagtgtctgattcaggccagaaatgaggttgctcagaccagggtagtagcagtaacaggcagtgagaaatgtgtccagggtctggatagtttccaggcccacccctcagcctcttcctcattcccatagctgcttctggggacctcccggaatccctgagacttccaggagcacagtttgcaaatccatgggtctgatgacctgcaagtctcccttctggttctggactccagctccaggggagccagagcactagtgttcaaggagctacacgagggacggtgtgatctgctgggcctaatttttctttccaaccaaaacatttacattttgaataatcagaaatattttggcttataaatcatcatcagtttctagcccaagcccattttcacatcagccgttctggcctcacgttttggctgcaggcaagaagtccagtgaaggcctcaaatgtgcagtcatttccttatgcccatgttcaactctcttctctggatgacagaaagagacgagagaccacttgggaccccaacacccaaatccctccacaagatracctctgtgctgtctgcactgtgatattcataacttaggattttacacacagtgggttctcaaaggaaataggtagcgttgattcaaatctatgacaataactccacataaaaacaatattataaacagcaaaattgcaaagagttgcaaggtggatgtatgtttctattcactttagccaaaccttatagg

SEQ ID NO: 516594 - DNA, 788 bp, Homo sapiens
agttataagaatggaaacaaagaggccagttaagaggctagtgtctgattcaggccagaaatgaggttgctcagaccagggtagtagcagtaacaggcagtgagaaatgtgtccagggtctggatagtttccaggcccacccctcagcctcttcctcattcccatagctgcttctggggacctcccggaatccctgagacttccaggagcacagtttgcaaatccatgggtctgatgacctgcaagtctcccttctggttctggactccagctccaggggagccagagcactagtgttcaaggagctacacgagggacggtgtgatctgctgggcctaatttttctttccaaccaaaacatttacattttgaataatcagaaatattttggcttataaatcatcatcagtttctagcccaagcccattttcacatcagccgttctggcctcacgttttggctgcaggcaagaagtccagtgaaggcctcaaatgtgcagtcatttccttatgcccatgttcaactctcttctctggatgacagaaagagacgagagaccacttgggaccccaacacccaaatccctccacaagatgacctctgtgctgtctgcactgtgatattcataacttaggattttacacacagtgggttctcaaaggaaataggtagcgttgattcaaatctatgacaataactccacataaaaacaatattataaacagcaaaattgcaaaragttgcaaggtggatgtatgtttctattcactttagccaaaccttatagg

SEQ ID NO: 516595 - DNA, 614 bp, Homo sapiens
cggacccacaccaaacagataaacattaaaaccttaattattgaagattgtaacaggggtactaaatgtcaagctttttctcagacatttccaactgtattatttctttcatgacacaaaatagttttgtgtaactatatgttcctgggcaaataatgtaaactctcagtgcctcagtttcataatttgtaataatgygggtggaatactggggccatgagaattaaatgaataaaaaacagaaaatcatttagaataatgttgtctggggtgtagaaaggtttgcataaatggaagctcctgtctgtgatggacaaacactggatacagtaacacatgtgacagggtaagttgttcattttcactgattggggtgctttaacaaaagaaaagttaaaaatctccctttctttatagaaaggcagtcagatatttgtcttgagttatatttttctcgctcctcggtgaaaggtgacaccacttgtgcgtttcgaagcaggtaggatgagctaatctgaagaatctccttctctcccactgccatcgattgggtgacaggggcccaacaaggttctaaggatgaattatccaagttgaggaaaagatggagtttg

SEQ ID NO: 516596 - DNA, 632 bp, Homo sapiens
ggttactgcttggtgtttgcttttttttttttttttttttttaatatggtttgaacagttggctgcctttcattggctgaaactcagtgattggcctgagtagattacatccagttaggttcacacacccagttaggttacagttcactaagtttggagttcagcctgtaggctgaacttaaaatacataaagaggcagcattgggctaaacttaatttaacacactaaagggtacttagcaaaccttgttcttgtagcttcctctggtaccatctccaggcagagaagcgagatgcatctaaagctgtctgcagtggttaaccttcattctccttggcagaagatgggacaggacacattctttggaaatctatgtcctgctcttaggcaaatagagagaagagagctttcctgcatctgcttcttaattgtcctcagctcaacaatccttcatatttgggggcagcstattctggtctcccacatagacaaaggtggcagaaaatgtgaaaagattttaacagttgtgaacaggtggtaggattgtggcttctccttttgggtctctaactgtctaaaaagttagcacagtcttcatactaaaataatttcagtacgtttttctgataaa

SEQ ID NO: 516597 - DNA, 632 bp, Homo sapiens
ggttactgcttggtgtttgcttttttttttttttttttttttaatatggtttgaacagttggctgcctttcattggctgaaactcagtgattggcctgagtagattacatccagttaggttcacacacccagttaggttacagttcactaagtttggagttcagcctgtaggctgaacttaaaatacataaagaggcagcattgggctaaacttaatttaacacactaaagggtacttagcaaaccttgttcttgtagcttcctctggtaccatctccaggcagagaagcgagatgcatctaaagctgtctgcagtggttaaccttcattctccttggcagaagatgggacaggacacattctttggaaatctatgtcctgctcttaggcaaatagagagaagagagctttcctgcatctgcttcttaattgtcctcagctcaacaatccttcatatttgggggcagcctattctggtctcccacatagacaaaggtggcagaaaatgtgaaaagattttaacagttgtgaacaggtggtaggattgtggcttctccttttgggtctctaactgtctaaaaagttagcayagtcttcatactaaaataatttcagtacgtttttctgataaa

SEQ ID NO: 516598 - DNA, 572 bp, Homo sapiens
agtcccagctcattagtgagaatatgtcacgctttctcattttctccactctatcagtatgtagtttatcttggtatgttatccctccttcaattaagtacttcccactttctcttatgatgcataaaataactggttatcactcatcctaacactagtttctattttcgtgtcctccctgggtaccattgatgtttcatctttctcatctctttttttttttttttttttttttgagacagagtcttgctctgttgcccaggctggagtgcagtggcgcaatctcagctcactgtaagctccgtctcccgggttcacgccattctcctgcctcagcctcatgagtagctgggactacaggcgcctgccaccacgcccagctaatttttttgtatttttagtagagatggagtttcactgtgttagccaggatggtctcaatctcctgacctcgtggtctgcccacctyggcctcccaaagggctgggattacaggcctgagccactgtgcctggccctcatcttttttattttatttttttttgcttaaagcccaacttatttattatgca

SEQ ID NO: 516599 - DNA, 642 bp, Homo sapiens
aatctgtcgacttgggggtaagttaaagaaacaccgtgttgttgtagaaggccattgacatcttctcctggtaaaacccccagagggtgctgtcttaaggtgttggacagaaactgccccatggcatctacacactggatgttgatttgagttaaactgagcatttgacagaaggattctgacccattccctggagtgatttgggaaggtatttataaaaaggaatgatgtgctccagtgatttacaataatggcatatattgttttgtctttggtttgtttcttgattgtaaatattggtcagtgtccaaaattaagatgcaatcactggttaccccaacctgggatgtttatttggaaaaacacaaagtggtttaaaattcatacaaatcactctaaacctgggtacactctttttctttaaatcttagattctgctgtcagatcaagagaaaaagrgaaagctttcatattgctcaaaatgattttttaaaatttccttcatttcttacttccttctcaactcttttccactctaaaacattctcaactccctaactcattaagatattttattcataaagagaacttaaattaagatttaaataaatatttattaaactgttttccagatttacaaaa

SEQ ID NO: 516600 - DNA, 546 bp, Homo sapiens
gctgatgtgtgataacacctgctgcctgttgtcactgagattcatggaaaaaattttttgaccaygaaagcatggtgtttggaaaagggtgagtgtttgagctagaaaactgtgccttgaactgggtgcggtggctcatgcctgtaatcccagcactttgggaggctgaggcgggcagatcacttgagctcaggagttcaagacaagcctggccaacatggtgaaatcccatctctactaaaaaatacaaaaattagccaggcgtggtggtggatgcctgtaagcccagctacttgggaggctgaggcaggagaatcgcttgaacccaggaggtggaggttgcaatgagctgagatggtgccactgcactccagcctgggcgacagagggagactccttctcaaaaaaataaataaataaataaataaataaataaataaataaataaataaaagaaaattgtgttttgaatcctgactcttctgcttcttagttgtgtgcctctggacagattatttaaactactctgagtcacagtttctcatt

SEQ ID NO: 516601 - DNA, 654 bp, Homo sapiens
tgaaactagcgctggacagatcacacatgggcttaaaaaaggtcttattagggagttttaaaggcatccccaaagccacaggaagccacagaaggatttccaaaataggaaaatggtcagatttccaataccgttgactagagcctggagtctcttaagtgctaacctctaagccctaataaagttactttaaaaattttgtaatgtgtgaaggttgaggaacctgggagcagaggtgatttgggacagcatagggaataaaatttctgccgctttcaaggttcagggttggggagctgtccacaargtaggtgctgaatagctgaagccaggagctgcctaaggaagcttcatgggatgtggggcaggtggcgccaggtgttaccgcctacctcagaggtgggaggaagagagttggtttttctttgtcttttatccatcctatttttctattttccttgcttatgtcttcctctaccttctcctttctcccattttcatcttctagcaatctgggcagctatagctgactctccctgaaggaagagggaagagaatgctttttgctcctccatcagtgacttctcataaggagtcaacagagcattgtgaaaacaaattcataagaagcccgcctttatctaagggttggat

SEQ ID NO: 516602 - DNA, 587 bp, Homo sapiens
atattgtcattattatactatagttattagtagttgagcatttagtgtggatcaggcagttaaacaagcactttacttctccaaacctaagaggagactgtgttgtctgttttatagaacatggcttgacttggaagatcagtggttgtgatttgtgctatttgtttaataaattattactgaggccaaataactgaaagatgcagaaaataaaatctattaayactctgtgtagactctttcaatagtcatttcatttagtctcataacaatcttgtgaaattatactgttattattctcattttactgatgaggacactgagtctcagagacttagggtaattggctgaggtcaacaactagtaagtgaccatggcagttttcaaacttggcactatttgattccaaagcctctgccctttcatctagagtgcttctttggtttctttggggccagtcacatctacagtctagtttgattttagcgaatgaaaactgctgcacttcattttccttcagtaccatttgcctctggatcttgatgcttcccatatcatctgtacctctgggagggcagcttccaacc

SEQ ID NO: 516603 - DNA, 603 bp, Homo sapiens
atgctgctgtaaggaaacctaggagaggaaggttaaggcaacaggtccccagctctgaaactgcccaagggaacagagaaccttaggagcagtaagatccctgtcactgggyatgtttaagtggaggcaggatggcccttggtgggggtggtagagggcttattctatagtagaggatttttaagactccttcaggagccatgacccacctttcacacagtggtcagagcactcgagctgtggcaggtaggggagggacagaaagtttacaaaaccgaatccagggtgttctggaacccagaaaccatttgtggtcatgggccaaatctcaggctatggcccctctgcctcccctggccctgcccccttaccaatgcaggagacgccatcctcagccagcaccgtcccgtggtcacagaagcagatgaccttgtggctttcagggtccatgtgacattcgtctacctcacagtgactgcagtttagataatgcttaatattcacttccccgtggccttccatcactagtgacaaggagggagggtcagtcttgggccgaggcctgcctccccactcccagcctcagtactatgtctccaggtg

SEQ ID NO: 516604 - DNA, 518 bp, Homo sapiens
tctctgttcgagtccctagagggccggccgtggaagggggacacgtgaatatggcattctctcagtccaaccctccttcggagttgcacarggtccacggatccagaaacaagcccaccagcttgtggaacccaacgtacggctcctggtttacagagaaacccaccaaaaagaataatcctatagcaaagaaggagccacacgacaggggtaacctggggctggagggaagctgtactgtcccacctaacgttgcaactgggagacttccgggggcctcactgctcctagagccctcttcgctgactgccaatatgaaggaggtacctctgttcaggctacgtcacttcccttgtgggaatgtcaattacggctaccagcaacagggcttgcccttagaagccgctactgcccctggagctggtcattacgaggataccattctgaaaagcaagaatagcatgaaccagcctgggccctgagctcggtcgcacactcacttctcttccttgggatcc

SEQ ID NO: 516605 - DNA, 612 bp, Homo sapiens
ctgcagagatctctgttcgagtccctagagggccggccgtggaagggggacacgtgaatatggcattctctcagtccaaccctccttcggagttgcacaaggtccacggatccagaaacaagcccaccagcttgtggaacccaacgtacggctcctggtttacagagaaacccaccaaaaagaataatcctatagcaaagaaggagccacacgasaggggtaacctggggctggagggaagctgtactgtcccacctaacgttgcaactgggagacttccgggggcctcactgctcctagagccctcttcgctgactgccaatatgaaggaggtacctctgttcaggctacgtcacttcccttgtgggaatgtcaattacggctaccagcaacagggcttgcccttagaagccgctactgcccctggagctggtcattacgaggataccattctgaaaagcaagaatagcatgaaccagcctgggccctgagctcggtcgcacactcacttctcttccttgggatccctaagaccgtggaggagagagaggcaatggctccttcacaaaccagagaccaaatgtcacgttttgttttgtgccaacctatttt

SEQ ID NO: 516606 - DNA, 612 bp, Homo sapiens
ctgcagagatctctgttcgagtccctagagggccggccgtggaagggggacacgtgaatatggcattctctcagtccaaccctccttcggagttgcacaaggtccacggatccagaaacaagcccaccagcttgtggaacccaacgtacggctcctggtttacagagaaacccaccaaaaagaataatcctatagcaaagaaggagccacacgacaggggtaayctggggctggagggaagctgtactgtcccacctaacgttgcaactgggagacttccgggggcctcactgctcctagagccctcttcgctgactgccaatatgaaggaggtacctctgttcaggctacgtcacttcccttgtgggaatgtcaattacggctaccagcaacagggcttgcccttagaagccgctactgcccctggagctggtcattacgaggataccattctgaaaagcaagaatagcatgaaccagcctgggccctgagctcggtcgcacactcacttctcttccttgggatccctaagaccgtggaggagagagaggcaatggctccttcacaaaccagagaccaaatgtcacgttttgttttgtgccaacctatttt

SEQ ID NO: 516607 - DNA, 612 bp, Homo sapiens
ctgcagagatctctgttcgagtccctagagggccggccgtggaagggggacacgtgaatatggcattctctcagtccaaccctccttcggagttgcacaaggtccacggatccagaaacaagcccaccagcttgtggaacccaacgtacggctcctggtttacagagaaacccaccaaaaagaataatcctatagcaaagaaggagccacacgacaggggtaacctggggctggagggaagctgtactgtcccacctaacgttgcaactgggagacttccgggggcctcactgctcctagagccctcttcgctgactgccaatatgaaggaggtacctctgttcaggctacgtcacttcccttgtgggaatgtcaattacggctaccagcaacagggcttgcccttagaagccgctactgcccmtggagctggtcattacgaggataccattctgaaaagcaagaatagcatgaaccagcctgggccctgagctcggtcgcacactcacttctcttccttgggatccctaagaccgtggaggagagagaggcaatggctccttcacaaaccagagaccaaatgtcacgttttgttttgtgccaacctatttt

SEQ ID NO: 516608 - DNA, 575 bp, Homo sapiens
ctggaacacaagtctccccactgagaaacttgacccctcattctcaaccccagtctcagagcaatactgaggtagtgcctatgggtccaggcagactcatggaggcagaggccaaggccacacccagycagtaataatcacccagcagacacgtgcccagcacggtgcatggttacaacagggacagggctgagccaattcttgccattctggagcttctgggccatgggaggagagtggcctacgaggcagcagggcatgtttgcaaagcccaagctcagagcttctacctgggaggccccctgaagaaggacagagggataggccagagggggaaggaaaggaaaggaaagatcatagagcgtggtcccatagcctaggttatttcacacaacagcttgtcctcacacaggcccagggacagttgctgtttttaccattatagggatgagtaaaatggtatggaagaatttaagggccccaaggctggaaggcagtagggccaggaagtcaacctggagtccacattctttcacccaactaagctacttctaggtatcaaagtctccaatcgg

SEQ ID NO: 516609 - DNA, 553 bp, Homo sapiens
ttgttttttctcatttgtttcagtgaaagcttgcataagtgagagacaataaatgatccaggaactctgggctcagtatgccttgattaagatcatttagcttgaagactaacagaacacaaaggcccctccatcagggcaagtgcattaagtacttgtttgggaagactgcttttttatcattcttctctcagacttgctgcttctgcctgtaaaacagctctgcatcttctcagagcctatttagctctctgcttgttgcagcaaagcttcagtggttttggacaaagaaaaacattttttttaattcatccrggcctggaggtggacagtgaatctaggagtaaaaaggttaaaatgctaactcttgatcacaaaaggtggtcttcccagcttgcccctctcctattgagaggaaaagaaacaagaggtggaattgccttagctatcatggagtcagggaggagagagagggcacagggcagaactcagcccagccagtgccctccctgctgggtgcttacacaaaagatgaggaggccaaagtgtgtac

SEQ ID NO: 516610 - DNA, 516 bp, Homo sapiens
gcctgactagcactcaggggatggagaacttagcgtgtgtttcactgctgaatccccagtgcctagaacaacacctagcacctgggaatcacaataaaagtttcttgaaagaataagtgaataatgctttttaataaataattttgggtaatggattcagaagcagggtttatgctttgttcataatataaaattagtatttcagaggacttccacatagccccaactcctgtggctatgtgtgtacaaagctggcatttgttcacataaaaagcaaatcatgtagaaggctccttgtagtgatcatgtccttctctgtgtctaaagaacttgctcagtgctgccaactccattcaggatgatggctgcccaytcatacctgcaatgggtcatggactgggaagctgatgaaactgcaactggcatgggctgctgggagccaccatacatggaggagagtgatggctgattcacagtgagtagcgagaggctgggagacagtcagcaagggcttcc

SEQ ID NO: 516611 - DNA, 618 bp, Homo sapiens
gtgggggtggtgagaagtgctggaggtcttggaattctctgcgaggagaaggaactaaagatccatttctcaggcaccagaggttctcagacttggctgtactcaattatcacccagagagcctgtggcacctgctttttccaagctccccacccagatcctctgattctataggactgaagtcaggcccaggaagctcctgcgtggttctgatataggcgtgtgtggacacaccattaatgcaacagcctaagcccatggcaactatgaatggctggctttagagggtttacaaacaaggaaactgaggcccagagagaaagagacttgttcatggtcccagagggctgrtggcaaggctaggcctcaaactaactctcccacttcccggaatcatgatttcttacccagcccaccagcagccatccatagcaagacccgctcctcgctgatttacattttgagtcatagaaacccaagatgccagctctttaatgaggttgtccacactacaactgaggaggcccaaagcctcagcaggactggtctctgccaggcttaatttacacagttctcaggccttctaataccccattaacgtcagaaaggaatctgcag

SEQ ID NO: 516612 - DNA, 688 bp, Homo sapiens
  misc_feature (1)...(688): n = A,T,C or G
aacaaatgtgcaaactgtctctcaattgagagacggctagaatagaagagtagaaacagtcatggggtccaccctcgaggatctccagtgacrtttgcagcaccgaggcccagcacccgagaaaccctgaagcacctctgcctctgttgcacatgtgctgtcaaaacaacctgcaggtttccaggcagataccattcctgttttacagagagccaatgggtaccaaggcatgatgactttttttttctcaacagggccgagctgtttagtgatagagacaatttttgttttttgttttttgtttttgagacggagtgncctctgtcaccaggctggagtgcagtggcacgatctcggctcatgccacctctgacttgcaggttcaagcgattctcctgcctcagcctcccgagtagctgggattacaggcacacgccaccacgcccagctaatttttgtatttttagtagagacgtggtttctccatgttggtcaggctggtctcaatctcctgacctcaggtgacccacctgcctcggcctcccaaagtgctgggattacaggcgtgcagccacgcctggccagactcaattcgtatttttaaaacaccgttgttctgattttgatatgggttattttcctttccacacatttgctcgaaggctgcagaacgggtatgggggtcaga

SEQ ID NO: 516613 - DNA, 465 bp, Homo sapiens
ttctggtaaagtctcaggtagggaatgcacccaccttgttgctcctgcagggcccctmtcatgctctccttgtctatttctctctgctcccagcccacagggtctgttccacatcactgcacattctgcctcactctgtgacttttgactacaaatctaggttttggggcctatcaattcttggttccagatattcaaagtttagctttttagactcaaggatgtaatttcactctcaaatagtccatatcttactgctaaaaatctgtattttcaagtgtatctgccctccccaacccaaagtagtgtgcagaaaaagcactagcggctctctaaatggagggaaatgaaggattgggtctgcaaagctcaggaaaaagaaacctcaggcgatgttgcaaagcatcaccatattttgagtcgtaattgtcataataatgagctcattgtagtgccacatcccca

SEQ ID NO: 516614 - DNA, 623 bp, Homo sapiens
tctgagaaaccctggactggagaaatttgggcaacatttaaaaacccarcattcattgctcctatttgaacatgggacacgttttcaccacaacagtgttgggaaacactgagttatattgtggcttctattttgaattaacatatagagttattaaagatagatgaaaaatacttctgttcttttgggatcttatatttttgtgggggtgaagacatatctgaaactgaggagagatgtatggaagcttagagagaggactggctcattctccctgaaggcttcacaaagcagtgaagcctttgtgcttcacttgggctgggccatgacaggtcagcagggatcacccgataatgacacaggggaggcatcccagacaaaagcgttaactgcatgctcactcctcctcccttcattgtccagggaccagtcctctgctcagagttcctgcatcctgggggccacttctgaaccagaccatgcccactccagccaccacagatcgagccacgggcaaccaattactagactggccacacctgtgacttgtgtggttccgccttaagagatagactggagcaatcagattctcagtttgagaaatctgatcaaacacatggaaa

SEQ ID NO: 516615 - DNA, 623 bp, Homo sapiens
tctgagaaaccctggactggagaaatttgggcaacatttaaaaacccaacattcattgctcctatttgaacatgggacacgttttcaccacaacagtgttgggaaacactgagttatattgtggcttctattttgaattaacatatagagttattaaagatagatgaaaaatacttctgttcttttgggatcttatatttttgtgggggtgaagacatatctgaaactgaggagagatgtatggaagcttagagagaggactggctcattctccctgaaggcttcacaaagcagtgaagcctttgtgcttcacttgggctgggccatgacaggtcagcagggatcacccgataatgacacaggggaggcatcccagacaaaagcgttaactgcatgctcactcctcctcccttcattstccagggaccagtcctctgctcagagttcctgcatcctgggggccacttctgaaccagaccatgcccactccagccaccacagatcgagccacgggcaaccaattactagactggccacacctgtgacttgtgtggttccgccttaagagatagactggagcaatcagattctcagtttgagaaatctgatcaaacacatggaaa

SEQ ID NO: 516616 - DNA, 591 bp, Homo sapiens
gaacagagaaattccaaataaactgcacaagggttctataaaggttgagatgtgagatttgttggtcttgggcatttggagataccagcactgtttttccttttttcattctatttaaacactgctctttggagcacccactgtkggccaggcactgtgtgggcactgggaaaagatagcttctataccccctcatcatggtcttggggctggggaagggaacaaaacttttcatcctgtagcggtttaacaagcccctgcaaagactttcttctctgatgttagacccgttttccagggaattttttttctttcccaaacccccaaaacatctgacccgcaggggatcagcgctgagctgcctcacccttgagctctctgttcctgcgcacactaaagataaccggaggcaggaggggccagggacactttcccagggtagatttgttctctttgtcccttagccaaggcgccgttatggagaggacgatggtggttgttcggcttgtttgtcggaatccctcccctccccatcctttgttgtctgtcaactcaaactcctaccaggacacattgggagaaaagctgtca

SEQ ID NO: 516617 - DNA, 616 bp, Homo sapiens
cagtcctttcaagaacagagaaattccaaataaactgcacaagggttctataaaggttgagatgtgagatttgttggtcttgggcatttggagataccagcactgtttttccttttttcattctatttaaacactgctctttggagcacccactgttkgccaggcactgtgtgggcactgggaaaagatagcttctataccccctcatcatggtcttggggctggggaagggaacaaaacttttcatcctgtagcggtttaacaagcccctgcaaagactttcttctctgatgttagacccgttttccagggaattttttttctttcccaaacccccaaaacatctgacccgcaggggatcagcgctgagctgcctcacccttgagctctctgttcctgcgcacactaaagataaccggaggcaggaggggccagggacactttcccagggtagatttgttctctttgtcccttagccaaggcgccgttatggagaggacgatggtggttgttcggcttgtttgtcggaatccctcccctccccatcctttgttgtctgtcaactcaaactcctaccaggacacattgggagaaaagctgtcaccatgaaaggctt

SEQ ID NO: 516618 - DNA, 512 bp, Homo sapiens
tgaattgaggtaaaagtctagcatatgatcgggcgtggtggctcacctgtaatcccagcactttgggaggccaaggcaggcggatcacctgaggtcaggagttcaagaccagcctggcaaacatggtgaaaccacatctctacaaaaattagctgggcatgatggcaggtacctgtaatcccagctacgcaggaggctgaggcaggagaatcgcttgaacttgggaggcagmggttacagtgagccgagattgagccactgaactccagtctgggcgacagagcaagactccatctcaaaaaaaagaaaaaaaaaaaattctagcatatatcaaattcctaacatgtgccactctctttacatattagtcctaatcttcatagcttgccggaaaacagatgtgttactgctgtaattctctgctgtgccaaaaacaaaaacaaacaaacaaacaaaaaaccccaagttcagaggttaaaaagtgggctcaaagtcatatagatagtctgggt

SEQ ID NO: 516619 - DNA, 512 bp, Homo sapiens
tgaattgaggtaaaagtctagcatatgatcgggcgtggtggctcacctgtaatcccagcactttgggaggccaaggcaggcggatcacctgaggtcaggagttcaagaccagcctggcaaacatggtgaaaccacatctctacaaaaattagctgggcatgatggcaggtacctgtaatcccagctacgcaggaggctgaggcaggagaatcgcttgaacttgggaggcagcggttacagtgagccgagattgagccrctgaactccagtctgggcgacagagcaagactccatctcaaaaaaaagaaaaaaaaaaaattctagcatatatcaaattcctaacatgtgccactctctttacatattagtcctaatcttcatagcttgccggaaaacagatgtgttactgctgtaattctctgctgtgccaaaaacaaaaacaaacaaacaaacaaaaaaccccaagttcagaggttaaaaagtgggctcaaagtcatatagatagtctgggt

SEQ ID NO: 516620 - DNA, 545 bp, Homo sapiens
agctggggaagtcactgggaacatggacaaatagttactgtggrtttctgtcccttgtccatttaatgttagccacttatgtcatgtgaccataacaatgcttatttcacaaacaagaattgaatccctgctattagcctggcactaaggaaacaagcataaagatgtctttgttttcaaggagtttagaactgagttgaaatgaacattaaaacaatcagcattccaatgaaagtgtgttcaatgaggatatgtaatgaaagaaagaagagagcattactgtctacctttgggagaacagaaaaaacttcacccagagggtcacatccatgatgggttttccaagtggacagaagtggtacttccaggcaaagaaaacaggatggacataagtgtgaaagagtgaaattgctgtaacactcatggcttgactgagatttaactatttttcttctagctcaggaaaataccttgtgaagttggaataataattttcttcttacagcagtgtttttccatgggactgtaatgtattaaaagggtaa

SEQ ID NO: 516621 - DNA, 555 bp, Homo sapiens
atatttgagaactacagagaagtaaattaacataaagattgaagaaagatcacctaaataaagaagtagttgcaaggaagaagctgagatgagagagactgatggcagcgtgctgggggaagaaagagaggagaaagtgatgccatgaagaggaagcaagcaagaggaaaaagaggggggacagctcctagaggaggtaggacccagggatgtggttatttgtataagagggaggtttgaacaagttgattatgttgagaatgcaaattgtattagtctgttctaatgctgttaataaagacacacctgagactgggtaacttataaatgaaagagatttaattgactcacagttccacatggctgggaggactcacaatcatggcggaagagcaagggacttccttacrtggcagcaggcaagaaggaaaatgagacagaagcgaaagtggaaaccccttataaaaccatcagattttgtgaaacattcactaccacaggaatagtatggcagaaattttgtaacatttagattacatgtacagatactgaaca

SEQ ID NO: 516622 - DNA, 211 bp, Homo sapiens
cacttgaactgctgaaagggyatttaagcagttggcataaactgatatgagagctgcttaacttgcagagtatctagtggaaggctgaagtctgctaaattggatatcagaaatccagagagccaggaatcctattttagtcctggttcacacagtgacaagctacatagccctaggcaattggcacatttcttcaccaatggcagatatt

SEQ ID NO: 516623 - DNA, 475 bp, Homo sapiens
tttattttttccatgtatgcctgacctctctttgtgccactgtatttctccagcaccaccaagatctcgattcagtttcatttatgagtgtaattaatatgatctttgcccattataagggttattaataatamggttaaataaaaaccttataacagcacccccactgaatcactccacacaagtcagcttattgcagaataacagttcattttatttacggtctctcaaccaattttcagcacatgtgacagtggccatgttaatatgaataagatttgaaataaggttttctgaaactgtatcacaggtttcatattccttttagtcaccggttttgatcaaaaggttgataagtttgactgctgtggttcagtcttcaattttggaagttactgttattagctagaggaaaaaaaatgattaggctattcatagtaccagaagattgatttctctaagtaaaagccatagg

SEQ ID NO: 516624 - DNA, 538 bp, Homo sapiens
gctacaaattgataataattggactttgacagatatttcctgatggaaattatgtatctgccttaagagacaaacagtgatattagtcattatactaattcatggacaacagcaaaacaaagaaggccaggtggcaatggatatacaggaaatagtgagggttatggagggctaagttctctatggtcaataactaatatgttttgggaatacagaaagtttatcaaaattgtcagagatgtcattgcaatggtaagacagagaatgtagacaacatgtgagtttcatgtcacaagccatctataattgggagtgactgattagagcactgagttgaggaagattctgaggccgtgtctgtcacaagtgtagaggcaaagagtagcagcctatgagtgatgtatttggctgttcctaatctaaaagctctttttgtgactcatgccttggttagacctattgacagagtatargctgtcctggtctgcaagacagagtcaagaaatgactgcaactggttagatgagaagatctgaca

SEQ ID NO: 516625 - DNA, 372 bp, Homo sapiens
acacagtgcaaatcctgcaccagcaaccaaggtatccagattctgtcattaggacagactaggtggctggcgtgacccatggagaggaaggacaaacagtgtagtgcagcgacctacctgagagccacaaggggcacgggagccctacctccagccaagggaggtggtgagttaccatgctacccagcctggaaaactgtgccttttccgtgaaactgtgcacccacagattggaagatccactcggtagccccaccactgggaccttgcgactccgacaaagctgcacagattctcaacagccactcaactagaattggcctaaacttgccgtgttcccgggggrtggggcggccatcaccacatgctgca

SEQ ID NO: 516626 - DNA, 372 bp, Homo sapiens
acacagtgcaaatcctgcaccagcaaccaaggtatccagattctgtcattaggacagactaggtggctggcgtgacccatggagaggaaggacaaacagtgtagtgcagcgacctacctgagagccacaaggggcacgggagccctacctccagccaagggaggtggtgagttaccatgctacccagcctggaaaactgtgccttttccgtgaaactgtgcacccacagattggaagatccactcggtagccccaccactgggaccttgcgactccgacaaagctgcacagattctcaacagccactcaactagaattggcctaaacttgccgtgttcccgggggawggggcggccatcaccacatgctgca

SEQ ID NO: 516627 - DNA, 558 bp, Homo sapiens
tttctgtgcaactctctcttctctggtactrtgtcttatgaactctactttctctgactaccccagattttccagatttggctcttcaatttagggagaaatgtgagctctgagtaagtccctccctccctgtgccatggattggaaatgttctccaagtagtaagttggggtaatagaaggcctgaccacacttgttttctgtctctttggaatttacagtgttttgctttctgatatccaatgtcttgagagttgcttcatatactttgtccaggtttttagctgtccagggtacagagtaaattcagttcttgttattccatcttggctggaagcagttctgtttaatttgatgcaaaaatcgtatgaatatcacttggtaaaagcctatcctgtttaacaagttactttacactgtttactgataagcatttaatacttaagttcatgcacatggctccattcacattcagtgttttgtagattttcctgacagtcctgtgagactggttggggtaagtcggagtgattctttgatagatgaggagactgaggc

SEQ ID NO: 516628 - DNA, 558 bp, Homo sapiens
tttctgtgcaactctctcttctctggtactgtgtcttatgaactctactttctctgactaccccagattttccagatttggctcttcaatttagggagaaatgtgagctctgagtaagtccctccctccctgtgccatggattggaaatgttctccaagtagtaagttggggtaatagaaggcctgaccacacttgttttctgtctctttggaatttacagtgttttgctttctgatatccaatgtcttgagagttgcttcatatactttgtccaggtttttagctgtccagggtayagagtaaattcagttcttgttattccatcttggctggaagcagttctgtttaatttgatgcaaaaatcgtatgaatatcacttggtaaaagcctatcctgtttaacaagttactttacactgtttactgataagcatttaatacttaagttcatgcacatggctccattcacattcagtgttttgtagattttcctgacagtcctgtgagactggttggggtaagtcggagtgattctttgatagatgaggagactgaggc

SEQ ID NO: 516629 - DNA, 558 bp, Homo sapiens
tttctgtgcaactctctcttctctggtactgtgtcttatgaactctactttctctgactaccccagattttccagatttggctcttcaatttagggagaaatgtgagctctgagtaagtccctccctccctgtgccatggattggaaatgttctccaagtagtaagttggggtaatagaaggcctgaccacacttgttttctgtctctttggaatttacagtgttttgctttctgatatccaatgtcttgagagttgcttcatatactttgtccaggtttttagctgtccagggtacagagtaaattcagttcttgttattccatcttggctggaagcagttctgtttaatttgatgcaaaaatygtatgaatatcacttggtaaaagcctatcctgtttaacaagttactttacactgtttactgataagcatttaatacttaagttcatgcacatggctccattcacattcagtgttttgtagattttcctgacagtcctgtgagactggttggggtaagtcggagtgattctttgatagatgaggagactgaggc

SEQ ID NO: 516630 - DNA, 520 bp, Homo sapiens
gaaatccacattctaaatactaagtttcttaaagatactcacactgcaagtttttatcataaaagtaataatcagtcagagcaggagtccacagcaggaaccaggccacacagcaagaggtgagctgcaggccagtgagcaaagcttcatgtgtatttacagctacttcccatggcttgyattaccacctgagctctgcctcctgtcagatcagtggcagcattagattctcataggagcgcgaaccctattgtgaactgtgcatgtaaggggtctaggttgtgtgctccttgtgaaaatctgatgcttgacgatctctcactgtctcccatcacccccagatgggaccttctagttgcaggaaaacaagctcagggctcccactgattctacattatggtgagttgtgtatttatttcattatatattacaacgtaataataatagaaataaagtacacaataaatataatgcacttgaatcatcacaaaaccatctcccacctctgtctgtgaaaaaa

SEQ ID NO: 516631 - DNA, 514 bp, Homo sapiens
tgcctggcccggaaagtacattttgctggtgttcagacttaaggtccatctgtagatgagctgaaacaaccacttctgactgttttatatattagagtaatttgcaaggagataacttcagttagtaaacttcacagatctgattcagattaaaaaaatttttttttgtttttgctgagacataatttcaacaatttataattgttttgtgggaactttttttttgcttacttgtgatttttgtccacaaatatttatttagcttatgcaaagggcacacctgatacagaaaggccttcctttaatyatataaccttgtgttatattctcttttgatttaaaaattaaagtaacagaaaaagaaagaaaatatggtatttcagaaatatatatgaaattaaaacaagacaaggcagagggacagtagaaatggatgtaaatactggaatttttaaaaaaagctttattctaaaattttaaatataattacttttttgaagcattagtttttaaa

SEQ ID NO: 516632 - DNA, 525 bp, Homo sapiens
ctgctctctatatataagcacagacrcacacacagacatacacacatatttcctaagtagacacttaagacattcatatctaagttttaaaaaaatctgatttggcgacacaaaggcttccaagggaagaatttaacaaaatatcttgaagtcttgaagcatgaaaagcctaaaaagaagaataatacaaaacaaaaacccacacatcagggtggtgaaatgagaaagtcagaaacattttccttataaagtttatcaaccacacaattactttatggtttatataaaattatgaactgcatacaacttatcatgaaaaaattgcttcctgcaactgagctgaggaatttagggatgatatgtgtcaaaggtgaaaacatgtttctttttcaagcaaaagatgtgggtcatgtggtaaggttctattgcaatatcttcatggctctcttgccaaaagactgatgtatatttaatcactttatctaatggatgtgatttctaaagtcacagttagccattaggaaa

SEQ ID NO: 516633 - DNA, 525 bp, Homo sapiens
ctgctctctatatataagcacagacgcacacacagacatacacacatatttyctaagtagacacttaagacattcatatctaagttttaaaaaaatctgatttggcgacacaaaggcttccaagggaagaatttaacaaaatatcttgaagtcttgaagcatgaaaagcctaaaaagaagaataatacaaaacaaaaacccacacatcagggtggtgaaatgagaaagtcagaaacattttccttataaagtttatcaaccacacaattactttatggtttatataaaattatgaactgcatacaacttatcatgaaaaaattgcttcctgcaactgagctgaggaatttagggatgatatgtgtcaaaggtgaaaacatgtttctttttcaagcaaaagatgtgggtcatgtggtaaggttctattgcaatatcttcatggctctcttgccaaaagactgatgtatatttaatcactttatctaatggatgtgatttctaaagtcacagttagccattaggaaa

SEQ ID NO: 516634 - DNA, 525 bp, Homo sapiens
ctgctctctatatataagcacagacgcacacacagacatacacacatatttcctaagtagacacttaagacattcatatctaagttttaaaaaaatctgatttggcgacacaaaggcttccaagggaagaatttaacaaaatatcttgaagtcttgaagcatgaaaagcctaaaaagaagaataatacaaaacaaaaacccacacatcagggtggtgaaatgagaaagycagaaacattttccttataaagtttatcaaccacacaattactttatggtttatataaaattatgaactgcatacaacttatcatgaaaaaattgcttcctgcaactgagctgaggaatttagggatgatatgtgtcaaaggtgaaaacatgtttctttttcaagcaaaagatgtgggtcatgtggtaaggttctattgcaatatcttcatggctctcttgccaaaagactgatgtatatttaatcactttatctaatggatgtgatttctaaagtcacagttagccattaggaaa

SEQ ID NO: 516635 - DNA, 645 bp, Homo sapiens
gctgctctgtgaataaattcttagttcacagttgctgtgggaaaaaatgaaagatccaattacaaagtctgggagatttcctataattagttgctattatattacttttgctatgacacagtacagaagaaaggaaaaaggaagaggaattgctgtttcatttctttattattttcttaattgcttttttactaacagcctgtgtctcaaggaagccaagccatattcatttcatcaataacattaatctgtcatttcattcaggaaatacaagaaaggtttcggttttaaccttaagaatactaggatattctgatctctcttatattgttttgtaagcatacttgcagaataatgtcaatacatagggagggttgcagacttgtgtttctgcatgtgtggcataaatrtttgtcaaaataataactatgtgattattatgtatactatgttgttcccaagtcttgtcctgattatattataccttatatttgagaaattatgatgccctataaatagagaaaagcgcacaaacacatcagcacgtatgtatagactatataatactaataatatattgcatttactttaaaatcgtttagaatctttgggctatttaaagtttgtacaaaaaacacaaatgac

SEQ ID NO: 516636 - DNA, 542 bp, Homo sapiens
aaaattttctacctcacgtttagaatagagtctccaattatttttgatcatcacccttaccagctcaataatagcaataccaataataataaaagatctcccaataaatgaatttatatgcttgctaaattataaacaatctacacatgcagtgtaaaacatatgcatttaaaaatatacacaaaattgaaactattttttattttatcattattttttaaatctatcattaccttgatcttgaataaaattgaaacttttaaagataagaatgaagacaaagctcttccagcattgttcttaggtgtgcatattcaactttggaaaccacagattatgccctttgcatacatccaccaccaaagcttccctggagaactcaggcaaacatgtccctgtccatccctaccttcatgctgcaaaaacgtttttagcacatagagtgcattgagttttaaaactagcattctttcaacatcasattaattgaaatgtcttctcttgcataacatctttctagagcctgtaaaattaactaaata

SEQ ID NO: 516637 - DNA, 553 bp, Homo sapiens
gccctcggggaggcggggctgctacctccacgggcgcgccctggcagkaggggcgcagtctgcttgcagcggtcgccagcgctccagcggcggctgtcggctttccaattccgccagctcggctgaggctgggctagcctgggtgccagtggctgctagcggcaggcgtcccctgagcaacaggagcccagagaaaaagaagcagccctgagagagcgccggggaatgagaggcccgcgccctctcctggagccagattctgcaggtgcactgggtggggatgatcggcgggctaggttgcaagtaagtgccttttcttttgctgcttctgtggggaggggaggagaagccctgctctttcgcccgtgctcgcctcaagccgccacacccacctgtgtctattttcacatctcggttctggaaccctgtattacgccacctggaaagaagagaggggagaagcttgaccgggtggttccagcaatgggaggaagaagggctggaagcgtagttatttcgatagctgggcagctcctgtgcggttttgactctg

SEQ ID NO: 516638 - DNA, 615 bp, Homo sapiens
attggtgtcacagcaagctgttagtctccactgattgctagctgctggctctgttgtttttgacagtgcccagagcataaattgckccatagtcttgatccaaataaagttgggcacctcggcaggggcaaggtattgcccgtctttgataatcctttccccatcctttcctggaaacaatctctgtgctatggagcaggagttggagagggtggtggtggtaatgggggcctgttcttcagtggctctcctatctggtcctccctaaatagcagaagcttggggttggggagttaggagctgatactgtggctcactttgcatcttcctcagcacaaagccttttgagatgcaatctctggatgttcactagttgcaaacgtacaaacctggaatagctctaggaaactgggagtagtgggaactaccactgagctgctgaacccattggaacaactcttctgcaacacagagctgtggggaatagaggactgcgtaggctgtcattatctgttatgctttgatcttccctaccgagtagcatttaggagtcagggaaagggtgccgctttcaggctgccttgaagcgtctcgcatagcccttccacacacaca

SEQ ID NO: 516639 - DNA, 615 bp, Homo sapiens
attggtgtcacagcaagctgttagtctccactgattgctagctgctggctctgttgtttttgacagtgcccagagcataaattgctccatagtcttgatccaaataaagttgggcacctcggcaggggcaaggtattgcccgtctttgataatcctttccccatcctttcctggaaacaatctctgtgctatggagcaggagttggagagggtggtggtggtaatgggggcctgttcttcagtggctctcctatctggtcctccctaaatagcagaagcttggggttggggagttaggagctgatactrtggctcactttgcatcttcctcagcacaaagccttttgagatgcaatctctggatgttcactagttgcaaacgtacaaacctggaatagctctaggaaactgggagtagtgggaactaccactgagctgctgaacccattggaacaactcttctgcaacacagagctgtggggaatagaggactgcgtaggctgtcattatctgttatgctttgatcttccctaccgagtagcatttaggagtcagggaaagggtgccgctttcaggctgccttgaagcgtctcgcatagcccttccacacacaca

SEQ ID NO: 516640 - DNA, 615 bp, Homo sapiens
attggtgtcacagcaagctgttagtctccactgattgctagctgctggctctgttgtttttgacagtgcccagagcataaattgctccatagtcttgatccaaataaagttgggcacctcggcaggggcaaggtattgcccgtctttgataatcctttccccatcctttcctggaaacaatctctgtgctatggagcaggagttggagagggtggtggtggtaatgggggcctgttcttcagtggctctcctatctggtcctccctaaatagcagaagcttggggttggggagttaggagctgatactgtggctcactttgcatcttcctcagcacaaagccttttgagatgcaatctctggatgttcactagttgcaaacrtacaaacctggaatagctctaggaaactgggagtagtgggaactaccactgagctgctgaacccattggaacaactcttctgcaacacagagctgtggggaatagaggactgcgtaggctgtcattatctgttatgctttgatcttccctaccgagtagcatttaggagtcagggaaagggtgccgctttcaggctgccttgaagcgtctcgcatagcccttccacacacaca

SEQ ID NO: 516641 - DNA, 615 bp, Homo sapiens
attggtgtcacagcaagctgttagtctccactgattgctagctgctggctctgttgtttttgacagtgcccagagcataaattgctccatagtcttgatccaaataaagttgggcacctcggcaggggcaaggtattgcccgtctttgataatcctttccccatcctttcctggaaacaatctctgtgctatggagcaggagttggagagggtggtggtggtaatgggggcctgttcttcagtggctctcctatctggtcctccctaaatagcagaagcttggggttggggagttaggagctgatactgtggctcactttgcatcttcctcagcacaaagccttttgagatgcaatctctggatgttcactagttgcaaacgtacaaacctggaatagctctaggaaactgggagtagtgggaactaccactgagctgctgaacccattggaacaactcttctgcaacacagagctgtggggaatagaggactgcgtaggctgtcattakctgttatgctttgatcttccctaccgagtagcatttaggagtcagggaaagggtgccgctttcaggctgccttgaagcgtctcgcatagcccttccacacacaca

SEQ ID NO: 516642 - DNA, 466 bp, Homo sapiens
ctctgtagtatgtactttctataatctgtttgtggagtaaagctgagttaatagcaattgtatctcacacagatacattgctctgtgtcatgtgtcttgcctattacttccttggagaaagttatgaaaagttgtgtcctgtacagagacgccacgatgctctacatcttccatgctacttccttactccctrgtcacaggcctaactcagagttctaatcctactgaacacttcattgtctaaatgccccatttacatcttcttcctctctccctgaaggctttcgtagattgtgtattcaaaagatcactgaatcaaaaagaaaatcaccattctttattttttttcctggcacttataatcatccaacataatacacatattttgtttacattgtttattgtgattcccttcactaaaatgtatgcttcagggatccaggaatgtctgtctgttttattcgca

SEQ ID NO: 516643 - DNA, 458 bp, Homo sapiens
tacttgattctctgtgtggtttataaacatttgtctgcagaaagatatttcagatgcagtttaatatgaaaataagcccgcgttttcccctcacacttaagaacagcacccctcaactctccacattcatttgccaccccactttaacaaaagcaaccacagcaactaaacttggattgatcaaaaaaaaatgtccattttgttatttaacatttttaaccctctgtaaaagtgtttttattgccaaggtatattccattacttcagatgagttatttgaaaattataratgactgaggaaagtgcattatttaactcattttatgggtaaaaatttattattctttacatttcaagccttaaaggaaaataagtccttgctagtgcaaacatggtaatacttgcaaagaaatatgaaattatgttacttatagcctgaatgttaaaaccttttatta

SEQ ID NO: 516644 - DNA, 626 bp, Homo sapiens
gctggctgcagcactcctcccccgccgggcttcagagtgggtggtttcctacagcctagggagggggcctgaaacggggtttaaaatcttccctgccctcacacaagcccttctgactgttggagaacctgacgcgcggattctaactagaactggcactctcttcgggtgttagataattaactcaaaggacagcgaaggccttttatgatgtctttcaagctggccttatgacagcttttcttaacgtttctgcggacattttggcggacttgtgtcggcctagctcagtgatcagtttcgttaaagaatttgagtatccgaacattaaaggattggacctaaattctagcaggaggatttttagccacatcaaataatttacgtctcaaagatttagataattagggtaaggatgcttagtaaaaccygaaggttccatcgcgccactgcactccaacctgggcgacagagcgagactccgtctcaaaaaaaaaacaaacaaaaaaaaacctgaaggttcctggaggaaagagatgaactattagccgtgtatttcggtgggaccactcaacataggttcctgtaggttagcaatgtagaaatgtagcgcttcagagccggag

SEQ ID NO: 516645 - DNA, 555 bp, Homo sapiens
  misc_feature (1)...(555): n = A,T,C or G
tcggatcccctgncagagcaccttcagtggcagacatcctgcttcatctgctatctttactgagaatgaccatgcctgggctgtcctaagcacctggctcagacccagtcccacctcccaggggtttactggggagaggcacaagctttgggatcagaacagccctgacccctccctgggggctggtgacccactgagcagcttttgtctagtctcttgccttccctgagcctctgattccacacctggaagtgaggatgggacacgcacctgtatgtgtgtgtggtaaagctctaccaagctgagggactgcatggtgctttataaatcgggccaggaaatggctgggtgaaagggacacgtgctccaccccaggaggctgtggggtcagcatcactgaggtgagcccaggctcaccgttctgcgggaactgtctccctccacagagatctggctgcaaggacaaggggaccaaggatatctcctccatgaagctgaagcggtctcccggatcacrggccaggtgagcccagagcacagaatctctgctcccag

SEQ ID NO: 516646 - DNA, 613 bp, Homo sapiens
aggaggcattggagcctgatggccttggtgcagaccggcccatgtccaacctggagaaggtgcacttcatcgtgggctacgcatcctgcggcccagcctcaggtcagttcccactcccatcccrgccccattcagagcatcagatgccctcactggctctcagccatgccacagcctcccccaccacccctatgacacctccttgtcctgcggcctgcaggctgggtctcaggacagcagatgtcatagctaccgagggttctctatgtgctctgccttttaaaaaagccatgagtaaaacccggttttaggaaaagagtcatcatggaccagtgattccttttagaacaggctgtagtgcagggccctgtaaatgaatggcttcctcatttatattatacattttgtgctttatatacaatttgctttataggaatgggtttctataccaattagaagaaacacgtatagtcagcctgcaaacactgcagttcccatccgtgttggctgaatgcgtagaagcagaatccgaacatgcagagactgattgttcactgctttaagggactgactactgtgttttaggggttcacttactttaggttaatacttt

SEQ ID NO: 516647 - DNA, 388 bp, Homo sapiens
gtgtcctcaggctttccttctcaacatatgcacttacccttactgtccctaaccatggcatcaattttcatttacatagtgattccttcatccatattgccactctagaacattttgctgggcccattaaatgtcctggtggacagtgaccagcacatagtagaaatgtaataaattattattgaatgaatgatgtctctagatcctagccattatatccctgcatcaagcttggcatattgaaaatcaacttattctttctgcctcctgtcccccattccaaccagacttccttttcctcctgcatttcctataaaggaaaaacggtcccttagcaacccagccactgaagccagtaatcwagccacatctaattggtcaccaagtt

SEQ ID NO: 516648 - DNA, 567 bp, Homo sapiens
atttaagggccttcagtttatccttcacacatctgcaaaagtgagaatttgatgccatgacttatcaggtcttatcaggttaaatccggatattatttggctgtgtccccacccaaatctcatattgaattgtagctcccataatccctgcatgtcatgggagggacctgatgggagataattaaatcatrggggcagattttcccgtgctgttctcagcatagggaatacgtctcatgagatctgatgattttttaaagggcagttcccctgcacactctctcttgcctgacactatgtaagacatgcctatgactccttcgccttctgccatgattgtgaggcctccgcagccatgtggaactgtgagtccattaaacctctttttctttataaattactcagtctcggatatttcttcatagcagtatgaaaatggacgaatacaaaaccctttaataaatctccaaagttgtaaatataaaatttgaataaactaatctcacaaaatatgcataatctagttcctgtctttgtatagtttaacctttacccagttcccactca

SEQ ID NO: 516649 - DNA, 605 bp, Homo sapiens
ataacttttaataatatgtgttatttttcttacagaggggtgaaatttgcttgagtagatttatggtgttttcatttccagcagagatctgagtgtcaaagtgctctctacctctggtgaaaggaccatgtggtggtggttggccttcagatgaggggaaggaggggtgtgtgatttcaggtgtgtcttccaaaacagaaaaatccaggtctgatcctgttcttgtctgataatttcttatctctggtgaaaacrcatatcccccgggtgcggattgaagcatgcgtctctggttccattttaatgggaatacacttttacatgagaggtagagatagagcaggaaggtgcagggaacctgagggcaggctatgtctctaaagtgaggaaggcaggcacagatgagcagcttgtgcagcctgtatttttggcttgcttcatgattttgtatttggccttgagccaagcctggggatgggaatccaacacttgcttcactgatttctatgagtgtaattactgtggttaaaaataatgttccttcacatacatggaaggctttataatcaacatgtgttgcctccttttagcattacagcaatccc

SEQ ID NO: 516650 - DNA, 605 bp, Homo sapiens
ataacttttaataatatgtgttatttttcttacagaggggtgaaatttgcttgagtagatttatggtgttttcatttccagcagagatctgagtgtcaaagtgctctctacctctggtgaaaggaccatgtggtggtggttggccttcagatgaggggaaggaggggtgtgtgatttcaggtgtgtcttccaaaacagaaaaatccaggtctgatcctgttcttgtctgataatttcttatctctggtgaaaacacatatcccccgggtgcrgattgaagcatgcgtctctggttccattttaatgggaatacacttttacatgagaggtagagatagagcaggaaggtgcagggaacctgagggcaggctatgtctctaaagtgaggaaggcaggcacagatgagcagcttgtgcagcctgtatttttggcttgcttcatgattttgtatttggccttgagccaagcctggggatgggaatccaacacttgcttcactgatttctatgagtgtaattactgtggttaaaaataatgttccttcacatacatggaaggctttataatcaacatgtgttgcctccttttagcattacagcaatccc

SEQ ID NO: 516651 - DNA, 458 bp, Homo sapiens
atataaaaaatgtttctatgtcagtagccaagatatgaagtcaaatctccctatgagaacacaatttatgcgcataaaatcttcagcaaagaccactgacatcactgcaatttataagagctgtagatgatgggaaatctcaaatgaaatatacattttttcctttttaarcaaaattttagattcaagttatgcatgtgaagattgttacatgggtatattgtgtaatgctgaggtttgagcttctattgaacccatcacccaaataataaataaagttttccgtaggtagtttttcaaccatgtcctcttgtctctctgcccctcctcccactcttggagtccccagtgtctactctttctatctttgtgtccacgtatacccactgtttagattccaattataaatgagaacgtgatatttttctgtttctgcatgaattcacttaggataatac

SEQ ID NO: 516652 - DNA, 458 bp, Homo sapiens
atataaaaaatgtttctatgtcagtagccaagatatgaagtcaaatctccctatgagaacacaatttatgcgcataaaatcttcagcaaagaccactgacatcactgcaatttataagagctgtagatgatgggaaatctcaaatgaaatatacattttttcctttttaagcaaaattttagattcaagttatgcatgtgaagattgttacatgggtatattgtgtaatgctgaggtttgagcttctattgaacccatcacccaaataataaataaagttttccrtaggtagtttttcaaccatgtcctcttgtctctctgcccctcctcccactcttggagtccccagtgtctactctttctatctttgtgtccacgtatacccactgtttagattccaattataaatgagaacgtgatatttttctgtttctgcatgaattcacttaggataatac

SEQ ID NO: 516653 - DNA, 514 bp, Homo sapiens
cagaaaagaaaaaaaaaatactcatgggtctgcaatgtttaaacagaargttttcccaaactagaactaatttggaaatgcagtgaataaataagctattaccactgtctttttacaaagaaaagcactgaatacataagttagtatcattgtccttttacaaagaacttcttccctcctcaaaattccaattattccaagccttcaaaccaaaataaatatatcagatactaaataattccttgctcaatctatttccacaattctattttgttaactactgaaataaactattattttaacttcatttataatatttactatcaaaagttaaatgtctttttggcttaagcactcactaaaatcaattttttatacaagctagcaacagtatcttttaaactaagacattcataaaaaattacatatgccgtaatggaaaaaatgagtaagtcatggtataatttaaaaagtgcctcaaagtgacatgcttatttcagaaaaagcaacactt

SEQ ID NO: 516654 - DNA, 530 bp, Homo sapiens
atactgtacaaccttaaaataatatataacatgtagcctgtttgtaagtgctttggaattctcatctttttctccttttgagagttttgagcttgtrtaaagaataattttggtacttgttatttctatggttctctcgaaagtttaaaaagtgcagacagttcatcataaaattatgctggagctatatagtatcataaaaataactaaaaaagaacaatatttagataacatgtaatttttgcctatatgttgaacaatttgttttttaaaatcaaataaattattgataaataacttattttggcatcatttagacatagataccatattataataaactatagtgtttcaaatggcattttattagtcttgaaaatgttctctttttcttacaagaactatttatccaggtatggacatatacagatgtgactgtcattttgtgttataacattaaacttttcacagttctcccaaaacaggtcctggatgaatagttcttgttactcatttttagagactgttaa

SEQ ID NO: 516655 - DNA, 676 bp, Homo sapiens
atacatcagaatggaaggttattctctctaaataggtccttattgctaacaaaaataccaaaattaaaatttgatagacactaaaattaatttcttaagcaattaaaacatctcctctatacgatctctctcacatttgctctttatttcatcctttctgtttctcactctcctcatcttcttcctctatttctcttttcctgttttacctttcaattgggcagtagaacttttgagttctagtctctgctaaattgagttacaacactataactttgacaagtcacaatatgtacttgcgattctaaatttctgtcttttaaaataacaacataaaaatcgataatgtatgatcttacttttagacttaaagttctgtcattcaaggacataattaaataccacctggggttatgtaacatgggcaatgataagtttcaaatgaagattcctgaaagtacatttgcttgaaaggcagcattttactttgagctaaaatgttacattaaccacatatcttaggttttctttgttcttgaggatagaggaataatgataccaggtttataaaggttttatttattgtaaggagaaaagtaaaaaataatggaaatccaagaaggggggacttwatagggccaaatcgaatgatgcttagataggatattaatgctaa

SEQ ID NO: 516656 - DNA, 618 bp, Homo sapiens
atctagtttggaaaagcaagaaattgtattttctgttttttcttaaaatgcattttaatcattagggcttttatgaaatttgttaacgttcgtgtttgcattaagcaaaactcacttcttttcacatatatagtttcacaatttcagacaagtgaatacaattgtgtaagtgccatgctagtcaagaaacggaatgtaattattacccccaaaattccttcatacttacccttttataccaccaaaccctggcaacaattgatttgttttttgttccaaaaattttgcctttcccagaatgtcatataaatggactcattcagtagctacatatgattctgattcacccatgttattgcatgttttatgttgctactagaattccattagtttggatatattagtcagcagttagagaatacttggattgcttccagatttggtgatgatgaataaagcttctaaggacataactttgcatttctcctgggcaatatctagagtgggattgctggattacatggcaagtgtatatttaactccataagaaactgtcaaactgttttccaaagtggctgtaccaytttgcattctcaccagcaatgtaggacaattcca

SEQ ID NO: 516657 - DNA, 609 bp, Homo sapiens
aatgcaaaggcactgcctacatccctctcttgtttaaaaaatcacccacaaaccaattcctcaatatgactactactaaaaatgtgtcttatgcttccaaattatttgcctctctatctatttgtctatacaattccatgctgtatattatttcagtatgcaaacaggaatggagcagaaatatattataaatctaatctgtgagtccgttttatttctagttttgctgttgctgtaagataaatcacatagacctaacaagaattatccatgcatttcctcagccattcctactgtactttctatacctttaatttttagcatattaagctgatattaaaagaattttgcaaactatggcattaaatgagtcactaacaaaattcactttataagagtaacrtgaagagagtgtgagaagacaggagaggaaaataaaggagaagggagaagaggggagggtagagagaatggaatatgttaaaaaatggtattagccagagggctcctacagagaaatgagagcttgaaaatgtagacagactaatgctcttcagcatcctacaagcaaagtgtcgggtataaggataagtagtggatgcaactaca

SEQ ID NO: 516658 - DNA, 609 bp, Homo sapiens
aatgcaaaggcactgcctacatccctctcttgtttaaaaaatcacccacaaaccaattcctcaatatgactactactaaaaatgtgtcttatgcttccaaattatttgcctctctatctatttgtctatacaattccatgctgtatattatttcagtatgcaaacaggaatggagcagaaatatattataaatctaatctgtgagtccgttttatttctagttttgctgttgctgtaagataaatcacatagacctaacaagaattatccatgcatttcctcagccattcctactgtactttctatacctttaatttttagcatattaagctgatattaaaagaattttgcaaactatggcattaaatgagtcactaacaaaattcactttataagagtaacatgaagagagtgtgagaagacaggagaggaaaataaaggagaagggagaagaggggagggtagagagaatggaatatgttaaaaawtggtattagccagagggctcctacagagaaatgagagcttgaaaatgtagacagactaatgctcttcagcatcctacaagcaaagtgtcgggtataaggataagtagtggatgcaactaca

SEQ ID NO: 516659 - DNA, 666 bp, Homo sapiens
gaatcagatacactttcaaggatctttgctatcatataattcttcaagattgattcaatatattttaagaagygtaattcaaagatcagaaggcagggacatacatagtattgttgtgaatacaaatcacttctgtaatatttacagatgtggatagatggtggatattgagctttttgctatcttatcatttgtcaatttttcatgagaaaactataaaattcccaatatagtaagctttctgatggttgtattttattatgtgaaaccaagtttaatataatgaggaaagcatttttgatgagttttatttggaaccagcacatttttgtaataacatgaaatcccatttcttttgtagacaaatgtataccatatattgttggtaccaaaatactgttaatttgatttttttaaactgttttcagttactccagatcttatcagaagaaaaattaatgaaaatcaaaccctctaaaaaggctttgtgtggttgagattaaattatatcatactctttccaaagcttgatgtttgtatactaaatgttatcaccacacaattgtggttttatcaccatatctttctgtgcccaatttattagcagcaaaaagaaaggaattttaaaatctacattttgatgcattatattacattttctatagt

SEQ ID NO: 516660 - DNA, 666 bp, Homo sapiens
gaatcagatacactttcaaggatctttgctatcatataattcttcaagattgattcaatatattttaagaagcgtaattcaaagatcagaaggcagggacatacatagtattgttgtgaatacaaatcacttctgtaatatttacagatgtggatagatggtggatattgagctttttgctatcttatcatttgtcaatttttcatgagaaaactataaaattcccaatatagtaagctttctgrtggttgtattttattatgtgaaaccaagtttaatataatgaggaaagcatttttgatgagttttatttggaaccagcacatttttgtaataacatgaaatcccatttcttttgtagacaaatgtataccatatattgttggtaccaaaatactgttaatttgatttttttaaactgttttcagttactccagatcttatcagaagaaaaattaatgaaaatcaaaccctctaaaaaggctttgtgtggttgagattaaattatatcatactctttccaaagcttgatgtttgtatactaaatgttatcaccacacaattgtggttttatcaccatatctttctgtgcccaatttattagcagcaaaaagaaaggaattttaaaatctacattttgatgcattatattacattttctatagt

SEQ ID NO: 516661 - DNA, 588 bp, Homo sapiens
tggggtggtgtggcagggggaggtggtgaggcagttgggggaagggagcagccgggggacctgccatcccagcagacattctggtcagcatcctccatttccatagcaaaaaaccatcactgtgcttgttaagttgtcatttcctgaaggaaagcacctgtcaccctcctcattttccccgctctgggcagttccacagagtgtaatcttgcactgcgattcccagcagctaaggtaactgagttttyagaaaaacaggggagagagttcatcaaagaaccacacatccggagatgggtatcccacacaattagttttgtggaagtggaaagcaatcacaagagaggcatttctgtatgtttggtgaaagtgttgaggaatgcgacatgtgataaagtcttagacatgaaccccagaaagactgtcttacctaacgaaagaatttgctatctttaagtagaaattctaacatccactgtgtttctctttttactttggtttccaggaagctcattataaatgtaatgctcaaataacctcagtagcctaagttatttggcatgatttcccccttcctccatatagttt

SEQ ID NO: 516662 - DNA, 588 bp, Homo sapiens
tggggtggtgtggcagggggaggtggtgaggcagttgggggaagggagcagccgggggacctgccatcccagcagacattctggtcagcatcctccatttccatagcaaaaaaccatcactgtgcttgttaagttgtcatttcctgaaggaaagcacctgtcaccctcctcattttccccgctctgggcagttccacagagtgtaatcttgcactgcgattcccagcagctaaggtaactgagttttcagaaaaacaggggagagagttcatcaaagaaccacacatccggagatgggtatcccacacaaytagttttgtggaagtggaaagcaatcacaagagaggcatttctgtatgtttggtgaaagtgttgaggaatgcgacatgtgataaagtcttagacatgaaccccagaaagactgtcttacctaacgaaagaatttgctatctttaagtagaaattctaacatccactgtgtttctctttttactttggtttccaggaagctcattataaatgtaatgctcaaataacctcagtagcctaagttatttggcatgatttcccccttcctccatatagttt

SEQ ID NO: 516663 - DNA, 590 bp, Homo sapiens
tataaggggaaaacccaagttatcaggatcactgactcaagtttcaccttcatgacctcaagaatttgtctgaaatagaggaaaaaaatgaccaaaatatgcaggatttatgataccataaagaactaaagacacttagttacagccatctagatagttccagaatgcccagatttaacagatgttgacaaagggtatctatcctccccaccccacccaggtgttaggcctaacaccaccacagctatccatcagaaactcaacttcccagtacaaaatactaataggagacactttgattttgcaaagaaaatagtgaatgtaactgggtaaagaaaaaagggaaaattaacaacaaacaatagaagcgaattcatggtctggtatccacgataagaactgcgtgccactcattacaatgaaaagaacactgtgaacatttgttagatctttttttccttttaagttattttgagaatgcacttatgtaggcagaatattacagagaacaaaaaatrtatgttacaatgtaagattattttaatgattctgaaagaagggaaaacaatcaaaataaattatgaggaaaa

SEQ ID NO: 516664 - DNA, 595 bp, Homo sapiens
caagccattcatgagagctctgcccccatgacccaaacacctcccactaagccccaccttctgacaccaccacattggggatcaaatttcaacattcattttggtgagggcagacaaaccgtgctcaaaccatagcagaatgcttttggctgcatgtaacagaatgcccccaaagtagctttagctaagatgagaggcgcttacttaaaataggagcccaggggattgcatggaacccagcataaggagtgcaaccacaggtcccgggataagaagctggaagcagtsaggaacataagctactctgggtctcttttctactttctatatctacataatatcccccagtctattctagcatgagggagactaggctgagaaaaatcactttgtccaataccagactcttgggaaatgggagactctggcccagcctggtattcagtggaacagctcttcctgagtcatatgtctgaccctagtgactcatctgtccagagagtgggagaaggcccatcctccacaaatatgcgtacaggagcccctgttggggcagggccagttttcagaaagggggatgtagatggaggagcta

SEQ ID NO: 516665 - DNA, 626 bp, Homo sapiens
tttgccatcttcattgaagtcagatgtagcttagacttaatatgagagacatgaagaagagatttttgtctatagatttctaatgggaattttagtcagaggaccatgcaaccatagaattttatttcttgtaagatgtagagacatacgagataatttatgacccattcaacttaaaggtaggaggaaagatcagttggtattttaagggttcctcttttccgataccacattgtcctgacttctttgagcctcagttttccatctctgagctcctttgatttgaagttataaaataccacagagttcaaggcttacacttttagctctttgggacaatgtctaggagagcatgaggaatgaccaagagtaagctgagatcctgaagttttagagtagtctcttttgtctcaraatttaaccctttcaagtgcttttagtggaggattgtgcatgaaagagacacctgcttcttattacctagaccttgtctctatctattagatacatttctatctcaccgagttacactcccaaatactaaatttgccccagttctccctgtgccattgtttcatggccagttgtgaaattttgttctccatactgctaagaaaataaatgta

SEQ ID NO: 516666 - DNA, 509 bp, Homo sapiens
ctgacttttgactttacatkgattgaaatgttcactcaacatggactggtaagattttcttttttccttaaacattacattgccttgtaaacaaacaaaagcaaaccaaaaactcaaaactaacattagtattggtgcccctggaaatagctgccttctcactaaagtgattttgtcatccaactttgtgtgttgttgaacacacatggtgctgtatgagcacacactcactagtctagaaaacattgctgtgaccagttacagaaaaataaattcagattgctctttacattccacagatgacccttctgaaagctatttgaattcattataaattatagttatattagtatgactttaattcttttgtaatctgaactttatgtgcaatgcatttttttctcatgttgaatcatttttgaatgctaaatcatttgcaaacaaatggcttgtcgttgagaaagaatttaagactgaaagtacattaagtgccatctgggaatctgtgt

SEQ ID NO: 516667 - DNA, 465 bp, Homo sapiens
acttttgactttacattgattgaaatgttcactcaacatggactggtargattttcttttttccttaaacattacattgccttgtaaacaaacaaaagcaaaccaaaaactcaaaactaacattagtattggtgcccctggaaatagctgccttctcactaaagtgattttgtcatccaactttgtgtgttgttgaacacacatggtgctgtatgagcacacactcactagtctagaaaacattgctgtgaccagttacagaaaaataaattcagattgctctttacattccacagatgacccttctgaaagctatttgaattcattataaattatagttatattagtatgactttaattcttttgtaatctgaactttatgtgcaatgcatttttttctcatgttgaatcatttttgaatgctaaatcatttgcaaacaaatggcttgtcgttgagaaagaatt

SEQ ID NO: 516668 - DNA, 465 bp, Homo sapiens
acttttgactttacattgattgaaatgttcactcaacatggactggtaagattttcttttttccttaaacattacattgccttgtaaacaaacaaaagcaaaccaaaaactcaaaactaacattagtattggtgcccctggaaatagctgccttctcactaaagtgattttgtcatccaactttgtgtgttgttgaacacacatggtgctgtatgagcacwcactcactagtctagaaaacattgctgtgaccagttacagaaaaataaattcagattgctctttacattccacagatgacccttctgaaagctatttgaattcattataaattatagttatattagtatgactttaattcttttgtaatctgaactttatgtgcaatgcatttttttctcatgttgaatcatttttgaatgctaaatcatttgcaaacaaatggcttgtcgttgagaaagaatt

SEQ ID NO: 516669 - DNA, 465 bp, Homo sapiens
acttttgactttacattgattgaaatgttcactcaacatggactggtaagattttcttttttccttaaacattacattgccttgtaaacaaacaaaagcaaaccaaaaactcaaaactaacattagtattggtgcccctggaaatagctgccttctcactaaagtgattttgtcatccaactttgtgtgttgttgaacacacatggtgctgtatgagcacacactcactagtctagaaaacattgctgtgaccagttacagaaaaataaattcagattgctctttacattccacagatgacccttctgaaagctatttgaattcattataaattatagttatattagtatgactttaattcttttgtaatctgaactttatgtgcaatgcatttttttctcatgttgaatcatttttgwatgctaaatcatttgcaaacaaatggcttgtcgttgagaaagaatt

SEQ ID NO: 516670 - DNA, 509 bp, Homo sapiens
ctgacttttgactttacattgattgaaatgttcactcaacatggactggtaagattttcttttttccttaaacattacattgccttgtaaacaaacaaaagcaaaccaaaaactcaaaactaacattagtattggtgcccctggaaatagctgccttctcactaaagtgattttgtcatccaactttgtgtgttgttgaacacacatggtgctgtatgagcacacactcactagtctagaaaacattgctgtgaccagttacagaaaaataaattcagattgctctttacattccacagatgacccttctgaaagctatttgaattcattataaattatagttatattagtatgactttaattcttttgtaatctgaactttatgtgcaatgcatttttttctcatgttgaatcatttttgaatgctaaatcatttgcaaacaaatggcttgtcsttgagaaagaatttaagactgaaagtacattaagtgccatctgggaatctgtgt

SEQ ID NO: 516671 - DNA, 369 bp, Homo sapiens
aatattttgttacttttccacaggaagctctgcattattctatattttctattattttaaaacacttataaaccatgtctattactacacattacattacasttactttttctttccatatcagaaattggaagaaatcattattatgctttaaaatgtagaatgtagatatttctttgttataattattatgccgaagtcttagtccattggggctgatgtaacaaaataacttagactgtgtaacttataaaaatttctcacagttctggagtttgggaaacttaaatcaaggcactggcaagaactggtgtcaagtgggggccttattcttcagagatggtgcattctatgtgttctcacatggag

SEQ ID NO: 516672 - DNA, 369 bp, Homo sapiens
aatattttgttacttttccacaggaagctctgcattattctatattttctattattttaaaacacttataaaccatgtctattactacacattacattacacttactttttctttccatatcagaaattggaagaaatcattattatgctttaaaatgtagaatgtagatatttctttgttataattattatgccgaagtcttagtccattggggctgatgtaacaaaataacttagactgtgtaacttataaaaatttctcacagttctggagtttgggaaacttaaatcaaggcactggcaagaaytggtgtcaagtgggggccttattcttcagagatggtgcattctatgtgttctcacatggag

SEQ ID NO: 516673 - DNA, 656 bp, Homo sapiens
cccatctgttttttggtggaatatcacctggaattattccttacatagtttttctgattattttatgagtagctctgtgtatgtcagtcattctcaagaaatatctggcaagtttattatactttcaggaaatgttttgaataataaatgtgtcttactttttgagtgggcttggatagcatttattcttagtctctgttattacataaaatatatgggaataaatgtatacaattttcctatgtggatatttggtaaaaatataatgatagtatttttccatgggtggatgaattttaaagaaataatttcttagcttgcatgaagtattttttttttatttctgcatttcccttctattttctccctaggatgtcagaagagataactaaaacttttatgataaccatgtggtcagatccataacttacactgaagtctgttcttgttcaacagaagctaatattaaattcaatgttctcaaatatttaytcacagtaatatgctccatttggtctattctgtgattttttggctcccacttaataatagttatatgccctttagcaaatataacagcaggaagaccataatgttcaaaacaacagacttgttaaatgtgtagcatattttttctttcttatttgcctttacca

SEQ ID NO: 516674 - DNA, 623 bp, Homo sapiens
gtgctgggcaatgctgggacgcagctctgggccccatccctctgaggttgaagtccagtgggggagtcagagagacccatccccaaacggtgatggcctagaatgcgcaggactggaactagcggggagcccagagtccccaatccagcccaagaaggggcctgggaggatttggcagaggcgttgaactcatggtcaccaccctcacagacttagctttacgggtgtaaacagccaatgaacaagttaaccaatcaaggaaagaattgcagatcgaagtaaaacgggggtggggcaggcagcaacacaggctactttagctggggtcagcagggaaggcctctgaggaggggacaccgagtctgagacctgaggttgagaaggcgccagcctgggatgagctggggagagggyacacagggggcagacagccagcgcccaggccccgcagtgagaaagagctggctgtgttccaggaacggcaaggagtcctgcgtgccttggccaagtgaggggcgggtgggagggaatgaaatctgtggaggcagaaaccgcgccccatgacgggggaatagatagatctcaggtcatctggcagggctgggagcccgcaggccctgggg

SEQ ID NO: 516675 - DNA, 396 bp, Homo sapiens
ctgcgggcgaggtgcagcagcgcgcggccggtggcgccgtggtcgcgggccaggatcagcagccacagggcctggccgtccaccagggctcgccagccccggcacacttggcggcagcgcccgagcagcgtgcgcggggggacgtggctcagcaccaccagaagcagctctgggggtagttggctcaggtccagcgcctcttcgggttccggctccggcgcggggacccgggcggcccggcccctggagaccgaggcgcccatggtccccccgccaggcccggctgyggctgcgggagaggaagggtcaaggcgtcagggaccagcagcctccgcggcgcgcagcctctgcctgccctgattctgccagccgcacccccgtcttcaccatccctgg

SEQ ID NO: 516676 - DNA, 452 bp, Homo sapiens
aagttttaaaaagagctaagccgccacttgttaactaggggtcacaagcactgtgagtttcctgaaaaccaacacctttttaactttgggggctcacctgagctagtcaatcagagctcagctgtatcaaccaatcagaactgagtttcaagtttcagatcttcatttgcataaaagcacttgactaggaacccrgatgggaacttttgctataaaacctaagctttccctgttctctggaacaaataatgtttaggttgcaaactccttatgccttttccccagaactatgtagaaataacgccttctaaaatgtgatcttgataccaggaactcctttttttttttttttttttttttttttttgagtcggagtcttgctctgttgcccaggctggagtgcagtggcgtgatctcagctcactgcaagctccgcctcccaagtggctgag

SEQ ID NO: 516677 - DNA, 574 bp, Homo sapiens
ctcgccggtgcgcaccggcgctcggggagccgctggcccgggtgtccagccggcccttgccctgcctggcgctcggaccgccacctttgccgccccctcgccagcctccgcagcttccagactggccggtctgcgcgcccacccctgcctcccggaccggccaccgccggaggccgcggaggagggcccggccgcgcagatcccgcttatcgggcccatctcccgtacataaggccaccccccatctccgcgggccatcgccagccgcaaccgccgcgccagcgccttctcccacgcgcgggggcgccccatgcccaccgctcccggcagggcttttggtgccatgggggataaggggcgttgactcacccgggcggggctccgggagttgcacagaccaaggtagttccccgctccttcccccatcacggagaccctgtgggagatgccgtgggccctctactacagattaggaaacaggcccgtagmggggtcacacggccaagtagcggcactccaggcactgggggccctcgaggggaaggggcagacttctgggagtcagagccagcag

SEQ ID NO: 516678 - DNA, 440 bp, Homo sapiens
agccggcgctcgtccaggtcgccttccaggttgcgcggcttgcgggactgtggagccggccgcggagcttgctctggggcggcggcggggaccgsgtctgcggttttcccggctggcgccgtaccgcgccggggccgcacggggactgctgcggacgccgcgtggagggaggccgctccgggctggcgggtcccagggcacctgctccggttgcttcggggcagaggggcctcccccggagacggcgggagaggaacgcccagggctgtttcctccagaccggcgccgggacgcccgcctgggctctggacggcgctgacctctgagctcgacggctgcggcgggagctgagcgcccgaggccatgtcgtgagcgggatcctgagtctgagttgccgcttaacccggcattttataacccagctcccggaacactgcagc

SEQ ID NO: 516679 - DNA, 513 bp, Homo sapiens
tgctggctctgactcccagaagtctgccccttcccctcgagggcccccagtgcctggagtgccgctacttggccgtgtgacccckctacgggcctgtttcctaatctgtagtagagggcccacggcatctcccacagggtctccgtgatgggggaaggagcggggaactaccttggtctgtgcaactcccggagccccgcccgggtgagtcaacgccccttatcccccatggccaccaaaagccctgccgggagcggtgggcaggggcgcccccgcgcgtgggagaaggcgctggcgcggcggttgcggcggcgatggcccgcggagataggggggtggccttatgtaacgggagatgggcccgataagcgggatctgcgcggccgggccctcctccgcggcctccggcggtggccggtccgggaggcaggggtgggcgcgcagaccggccagtctggaagctgcggaggctggcgagggggcggcaaaggtggcggtccgagcgccaggcag

SEQ ID NO: 516680 - DNA, 501 bp, Homo sapiens
gaactcctggcctcaagcgatgctgctgcgttggctgcccgaagtgttgagtgcccagcctatgctgatattttaatcaatttttttttcttcttgtttacggcattattagccatagggttttctggaagggcgggggaagaaaagggtagaattcagagaatgaaccttaattttatattttagtatagatggcracatttggaaatgatttttccacaaaattgcacacaaaagttgtccacaaaaattccattcaacaagtagtttccctgaagagtagcttccctggtaacagctctaaccatttcatgttacgttgctccctcaggaaaacgttttctgcattttaactgcaatcaccagggccttagctccccttggaatatgagggttccctcttgcagcagccaaggttctgtgcagtggggtggagtgggctgtgggcgggggcagagggagaggggaagatcaggctcaggtggcccagaactctctgca

SEQ ID NO: 516681 - DNA, 646 bp, Homo sapiens
tgcctggtgctttttgtatccacaggtgagaatctgagtttagattcccttggtgagcaaaggtagggttattggtgaggccagcaactgcctgctctggagcttcctcacagccagggatagagactgcagcacacaggcctggtccctcctgagccacttctgcccctcctcagatgacccagacatagcctgaagggaagggaggagatacaggtgtccctccaagttacagcttttccctgaaccaatcccacatcctggtccacagtcacacagcatgaaggcagtgtgagcatggagaaagagccactggaagctaaagatgcggctaggacctgactcctcccttgtaaaaagcaggtggaacacctgctgcagaaggaaggcagagggataccaagactaggaaggctgatgaggtcctgccctgctcagayaccctcagctgaatcctaaagcagcatgaaatgcagccagaaatcctttttaaagatgatttcctctttcaacatgtcagcataaggggaagggggagtctgatccttcctcagcttgggcacagttccttcttctgccaaaaaccatttggcagcaggccaacctgtccccaggagaaaggcgtgcttatgattcagttctcaaa

SEQ ID NO: 516682 - DNA, 534 bp, Homo sapiens
cttcagaatctgtttccagtatgcacctttcttacccttcaaggtggctcactggattgtatttaagccatcagcatgtgtctacagattgaggtgcwggtaagaaatctacccttgcggctctaagggtgtttttctaagggtggctgtggtcatgccagccacagcaaagggattgcacaagttgaccaggcactcccttgggccctccaagtggccctaagggacagacctatgtccacaactaaatactcccagagctattccagtcatcctacccacatcactacccatcaggaagacatagttggcctctctttaaataaacgacgtatttatattggatcccagacattttgagacataatgaaaaaaaaatgattttcccatgtgtatatttttgacctcccaacaaagtccatatttccagttttactggagttaaatctttcagatgagacagaggagaccaaaagtctgggctctgtcatttattagttattttgctctgaagtcacttcacctctttagagc

SEQ ID NO: 516683 - DNA, 599 bp, Homo sapiens
tccatcaccctggcagggggaaagaacaagtcaytggtgagtggggtaagaagaaagcagaggccacagtgaccacaggaccaccgggaggcattgaagatggaggggagatttgctgttagatcaagcgtagaatatttattattaccagtgtaagcattctgtcttctgattcaagattatttgacttcaagggggtcaacgctgacactttcctgggaaaaagcataaaagtcatgggcttgcctgatttttcatctgggtcaagggaatgttgccagaacaaccccaggacagagttcaaaggcaccatgggaagtaaaaataaagtcttaaatacattacaagttgttcttgttcaacatgttgatctcactaacatgtatctggcacctacttttggccaggcagtatgctaggagagtcactttgctatcttatttaaagttaaagccgtcatttaatagggataaatcttacttttacagacaagaaaagtgagactcagagagggtaagagatcagttgaactgaaatgtgttgcatccagttccgttcaactccactaccaataacctttgtctttataccaggccctg

SEQ ID NO: 516684 - DNA, 609 bp, Homo sapiens
ttttttccattttctttgcttaaacactcctcataaaaatggtatttcttggcaagaaaagccatttttcctttatgtcagagtcactgttaagttcacatttgtatttgcaagttctgtttccaactttccactctagctctatcccccacagcaagaagaaaatcacggcatttgcatattgtgtttatgaagtagagtagctgtcttagagagaagcactaaggggttagaaatcatgaacatacacacttgttgtcgcagaatcctgatccaacatatttgtactctacttttatatatttctctgctttcaattaagatgccctattaaatagcattcaaacatgtgaaagcaaagacagagcctgacagaatttcaacaggttctgtgcattcatactgtatgtcacctcttaattagcaaccaaaatgcaatgaacagattgtacagtttaccatcgtagcccagctcctacacttgctatttgtgcgtatacagcrtatttaaagagaccccatccagtgggattctcatactcgctccatccctggaacagaaccaccatcaactaaatgccacttcatggatgccttagcctgcggcag

SEQ ID NO: 516685 - DNA, 549 bp, Homo sapiens
acagttggccctcttgggagcagcccccatatagtctcatcactgccaatctgagtagctgggtgaaatcctagcatagcctggctgaggatatgccaagccttttaaaaaggtaagataccaaccccaaagagcctaagaattagctaggatgtattagcaggagccaaagaagtactccttagggttggattctaakggttcttgataaaaaagattcaaatgaaagactagataagcaacattcaatagtttagagccccttgggatttgggattcagctccctagggaaagaccctagggtacgggtggcttgtaaaatcctgaagaagaggtggctattgctgaacaaactcctgcctgtgtttctcctgatagatagcaggggaaagattaacaggctaaggaaagtgattaggctggaatgggtacattttgtgaggtcagaatacctaacagaagattattctgtggagaggcttagagaacacaccattcaccatggtcaacatgaatgtatttttgagagtgtattctgtgatcataat

SEQ ID NO: 516686 - DNA, 379 bp, Homo sapiens
ctagggcacacctgaccttaggctctgctgggttgcttatcctgaagcagtgtgagtccctcccaaggtgaagaaatataattagaagaaaaagagatcattcagtgaggagcctaaggtaggacacaaggggttactttctaagggaaaaaatagattgcaaaaaaaaaaaaatkgactgattctgaaaagaaaaaaagagttagcgttctgcagtaaaagaaagcagcatgtcaaaaattagtgaagtaaatgacttttactggttttcaacactacttgtgagtcttatcaggcctgtcttattactctcccccagaggagaaagaaaaacaagaagatagtagccaaagacccagagaattcctaggctaaactg

SEQ ID NO: 516687 - DNA, 379 bp, Homo sapiens
ctagggcacacctgaccttaggctctgctgggttgcttatcctgaagcagtgtgagtccctcccaaggtgaagaaatataattagaagaaaaagagatcattcagtgaggagcctaaggtaggacacaaggggttactttctaagggaaaaaatagattgcaaaaaaaaaaaaatggactgattctgaaaagaaaaaaagagttagcgttctgcagtaaaagaaagcagcatgtcaaaaattagtgaagtaaatgacttttactkgttttcaacactacttgtgagtcttatcaggcctgtcttattactctcccccagaggagaaagaaaaacaagaagatagtagccaaagacccagagaattcctaggctaaactg

SEQ ID NO: 516688 - DNA, 683 bp, Homo sapiens
aggaatgtcagctgcaggaaagtattgcattgattcagggtatgctcccagggacaatgagactctggccatatttacaattcttcaccctcccacccacctacctaccccaaagcaaggcttttaagacctattggcgtaactctcccacactcaggatgttcccgggttgtaatgttgccagccttcagaagctgcctctctcaggccacttgcaaactcttgaatttaggtcactcgtaagcaagacttatgaaagagtacataataccatgattcagcttcctaatgtgcctcatgtacttttaaggcatagatcagacaccaagaaattctaactttatgtacctttgaatttaccaatatttggtgcagcctttctttaacatttgtattttttaaaaatacttgtccttacttttagtcaggtaattataatattatgtaataatcttatgtaacagctaacyactatctacaagaggttaaatacagattagatatgtaatatttcaggaatgactaaccacctataagtggttgtgtgtgtgtttgtgtgtgtgtatgtatttgattctctaattgctaaccacgtagtcctctaagctgatgcttgctctttgttgcagatatttttaggatgctccgtagaaagactgggcaatgacattacttacattcat

SEQ ID NO: 516689 - DNA, 683 bp, Homo sapiens
aggaatgtcagctgcaggaaagtattgcattgattcagggtatgctcccagggacaatgagactctggccatatttacaattcttcaccctcccacccacctacctaccccaaagcaaggcttttaagacctattggcgtaactctcccacactcaggatgttcccgggttgtaatgttgccagccttcagaagctgcctctctcaggccacttgcaaactcttgaatttaggtcactcgtaagcaagacttatgaaagagtacataataccatgattcagcttcctaatgtgcctcatgtacttttaaggcatagatcagacaccaagaaattctaactttatgtacctttgaatttaccaatatttggtgcagcctttctttaacatttgtattttttaaaaatacttgtccttacttttagtcaggtaattataatattatgtaataatcttatgtaacagctaactrctatctacaagaggttaaatacagattagatatgtaatatttcaggaatgactaaccacctataagtggttgtgtgtgtgtttgtgtgtgtgtatgtatttgattctctaattgctaaccacgtagtcctctaagctgatgcttgctctttgttgcagatatttttaggatgctccgtagaaagactgggcaatgacattacttacattcat

SEQ ID NO: 516690 - DNA, 544 bp, Homo sapiens
tcagctgagtgacagtcattgaatgtgtcccagcctttttagtgacaagagcatatacctacacttttgttgttagattaggtagtaatcagtgggtggtaatttagggccccacatatatgggtgcataaggaagtatggcataatgttagttattattgaactctgaatgttaatcatattcattcattagctaaatttcaagctttcaagggrcttagtttagtgctgttgctgaacttgaaagaagttatagctctaaaacatgcatagatttattaaggtgacatgttagactcacagacatataggtgacttaatatgtaaagaatactttaaaaaataaattccaggacaccatttcttcatattattttctactttggctctgaatactaccatagtggcatttggctgtaaaatgatttgtccctctaaaccatgttatcagttattgtaattaagaataagcatctttctttaaaaaaaaaaaagtggagacttcacagtctgtagaacacttctaaaataataccctcaaaaa

SEQ ID NO: 516691 - DNA, 540 bp, Homo sapiens
ctgagtgacagtcattgaatgtgtcccagcctttttagtgacaagagcatatacctacacttttgttgttagattaggtagtaatcagtgggtggtaatttagggccccacatatatgggtgcataaggaagtatggcataatgttagttattattgaactctgaatgttaatcatattcattcattagctaaatttcaagctttcaaggggcttagtttagtgctgttgctgaacttgaaagaagttatagctctaaaacatgcatagatttattaaggtgacatgttagactcacagacatataggtgacttaatatgtaaagaatactttaaaaaataaattccaggacaccatttcttcatattattttctactttggctctgaatactacmatagtggcatttggctgtaaaatgatttgtccctctaaaccatgttatcagttattgtaattaagaataagcatctttctttaaaaaaaaaaaagtggagacttcacagtctgtagaacacttctaaaataataccctcaaaaa

SEQ ID NO: 516692 - DNA, 628 bp, Homo sapiens
ccaagtatcaaaaacaggagttgtgttcaatatgtaaaatgttaagtaatattcgccatttgtagtttcctaaaaacgtgtttacttgaaattgcagcctaaaaagtaaatttcactttcttgtgactccacaacatkgtttatccaactttaaacataaaaatatataaggcgtgtattcattttatgcatatcccattttttaaagttttaaactttattcatgtagaaaccattaacactcatggggacacttatggggaactggaagatatgacacatgaatgtccacgtcagtctgtgttgagcagaacactttggtgtttgaggaatctattttatagaaaatcttaagctgtggagtcaaggtcacaaccaaatattcaaaaccctcaggtgttctttccttattgtggacattctgtaggttgcagccacgtaccaggaactgtgttagacataccccgtgcagcttgtctaatcctcacaactaatgaaaaagagttaaagtagctcccccttatctgaagttgcactttatgtggtttcatttacctgtggtgaattgtgaccccgaaatactaaatggaaaattccagaaaaaaataattcacaaatcttaaattgt

SEQ ID NO: 516693 - DNA, 529 bp, Homo sapiens
tgtcaaagactcgaaatcatgtatggaatcataagctatgaagtgacaaaaactagcgaagagagagcaagcatttcagtcattaccacagggagatttttatcaaccattcgtctgagcaaatgtatgtccagcagtccagtctgaggtcacggctgccccagaattgagcggtggggatatttgggatgctttcattagaaggcacagagtacagttaagaaacaggcttggggcgccagcatgtgattatggtaagactggctgaccactgggaaatgctgagccaacaggccraggagtcaggctgacctccctgaagccaagtccacagagagccaccacccaacacaccttctgaggggtaatctaaagcactcaatgctcaaaatactcatctgagcaacagatgttttgtaagacaaaagtatgtacattttcagatgctctgtttatgaatcttctgctattctatttttaaaggtgctttatcaaaaaaaaatttcttatatttacttcagaatgatcc

SEQ ID NO: 516694 - DNA, 592 bp, Homo sapiens
tgaatattagtaaaataaaaagataaaaataagtatagaaactcaaacccagtaaggaaacttgatgatgtatcctttttccaaagggacaaatgtataaaaacagctttaatgatctgatattttatcattggttttatattttttaaaagtcactggatttttaatacagcattcttttgagaagtatcaagacaaagaaatttaagttcttgaattaagcaataaatatatgactttttataattttaaaactttctataaacaagttcctacagcttgctggctttttcttttccttttaattcctttttcttcagaaggaagtatgctaaaaatctttcttggtaaaaaagaaaatttctttcctctggccttaaataactctgacatttaatacaactcttttttaagttttataatgtattttccttcaaaaagaaaagtgcactaggcttgtgaactaaycttatatctaaaattaacctgtgaatcaaccagccaaatatacaattgtgatctatatacataatagacaattttcttcaagaagttaactaacccataatgaaatcaaacacgaagacactca

SEQ ID NO: 516695 - DNA, 619 bp, Homo sapiens
gctttttgaatttaatggctaggattggggtggcccacttctttttccttgacctcctattttggaacatatgcaatgtcagtgctaatgcaagtttcatctagagagctagattatttatgatttttttttaaggaggaattttaagtctttttttcttgtattaaacaaatacagtgtgtgatgtgtttattaggccctttaacgcatacagaaattagctaatttatgcctagtgttccattattggaacgctaagcatgtgggagttatttatgtgctactgctcaagatcatcgccaaggtctgcttgcataaattcaaaaaattgcaacctctggcataaatgggttaataggacctaatctcttctgagatggggagagcaaagatattttgataatcagcgttttatgacctggtgttataagtgccttgaatagaggtatccacgtatcttggaattccttgaaatttggggcttaggcttactgatagtttgctttctgcaaacttgcactcaggcactcagtaaacacccacttgtaagcmaggcactaagttatctatgtctctggggggacctgggaagttaccagcatggtaggaatttgcggga

SEQ ID NO: 516696 - DNA, 573 bp, Homo sapiens
ctgattctgaataatgcctgcttgtgcactgggaggatcgggtggagccttgggaagttcacaccatttgcaggggggaagagtctggcctcttcagtgcctgtgtggtaacccgggattcagtctgtgasgggggaggtgttggcaagagcccctctcactttgctgagagttttctttctttttcctttttgcccaataaattccattttcctcacccttctatgtgtccacaagcctaatcttcttagtagtgtgacaagaacccagttttagctgaactaaggataaagttctggaacccaggatgggatgaaaagataggcctcctttccatcttacattttaccaagaagcaaacagttgtcctaaaacttcattgacttttcctttcatttaatcagccagaattggtcatgtgcctaaccctaaaccaaatactagaaggggtaaaccagatgatgtgcttgatgtgattagtgatcttcaggccagcagcaacagcgtcacttgggaacttgttagaaatgcaaattcttgggcacgcagggtggcttacacatgtaatcccag

SEQ ID NO: 516697 - DNA, 655 bp, Homo sapiens
gctgcactccccaagcagtgggtctaaggtgcttattttctgggaccagaggtgaaaactgatgtatgaattctgacctggcatcatttaaaaagagattttgcctggcactgtggggtgtgactatagtccyggctacttgggaggctgaggcgggaggattacttgagcccaggagttggaggctgcagcgagctatgatcacacctatgaatagccactgcactccaacttaggcaacatagcaagaccctgtctttaaaaaagagaaaaagagatcttgcccaagaggactgcctgagagtacgatgggacacaacagagagacagtccgtgtggagacggcaccccatgctaaggttgccaagggtgatgaatgacaaaccaaagcagaggccattccccaactccaagtgaagaggagcagtcagacagcttcctggccagcccatcggagtaaccaggagagaagcatcagctcaaatcatttaacatgttcagagaaactccaagcctggagggtcagaagtcccagaaagtgcgggctgtggaggagaggctcccagaggaaaaagagaagcagacaatcaccctctccttgactgcatgcttctgccttgagcaggccacgctgaggcaagttgacataaagtca

SEQ ID NO: 516698 - DNA, 655 bp, Homo sapiens
gctgcactccccaagcagtgggtctaaggtgcttattttctgggaccagaggtgaaaactgatgtatgaattctgacctggcatcatttaaaaagagattttgcctggcactgtggggtgtgactatagtcctrgctacttgggaggctgaggcgggaggattacttgagcccaggagttggaggctgcagcgagctatgatcacacctatgaatagccactgcactccaacttaggcaacatagcaagaccctgtctttaaaaaagagaaaaagagatcttgcccaagaggactgcctgagagtacgatgggacacaacagagagacagtccgtgtggagacggcaccccatgctaaggttgccaagggtgatgaatgacaaaccaaagcagaggccattccccaactccaagtgaagaggagcagtcagacagcttcctggccagcccatcggagtaaccaggagagaagcatcagctcaaatcatttaacatgttcagagaaactccaagcctggagggtcagaagtcccagaaagtgcgggctgtggaggagaggctcccagaggaaaaagagaagcagacaatcaccctctccttgactgcatgcttctgccttgagcaggccacgctgaggcaagttgacataaagtca

SEQ ID NO: 516699 - DNA, 655 bp, Homo sapiens
gctgcactccccaagcagtgggtctaaggtgcttattttctgggaccagaggtgaaaactgatgtatgaattctgacctggcatcatttaaaaagagattttgcctggcactgtggggtgtgactatagtcctggctacttgggaggctgaggcgggaggattacttgagcccaggagttggaggctgcagcgagctatgatcacrcctatgaatagccactgcactccaacttaggcaacatagcaagaccctgtctttaaaaaagagaaaaagagatcttgcccaagaggactgcctgagagtacgatgggacacaacagagagacagtccgtgtggagacggcaccccatgctaaggttgccaagggtgatgaatgacaaaccaaagcagaggccattccccaactccaagtgaagaggagcagtcagacagcttcctggccagcccatcggagtaaccaggagagaagcatcagctcaaatcatttaacatgttcagagaaactccaagcctggagggtcagaagtcccagaaagtgcgggctgtggaggagaggctcccagaggaaaaagagaagcagacaatcaccctctccttgactgcatgcttctgccttgagcaggccacgctgaggcaagttgacataaagtca

SEQ ID NO: 516700 - DNA, 655 bp, Homo sapiens
gctgcactccccaagcagtgggtctaaggtgcttattttctgggaccagaggtgaaaactgatgtatgaattctgacctggcatcatttaaaaagagattttgcctggcactgtggggtgtgactatagtcctggctacttgggaggctgaggcgggaggattacttgagcccaggagttggaggctgcagcgagctatgatcacacctatgaatagccactgcactccaacttaggcaacatagcaagaccctgtctttaaaaaagagaaaaagagatcttgcccaagaggactgcctgagagtacgatgggacacaacagagagacagtccgtgtggagacggcaccccatgctaaggttgccaagggtgatgaatgacaaaccaaagcagaggccatyccccaactccaagtgaagaggagcagtcagacagcttcctggccagcccatcggagtaaccaggagagaagcatcagctcaaatcatttaacatgttcagagaaactccaagcctggagggtcagaagtcccagaaagtgcgggctgtggaggagaggctcccagaggaaaaagagaagcagacaatcaccctctccttgactgcatgcttctgccttgagcaggccacgctgaggcaagttgacataaagtca

SEQ ID NO: 516701 - DNA, 702 bp, Homo sapiens
gccagctgaccggcccctgcaccmggcatcaggctcttttgagaaaagaatcccagatggcccaagtggaaattcacatgagctccatggcataagcctacactctgggactctacttaagataagtggctggtaaatgatacgtttacctttccattctctagagaagatagttctgtatcaagcgagtcctggaatagtcattatccattcatccaacaaatattcaaatacggagctaagcaccagagacacaaaagtgaaggaggcaaagtccttgccctcatgaagtttatgttcctgggaggagagtaaggaaacagaaaataaggagatagacatataaagacatcattttcagtagtgataagggttattttaaaatgtaaggtagccagatgcggtggctcacacctgtaatcccagcactttgggaggcctaggagggaggatcacgaggtcaggaggttgagaccatcctggccaacatggtgaaaccctgtctctactaaaaacacaaaacatcagccaggcatagtggcgggcccctgtagtcccagctactcgggagactgaggcaggagaatcacttgaaactggaaggcggaggttgcagtgaccccagattgtccactccagcctggacaaaagagcaaaactccacctcaaaagataaataaataaataacgtaaaccatggaa

SEQ ID NO: 516702 - DNA, 702 bp, Homo sapiens
gccagctgaccggcccctgcaccaggcatcaggctcttttgagaaaagaatcccagatggcccaagtggaaattcacatgagctccatggcataagcctacactctgggactctacttaagataagtggctggtaaatgatacgtttacctttccattctctagagaagatagttctgtatcaagcgagtcctggaatagtcattatccattcatccaacaaatattcaaatacggagctaagcaccagagacacaaaagtgaaggaggcaaagtccttgccctcatgaagtttatgttcctgggaggagagtaaggaaacagaamataaggagatagacatataaagacatcattttcagtagtgataagggttattttaaaatgtaaggtagccagatgcggtggctcacacctgtaatcccagcactttgggaggcctaggagggaggatcacgaggtcaggaggttgagaccatcctggccaacatggtgaaaccctgtctctactaaaaacacaaaacatcagccaggcatagtggcgggcccctgtagtcccagctactcgggagactgaggcaggagaatcacttgaaactggaaggcggaggttgcagtgaccccagattgtccactccagcctggacaaaagagcaaaactccacctcaaaagataaataaataaataacgtaaaccatggaa

SEQ ID NO: 516703 - DNA, 492 bp, Homo sapiens
taaactctttgcttgataggggtctatgattacttgttacctgcctgccacagtgctgctcatcccagcaagggaaaagtaggtagagcccaaaatctaccttcaaggggcttttcatcttacagggggagacgaagatcacaatgactaacttgaaaagggggtgtaatgcaatgaaataaatagaaagacaagcctggtgatgtgcaaacttggagtaaaagataagttttacttggggctttgggaagacttgaatctggcttagggcctgataggaatttgtgtgggaaaagggcaggcagacagagaaaggtgaataaagcttaggtgtggaatgtgttgggggwtgggaagaaaaaatatggacaagggattaaaagtggcaggtgagattagtcggggagagaaaaggactataaaacacaggaaggaatgcagttactacatcaaaactaagcgtttgatttgtaaaagacattatggacaatc

SEQ ID NO: 516704 - DNA, 573 bp, Homo sapiens
attctacaacttggaaaatctgggtcgaggcaatgtgggagttctctgtgctattctaccactttcctgtagccctgaaactatttcaaaatgtaaataatttaagaggcaaaataattcattctgttctactgaaaatcctttcagttcatccrgttcaaattactgtctccttgagtttacagctcagttgcaaacatgttcttaggctaaaattccatctaagacctcagtttgagaggctgtttaacttcctatcaaattatttgagatactggtaccaatgtaaatcaaataaaactataccacaggtaaacataagttcctgtgtcaagatgccccatttttatagaatgcactggtaacaattaggagattctgtatttaacgaaaactgccgagagcaacaagcagactgaaagagccagcttggctggaggatgacactggctgggtcaaggtgattctgatttaagttatgcacaaagactgtattcccagggtctgccaatcaccttgtaaatgaaggctattcaagcccatcttggtttggcaagggcaagggcatgcaga

SEQ ID NO: 516705 - DNA, 536 bp, Homo sapiens
gtcagctgttcctttaatacacacaaactcaactcccttgaccagagccccaacatctgatcatgggttccaagcctaggtttcccctcctaaaaaggggaaggaagccacagcccagaaaagcagtgggagacagaccacaggccacagtgatgatcagaggggtcagccacttctcagccattatttagtctgtaaaatggaaatgggaataacaacagtacctatcctcaggtgccggcgaggggtactagagagaattacgtccaaaaagagcagggccgggcattaggcatttggggagagcaagctattattgtctttactactactgtyccaccgtcccagaagagaccctgctgagacccgagacgagcaactgacaggcaaatcgggccagttggagcgggtatctagtgcctggagcccagcgagccgagaggacgaaagaggtgaggagctgcgggcgcaggggcgtgagagactgagaacaggtgggaagagcccaggagaaagcaaggatcagcgaatggggt

SEQ ID NO: 516706 - DNA, 536 bp, Homo sapiens
gtcagctgttcctttaatacacacaaactcaactcccttgaccagagccccaacatctgatcatgggttccaagcctaggtttcccctcctaaaaaggggaaggaagccacagcccagaaaagcagtgggagacagaccacaggccacagtgatgatcagaggggtcagccacttctcagccattatttagtctgtaaaatggaaatgggaataacaacagtacctatcctcaggtgccggcgaggggtactagagagaattacgtccaaaaagagcagggccgggcattaggcatttggggagagcaagctattattgtctttactactactgttccaccgtcccagaagagaccctgctgagacccgagacgagcaactgacaggcaaatcgggccagttggagcrggtatctagtgcctggagcccagcgagccgagaggacgaaagaggtgaggagctgcgggcgcaggggcgtgagagactgagaacaggtgggaagagcccaggagaaagcaaggatcagcgaatggggt

SEQ ID NO: 516707 - DNA, 623 bp, Homo sapiens
ctcttgttctttaaaaattgcttctgtagaccttatcccaagcccaggtcttttcttcatactcttcattctccctgggttatcttacctayttcaatggcttgcatattgatattaattgattcccaaatcagaattcccaaaatcaaaaccagcccagattgctgtttctcatatatccaagtaaatacattcccttgattattctgcaggtgtcctcagactcaacgtacctaaaactaactatctttatcatcaagtcccttcaatttccttgtcattaaatggcattctcatgtagttactcaagccaggaacctgagagtcttccttgatttctctttcttcaactcccatttcaaattaatcaccaaatctttttcatttatgatattttgggtccatctactctattttgttgctaatattggtcaccgctgtctttcaccagaattactgcaaaccctttctaaatggttttcttactcattgtctcttctccaatccattatccataccaaagccagactcatctttctaaattacatgtctgagatgttacaccaatgcataaaactcttcagttgctctccatctaacatatagtatgtagacttcgtaat

SEQ ID NO: 516708 - DNA, 623 bp, Homo sapiens
ctcttgttctttaaaaattgcttctgtagaccttatcccaagcccaggtcttttcttcatactcttcattctccctgggttatcttacctatttcaatggcttgcatattgatattaattgattcccaaatcagaattcccaaaatcaaaaccagcccagattgctgtttctcatatayccaagtaaatacattcccttgattattctgcaggtgtcctcagactcaacgtacctaaaactaactatctttatcatcaagtcccttcaatttccttgtcattaaatggcattctcatgtagttactcaagccaggaacctgagagtcttccttgatttctctttcttcaactcccatttcaaattaatcaccaaatctttttcatttatgatattttgggtccatctactctattttgttgctaatattggtcaccgctgtctttcaccagaattactgcaaaccctttctaaatggttttcttactcattgtctcttctccaatccattatccataccaaagccagactcatctttctaaattacatgtctgagatgttacaccaatgcataaaactcttcagttgctctccatctaacatatagtatgtagacttcgtaat

SEQ ID NO: 516709 - DNA, 423 bp, Homo sapiens
tgcaggttattcaagagaaatggtgtctggggaaggaacagggtaaaaaaggtgaagatcatgactaataaagcataaaaagaatgaaaaccttcaaattaaaaataaaaggatggcgtcctggttttaatcatgatggagtaataagaatagggcttaccttttactgtaataatcaactataaaactctwgaaaatatataaagcagtgttttcatacagttgtagacagcagtccaggactgatttttaagagaagaaacaagcggtgagctccatagtcaccctgactttctgcttgaaggtactttgcaaactaacacaaagtggagtatgtctggttgggagaaaataacacagtatagggttcctgctggaatctgctgggcagagtactggggaggaggaagctgcagagatgca

SEQ ID NO: 516710 - DNA, 640 bp, Homo sapiens
tgtgtatgtttatagtgagtagctacacaatcattctgttttttgctttcagtttactattcaataaattagatgaaatattcagtactttacaataaaatagcttttgtgttagatgattttgcccaactataggctactgtgtcatgagtayatttaaggtaggctaggctaagctatgatgtaggttaaggtgtattaaatgcacttttgacttaaatacagtattttcaacttacattgcgtttattacaatgtaatcccaacttaaggagcatctatgcagctacagtaattcaaggcagtatggtatgagtgagtgcaaggatggacaaacatttcagtgtaaccaaacagaaagtccagaaacagatccaccattatggttaattgattttttactaattggcaaggtaatttaatgaggaaaggataattctttcaataaacagtgttacaatgactggatacttgtatgggggaaaaaaagaaccctgatccataattcacaacatacatatcaattcaaggtagatcacaaatataaaaatataaagtttatataatagagcagaatatctgaaatcttggggttaaattggagagaaaaaatatcaaacaaaagaaaaaaataaatttg

SEQ ID NO: 516711 - DNA, 640 bp, Homo sapiens
tgtgtatgtttatagtgagtagctacacaatcattctgttttttgctttcagtttactattcaataaattagatgaaatattcagtactttacaataaaatagcttttgtgttagatgattttgcccaactataggctactgtgtcatgagtatatttaaggtaggctaggctaagctatgaygtaggttaaggtgtattaaatgcacttttgacttaaatacagtattttcaacttacattgcgtttattacaatgtaatcccaacttaaggagcatctatgcagctacagtaattcaaggcagtatggtatgagtgagtgcaaggatggacaaacatttcagtgtaaccaaacagaaagtccagaaacagatccaccattatggttaattgattttttactaattggcaaggtaatttaatgaggaaaggataattctttcaataaacagtgttacaatgactggatacttgtatgggggaaaaaaagaaccctgatccataattcacaacatacatatcaattcaaggtagatcacaaatataaaaatataaagtttatataatagagcagaatatctgaaatcttggggttaaattggagagaaaaaatatcaaacaaaagaaaaaaataaatttg

SEQ ID NO: 516712 - DNA, 400 bp, Homo sapiens
ataaaaactgctatagtagggcagtcttccttagaaagggattgtgggcatgacagagaacaatattaatctgtccattatattccttaactgtaaaatggagaccatatgttccaccagcttcacttggtaattatgatacatggctattaagagactcaaatgactccatttcatcaactaatatgccctgtcaattctacttctaaagtatcccatgttctatccaatgtcataccactatcataatttaagtgttcataactctctataatatttcaataatctaactggtctcaatgcctgtagtagaaattgcagattggctcacccaatktctgttccctaggaaggctgagaagcttttaaaaaaagaccttcatttccctaactcccttgc

SEQ ID NO: 516713 - DNA, 641 bp, Homo sapiens
atattctctgtctggaacttcccctttctctctcctgtgagacattttctctcctacagtcaagcatctagctcaaacctttccttgtttttagttttccaggaagaattcatcaatccctcctttgtagcttgtgtatatgtctattcaaattgctttgacaaatgtttgttgaatttattttttttctttayggtttttcctactagacaataaactccttgaataacagaggacctggaatgttgtctgtaacacagaagattcttaataaaggcctgccaacttgaagtggacttaacacacctgctcttgccataagcacattgttttcaagtaagttttctctcttttgcctccactcttgaaatacaaattgacctctcagaatttttcctctaatgcccttgtaggaaaatgttaataactggtcagtgacaagtgtgattaagccttcccttttctcttatttagactggtgtcactgcactggctctgagagagctgtaaagaacattaacactgcatccaccttgacagaacaaaccattccctagaaattgataagggttttttttctggaaatgaatttggtggtggcaaaacaaacggctgcctcaattgccatccatctcccttcc

SEQ ID NO: 516714 - DNA, 641 bp, Homo sapiens
atattctctgtctggaacttcccctttctctctcctgtgagacattttctctcctacagtcaagcatctagctcaaacctttccttgtttttagttttccaggaagaattcatcaatccctcctttgtagcttgtgtatatgtctattcaaattgctttgacaaatgtttgttgaatttattttttttctttacggtttttcctactagacaataaactccttgaataacagaggacctggaatgttgtctgtaacacagaagattcttaataaaggcctgccaacttgaagtggacttaacacacctgctcttgccataagcacattgytttcaagtaagttttctctcttttgcctccactcttgaaatacaaattgacctctcagaatttttcctctaatgcccttgtaggaaaatgttaataactggtcagtgacaagtgtgattaagccttcccttttctcttatttagactggtgtcactgcactggctctgagagagctgtaaagaacattaacactgcatccaccttgacagaacaaaccattccctagaaattgataagggttttttttctggaaatgaatttggtggtggcaaaacaaacggctgcctcaattgccatccatctcccttcc

SEQ ID NO: 516715 - DNA, 391 bp, Homo sapiens
ttgagtgctgacttgatgccacaagcagaaaattctacacctgacctcatgtgatgagtctcagtcaaaatgtagtcaaaactttgtttcatgcacaaaattattaaaaatattatataaaatcaccttcaggctatgtgtataaagtgcatatgaaacataaatgaatttcatgtttagacttgggtttcattcccaagttacctcattgtgtatatgcaaatattccaaagtccaaaagaattttgaaatcaaaaacatgtctgtcccaagcatttcagataagggwtggtcaacctgtataaactatcctcaggtgtttggtagtccttaattaccagatcctgtttttgagtcattgttacaaagctcactggaaattctcatagtg

SEQ ID NO: 516716 - DNA, 506 bp, Homo sapiens
ggctaattttttgtattttagtagagacagggtttcaccatgttgcccaggctggtcaggaactcctgagctcaggcaatccgccttccttggcctcccagagtgctgggattactagtgtgagccactgagagataagcacttttctatgcacaagtttagcattcctctcttctttctgttcccctcatcagcccccagcagagttgaaaacaacagtagtgagtgagagacataaacaaaggcagcagaagcagtgagctacgctgcctttctacatgacaggaagatcccctgccacagacaggctggggagaaaagaagcttggtctttgcatggagagtgaagtgctgattaccatattggattagayttgtgtgaataagtctcagtaggtgtgcctgccatacacacatcttcagctactgtagcagcccttggtggtcctggcccttggagctctgctgtacaactttaggggtctcagctctggagaagactggct

SEQ ID NO: 516717 - DNA, 510 bp, Homo sapiens
ctttcactgacagttcaatagaggcatattaataaaccatcctggcatttccaaccatagtaataacctaaggaggattgggcaaagatgttgatgaatccctatcacaatgctaggtaatacagatttaagtctaggtgctcacaatgggcagataatcacttgtagcagttccaggcctcatatctccctccctctgtattcagcccatcttcaccctcgaactcttctccagatcatgtagatcaattccaatttgccctttcttcccagtgaatkctcacattaattcatatgttattcctttatccatgatctcagcccctgttgtagttgacagtctccttgaagacagaggccctaggaccatatctgttcaccagtgggcattgctgtaacacacaattctccgattcactttacttgttgactcagcaaacattttccccaaacacttgaagcttcagaagagaggccacgggctggattggtggtttgtggattcaattc

SEQ ID NO: 516718 - DNA, 587 bp, Homo sapiens
tgtggccttttctgagctagtgcccagcatgaagctttcaataccgttacaatgctatgcatttgccacttggatcaataccatggattccattaagctctgcttggcatcctgttttctacctatccttggtgacctcctttccctgtttccattttcaaacctctgcaggcagtgtgcaagaaagctattaagtggcctgaatcagggagaatttatgcaagactcactcctcattctctgctatgagattggcagccagagtaaatgacactatagactcacagaaacgagcstgcatataaggtatcattccctgtaataagaataagtaactagagatagtattgtaaggatagagctcagggactgacttcaagctagtgcctccccatgtccatccatggtgacaaactcaaacaattattctcgctttttcttttctcctgaaaaataatgattgataattttccttcatcccttcctccctccctcctttcctctcctttccttttctattgtcctttctttctttatttttctcctgattgttgttcttgtatgggagatggacagtaatccacagt

SEQ ID NO: 516719 - DNA, 356 bp, Homo sapiens
ggaggaaaaggcaacaagcttataggatttttttcttcttttcagggaacctggcttagtggtggcctccccacacccaagcagtaaaagggagagcctcctgagccagcakagaaacttaagcctcccagtattctggaagcaataaagaataatctgatatacaaacaaaggtgccgtgaggtattctcacttctcttaactactgctggtgatgatgtttgtgagccagctctttttaccactgaaaaagttcttaactgttaatgactcccaggtgaaggcaccaacccaagactgagatgttctgaataaatgagggaataaatgaatgagtaagtggatcactgactgag

SEQ ID NO: 516720 - DNA, 654 bp, Homo sapiens
tgatgtttgtgagccagctctttttaccactgaaaaagttcttaactgttaatgactcccaggtgaaggcaccaacccaagactgagatgttctgaataaatgagggaataaatgaatgagtaagtggatcactgactgagccaactcctattgagagcctaaaatgcataaaggtttcacaaatgactacaactgtcccttcctacaactccataaggcaggytctaaaatcacccccgttctatggatgaggaactggtgctcagagaagttaagtggaccttgccaaggacaataggaaaacatcatgagtaagagactcaggactcacgcatcaagacccacattgtttctgttatgctgtcttaccttcttgaaagctctgacttgagaagattggttcagattttgtgcaactggtcatccctggtgcaacccagagactggcactcaatttcacttcatgagtctcttctgtccccctcagatcatagcaccgctgtttacacttcagcgccagcacctcctgcctcctctttgggacaccttttcttacctttgatgctatgacaagggggctttcctccctgcctctagcagactgttttgcttttcccattcttttcataactttccaaagacacaaaatcaca

SEQ ID NO: 516721 - DNA, 654 bp, Homo sapiens
tgatgtttgtgagccagctctttttaccactgaaaaagttcttaactgttaatgactcccaggtgaaggcaccaacccaagactgagatgttctgaataaatgagggaataaatgaatgagtaagtggatcactgactgagccaactcctattgagagcctaaaatgcataaaggtttcacaaatgactacaactgtcccttcctacaactccataaggcaggttctaaaatcacccccgttctatggatgaggaactggtgctcrgagaagttaagtggaccttgccaaggacaataggaaaacatcatgagtaagagactcaggactcacgcatcaagacccacattgtttctgttatgctgtcttaccttcttgaaagctctgacttgagaagattggttcagattttgtgcaactggtcatccctggtgcaacccagagactggcactcaatttcacttcatgagtctcttctgtccccctcagatcatagcaccgctgtttacacttcagcgccagcacctcctgcctcctctttgggacaccttttcttacctttgatgctatgacaagggggctttcctccctgcctctagcagactgttttgcttttcccattcttttcataactttccaaagacacaaaatcaca

SEQ ID NO: 516722 - DNA, 654 bp, Homo sapiens
tgatgtttgtgagccagctctttttaccactgaaaaagttcttaactgttaatgactcccaggtgaaggcaccaacccaagactgagatgttctgaataaatgagggaataaatgaatgagtaagtggatcactgactgagccaactcctattgagagcctaaaatgcataaaggtttcacaaatgactacaactgtcccttcctacaactccataaggcaggttctaaaatcacccccgttctatggatgaggaactggtgctcagagaagttaagtggaccttgccaaggacaataggaaaacatcatgagtaagagactcaggactcaygcatcaagacccacattgtttctgttatgctgtcttaccttcttgaaagctctgacttgagaagattggttcagattttgtgcaactggtcatccctggtgcaacccagagactggcactcaatttcacttcatgagtctcttctgtccccctcagatcatagcaccgctgtttacacttcagcgccagcacctcctgcctcctctttgggacaccttttcttacctttgatgctatgacaagggggctttcctccctgcctctagcagactgttttgcttttcccattcttttcataactttccaaagacacaaaatcaca

SEQ ID NO: 516723 - DNA, 654 bp, Homo sapiens
tgatgtttgtgagccagctctttttaccactgaaaaagttcttaactgttaatgactcccaggtgaaggcaccaacccaagactgagatgttctgaataaatgagggaataaatgaatgagtaagtggatcactgactgagccaactcctattgagagcctaaaatgcataaaggtttcacaaatgactacaactgtcccttcctacaactccataaggcaggttctaaaatcacccccgttctatggatgaggaactggtgctcagagaagttaagtggaccttgccaaggacaataggaaaacatcatgagtaagagactcaggactcacgcatcaagacccacattgtttctgttatgctgtcttaccttcttgaaagctctgacttgagragattggttcagattttgtgcaactggtcatccctggtgcaacccagagactggcactcaatttcacttcatgagtctcttctgtccccctcagatcatagcaccgctgtttacacttcagcgccagcacctcctgcctcctctttgggacaccttttcttacctttgatgctatgacaagggggctttcctccctgcctctagcagactgttttgcttttcccattcttttcataactttccaaagacacaaaatcaca

SEQ ID NO: 516724 - DNA, 606 bp, Homo sapiens
agctgtaaaaatggcatgttatagctattggttgctcacgtctttcaaagggctttcccaattattttttcatttcatcttcacaacagccctctgtggaccaggaaggcagctgtcattacccaccattgcacggtcagggaaactgagacctcaaaaaggggaatctcccacgggagtcataggtaaggttggtgacagaggcaagacctgcactcaactgcttgacyaccagggccaatgctctttcacaaagacaccacgaccaacatggatagaatgtgcctctaactgcagctccagtttatagggctatttgagcaaaggggatggagtgaggcctcatttggagaagtggagatgaggatgggaggatctggcagagcagcgtggcaggtgttggttagattctctgcacctatgtattccttccatagacaattttgtatcccagaaaaaatgaaataaaattataatcctaaagccattcgtatatcttctttggaaaaaaaaatgtatatccaggtcccttgcctatttttattcagattatttggggttttttaattttaatttttttattttttgctattgagttgtatgagt

SEQ ID NO: 516725 - DNA, 606 bp, Homo sapiens
agctgtaaaaatggcatgttatagctattggttgctcacgtctttcaaagggctttcccaattattttttcatttcatcttcacaacagccctctgtggaccaggaaggcagctgtcattacccaccattgcacggtcagggaaactgagacctcaaaaaggggaatctcccacgggagtcataggtaaggttggtgacagaggcaagacctgcactcaactgcttgactaccagggccaatgctctttcacaaagacaccacgaccaacatggatagaatgtgcctctaactgcagctccagtttatagggctatttgagcaaaggggatggagtgaggcctcatttggagaagtggagatgaggatgggaggatctggcagagcagcgtggcaggtgttggttagattctctgcacctatgtattccttccatagacaattttgtatcccagaaaaaatgaaataaaattataatcctaaagccattcgtatatcttctttggaaaaaaaaatgtatatccaggtcccttgcctatttttattcagattatttggggttttttaattttwatttttttattttttgctattgagttgtatgagt

SEQ ID NO: 516726 - DNA, 471 bp, Homo sapiens
tgaatgaaagtataaatgtttagggtattaaarttttaaaaaaggatgaactagaaacaatgggatgggaattccagagaaatagatgtaatcgaacatgtaataaggagaaaggaaactattacaggaaagctgtacaaagatagcatttgctgccttgggaaatggcaggctttctctcaccaaagactttagagaagggtgtctcaacattttcactgggccccaacacagagttttagattcattctgcctggggtaggcctaaaattttgcagtgttaaggagttctcaggtgatgttgtcagatctagggccacacatgagaatgactgatgacagacaggcaaagaaagcaatgtccctccttctacctcttcctcccctgatgttttctctgcttttttctctggtggatttgtttcttcagtgccctacgccaaagccagagacccaaaaagttgacattga

SEQ ID NO: 516727 - DNA, 471 bp, Homo sapiens
tgaatgaaagtataaatgtttagggtattaaagttttaaaaaaggatgaactagaaacaatgggatgggaattccagagaaatagatgtaatcgaacatgtaataaggagaaaggaaactattacaggaaagctgtacaaagatagcatttgctgccttgggaaatggcaggctttctctcaccaaagactttagagaagggtgtctcaacattttcactgggccccaacacagagttttagattcattctgcctggggtaggcctaaaattttgcagtgttaaggagttctcaggtgatgttgtcagatctagggccacacatgagaatgactgatgacagacaggcaaagaaagcaatgtccctccttctacctcttcctcccctgatgttttctctgctyttttctctggtggatttgtttcttcagtgccctacgccaaagccagagacccaaaaagttgacattga

SEQ ID NO: 516728 - DNA, 611 bp, Homo sapiens
tattcttctaaatttacacaaaatgtcctccctaattttagcaaaataactaaatataaaatagtggaaaaataggtatgcttcattttaactatcctcttgtctaattttcccattgttatagtactcattaccccaaactatttcatggtgggcatagatacactgatgcaatgagcaaaaaatgaaaaatacacttttggcacttgcaaattggctggatgaaatggaatcccataaatccccagttaaaatagttaaaatggtccaatgtaagttaaaacagggccytgaaggattaaaacttactacgtaagacctaactagaggtaattgtgcccactgcttctttgtttaatagcccaattataccttttattaaacctggaaaaaataaatgcaccccaaggtgaattattgtagaggctttagtaactcattcttgtgcctcttaataggtctttgaacaacctatgatagctataagttacccataggcttctgatagcaaaatattgcccttcttggctccagctgctatatcattagaaagaaaattactggctgctttctgtattcttctggaaatagagcctttcatatatcccgag

SEQ ID NO: 516729 - DNA, 628 bp, Homo sapiens
ttttttttgaaaaggaaaaagaattttttcagtttttaaagataatttagaggatatgtatagaaaccagggctttatggactcaaaaataaagatcttccttatccccaccaaaatattcttaaactaagaaatggatgaagataaaatccaaagttaggttctttgtaaggattaaaagtgctgccctataaaaaatttctgctattcaaatgaccttgtaagggtcttaaggacatacctattgaatcttttgttaaaggccgtgaggactttaagggagttgtaccacaacagccttacatagggcccaaaatagaaaatggcatgtctaaaagagacttgtggttgtggcttttgttttatgtaataggcctcaatatgactagtgtaaaaaacacagaactttattggaagaagcaytgcctgtttgactaaaaggcccagagccagtaaaaaatgaaatgatacttcctagagagagaggtgacaaactagatctcagaaattcctgccatcccagtccaggtgccatacgccatgagtacaaacgtcctcagaggtcacagcctcagtctccatctaactgcaacctaattgtatgagggaccctaagtgggaatcaccc

SEQ ID NO: 516730 - DNA, 619 bp, Homo sapiens
aaaaaatggcaatttcattaacctaattgtataggtattctaatacaggacacagggtatgaaacatctgcaagtagttgactgtttgtctctcctctcccctactcctgcatgtttccctatcrtttttgtcaaataggagttagtgaacttgttaagtatagtgatatctcttccctaataagctatcttactatggttcaaaggcaacaccagtgtgctgccctctctctgcagtacacaagcaaagaatggtatacatctactaggtggtccgggcaataaggcctctgaccatatttgccttctccttcaagctatggctgtgaagaataatttaagaaataatctcctgtattcacttgtgcccattactggttttcatcaagatacttgggtgtaattcctggtaaaacaaccacagttgatgttaaacaagtctctgagaattaaataaaaaaaaaaaagaaacttaaaaaaacccagcaagatttagaaagcaagccatgtggcagagatcatatatttttgttgaatcttcgaagccaaaaacttagaaaggtcattatcagtagcagcatcaggctaagagcatcttgagttttggaacacataggag

SEQ ID NO: 516731 - DNA, 619 bp, Homo sapiens
aaaaaatggcaatttcattaacctaattgtataggtattctaatacaggacacagggtatgaaacatctgcaagtagttgactgtttgtctctcctctcccctactcctgcatgtttccctatcatttttgtcaaataggagttagtgaacttgttaagtatagtgatatctcttccctaataagctatcttactatggttcaaaggcaacaccagtgtgctgccctctctctgcagtacacaagcaaagaatggtatacatctactaggtggtccgggcaataaggcctctgaccatatttgccttctccttcaagctatggctgtgaagaataatttaagaaataatctcctgtattcacttgtgcccattactggttttcatcaagatacttgggtgtaattcctggtaaaacaaccacagttgatgttaaacaagtctctgagaattaaataaaaaaaaaaaagaaacttaaaaaaamccagcaagatttagaaagcaagccatgtggcagagatcatatatttttgttgaatcttcgaagccaaaaacttagaaaggtcattatcagtagcagcatcaggctaagagcatcttgagttttggaacacataggag

SEQ ID NO: 516732 - DNA, 524 bp, Homo sapiens
taagaaagtttgtgacatttaaatcaaagatcttttaaaataataaacattaataatatattcacttagtgtggtaactcaattattgtctaagacagttaattaatccaaattttatcttggtttaaaaataatagttcttagtaatggcaataatcagattttaggtatattttatttcctaagttctctccagtttggtaaaattatagttgcttttcaatttagcacatagttaaaaagaccttcaagggaaaattccaaaagacctctgtataacattgctgttttttccctgactcaatcttttacagtcactattccacccaagttttgtttactgagtgagctaagtgcttccatgatacttttaccrctgacactttcctccaagaaactaatgtatttcatatattattgaaatgtttaacttgattaatagcaaaactgattatttataaaagggacttcaagccatggtttattctaagtatgcagtagatacataaacattagattcagat

SEQ ID NO: 516733 - DNA, 612 bp, Homo sapiens
tttaagtataaaaataatcattgatattktacagtccttactatatcttaggcactataaatgaacagacattccttataagcaattctgtaagattcttattagtaccccatttggtaaatgaggaacttaaagaaaggttaaaacttgcccccagttacccagtaataagtggcagaagtagctccaggctgagtgtaactataatgctgtaagtcagaaaagctgacttaccctattatagaaataacatgtggaccaaatgaaatattcaaaggctgttcatttaaatattaagaaaaatttacataaacacccaaaataaagagaaaagcatatacatatacacacacaaaaatatttcacagaagactcacacatagggagtcatttttacatgcgacttctgttcctgttttcaattggctcattgattataatttagttagaactgctagcctttacttgatgagaaacagcaactcctggagtgtaggcaaagaaggcttcaaaacaaagcaaagtgacaaaatgaactacgtacactgactacaataaaaatacctaaaccataaatttctaaatatctagttgttttctttctccaatatt

SEQ ID NO: 516734 - DNA, 612 bp, Homo sapiens
tttaagtataaaaataatcattgatattgtacagtccttactatatcttaggcactataaatgaacagacattccttataagcaattctgtaagattcttattagtaccccatttggtaaatgaggaacttaaagaaaggttaaaacttgcccccagttacccagtaataagtggcagaagtagctccaggctgagtgtaactataatgctgtaagtcagaaaagctgacttaccctattatagaaataacatgtggaccaaatgaaatattcaaaggctgttcatttaaatattaagaaaaatttacataaacacccaaaataaagagaaaagcayatacatatacacacacaaaaatatttcacagaagactcacacatagggagtcatttttacatgcgacttctgttcctgttttcaattggctcattgattataatttagttagaactgctagcctttacttgatgagaaacagcaactcctggagtgtaggcaaagaaggcttcaaaacaaagcaaagtgacaaaatgaactacgtacactgactacaataaaaatacctaaaccataaatttctaaatatctagttgttttctttctccaatatt

SEQ ID NO: 516735 - DNA, 612 bp, Homo sapiens
tttaagtataaaaataatcattgatattgtacagtccttactatatcttaggcactataaatgaacagacattccttataagcaattctgtaagattcttattagtaccccatttggtaaatgaggaacttaaagaaaggttaaaacttgcccccagttacccagtaataagtggcagaagtagctccaggctgagtgtaactataatgctgtaagtcagaaaagctgacttaccctattatagaaataacatgtggaccaaatgaaatattcaaaggctgttcatttaaatattaagaaaaatttacataaacacccaaaataaagagaaaagcatatacatatacacacacamaaatatttcacagaagactcacacatagggagtcatttttacatgcgacttctgttcctgttttcaattggctcattgattataatttagttagaactgctagcctttacttgatgagaaacagcaactcctggagtgtaggcaaagaaggcttcaaaacaaagcaaagtgacaaaatgaactacgtacactgactacaataaaaatacctaaaccataaatttctaaatatctagttgttttctttctccaatatt

SEQ ID NO: 516736 - DNA, 612 bp, Homo sapiens
tttaagtataaaaataatcattgatattgtacagtccttactatatcttaggcactataaatgaacagacattccttataagcaattctgtaagattcttattagtaccccatttggtaaatgaggaacttaaagaaaggttaaaacttgcccccagttacccagtaataagtggcagaagtagctccaggctgagtgtaactataatgctgtaagtcagaaaagctgacttaccctattatagaaataacatgtggaccaaatgaaatattcaaaggctgttcatttaaatattaagaaaaatttacataaacacccaaaataaagagaaaagcatatacatatacacacacaaaaatatttcacagaagactcacacatagggagtcatttttacatgcgacttctgttcctgttttcaattggctcattgattataatttagttagaactgctagcctttacttgatgagaaacagcaactcctggagtgtaggcaaagaaggcttcaaaacaaagcaaagtgacaaaatgaactacgyacactgactacaataaaaatacctaaaccataaatttctaaatatctagttgttttctttctccaatatt

SEQ ID NO: 516737 - DNA, 611 bp, Homo sapiens
tggcttcacagggcttcacccacgcagcctgtgaatggggcagcaggttggtgtgagctcctggcccrtgggttcctgtactttgaagactttgagagacaacagtgtctctcctggttaagaatgcctgcctcaaaaccatgggccttcaggtgtgctagtctaaggaggacacacgatcaccgacgtcgtatttggcctaggtgattcagggatgcataacccgaatctaattataaggaaatatcaaacacaaaaggagaaatgttctattttttttttttttttttgagactaagtcttgctcttgtcccccaggctggagtgcaatggcacaatctcagctcactgcaacctctgcctcccgggttcaagcgattctcctgcctcagcctcccaagtagctgggactacaggtgcccaccaccacgcttggctaatttttgtatgtttagtagagatggggtttcacatgttggccaggctggtctggaactcctgacctcgtgatccacccgccttggcctcccaaagtgctggaatattacaggtgtgagccaccgcacccagcaaaatgttctattttttttaaagggggaaaattatattct

SEQ ID NO: 516738 - DNA, 611 bp, Homo sapiens
tggcttcacagggcttcacccacgcagcctgtgaatggggcagcaggttggtgtgagctcctggcccgtgggttcctgtactttgaagactttgagagacaacagtgtctctcctggttaagaatgcctgcctcaaaaccatgggccttcaggtgtgctagtctaaggaggacacacgatcaccgacgtcrtatttggcctaggtgattcagggatgcataacccgaatctaattataaggaaatatcaaacacaaaaggagaaatgttctattttttttttttttttttgagactaagtcttgctcttgtcccccaggctggagtgcaatggcacaatctcagctcactgcaacctctgcctcccgggttcaagcgattctcctgcctcagcctcccaagtagctgggactacaggtgcccaccaccacgcttggctaatttttgtatgtttagtagagatggggtttcacatgttggccaggctggtctggaactcctgacctcgtgatccacccgccttggcctcccaaagtgctggaatattacaggtgtgagccaccgcacccagcaaaatgttctattttttttaaagggggaaaattatattct

SEQ ID NO: 516739 - DNA, 611 bp, Homo sapiens
tggcttcacagggcttcacccacgcagcctgtgaatggggcagcaggttggtgtgagctcctggcccgtgggttcctgtactttgaagactttgagagacaacagtgtctctcctggttaagaatgcctgcctcaaaaccatgggccttcaggtgtgctagtctaaggaggacacacgatcaccgacgtcgtatttggcctaggtgattcagggatgcataacccgaatctaattataaggaaatatcaaacacaaaaggagaaatgttctattttttttttttttttttgagactaagtcttgctcttgtcccccaggctggagtgcaatggcacaatctcagctcactgcaacctctgcctcccgggttcaagcgattctcctgcctcagcctcccaagtagctgggactacaggtgcccaccaccacgcttggctaatttttgtatktttagtagagatggggtttcacatgttggccaggctggtctggaactcctgacctcgtgatccacccgccttggcctcccaaagtgctggaatattacaggtgtgagccaccgcacccagcaaaatgttctattttttttaaagggggaaaattatattct

SEQ ID NO: 516740 - DNA, 455 bp, Homo sapiens
gctgatggctggtcacactctaactcactggttgagatattaatacaaaggtgctttattttttgagacagagtcttgctctgttgcccaggctggagtgcaatggcgtgatctcagttcactgcaacctctgcctcccaggttcaagtgattctcgtgcctcagtctcccaagtagctgggattacaggtgtgtgccaccacgctcggctaatttttgtatttttagtagagacggggttttgtcatgctggccagsctggtctcaaactcctgacctcaagtaatctgcctgcctcggcctcccaaagtgctgggattacaggcgtgacgactgcacccggcctacaaaggtgttaaaccctctcatcaccaggttggtctgggtatgcaacaggcattggtatacgaggtatagcagggtcaggggtgctggttgggagactcctcaataca

SEQ ID NO: 516741 - DNA, 515 bp, Homo sapiens
ccaatgataggggcccagcctcctaggtcaacacaggcactgcctgaagcagcccccaaggtggtcagggtgcctcayggggtgggctctgccaggccaaggggcagctccctgatgctctgccgagggccactttctttctttcttttttttttttgaaatgaaatcttgccctgttgtccaggctggagtgcaatggtgtgatctcggctcactgcaacctccacctcctgggttcaaatgattctcctgcctcagcttcccgagtagctgggattacaggcatgcaccaccatgcccggctaatttttgtatttttagtaaagacagggtttcaccatgttggtcaggctggtctcaaactcctggacctcaggtgatccgcccgcctcggcctcccaaagtgctgggattccaggcatgagcatgtgttgtttctttagctggatgcatgaatgtgccattgggagctgctgtccatcctcagggacaaacgtgaggggaaaggcatacat

SEQ ID NO: 516742 - DNA, 594 bp, Homo sapiens
gtgcacacattctaatcatgctgttcccctttgaggcgctgaaagactggccttcggctgggyttggtggcacgtgcctttaattctagcactttgggaggcctcacaggaggatcaattaaggatagcctgggcaacatagcaagactgtctcaaaaaaaaaaaaaaaaaaaaagactggcatttggctgagaatggcaatggtaatggcgtcccaaatccaggccccagcccttcagccccactcttcttcgctttggccgaggtactttatccagcctctaccccaccttccctcagtaaacccagggtccctggtcctgccctcaggcctataagccactgggaccctctgcctggcttctcccttgaagacggtgctgcctgagttgaggcctgacttggcataacttggaaacttgctggtcagagggtggcaccctgtatgcccctcccttccagcctggtcagtgatccctactccaggctgtttgagacccaggccacactatcatgtatccagtgaactcttcccccgccgggaactggtgactcatcactgaagacttgtgacaaagagcagctccacacctg

SEQ ID NO: 516743 - DNA, 594 bp, Homo sapiens
gtgcacacattctaatcatgctgttcccctttgaggcgctgaaagactggccttcggctgggtttggtggcacgtgcctttaattctagcactttgggaggcctcacaggaggatcaattaaggatagcctgggcaacatagcaagactgtctcaaaaaaaaaaaaaaaaaaaaagactggcatttggctgagaatggcaatggtaatggcgtcccaaatccaggccccagcccttcagccccactcttcttsgctttggccgaggtactttatccagcctctaccccaccttccctcagtaaacccagggtccctggtcctgccctcaggcctataagccactgggaccctctgcctggcttctcccttgaagacggtgctgcctgagttgaggcctgacttggcataacttggaaacttgctggtcagagggtggcaccctgtatgcccctcccttccagcctggtcagtgatccctactccaggctgtttgagacccaggccacactatcatgtatccagtgaactcttcccccgccgggaactggtgactcatcactgaagacttgtgacaaagagcagctccacacctg

SEQ ID NO: 516744 - DNA, 594 bp, Homo sapiens
gtgcacacattctaatcatgctgttcccctttgaggcgctgaaagactggccttcggctgggtttggtggcacgtgcctttaattctagcactttgggaggcctcacaggaggatcaattaaggatagcctgggcaacatagcaagactgtctcaaaaaaaaaaaaaaaaaaaaagactggcatttggctgagaatggcaatggtaatggcgtcccaaatccaggccccagcccttcagccccactcttcttcsctttggccgaggtactttatccagcctctaccccaccttccctcagtaaacccagggtccctggtcctgccctcaggcctataagccactgggaccctctgcctggcttctcccttgaagacggtgctgcctgagttgaggcctgacttggcataacttggaaacttgctggtcagagggtggcaccctgtatgcccctcccttccagcctggtcagtgatccctactccaggctgtttgagacccaggccacactatcatgtatccagtgaactcttcccccgccgggaactggtgactcatcactgaagacttgtgacaaagagcagctccacacctg

SEQ ID NO: 516745 - DNA, 592 bp, Homo sapiens
ggtcagaagccaagtgcttttaataacttttgaagagtaggtaatctctgttcactttgaagactgaagtatgtactaattgcttttgtaaagtgaaggtgatgttgctgtagttaatgggccatgcagttgtatcccgggacatgtaatcccagtgtctcatgtggcttaagttgctgttttcataacatactcattgtttttygtttcaatatcatttggttaacacttggaattgttatctttgcttcccaaaaatcttttctcaaaaaatatctttagatggtttatcaattaactaataccaagattattttactaaatattttaaacatccaagattctcatgtatctaccactaacttaagtaataaaacattgcagttgctgttacagccccgtgtgtgcccctcctgggtcatatttccctccttccctcctctcccgctccccctgaagttctccagtcctgaacttagagtttaatcactctcatactggctttatactcgttacacatttaagtgtccccaaacaatattattttgcacatttaaaagttttaagtggcaccatactgcaaatatctttc

SEQ ID NO: 516746 - DNA, 584 bp, Homo sapiens
accatctgagaattagaaaaagaaaaaaatgtaattcagagataaccacttcacagtaacttatattaagtaacactgataataatacctaacacaatatttcctccctcccaaaaaactcttgcaggcttccacggagaccaaagattcccttgaacaagtggacaaacctgctgtagggacccactacttgaatgtcattgaaaaagcaatcctttccccaaatattggataaattatcaagtggaggaagcattaatttgccaaaatcaacatagaatatatatttttattctactctattaaatgcactagtaacacttcatttttaaaatgtcttctataagcaaaccatcatgtcttagaatgatatgcatgttaaaatccagtgtctctatctcagcatctactaagagagattcataactagtgatggttattctgttttgaagttcaaactactgcctgtggagatgatgacctctgtacttgcattygtcatccatcaagtagtctttcttctgatcatattggtaagttaggagcaatacacttcattatgtttgaatgttatcttaaaaatg

SEQ ID NO: 516747 - DNA, 581 bp, Homo sapiens
aacgttttcatacttcctagttaattatcctcccatctatgtttacaaacaaaaatgtggcttattgctratgttactacttaaccttccttatacttgatttgaatcttttcagcattagtctacatcgaaaatatgtcagtgctacaaactgcatctcacagaaagctcagaattcattgacccattctgaaatatagttttctggaaccaaggtagactttaatcgtacataaatgatttgtaagactttcttcacttattacagtccatgtctcacataactctccacataggaagagactggggagagaaaggaaatttcaatgctcattcatagaagaaaaaaaaggaatagattcaattaagaatccaatagaaaatacaagaaacccttaacataagattatttgagaagggattagttatacagggactatttgcaaagttgtatgataggagaaacacaagggatactacagtcagttgggggttagtagtggctgagctgatcacccaaggcccaaatgaccagagaaggaagcaagtaaagaactcagagaggagaaagtctgcaaact

SEQ ID NO: 516748 - DNA, 581 bp, Homo sapiens
aacgttttcatacttcctagttaattatcctcccatctatgtttacaaacaaaaatgtggcttattgctgatgttactacttaaccttccttatacttgatttgaatcttttcagcattagtctacatcgaaaatatgtcagtgctacaaactgcatctcacagaaagctcagaattcattgacccattctgaaatatagttttctggaaccaaggtagactttaatcgtacataaatgatttgtaagactttcttcacttattacagtccatgtctcacataactctccacataggaagagactggggagagaaaggaaatttcaatgctcattcatagaagaaaaaaaaggaatagattcaattaagaatccaatagaaaatacaagaaacccttaacataagattatttgagaagggattagttatacagggactatttgcaaagttgtatgataggagaaacacaagggatactacagtcagttgggggttagtagtggctgagctgatcacccaaggcccaaatgaccagagaaggaagcaagtaaagaacycagagaggagaaagtctgcaaact

SEQ ID NO: 516749 - DNA, 608 bp, Homo sapiens
ctgccctaagaaaaccaatgaccttaggtgcaaaagtcacaaccagttccaagcaatcgtgccgagtgggatccagaggattagataatccaacctcactctcctccccttctgtctccttctacggcttgcatgggcccaacctacctggaagccaggaggaataaggaccctgttgatggaatccatataaagcgttctcatataaattatcatccagactgggacacttttgagggttaagaaagttgttaaagttaattaccattattgcaaaaaaaaagaaacatgctactcaacaattatctaactatataattgtagctttatacaatacaattgtattgtataaaactcacctatgactctgtatatactaggacaaaactgctgtacctgtttgtcctgcatatctcacatccacctaacccacattgcccttccaccttgtcagactctgtgagtcctacaggctgctgcaggcaccagaccacactagctagtagatcaagtggctgrtagggaggcatcgttggacacttccatcaccagcagaaatcagaaagggttagctgtccctaaccacttgtgtctgagtgtactttgtt

SEQ ID NO: 516750 - DNA, 666 bp, Homo sapiens
tattcagctgtaaaaaggaatgaagtactgatacatgctacacacatggatgaattgagaccattatagcaagtaaaaacaatgcgacacagaaggctacatactgtcttaattccactacatgaactatcgagaatagataaatccgtagacacagaaagcagattagtggtttctagggcctgggaagaggaggggttggcgggagtgactgctcaatgggtacaggggtttccttctggggcgattaaaatgttctggaagtagataatggtgatggttgtacaacattgtaaatatacaaaatgcccttggattgtacattttaaaatgattaaaatggtgaattttatgctatgtatattttaccacaataacattgagtcattttggtctctgggaaggcaagggaaattgtgaagccttttttgaagaaggtgggcttctgagaacaaaggaaatttgaatttgaatccgaatttgaatttgcagcaaaggataaaggtgccccacgtaaaggtaaagatagaaacttgagcagcctgkcttgtgtaacaagtggggatcaggtggaattgttgaggaatgtctctttagagtctacaaatttgatcgaagtaaggattaatttaaagcacaaaatatattttcagcagagaccaaatg

SEQ ID NO: 516751 - DNA, 607 bp, Homo sapiens
tcacttaccctatgctagtcttatgcaccacgttagttaaccaccaagggcagaactaaaaaaattgtagaaagttggaagcttctgtaggaattttctaggcaattatggaagatgagctcttcacttaggggctcagtcatttttttctttgctaggttttcagtgagttttcctatctctaccaggaaatgacaggccagcctgaagaattcttgaagatcccagccacttaatttcaactcattagaggatgtttgatagggcagaaatgtctgttccctccttgcctcagtgccattttaaatagaaagctgataggcttgtgtaaaagtgggtgkgctgccttttaaaaaaattatacttctttttaaaagtgattcttgacagagaacaagtttcagtgggattgctgaagtggccccaaaacactttcaaaaggcttcattctttaggcactcaaaattgtgtaatcaacacatttacatttgaagatttcccagttaagtcaagagatttgtcagagttcaggagtggatgtgaacaatacgttggcacctacaaccagggagggcaaatatctcattcacccccttccccctgcaaa

SEQ ID NO: 516752 - DNA, 591 bp, Homo sapiens
ggttagaagggcattaagaactttaagttaaatatgtagcacatgggagaagaggtccattttggcaaaacagcagagatatgcttttcttaccccaaggctgaaggattttcttttacaaaaattgattaatcratttctttttatttatttaatttttttttttttttttgagatggagtctcactctgctgccaaggctggagtgcagaggcgcggctcgctgcactgcaagctccgcctcctgggttcacaccattctcttgcctcagcctccttgagtagctgggactacaggcacccgctaacaagcccggctaattgtttgtaatcatagtagagatggggtttcaccgtgttagtcaggatggtttggatctcctgacctcgcgatccgcctgccttggcctccgactgtgctgggattacaggcgtgagccaccgcgcctggcctattattttattttttgagaagcggtctccctgtgttgcccaaactggactgcagtggtgcaatcatggttcattgcagccttgaactccagggctcaattgatcctcccacatcagtctcctgagtagctgagaaaa

SEQ ID NO: 516753 - DNA, 645 bp, Homo sapiens
gagaagttgggctgcaaagcagttacaacataaccactcccataagaagctctgaaactgggattgcctttcagtggggtcccaagttgtgggtgggtaggcagccctttattctctcatatgagtgagttatcttatacagactggccctggaaggaggcaagaatttgagaggcagttctttatggctgaggcaattattggtgagggctaacaacggagcactctctgmaagataacattcctaaccttactagcagttgggaaatatgtgcttcagtcctaaaggggagccctggaaggagcacatccaagacagtagctaaataatatgacattgacaaagagaaactgtgcctagcacctggcacatattaagagctccattaacattagaatgtgtgtgcttcgggttcattaatatgcttgaaatgtcaaagactaaaacgtcaacagtgtttaacttgggggtgggaccatggctacttgctgttttctctgtttttctatgctttaaatgtcacaattgtctatgtctgaggctactttccaactacctggtacagttatcagtggatgttatattcactaggtggccaagcggtgtcctatgaagtttgaaggaaaaacataccaccttaatca

SEQ ID NO: 516754 - DNA, 538 bp, Homo sapiens
tttgctgtggatgtcttctacacactgatcatatttgattacctgggctttcaattatttgcagagcccaaggagcagccccagggtatttaggaatcagcaattagttcagtaggtaagtgctgtgcctagagggccatcatttatgaggagctattcaatttaacctgaatcttacacaaaagttacatttatataaggagtagtaattccttagtcttgtgctcaagccttcatattttgacttttaatgttcacactacacaacaaacactttggttagattagcaggctgttccctaggtaccaggtaggttctcactcctcttcttaccattcctttgcctgattgmttatctaaatcctcatgagccttagatcctacttaagccatcttccccggaaggcactctagatctctgcagcccaaatattttcttttcttttcttatgtcttttatgatatccttaccgtagctgtaaattgtgataaactcatcttagcactaaattagataatatcatgcaaggtgattta

SEQ ID NO: 516755 - DNA, 480 bp, Homo sapiens
gggtctgtttcctcaaacctaagtgtggggaggagggcccgggggagggttctcctgtaccttagaggagcagtctttccatgagcaaacctggcagggagactcccctctgtagacatgggggtcctcctcgggtaggcatgtgttttctacattgccatcatcagcccctcctgccagacagcagtgggagagacaaatgcagagtgaccctgggcccatcagccaggtgagggccctgcagcctcctgggccttcaactccatcttcctgaccccaaagagccctaggtcctcctgctctccatatctcgccagtggggtttkatagagaactcagaagcgtggggctgcattttgttgaagaaaagctgcccacacttgtccccagaaggtcatccccatgcagtcgtggcaggtccacccgctcacatttagcctctttcctcggtgactcccaggtcccagacttacagcacca

SEQ ID NO: 516756 - DNA, 570 bp, Homo sapiens
ctgcttctatcctcagcgctgtctttgttctctgacccacatcattgtggtaggcagactcctaagatgcccccaagattcccggcccccggtgtacacatgcgcatcccaccgctattcaactgaacacaaatctggggactggtgtgcagggattttgcagatgtgattaaggttccaaaagacttgaccttcaggtaaggagattattggggtgggcccgacctaagcacatgagcccttcaaaatcagagagttttgccaagtgcagtggctcatgcctgtaatcctagcagtttgggaggccaaggtgggaggattgcttgagcccaggagttttgagaccagcctgaacaatacagtgagaccccgtctcttaaaaaawaaataaataaaagcagagagtttcccgggctggtcagtgtgaggaaaacagaaacttgaagcaagtggaagactccactggagggaattctccattgctggctgtggaaatggagggggcctctgggagctgacagcagaaccccaaagtggacaccttgattctagcacttcaaggaactgaat

SEQ ID NO: 516757 - DNA, 476 bp, Homo sapiens
gggtggctggaaggggggtcccagagctgacccgggagggaggargaagggatgagggagggcaaaaggagggaggagagactgagggcctgggggctgccccccaccccacccccgggactggagcagaagagtccctagggaagcgtgtttgcctctgtgcctttctgtcggaagaggctctctgagacaatatccatttttacatttcttggaaatttcatggcattcatttcggggaaaataaaagctgtccttgctggagaaatgataccaatcagggcctgaaaaggctggaaaattatcctcctggagacgggaacattgagggaaaaatgcagattaaaagcacagagccactttgccacctccctgccctcccctccccccttcatggaatcgccacattataagtaattccatttttcttctttagaattaataggacccaagaaggatgcatggggcagaggaca

SEQ ID NO: 516758 - DNA, 476 bp, Homo sapiens
gggtggctggaaggggggtcccagagctgacccgggagggaggaggaagggatgagggagggcaaaaggagggaggagagactgagggcctgggggctgccccccaccccacccccgggactggagcagaagagtccctagggaagcgtgtttgcctctgtgcctttctgtcggaagaggctctctgagacaatatccatttttacatttcttggaaatttcatggcattcatttcggggaaaataaaagctgtccttgctggagaaatgataccaatcagggcctgaaaaggctggaaaattatcctcctggagacgggaacattgagggaaaaatgcagattaaaagcacagagccactttgccacctccctgccctcccctccccccttcatggaatcgccacattataagtaattccatttttcytctttagaattaataggacccaagaaggatgcatggggcagaggaca

SEQ ID NO: 516759 - DNA, 571 bp, Homo sapiens
ccctgcctctccactgcctgtcctgccccctccggccatcccctggggccccaacaggcctcaccccagtcgtcgtagccgtgggtcagctcatgtccaatgatggtgccgatgcccccgtagttgagagacctgggcccacagcagcagcatcaggccctagccctccaccctctgagagccccatgctgctgcccaggccccagatgtccctggccgggccaggaggtggcccagggaggccacagaggcatccgtgcggtccaggggcacatgtgcctcagcttcctcatgcgctatgtgaatgccagtggaacctatccagcttcttttaggaaatcacatctaacagagctggctgggcagtgaaacagggctggaggagacaggagggaaacggaggcacctacgtaggggtttctyctcctacctcatcattagtgttgcgccacctttgaaacatcaaaatgagcctcaaacaagtaaagaagaccccaggaagttacaaataacaaacctacacatttttctaaataaccaaggatgtagtggggagccagggtccacagct

SEQ ID NO: 516760 - DNA, 483 bp, Homo sapiens
catctccccatgaaaagcccaaccctcctccctcagcctacccagcaggacacagcctctctgcctcggaggtttctggggctcagggaggtgagccttctgcttttcctgacttcccattatctttccactctgcccccctccttctccaaagctgcctttcctgtttccaaatcaccccctctctgttcaagctgcscaccaggcagctttgcccacgtgtgcaatcccaagtgagcacagtgcagggtccgctaccaacgccgcagcctccttgttcaacagttattaagcaattcacaggggcaacagcacagcgggacaccaggtgggggccgtctgcagcgggcagctccgtgagctgagcagggcaggggctagcactgcaggggaagggggtcctgatgaggaggggctagggctgcaggggaaggggtcctctactcccaagtacatggggccctaggcctggttttggggggt

SEQ ID NO: 516761 - DNA, 424 bp, Homo sapiens
gtgcctgagcatctccactctgggaggctcccagtccttcccccatgtgtgtgcacatgtgggragacactggctggggatggctgtcctgtcagaagtggctcaggcgaatgtgctgggcctccaaccataggggcaacacccttccctgggcagcctgcttctggaggagaggggtcctcagagcagagggcatctgaaccaggcttctgtgggcctcattcagtgcttacccacaccacttccacggagcctcacagtgtacccattttgcagatgcggcaattgagatgtggataggtggatggcttggcaaggtgagtcaggactctcaggtctgggcaagagccgctggggagaatggaagaaaaaggaggtgcagggacttgttttcagtatcatcttgtttacacagacatggctg

SEQ ID NO: 516762 - DNA, 424 bp, Homo sapiens
gtgcctgagcatctccactctgggaggctcccagtccttcccccatgtgtgtgcacatgtggggagacactggctggggatggctgtcctgtcagaagtggctcaggcraatgtgctgggcctccaaccataggggcaacacccttccctgggcagcctgcttctggaggagaggggtcctcagagcagagggcatctgaaccaggcttctgtgggcctcattcagtgcttacccacaccacttccacggagcctcacagtgtacccattttgcagatgcggcaattgagatgtggataggtggatggcttggcaaggtgagtcaggactctcaggtctgggcaagagccgctggggagaatggaagaaaaaggaggtgcagggacttgttttcagtatcatcttgtttacacagacatggctg

SEQ ID NO: 516763 - DNA, 633 bp, Homo sapiens
gctggcttccccaaagtgagagatccaactgatgtgagaatgagggctaatgagcaagaaagaggccatagtgtctttcctaaccaaatctgggaagtgaggtaccatcacttctgcctcattctattggttacccagacccaccctggtacagagtgaggggactgcacaagggtgtgaatactgggcatcactggggccatcttggaggtggaccrccatacaaacagacccttgtctcccaattcctgcagcctctgttggccctcaggataagattgagtggaggctgcctttgggatagggttgctagatttagcaaataaaaataggggacaaatttcagagaaacaacgaatgattttttagaatatgtatgccccaaataatgcatgacaaccctaatttggagaggagtaggtgctggggggcagggaccctttggggagaggtgctgcgttctggtcctctaggattgtgtgtgcaacctcaggctgaccccaagtctttgtggatgtcgatcctgacctttccactccagtcctcaacttcccaaagggacctaggcagagaggtcaaggcagaaagagctaggaaaggatactctggggtctggagggagggaggtgtcct

SEQ ID NO: 516764 - DNA, 584 bp, Homo sapiens
agggtaggtaggaagagggaggctggaggggccagagagtgaaggcgcagattcctgcctgctctaccccacaccttgggggaggagaagcagagaaggggccctatctgtctcacccctatcagagctctccccctgaggccaccctgagtggcctcctccctggcccctgagccagcctcgggcctccccccaaatcgtcctgcccacccactgtagccgatgtccaccctcagaccatctcgggtggcccctgtcttgatttcaggggagccattgagcattgaggagtggctgctccctcccttccttggactcttccccagtctgaggggcacgagcctcagggctaggagtgggtgtcattagggacygtggctcctctctcagaccctgctgtctcctggctccccaacaggcccaccctagatgaagcgcttgtcctgcacgttgtaggagtaggggtccccaggaaaaggctggggtggtggctggttgtaaacgccctgcaggaagatccaggctgtgcccaccaccatgacaggcgtcaccacaaacaggcagaggcggtccactgtgcgggc

SEQ ID NO: 516765 - DNA, 427 bp, Homo sapiens
cacctcagtccacagcctgggcaggagaggagagccagccaggagctgggaaccctgcccatgcccagcaattgtggtgcccagggctctctccckgcagagaaagagctggctctgggggtctttgaggtgtgacagcatcctcagcccgagaaggaaatgaggcccatgtgtcactgatagggatcccctgcccttggagctctgagaggctggtgacacagccgaggctcctggagactgtgtgtgttggggtggaggaatggataggtggggtgggggtgggcggtaggggctgagtggataggtggagggtgtcctgtcctaattttcagcctttagttaaaaacagctcagttatggttaagaggcctggcttcaagcctcagcttccattccagctcccttacttcctggctctgtgacc

SEQ ID NO: 516766 - DNA, 427 bp, Homo sapiens
cacctcagtccacagcctgggcaggagaggagagccagccaggagctgggaaccctgcccatgcccagcaattgtggtgcccagggctctctcccggcagagaaagagctggctctgggggtctttgaggtgtgacagcatcctcagcccgagaaggaaatgaggcccatgtgtcactgatagggatcccctgcccttggagctctgagaggctggtgacacagccgaggctcctggagactgtgtgtgttggggtggaggaatggataggtggggtgggggtgggcggtaggggctgagtggataggtggagggtgtcctgtcctaattttcagcctttagttwaaaacagctcagttatggttaagaggcctggcttcaagcctcagcttccattccagctcccttacttcctggctctgtgacc

SEQ ID NO: 516767 - DNA, 537 bp, Homo sapiens
tggaacctgaaagcgtttgagtgagtgagctgctcatatacaaataagaatgtgtgcaaaccaataagaacaaaatgaccatcacccctccccaaaaaaaggggcaaagaaaaaaccattcacaggcagaaaataactacaaatggttaataaacataagaagatcaacttgcctaatttagaagcaactgaagacaagaccttccaatgacagccagtgccaggcacccccagccgagaagctcctcagaacattgagaatgtaaaatgggaatttatctcaagtattcaaactcggaatgactatgaataataaacctgaatgaagcattgctcataaaagaaaatgctggaaactgcctaacactcgcagggtctccttagcaagtcctgctatgcagtcatcaaagagggagaagagcccagtgggcagggacctggaggtcagcgccagggctgcgrggcacccgggaggtgagagccagggctgcgggggggacccgggaggtcagagccagggctgcggcggggacccgg

SEQ ID NO: 516768 - DNA, 507 bp, Homo sapiens
ggcaccccattcctgttctgccccaggtagctggtgcattccccggtgctcaccggctcgaccccccagcarcacgagagacctcacagagggagtcacactaacgtggtcggggctccagagcgaaaccccaaccactatgctcacagccaggaccgagcaggctgggccaacggcagtccctgcccagcgcccggctccctccgagtggccagcagcgccctctggtggagactggctcggcctccgcggcactgcattcccacggcagtggtccatctagtccccaagtcctagaggaggcccctctctctccctcagccctggcagggtccttggcgcccattctccacacctgcactccttggccctccaggaattaccggcctcaggggcgctcctggaagcagagaaggggatctgcctggaccttcctcagaggcacagccttcacagaggcacgaggggctttggagcagaggaggctgccacttatcagccagacgg

SEQ ID NO: 516769 - DNA, 392 bp, Homo sapiens
ctgggccagacgcaactcccacctctcagttcttcaggcaggctcctatcactttgtccctccattttgccacctacataacagggtcacggtaagcgccctgcagggtgtggcggtgagcagggggacagtcggaactccagggctggtcacggcagcacctgtgccagcactgtgcccactgtgactctgcctgatgtcacagctataggcctaactagccacataaccacagagaaaggaggtggctgagaaacaagggtctggggacagtaggaagatgctgcctgctctracagacaccccccaccccacccgctgccccgatggagcccacttggccatatttgacaaccccagacaggatgcagagggacactgccctccatgac

SEQ ID NO: 516770 - DNA, 589 bp, Homo sapiens
aggggtggggcaggcacgaggggccagaaatacaagtccccaagcccaggcctggaaaatacggtgaccaggcagcgtgtggggtgcaggagaaaggcccgcaggtgacgcctctgaggagggcatggtccttrgaccccactcagccatctgcaccgggcccctcatgctccttggttcgggtgaatgtcagtgctggttggtccacccagagcctgaaagtcaaggctcccagtgaccccttcccccaagacccggccaggcagagcccccagtagccacccggtacagagcctgggtctcagcacaccttgctgcccagggtgcacgccacgggcacctcctgtcaccccaacatgcagggagggcaccacatgctggggtgcttggcgccacccccacccctacatttctgatgtggccttctgggtgttgagggggggcctgaaaactgcatttctaacaccgtgttctaacccgagttctccctgggtgctgatcccacttctgtcacacggcctcaggctgaggggtgggaaggcctccggagcccctgtccatctctcagcacagcctgcactgcccacag

SEQ ID NO: 516771 - DNA, 634 bp, Homo sapiens
ggcacacctgctggcggctgaggaaccacaccctgtgggttgcgggaggacaaggcaggctcctgtgccggcaaggtggggtcaaccccgaaggtcgaggacaccaagacccgctcctctcccacagagcaacaggaagtgcaggcggctaaggaaagccccactgggcagggctccagagcaaacccgccaggctggcccgggactgcacagccgcctctgccctggacagcytgcgtgtggcccagcacagctcgctgcacagccgccggccacactgggagggcagccacggacacagtccgccgcctccccaccctgacctccttcctgggggcaagaacagggcagacagatgtgctacacacccctcccccagccaggctggcaggtgttacctgagcactttgctgacagcctgaagcaccattttgcagcagagtccactttgcagggactggccgggccgggcttggtcttcagggagactgcagtggtctcccagcatgagtgggcgacgggaaggtggggaggagaagcggggcgtggtgccggctggccagcactcgcaaatgcctgctgccgggccctccagcctcactccctggccaatgggacgcctggcagagacaaa

SEQ ID NO: 516772 - DNA, 494 bp, Homo sapiens
gcaggcggctaaggaaagccccactgggcagggctccagagcaaacccgccaggctggcccgggactgcacagccgcctctgccctggacagcttgcgtgtggcccagcacagctcgctgcacagccgccggccacactgggagggcagccacggacacagtccgccgcctccccaccctgacctccttcctgggggcaagaacagggcagacagatgtgctacacacccctcccccagccaggctggcaggtgttacctgagcactttgctgacagcctgaagcaccattttgcagcagagtccactttgcrgggactggccgggccgggcttggtcttcagggagactgcagtggtctcccagcatgagtgggcgacgggaaggtggggaggagaagcggggcgtggtgccggctggccagcactcgcaaatgcctgctgccgggccctccagcctcactccctggccaatgggacgcctggcagagacaaa

SEQ ID NO: 516773 - DNA, 622 bp, Homo sapiens
gctcggatgcacagaggccccaaaccctccagtcagcgtgtgccagggtggggcaagcctcgtgaccctgggaagcagccccagcgccccgccatgcccacgctcctgtggcggctgctgctctgtggcgcaggctgctctgctaactgcacgctcttttgttttgttttgtttgttttcttgtgtgtcacttsttttcttttgtggctaatcctcctgcccatgcctgcctgcctccccaccctcccgctcccgcctgtttctttctggtcctcctgtgccgtgtgcatgcgggggactggggtgcatgtgccgcgcggctgcccccaccccgctcgctccctgcgcctccccgtagcctattaggaagcttgtcctgcccccaccgccccccgagccgcccttcgtggcccgccccctggccacctccacggagcccgaagcttgtgggagcgcctcgaggcctggacacgtcctccctctgcacggcctgcggcccgaccccaagacccagacttgccgtgcaaggccaagctgaccgacaagcctctgcagggcaccaagtccaaccccttcccggccagcaccccagcccggcctcccgccactggcctttgtcccc

SEQ ID NO: 516774 - DNA, 517 bp, Homo sapiens
ccagctgagggccctcctcctaccccttcacctttggacacaaaaccaagattgccccagcctgacagaggggcgctggcgtgccgcccgctacragacaccgcccctctgccccgagcccccccagaggtggagctgcttctccacagagagacggaacccatgacagagcgagccgcaccgtctttagatgtgtgtgtagaaagaagcaggagcaagggactaaaacacaaaacctggccctgccccagcggcgcccccacccccacacccttttccaaaaaccaccaagaaaaaaaagtttataaaaatatcttgcaggaattctttaaagtttacagtagctcgccagcccccccgcgccccaccagctctgtcctcagagggcgccctggccccagcccccccactgcctgagacacgcagacggcaggggatgtggccgccgcccttccctgaacagaggtgcggagaatccataaattaaaacggcaaataaataacactgatcccacgc

SEQ ID NO: 516775 - DNA, 370 bp, Homo sapiens
ttaactttctgcagagcgcagggcagcacagagggccagccaggccagggggccagaggttcccctcccacacaagctccgaggtgtccagacaggaggcggtggccccagtccgcataggcctttcyccagggcagccctttccccagggttaggctgcaggccctgccggtgtggcttcaggagtcctggtccccgcactcaagcttccctcctgctcatctgtgatggggcctgggtgtacccaggtccttggtaggcgccaggagatgtgtggggccccctggagcctggagcccccccagcccctccgcttatctttggtgtctggggcggagactggcccttggcacccgcggccgtccctggc

SEQ ID NO: 516776 - DNA, 609 bp, Homo sapiens
ctggctttcgtcctgcgccgtcctgggtctttgggtccctctgccagccccgtggtgacttcttgcacacagggtttgcaggggggctgcggaatgaytccgtcccttccacagcacacgggcacctccagccaggaaggagctgggcaggcagccccgccccaggccagagccacagagccgttgtgactgggggtctctggccaggacgttcctgtgctgtctgttgtggcagccccccagggcagggccacctccagggtacttggttccagacgctggctgagtggtcacttgtgtccacaccgcagtttccctatctgtgaagtggcttggataggatggtggggtggtgccagggggttgctcttgctgggactgagcccaggcctggccctgccactggggccagcgtcagcctcaggacagccgaggaggggagatggcttgtgggccaggatgcccgagggtggggagaagcagctcagatggcgtcactgtgttgccttcccccagccgatgggatttttgtggagctctctctgctggggacaatgagaggggagccgtgagccgtgatagggattgtggcaaggccgggctggtcag

SEQ ID NO: 516777 - DNA, 479 bp, Homo sapiens
ccgtcccttccacagcacacgggcacctccagccaggaaggagctgggcaggcagccccgccccaggccagagccacagagccgttgtgactgggggtctctggccaggacgttcctgtgctgtctgttgtggcagccccccagggcagggccacctccagggtacttggttccagacgctggctgagtggtcacttgtgtccacaccgcagtttccctatctgtgaagtggcttggataggatggtggggtggtgccagggggttgctcttgcygggactgagcccaggcctggccctgccactggggccagcgtcagcctcaggacagccgaggaggggagatggcttgtgggccaggatgcccgagggtggggagaagcagctcagatggcgtcactgtgttgccttcccccagccgatgggatttttgtggagctctctctgctggggacaatgagaggggagccgtgagccgtg

SEQ ID NO: 516778 - DNA, 699 bp, Homo sapiens
cccgcaatctgggtgcgcggagctgtgtccctgcccagggcctcactcctctgtgttcccctcctgtctctgggccccgtgtccttgatgctgccccttttcctgaccctgctctcctatcacgtcccctcttcaggggagtggccacgggaggaggccrtcgtcccagccagccctccgcctgcctcagcctcccaggacagacgtccctttggccgagagttgcacctgcctctgatccttgcccttgctctgtcttcccctccgtccctgtcccagcacccagaggaggttggggtggggaaaggtcctcgggggagaccatctgcacggcccctccctggatgccacagagcaccagccttgggagggcagagggggcgccccggaggtggatgccctgccctggttcctgatgtggcccctgcctctaagaccacaaggcactcagggacagatgctaacgtttgggagggtaggagcaacgggcgtgggcttgcagcccctgcctctcccctctctgcccttcccgcaagccgcccgctacccactgcccactaagcagctctattcttaccgcgccctggagattactgctgcgacggctcctctgggacaggcaggctcgccgggctgggggcagggctcagcactcccgctctgtgggagggtggccgcaggacctgcgtggaagtccct

SEQ ID NO: 516779 - DNA, 699 bp, Homo sapiens
cccgcaatctgggtgcgcggagctgtgtccctgcccagggcctcactcctctgtgttcccctcctgtctctgggccccgtgtccttgatgctgccccttttcctgaccctgctctcctatcacgtcccctcttcaggggagtggccacgggaggaggccatcgtcccagccagccctccgcctgcctcagcctcccaggacagacgtccctttggccgagagttgcacctgcctctgatccttgcccttgctctgtcttcccctccgtccctgtcccagcacccagaggaggttggggtggggaaaggtcctcgggggagaccatctgcacggcccctccctggatgccacagagcaccagccttgggagggcagagggggcgccccggaggtggatgccctgccctggttcctgatgtggcccctgcctctaagaccacaaggcactcagggacagatgctaaygtttgggagggtaggagcaacgggcgtgggcttgcagcccctgcctctcccctctctgcccttcccgcaagccgcccgctacccactgcccactaagcagctctattcttaccgcgccctggagattactgctgcgacggctcctctgggacaggcaggctcgccgggctgggggcagggctcagcactcccgctctgtgggagggtggccgcaggacctgcgtggaagtccct

SEQ ID NO: 516780 - DNA, 564 bp, Homo sapiens
tacccactgcccactaagcagctctattcttaccgcgccctggagattactgctgcgacggctcctctgggacaggcaggctcgccgggctgggggcagggctcagcactcccgctctgtgggagggtggccgcaggacctgcgtggaagtccctccccagccctcgctgcccctgtgtcctgacacaaggcccccaaggtgtggcaggcaggcgggcgtgcaggcctctgtctctggtggtctagggggtgggggtggctctctgaggggtgtgggcctccatctctggtggtctagggggttgtagggggkctctctgaggggtgtgggcctccatctctggtggtctagggggatgtaggggggctctctgaggggcctgagcagcctccagcccctccccagggaggtcagtcaccctgggagggggttgggagagacccgggccaggctgcctcatccacagccctgggccagtcagtggggcagggaatgtggacactgccctcctagccctctgcctgggatcctctacgtctccccacttgggacaggagctgacg

SEQ ID NO: 516781 - DNA, 591 bp, Homo sapiens
cagccgctctcagagaagcaggtgcaggaccacaggtcaggaaggcttccggtccagggccagtagcctgcgaccccacagactgtcctgtgcctcactgaaccgtagcagccaaattcctttcctcagcctgtttcttaaggtaaaatgaacygggaaactgtaatccagggattggaatggatcctgattccctgggcccctcccaagtgccttctcttcagggtaccaacctcctgtgagctcagccacttggcagtccagggtcaaacagaggacggctcagcttccctctgtgtcctgggctctgagcggagccctgagctaactaagcctgactaacatggtgaccccctggctccctccagagagatgggtacaggcacagcttgaagttcagggcagtggctctcacctgggggtgattctgtcccctaccaggagactcatggcaatgtctggggacgttttgtcacaatggaggtgggacagctactagcttctgttgggctgagaccagggatgtggcccccaccccatcatcatctcccccctcagccatgtgcttagcacctgctccaatgatagaca

SEQ ID NO: 516782 - DNA, 513 bp, Homo sapiens
tttgcttgtctcccaggctggagtgctgtggcacgatcttggttcactgcaacgtccgcctcccaggttcaagcgattctcctgcctcagccttccaaatagctgggattataggcacccaccaccatgcccagctaatttttgtatttgtagtaaagatggggtttcatcatgatggccaggctggtctcgaactcctgaccacagatgatccacccaccttggctcctcaaagtgttgggattacaggcgtgagccaccgtgcccagccaatattttaaatttaatgtttacatttgcacacatgccaattgggcwtcatggtggctgcctcacaccactttttgtccgtgtgtgagactcacatagaggctgttttctgtgatccttttttaaaaaataattacatttttttaatgctcagggaaaatgtcaaataattgtttatgttttgtactgaaatctgcactggtctgatggtacccagaaaaactcttaactgtagccagaaac

SEQ ID NO: 516783 - DNA, 469 bp, Homo sapiens
ccgctccgcccctgcctactctgcttgcttttctttgtttttttgctttttgttttttgtttttgagacggatttcactcttgctgcccaggctggagtgcagtggcccgatctcggctcattgcaacctcygtctcccaggttcaagcgattctcctgcctcagcctcccgagtagctaggattacaggcgcccaccaccacgcccagctaattttgtattttgagtagagacagggtttctccatgttggtcaggctggtctcgaactcccgacctcaggtgatccatcggcctcggctcccaaagtgctgggattacatgcgtgagcgccgcacccagcctgcttgcttttctttgactcccatgtcttaaccccagtgtttctcaaacaagagtgttgcaatggcattctgaggacattgtggagttgaagtggccttggtatgtggtgacatcctaggtttctt

SEQ ID NO: 516784 - DNA, 645 bp, Homo sapiens
accagggcacccagctaagttgtgcttagactacagaaacctgacccatgcaagctgtgagataataaacgtggattctcttcagctgcaatatttgtggaaatttgttattcagcaacagaaaactaatacaaactggtagactctcttttaaaaattactttactttattgtagaataataggagagaatcgtgccagatgagactccaccaccctggcccatgagaagggccatatagacaagacattggttcatctgaaatcaactgactgctacccaataaaataaaacaccattctcccaattccaatacattctcctgaggaaatatccacatgcaacctggtgaagcacatcctaggagtaggcatttcaaggggcactgctggctggagaaagtgcaggctgattcatcctgtggttggaagcaggaaacaaatgtcctgggataatattttgaaataggagcrtgtcccttcccccatccccaagagctgaccttcccctgctcaaactaaatgattctgagttccttatctcaggaatgggatgaaccccagaaagggagaaaagaggagcttttctgcttttgatgttcagtaagccagccttcagaggcaacagggagaaatctgggcttaa

SEQ ID NO: 516785 - DNA, 566 bp, Homo sapiens
tgtgggagacctgtgcgaagaaacttggactctctgcctgggggaaagaaaacatttggaacaagcacgatggaaaaatttcctccagcctctcctatccactaaccagaggaaataaaatgttaggggcccgttactcatcttttgtgatcctaagaagcttcttgacctttcctattctgccactgtcatttcccagaatttagggaggaggtgaaaaaaaaaaattgtttctgggtctttgggccaaatcaagtacaaatctatacagagtttctgtggagytgttgagagtttcttagtaaatatagcagacgtgtgttccagatcttctaggattgttccatttttgacatgatgtcttatagacaattgtcagattgtgtcctaatttttggttggaaaaatttggtcacttgtacagaatagcacttaacatagcatactgtagttatttttttaaaagtctttctttcccactagaccaagaagtcctccaggacaaacgtgatgacgtgcttatctttgattcttagtgcctgttgtcttcccaagcactgtgtact

SEQ ID NO: 516786 - DNA, 566 bp, Homo sapiens
tgtgggagacctgtgcgaagaaacttggactctctgcctgggggaaagaaaacatttggaacaagcacgatggaaaaatttcctccagcctctcctatccactaaccagaggaaataaaatgttaggggcccgttactcatcttttgtgatcctaagaagcttcttgacctttcctattctgccactgtcatttcccagaatttagggaggaggtgaaaaaaaaaaattgtttctgggtctttgggccaaatcaagtacaaatctatacagagtttctgtggagttgttgagagtttcttagtaaatatagcagacgtgtgttccagatcttctaggattgttccatttttgacatgatgtctyatagacaattgtcagattgtgtcctaatttttggttggaaaaatttggtcacttgtacagaatagcacttaacatagcatactgtagttatttttttaaaagtctttctttcccactagaccaagaagtcctccaggacaaacgtgatgacgtgcttatctttgattcttagtgcctgttgtcttcccaagcactgtgtact

SEQ ID NO: 516787 - DNA, 542 bp, Homo sapiens
ggacagaggaaagtgaggtcagggtctctacctacccacccactgctccctgccagtggaggctgcaggtgggtggtcctcttccagcagccacagcttctgcccagccaccctgtcttccagcttcaactctccctcctggttcctgaaactgctcctcctcaggtttaggggtagtcacaactccctgggagcttcacctttccttattgcactcctttgactctgccaggcccttataaaatgtcccttcatcaaactcacttctcttgccccacttgagtatgccatctgtttcctgtgggactgagactggtattgccactttttcagaaattgattcttagactctgtacatgtattattttgataaaataagaagcaaagctaacaaaacagtaaagtcagttaytactatagaattttatgttgctataggattttataaaagattatacatccccactgtactgaggctgccctttctgaattgccttcctctcccccatcccactcaaatgctgcttccttccattgctcac

SEQ ID NO: 516788 - DNA, 516 bp, Homo sapiens
taattaaagagaagaaaaagcaagtgagaagttcctcagttttatccctaggccactcattctttagtgccaaccatcctgcttttaccccaactactatgttgcttatttcaactgttgtgggggttttattataaacctttatgttgaaatagcttcaaatttatataaaagttrcaagaatagcacacagaacttctgatcacctgtcaccagattccacagttgttaacattttaccacatttcctttatcattctctcaccatatagatacatattattttttgtgaacttctgagaagtagcagacatcatgcctgtccttttacctctaaatacttcagtgtgtatttcctgaatgtttttgtaatattttgtaagagaacaaggatgctcttacaaaattacaatacacttatcattaacattgataaaatactataatctaatctatatgtcttgttcaaattatactcattatacctctcatgttctccaaagcaatactgtatca

SEQ ID NO: 516789 - DNA, 389 bp, Homo sapiens
  misc_feature (1)...(389): n = A,T,C or G
gctgctgtactttcctcctcgccttcccagttccccagagagccttggacggaagcggtgggagcaacacaggagaaagtctggggcagcgtcagcgggcgccagggycacgccggagaccaaagccagggccacccttcttggagcgcttttccccctttcccgggtttgtgtccccgactttctccacccggagctacccaaagccggctccttggtgcccttggctantggcgtgctgagcactttgcgaggaacagtctgaccccggcgcgcactccgcgggatcctgggtactccacgaagaaagattctgggcggagaacaccccgcccagcccgggagaggagcgccggcttggcacaccggctagagcgagccgcccgacg

SEQ ID NO: 516790 - DNA, 634 bp, Homo sapiens
ctgcaaggaaggctgggaaatatagcatttagctgggtagccacatgcccagctaaaacttgaagaatttatttttcaaaaagatgaaacaaagtaaatttctaaggatcatattaacggtctctgtcacatattttcatgcatagtcakgtaaaaacacaatatatcttactttctcagtgaaaggtcagctaggtgggtcaacttgacaacatataaactgatgttcctgctaagaatcagcagaggaagccagatgcagtggctcacacctgtaacctcaacactttgggaggctgagacaggtggattgcttaaccccaggagttcaaaatcagcctggacaatatggcaaaacccatctctacaaaaaaaaaaaaaaaaaaaaattagctggctgtggtgtctcatacctgtagacccagctactcaggaggctgaggcaggaggatctcttgagctggagaagttgaggctgcagtgagtgaagattgtgccagtgcacccagcctgggcgacaaagtgagaccctgtctcaaaagaagggaaaaagagcagaggcaggagtgctggggtgtgtatgtgcaagcttatgttgtggcttgttttgtctcattctcctttctcaataaaa

SEQ ID NO: 516791 - DNA, 615 bp, Homo sapiens
acacaaagaaaaggtggcccttttcctatgagcatgcttccccatcaccacctctcctagccccagccccagcctcccacacactttagcacctggtcacatcattgccctatcctgttactatgggacacactcatttagtgaccagtggaatatcctcaaagccaacatgactgcaacatttcccgcttggcagtagggtgatggggagaagagaaccatgagttttccttaggtggccacaatcacagactggcgaagcttgagccagggctgacttgcttgtacttctctgccaccaaagtctgcctaycatgtaactttcacacatctgtccaaggttctgtcctttggaatcaaggaaaataaggtctcccctgggccatatgtcagcccttgagatgtttgtgaataaatagctgtcatggcttctcttctgactaaaatgccccatttctttaaccattctttgtgggttgcagttgcttgctcccttgtactttgtgccccagatgtggtctgttaggggcaggacatgatagaatgattatctccttgtcctggacattgtggttgtgtgaagcttgccaggtcttgtgtttgctattttggcag

SEQ ID NO: 516792 - DNA, 520 bp, Homo sapiens
acaggccatcagtcaacacgtgatctcctctctagctatgctccctctagaaatgcaggatcttttgccccatcctaaactcagaaaaggggtttcatgtgcagaacatggtggagaatcctaggtctctgactcacaaaaggatcaccttgggcctgagcttcctcatctatgaaatggggatgggaattcatgccttgctgtataattgcaaggattctatggagtaataaaggtaagcgtctggcatggtttctgtacatctcrggtgctcctggtactggctgtcacacaggtcaataaatatcatttcctcctaatctttccacatgcatagttattggaaagctgggtgggcagcaggctataatttttattttgcccaaaaaggcaggaccttattttgtttatagaaggcagaacctctttgttctgcttgaaacaaacaaacaaacaaaaaacctctccaaaggctcttttcatcctctgctaaattggacaatccagtcggtccctctgg

SEQ ID NO: 516793 - DNA, 617 bp, Homo sapiens
cacctactaggctctaggcactcaagatgccaccagggcccattctctgattgtcacttcaatgactcaaagtcatggtcatcaagcatctagcagctccaggtccccttctgggctctgtacacargacatctttcatcatgtgtagccattttccacataaggatgtgtactcacagagagttgggtgactttactcaaggtcattcagtagctaaggcagaaatcagacctatgtctgctggctccaaagtccacatcttctctccccactaccccatgctacctctcaggattccaggagcacatttcacctggtttgaaggataattcctcctcctcttcctggtttttctagaggagatagctcttttcttattgaggattacccacccctgaaaaattaccactttcccgaagtctgtctctacttttctcagcatcttccaattctcacctggaagatgaggctttctattctaactgaggactacaccatgattcaggcagtgacccctacacacacacacacacacacaagcatgtgtgtgcccagttctactggagcctgtccattgtacttgaggctcccaagccaaactggatttaggtgcagg

SEQ ID NO: 516794 - DNA, 616 bp, Homo sapiens
ggccatcatccgaagcaaattaactcaggaacagaaaaccaataccacatgttctcacttgtaagtgggagcaaaacactggattcatatggacataaagatggaaatgatagacaccaggggctaccggagcaggaagagattaatggggaaaggtctgaaaractaccttttgtgtactgtgctcactacctgggtgatgggatcattcgtaacaaacctgtacatgtacaccctgaagttgaaattatatatttttaaaaaggatgctataacttttgtgaaagttaggctggaagatgggggtatttgtagggaaaagggacaggatttaagcctaaatctttacagtttagaagagaggccactgacaaaaagtacactgaataacgcagtcaatgcagccattcaaattatgtttctgttaagttcagaaaaacctggaaaaatattgaggctcctaggacaaatggaaaaagaaacaagacacattatataaacaaaatcagtaccgctattaacaaattttaaagaatacatggagaaaaggctagaaggaaacaaaccaaaattattcaaacagtggaggatttttttttttcctttacttttctgt

SEQ ID NO: 516795 - DNA, 616 bp, Homo sapiens
ggccatcatccgaagcaaattaactcaggaacagaaaaccaataccacatgttctcacttgtaagtgggagcaaaacactggattcatatggacataaagatggaaatgatagacaccaggggctaccggagcaggaagagattaatggggaaaggtctgaaagactaccttttgtgtactgtgctcactasctgggtgatgggatcattcgtaacaaacctgtacatgtacaccctgaagttgaaattatatatttttaaaaaggatgctataacttttgtgaaagttaggctggaagatgggggtatttgtagggaaaagggacaggatttaagcctaaatctttacagtttagaagagaggccactgacaaaaagtacactgaataacgcagtcaatgcagccattcaaattatgtttctgttaagttcagaaaaacctggaaaaatattgaggctcctaggacaaatggaaaaagaaacaagacacattatataaacaaaatcagtaccgctattaacaaattttaaagaatacatggagaaaaggctagaaggaaacaaaccaaaattattcaaacagtggaggatttttttttttcctttacttttctgt

SEQ ID NO: 516796 - DNA, 616 bp, Homo sapiens
ggccatcatccgaagcaaattaactcaggaacagaaaaccaataccacatgttctcacttgtaagtgggagcaaaacactggattcatatggacataaagatggaaatgatagacaccaggggctaccggagcaggaagagattaatggggaaaggtctgaaagactaccttttgtgtactgtgctcactacctgggtgatgggatcattcgtaacaaacctgtacatgtacaccctgaagttgaaattatatatttttaaaaaggatgctataacttttgtgaaagttaggctggaagatgggggtatttgtagggaaaagggacaggatttaarcctaaatctttacagtttagaagagaggccactgacaaaaagtacactgaataacgcagtcaatgcagccattcaaattatgtttctgttaagttcagaaaaacctggaaaaatattgaggctcctaggacaaatggaaaaagaaacaagacacattatataaacaaaatcagtaccgctattaacaaattttaaagaatacatggagaaaaggctagaaggaaacaaaccaaaattattcaaacagtggaggatttttttttttcctttacttttctgt

SEQ ID NO: 516797 - DNA, 560 bp, Homo sapiens
tttggaatcgtattctcctagatgtctcactgccatggcccacccacgtgttagaacgcttgcaacttcctctgggaccttgatgctgttcaggttcatctcttgaggcttgtgtctcttgaaccagaaagtgtgaggaggtgacgtatcaggggagataatccagatcagagttgaggaggggagtcaagattagatttagggaagaaggrttgtatgttcagatctgaaaaagaaaagcccataaataggctgagggaagagtaggcaccctcagagtaaagatgggtcatgatgtaggtttcaaaatgggtatggcatgtgatttaggactaagactgcattcaatgaaaagttttagaagcctagaaaaatcattctattagcttaaaatgcccctgatatttgaaaaggcatattcatgaccagatacccaaccagttgctttaacaatagactgacaagtattggggaaatcaaaccttgtctacctgtctaaacttggtggatatctgggttgtctcacctggctggatgggaaccagtcacagattaagatt

SEQ ID NO: 516798 - DNA, 637 bp, Homo sapiens
gccacatggtaagaaaactcaagcaaactttttcagaggtccatgtggcaatagcctgccaatagccagagaggaaccaaggccatgttaggaagtgagtcatcttgggaagaacttctctagccctgctcaagcttcagagkatgtcaacttagccaatgtcttaaatgcaacctcatgaaagatgctgagtcagaatcacccatatataagctgttcccaaattcctgtcccacataaactgcaagatagtaaccactacactttgggtaatgtcatatagagcaacagataactgatacagaagatgagataccttgatgctccaaacaagattaaaactgacgaccaaaagttgtggcagactttttcacaccaaccagaagctacagctactgtctgaatgaaaggaaaaacttgcctctctcggcttgtttggctgggtcctcttatcccacacattaagccatagggactcttccatagcccttcctatgggaggggctacggaagatctcctagccagagatctttcccatggcctcagacaaaattttaaagaagacccaacctgccaataagttaaaacatgctgctgttatcaccatcaaccctctaagcaaatccctccattttt

SEQ ID NO: 516799 - DNA, 637 bp, Homo sapiens
gccacatggtaagaaaactcaagcaaactttttcagaggtccatgtggcaatagcctgccaatagccagagaggaaccaaggccatgttaggaagtgagtcatcttgggaagaacttctctagccctgctcaagcttcagaggatgtcaacttagccartgtcttaaatgcaacctcatgaaagatgctgagtcagaatcacccatatataagctgttcccaaattcctgtcccacataaactgcaagatagtaaccactacactttgggtaatgtcatatagagcaacagataactgatacagaagatgagataccttgatgctccaaacaagattaaaactgacgaccaaaagttgtggcagactttttcacaccaaccagaagctacagctactgtctgaatgaaaggaaaaacttgcctctctcggcttgtttggctgggtcctcttatcccacacattaagccatagggactcttccatagcccttcctatgggaggggctacggaagatctcctagccagagatctttcccatggcctcagacaaaattttaaagaagacccaacctgccaataagttaaaacatgctgctgttatcaccatcaaccctctaagcaaatccctccattttt

SEQ ID NO: 516800 - DNA, 637 bp, Homo sapiens
gccacatggtaagaaaactcaagcaaactttttcagaggtccatgtggcaatagcctgccaatagccagagaggaaccaaggccatgttaggaagtgagtcatcttgggaagaacttctctagccctgctcaagcttcagaggatgtcaacttagccaatgtcttaaatgcaacctcatgaaagaygctgagtcagaatcacccatatataagctgttcccaaattcctgtcccacataaactgcaagatagtaaccactacactttgggtaatgtcatatagagcaacagataactgatacagaagatgagataccttgatgctccaaacaagattaaaactgacgaccaaaagttgtggcagactttttcacaccaaccagaagctacagctactgtctgaatgaaaggaaaaacttgcctctctcggcttgtttggctgggtcctcttatcccacacattaagccatagggactcttccatagcccttcctatgggaggggctacggaagatctcctagccagagatctttcccatggcctcagacaaaattttaaagaagacccaacctgccaataagttaaaacatgctgctgttatcaccatcaaccctctaagcaaatccctccattttt

SEQ ID NO: 516801 - DNA, 628 bp, Homo sapiens
gctgaaatgctccaactttttcataaagcatgggtggtccagtttagactgatgggaatcttcctgttattctttttaaatggatrataccgatggaaataaaaggtggaaaatatatttaaaaaaagaaaacccattcttttaaacaatatatattgagcacctaacatatgccaggcaccataattaatgacaggcataaaaacacagatgggaccttggcctctgttcttatggttcctgtaatcccatggaggagatagccttataaacatgaaaaagggtttacaacttacctaagaaattagaatggcaaatttttatgtatacaaattttctataatgaacatgtattatatgtataataaaagtagtaaattcttgtaatatagtttttataactatgtaaaatacgtaattattagtagagaacacaaaagagtgaaaataattgtgttagggtaatcctaatatgatattcagttttatttcaacttggccaggttatagtcccaatgatttagttaaacattaatctagatattgctgtgcaggtattttgtagatgtggttgacatcttccatcagttgatcttatgtaaaggagaggtccctgggtaatgcgggt

SEQ ID NO: 516802 - DNA, 577 bp, Homo sapiens
tcatggctgccctggtctgctctccagggatcaggtgtggaacaaggagctggggattctcctccaacccacatgtcctctgccattacagaccggtgaggcactgggctttgggactcctgggcttgcttgtccagcacaagatctggattgaggatgtgactctgtgtgggcctccttatgagcaataagaaataagaaatggccacctgcttcgtggagtggatgtagtggggttrcagaatgaacactggccttggtgttgctccaggatccattctgtccctgccttgttacgagattccagataagtcacatcgcctttctgattctctgaaaagtggagtgtggaataaataacttcccaagttcctttctaatataacactccatggttcctttaataatattgacatgttatgttagtataccattatagagcaataataataatcacttacataatgtcttgatattgttcttagttgtttgcatatattaattcaatgagatccttgcaacaaccctacttttgttgtggaggaccctgaggcaagagagatggagaagcttgtct

SEQ ID NO: 516803 - DNA, 620 bp, Homo sapiens
tagcagaaaaacatccagaaaggcttcaccagaaagtccttctccaccatgactgctgctcattcttctcatcaaacaagggcaattttgtgagtttcaatgggaaatcatcaggcatccaccttacagtcctgatttggctccttctgacttctttcttgttttctactcttaaaaaaaaaaatctgtaaaaggcacccagttttcttcagttaataatgtgaaaaagactgcattgacatggttacattcccaggaccctcagttctttagggatggactaaatggctggtatcatcacctacaaaagtatcatrgacctgatggagcttatgttgaaaaataaactttatatctttttatctcttaatcccatttttctgaaaacttgttgaagtcccctctcatatttatgtcaaataactaactgatatattatctcaaataacatacccattaacattgaatagaggcctttgcaaattcatgagactgtttctgtagaataaatatatagatatgtagttgctaggtaaacggtgtagtgaattcatacaattttctgttggatacattttgaatccagttttaactttctcacaccagaactgtgtcaccct

SEQ ID NO: 516804 - DNA, 582 bp, Homo sapiens
ctggcgccagcttgtgtgagtcaaaattttcaggaactttgcaagccagtagatatcatgttggtaccttgaaattggcccatagtggaagtatttacaccaaatgaattgctaaatgcwtcactttctttgttatttttactgctggtgtcccaaggaaagcagacaaatcgtagttcttcaccccaaagagccagtcattaaacatttatcagtacattactgacactagatttctgagaagcacagcttgtgaaatgatgggaactaaggagaaggtggcgaatgtgagagagaaaaaggaagagaaaggaataactcctctggcagccaaaagatcacaggatccttctaagagatttccctggggaagatgggcacagcctggctgatggccttgccggcgataatgaagatggtcaggcctagcgcatgcttcttgctccaacttaatttgtcccttaccaccttacagagcctgtcgccaattaaccaattagtagctaatttaatttcctcttccgggtcgaagcagcaggttttctgatttgagtgtgaggcatgccagagcaggtgcaggca

SEQ ID NO: 516805 - DNA, 582 bp, Homo sapiens
ctggcgccagcttgtgtgagtcaaaattttcaggaactttgcaagccagtagatatcatgttggtaccttgaaattggcccatagtggaagtatttacaccaaatgaattgctaaatgcatcactttctttgttatttttactgctggtgtcccaaggaaagcagacaaatcgtagttcttcaccccaaagagccagtcattaaacatttatcagtacattactgacactagatttctgagaagcacagcttgtgaaatgatgggaactaaggagaaggtggcgaatgtgagagagaaaaaggaagagaaaggaataactcctctgrcagccaaaagatcacaggatccttctaagagatttccctggggaagatgggcacagcctggctgatggccttgccggcgataatgaagatggtcaggcctagcgcatgcttcttgctccaacttaatttgtcccttaccaccttacagagcctgtcgccaattaaccaattagtagctaatttaatttcctcttccgggtcgaagcagcaggttttctgatttgagtgtgaggcatgccagagcaggtgcaggca

SEQ ID NO: 516806 - DNA, 407 bp, Homo sapiens
atttaaagaggaaggtaatttcaagcasagaattgttccaccatctccccagagtcttcttaatagaccccctcagccctccaatttggcctggaaaacagcacagtcctgttccagaagcaaggatgacagcaagtgctgcccagaagcctggtgggggaagggagagggcctccctgcaggcaggaacgtgcattacataccacaccacatgccacgctgtcacagatcagacagcggccctggcagactctcagagagcccctcattttacggatgaggacactaagctgggaagagagggagtgccatgctcaaggctgcacactgatcatggaagagcaggaaccagggctccccctcctcccccaactctgcttgctacctccacaactccacgtgtggca

SEQ ID NO: 516807 - DNA, 524 bp, Homo sapiens
acactgtttatatgacagcagagtgccggctaaaagattcatatgctgctgatgaagtatgttataaattttaattaccatagtttgtacaaatgacatgtttgaaatgctattgagtaatgtgaccctgataatgaaactataaaataaatcattaactttctgaatgagcttttttatttcagtgctgcacagagtaaacttttcagtttattccagatcagtctttttatgcccccaccttctgcctctggcctaaccgactcttctccacccaggttggggacagaggagtgacaggaggcctgggaaaagcctggggaatcttcctggcaggactgaccccagcagacacagctcaggggctggggaagggagagttagccaggaatgggggtccagacatgcaccttaaataagccccataaagttgcccaccygtgagaagaaaggacttttttgaacctgcagaccctctaaagatccccatccactggcaactgggctctgagactgaagcaccc

SEQ ID NO: 516808 - DNA, 559 bp, Homo sapiens
tcaaagtcttgctggaaaaacagacatgtaaaaatgtaattatactataatgctacaaatccagaatggagagatgaacaaagcactgatagcaccgaggtgacagtatatttttacctttttcccctatattttctagttctaatgaaagtttgattatsatctaaattgctaatttattatatctacaaaataacttagaaaaatttgattttttaaaatcctataatcttctccctcagggttattgtctgtttcatctttttaattttctaattaaattctgtagttttccttaatgttaaatactggttagaaacatttcatgttaaacatacgcatcttatggatattatttgtgacagtctacaagtaattcagtgtttgatttatttctttaaagaagcctatattttgggtttaccattcacagggaaaatcggagcccatacttttttatctttctttattgagtgtggggtctcaaacattcattggtaatacctttgggatttggtaagaaatactgcacacagatacaatgtagaaatttcattga

SEQ ID NO: 516809 - DNA, 559 bp, Homo sapiens
tcaaagtcttgctggaaaaacagacatgtaaaaatgtaattatactataatgctacaaatccagaatggagagatgaacaaagcactgatagcaccgaggtgacagtatatttttacctttttcccctatattttctagttctaatgaaagtttgattatcatctaaattgctaatttattatatctacaaaataacttagaaaaatttgattttttaaaatcctataatcttctccctcagggttattgtctgtttcatctttttaattttctaattaaattctgtagttttccttaatgttaaatactggttagaaacatttcatgttaaacatacgcatcttatggatattatttgtgacagtctacargtaattcagtgtttgatttatttctttaaagaagcctatattttgggtttaccattcacagggaaaatcggagcccatacttttttatctttctttattgagtgtggggtctcaaacattcattggtaatacctttgggatttggtaagaaatactgcacacagatacaatgtagaaatttcattga

SEQ ID NO: 516810 - DNA, 552 bp, Homo sapiens
ctgctcataaaaggactctcggggactagatagaccattgtcacagcttcttcacccaggcagcatacagtgtctctcagtggcagtcagtgctcttcagaacattggctgggtttccagtatgggccaacccttaatgtgtgaagtcttgtgaaactgaccttgtgcgttcttctatctgtcagccaggggtcagggtagaggcaacactgctctagcataagtttgtctagtctccttcggctayttctatggtataaattgtgtttgcttcctacatttttcagtctttctcttttgaatctcaaaactctgttttggaaatcaagaaaatgaaacacagactctttcttcttttagttattttttttaagagacagagtctcactctgttgcccaggctggagtgcagtggcatgttcacagctcattgtagcctcaacctcctgtgctccagcaatcctcccatctcagccccctgactacctgggactataggcacacaccaccatgcctggcttttttttttttttttttttttaatttttgtag

SEQ ID NO: 516811 - DNA, 562 bp, Homo sapiens
taagataagaaagagacagtgaagaaatcaagattgggacctcatgtgaaaatggagggtgttcaaagacacctcagggtgcatagaatctagagaaagcctgtgtctatcattctggagcacctcttttccaggaggagatgaaactctgaaactattgaaaataaaagaaacttctgattttagtatgttcttagcccaagaggrctgtgcaaaaaggaaacacacgtagaccatggaaaaaaaatgctgggaacaaagttattccatgtagacatgcctggcatcaggcaagaggtcacaatttccatagatgctaaaaactcacttccagaacttagttgagtagaagcaaatagtacattattaaatgcgtacactgcatttgaatgtggctcattgcatggtggctcatgcctatgatcccagcactttgggaggccaaggccagtggatcacttgagcctaggagttcaagtccagcctggccgacatgacgaaacccgtctctactaaaatacaaaagttagccaggtgtagtggtacatgcctgtaatcccag

SEQ ID NO: 516812 - DNA, 562 bp, Homo sapiens
taagataagaaagagacagtgaagaaatcaagattgggacctcatgtgaaaatggagggtgttcaaagacacctcagggtgcatagaatctagagaaagcctgtgtctatcattctggagcacctcttttccaggaggagatgaaactctgaaactattgaaaataaaagaaacttctgattttagtatgttcttagcccaagagggctgtgcaaaaaggaaacacacgtagamcatggaaaaaaaatgctgggaacaaagttattccatgtagacatgcctggcatcaggcaagaggtcacaatttccatagatgctaaaaactcacttccagaacttagttgagtagaagcaaatagtacattattaaatgcgtacactgcatttgaatgtggctcattgcatggtggctcatgcctatgatcccagcactttgggaggccaaggccagtggatcacttgagcctaggagttcaagtccagcctggccgacatgacgaaacccgtctctactaaaatacaaaagttagccaggtgtagtggtacatgcctgtaatcccag

SEQ ID NO: 516813 - DNA, 511 bp, Homo sapiens
gacttaaattctatttcatatttgttcacgtcatgcttgaactcttagcctggtccttatctcttcaaatttgcccgcatctaactccaaagatgattctttgagttcatttcagacaataccattttagtctccagcaggagccctggggaaactcaccatgtctaatttatyttcagtgaatatcaaatcatattcaccacataaaagttaggatggctttatcagttttattaaagctgtaaattttccttttaaaacctgccaaagcctatgcttctagaatcctctaacaacaaattaactttttttcccttctttctctgcttagtccttcagccagtctgaccaatgggatactccccatagagcatgtgtgaaaattgtcctgtaattcaagacagcagagtggtatttctgtttttctacctggattcacacttggcgcagtgctgtagctcagaaagaaaaactgcacatctaagaaccacagttccaggcaaggtgttgg

SEQ ID NO: 516814 - DNA, 559 bp, Homo sapiens
tcccacaggtgagcttgttatacaatgtgctagcatgagtttgaaagagcttgctataatattcttgccttacttccaagttgtggatcattttcccaaatgcagatataccataacagggctttgattctctccctggatccccacacatataagtaaggatgctcagaaatagtttgcatttagaaatattattattagtgttttcatctgtgtttctttgctttaatccagtatcgttctttgttggctcttaattttgctttctttattttatgcttttgctttaggcatgtctttttacataaacttctttaaatctgttgtgaaagatagatgggtattaaaaaattaacaaataaaacccacatattatatcaaataccatataattagaagtttataatgctaacttgatgaacttggcttttagctaaaacgtgtctattattagcttamtgcaaatttttataaagtgttttaaggaagaaaattgaatcaagtaattaaagattaattgtttaaaggttttaataattgtgacatttgcactgaactc

SEQ ID NO: 516815 - DNA, 551 bp, Homo sapiens
cttctcttcttcttttagagacagggtctcactctgttgcccaggccggagtgcagtggtacaatcccagctcactgtagcctcsacctcctagactcagatgatcctcctgcctcagcgtccctagtaggtgggcctacaggtatgtgccaccatgcctggctaactttttgtatttttttgtagagacaagttttcgccatgttgaccaggctggtctggattgtttttttctttctttttctttctttcactctttttgttttacttacagaatggcagtgggaaataatctgtaaacatacaggtagaaaaaacattaatataaattttggtaaaaccaaagtcttggttagcacttggatttttaaaaattttcatgtaaataaaatttaatttactgtttaatatacctaatatctgactctggggggaaaccaaaaacacaacttttttcaaaatcatacaatttgggttgcttaattcaaataatgagatgttttgatcttggcagacttgagagggaaaaattttaggaaagacaaccttgg

SEQ ID NO: 516816 - DNA, 551 bp, Homo sapiens
cttctcttcttcttttagagacagggtctcactctgttgcccaggccggagtgcagtggtacaatcccagctcactgtagcctcgacctcctagactcagatgatcctcctgcctcagcgtccctagtaggtgggcctacaggtatgtgccaccatgcctggctaactttttgtatttttttgtagagacaagttttcgccatgttgaccaggctggtctggattgtttttttctttctttttctttctttcactctttttgttttacttacagaatggcagtgggaaataatctgtaaacatacaggtagaaaaaacattaatataaattttggtaaaaccaaagtcttggttagcacttggatttttaaaaattttcatgtaaataaaatttaatttactgtttaatatacctaatatctgaytctggggggaaaccaaaaacacaacttttttcaaaatcatacaatttgggttgcttaattcaaataatgagatgttttgatcttggcagacttgagagggaaaaattttaggaaagacaaccttgg

SEQ ID NO: 516817 - DNA, 643 bp, Homo sapiens
tggctatatttgattggccaaaattctgtgattggcataagtagaggctacggtctgtttacacctccacttattatattcacgttgtgtggaaaaacctttaggccaaacttaaaatgtgtaaagggacatctttaggctgaacttggtttaacagagttatttgttccaactcaacatttgctaggctatgagctaggtgctaggcatccactctcttgtttatttctctgaacatcttgtcaggtacattttattatttttattttacagataaaagcaaaaamcacaacatcctaaccttggagaggttaagtggcttatcaagagctcacatttaatcacttgtgtacaaagtgagtcagaatcaggattttctgattcaaaattccaggaagaaattttattaaaccagagcagagaaattaatattttgacagattccagtcatgaacttgacgaatttgtcctggcttattgtacttaaaaagttatctttttgagaacttgtaagaatcaaggggaaaaaacaataaagacttctatgtaagccctctgatttgaatgagctctgactaaggaaaacatagcttgccagacatcatctggggaggatctggtttggaaagagttagatcacagt

SEQ ID NO: 516818 - DNA, 643 bp, Homo sapiens
tggctatatttgattggccaaaattctgtgattggcataagtagaggctacggtctgtttacacctccacttattatattcacgttgtgtggaaaaacctttaggccaaacttaaaatgtgtaaagggacatctttaggctgaacttggtttaacagagttatttgttccaactcaacatttgctaggctatgagctaggtgctaggcatccactctcttgtttatttctctgaacatcttgtcaggtacattttattatttttattttacagataaaagcaaaaaccacaacwtcctaaccttggagaggttaagtggcttatcaagagctcacatttaatcacttgtgtacaaagtgagtcagaatcaggattttctgattcaaaattccaggaagaaattttattaaaccagagcagagaaattaatattttgacagattccagtcatgaacttgacgaatttgtcctggcttattgtacttaaaaagttatctttttgagaacttgtaagaatcaaggggaaaaaacaataaagacttctatgtaagccctctgatttgaatgagctctgactaaggaaaacatagcttgccagacatcatctggggaggatctggtttggaaagagttagatcacagt

SEQ ID NO: 516819 - DNA, 588 bp, Homo sapiens
ctggctatatttgattggccaaaattctgtgattggcataagtagaggctacggtctgtttacacctccacttattatattcacgttgtgtggaaaaacctttaggccaaacttaaaatgtgtaaagggacatctttaggctgaacttggtttaacagagttatttgttccaactcaacatttgctaggctatgagctaggtgctaggcatccactctcttgtttatttctctgaacatcttgtcaggtacattttattatttttattttacagataaaagcaaaaaccacaacatcctaaccttggagaggttaagtggcttmtcaagagctcacatttaatcacttgtgtacaaagtgagtcagaatcaggattttctgattcaaaattccaggaagaaattttattaaaccagagcagagaaattaatattttgacagattccagtcatgaacttgacgaatttgtcctggcttattgtacttaaaaagttatctttttgagaacttgtaagaatcaaggggaaaaaacaataaagacttctatgtaagccctctgatttgaatgagctctgactaaggaaaaca

SEQ ID NO: 516820 - DNA, 637 bp, Homo sapiens
gttgtattccgaaaagtgttgattcttgttgtagaagacaattcacttgctgaatcctttaaacttgcctagactttattttatgctttgctagtgcatatttgttgaaaatccaagttatttcctaagcctctgtagctttgaaagattcaacctccaaaatttgtgtcttttgcagatcatgttgggacttagtttcaggttgtcttaacatgtgtctagagtgtgtttgatgagagaatgatcctttcttttgaggcatcgtctttttggtgtatcagacacctatcaggactgttagcaaatgctttccactctggcagtccaaactccagtagttcatggagctgctctgtctctccagctctgcttcacatctagtaactctattctatcctgaagcacaaagcaacctaatctgctgtgccattgccatcttgaaagctggcttttagccaggactcacaggagaatatatgtatcaataaatacagcatggttttctgctgtggactcagaggagtgtcccacaacttggacttctatggccccttctgcacagcctcttcatgtttcacaccytatcctgcagattctaggcattttatttgctctgagttatgatctctgcctgcac

SEQ ID NO: 516821 - DNA, 606 bp, Homo sapiens
ctggcggcacttcccaaggaaccaagagaaattgggtataacccagtaaagagaaagaagaataaggtggtcttaggttgtaaattycagaacttctgaaagatttaaatattgaatatctgatctctttgcaagaaccaacaaagatttatgaggagaaagtgcgaaggggacagcatttctaatgagttaatgttctgagccgacccgcctacccccatgaagagaacaaggggccccatttactgctcctcccacctctgccttcggaggagattctgtctctgaccaactagttcaaggactcttgcaatctgaaaaagaaaatgggcagaaaacaactgaacctaaaaatatgaaagaaaagagagggatgcctaaggagaaatggaaaagtaagtagaagagaacaaaacaaaaagagaggccagttaatggagaaagagaaagaaaccgagagaagaaagtacgctgtgggattcaaaatgataagaggatttattttgtgagcttctgcttgtgtgttgagggtggagggtcacacacagatgagaggctcaaacaaaaatgatatgaaagggaattgagaagaagcgggaaaaggag

SEQ ID NO: 516822 - DNA, 606 bp, Homo sapiens
ctggcggcacttcccaaggaaccaagagaaattgggtataacccagtaaagagaaagaagaataaggtggtcttaggttgtaaatttcagaacttctgaaagatttaaatattgaatatcwgatctctttgcaagaaccaacaaagatttatgaggagaaagtgcgaaggggacagcatttctaatgagttaatgttctgagccgacccgcctacccccatgaagagaacaaggggccccatttactgctcctcccacctctgccttcggaggagattctgtctctgaccaactagttcaaggactcttgcaatctgaaaaagaaaatgggcagaaaacaactgaacctaaaaatatgaaagaaaagagagggatgcctaaggagaaatggaaaagtaagtagaagagaacaaaacaaaaagagaggccagttaatggagaaagagaaagaaaccgagagaagaaagtacgctgtgggattcaaaatgataagaggatttattttgtgagcttctgcttgtgtgttgagggtggagggtcacacacagatgagaggctcaaacaaaaatgatatgaaagggaattgagaagaagcgggaaaaggag

SEQ ID NO: 516823 - DNA, 606 bp, Homo sapiens
ctggcggcacttcccaaggaaccaagagaaattgggtataacccagtaaagagaaagaagaataaggtggtcttaggttgtaaatttcagaacttctgaaagatttaaatattgaatatctgatctctttgcaagaaccaacaaagatttatgaggagaaagtgcgaaggggacagcatttctaatgagttaatgttctgagccgacccgcctacccccatgaagagaacaaggggccccatttactgctcctcccacctctgccttcggaggagattctgtctctgaccaactagttcaaggactcttgcaatctgaaaaagaaaatgggcagaaaacaaytgaacctaaaaatatgaaagaaaagagagggatgcctaaggagaaatggaaaagtaagtagaagagaacaaaacaaaaagagaggccagttaatggagaaagagaaagaaaccgagagaagaaagtacgctgtgggattcaaaatgataagaggatttattttgtgagcttctgcttgtgtgttgagggtggagggtcacacacagatgagaggctcaaacaaaaatgatatgaaagggaattgagaagaagcgggaaaaggag

SEQ ID NO: 516824 - DNA, 606 bp, Homo sapiens
ctggcggcacttcccaaggaaccaagagaaattgggtataacccagtaaagagaaagaagaataaggtggtcttaggttgtaaatttcagaacttctgaaagatttaaatattgaatatctgatctctttgcaagaaccaacaaagatttatgaggagaaagtgcgaaggggacagcatttctaatgagttaatgttctgagccgacccgcctacccccatgaagagaacaaggggccccatttactgctcctcccacctctgccttcggaggagattctgtctctgaccaactagttcaaggactcttgcaatctgaaaaagaaaatgggcagaaaacaactgaacctaaaaatatgaaagaaaagagagggatgcctaaggagaaatggaaaagtaagtagaagagaasaaaacaaaaagagaggccagttaatggagaaagagaaagaaaccgagagaagaaagtacgctgtgggattcaaaatgataagaggatttattttgtgagcttctgcttgtgtgttgagggtggagggtcacacacagatgagaggctcaaacaaaaatgatatgaaagggaattgagaagaagcgggaaaaggag

SEQ ID NO: 516825 - DNA, 639 bp, Homo sapiens
ccgttttaaatgaccgtccttggttgggttcccctgggatgtgggctctgagtgcagaccagcttgcgggaagttcactggtcacaccctgggcatcagctctgaggggaagagaagactcagggctagtagagggagaacttcaaggtcaatatccttgcagcagaggccacagtggattccacggggagctctggaactacagtggctckttagagtgttccaaactcaggcaagtgcccgggacttgaacactgctctgccctgctttcatccccaatgtcacctaacatggcctgcccctggggagagggtgacttagagtgagccaaccctttacagcccaggactgctttctacactgtgcaccagctgccgcagtgctccttagtggactcaggggtgctgtaggactcagtaggagctactagctcaaaacagttcgccacttctacataagattgcagttttccttccaaaaccaggttttcagtagtcactgtgattaaaaagcaagtaacatgtgaaactcaaagtaaaatagaaaacaagggtggtgatgtccagtcttccagagtttgaaaagttgtgtagtgcctagtgggacttgaatacttattaagctgtttgagctactta

SEQ ID NO: 516826 - DNA, 477 bp, Homo sapiens
cctttactctgagtcacttggcttctaaggaaatgcaacgtaccatttttaatgagttgcaaactgcctggctgccccaaccccctttagtctgcccttcaccattttgaagtaattctagagaatataaactatgaaaaatatacatttctttcaagtagctgctatttgcaccaagcattgtgataggcaatagaaatattgctactcctaattccaaaaacatatgtcatttatagtgtgtgrattaatatttttacatactttaatccagttttccttaaaacaaccatatggggcaggcactcttcttgtctccattttagcgataaaataaagcacagaaagttaattgctcaaggtgctactaagtggtggagctgaatctgcacccaggcagcattactccataatctatggagtgattaaactattataattagtagcaaagtcattgtccttgttgggcttgcaggt

SEQ ID NO: 516827 - DNA, 477 bp, Homo sapiens
cctttactctgagtcacttggcttctaaggaaatgcaacgtaccatttttaatgagttgcaaactgcctggctgccccaaccccctttagtctgcccttcaccattttgaagtaattctagagaatataaactatgaaaaatatacatttctttcaagtagctgctatttgcaccaagcattgtgataggcaatagaaatattgctactcctaattccaaaaacatatgtcatttatagtgtgtgaattaatatttttacatactttaatccagttttccttaaaacaaccatatggggcaggcactcttcttgtctccattttagcrataaaataaagcacagaaagttaattgctcaaggtgctactaagtggtggagctgaatctgcacccaggcagcattactccataatctatggagtgattaaactattataattagtagcaaagtcattgtccttgttgggcttgcaggt

SEQ ID NO: 516828 - DNA, 477 bp, Homo sapiens
cctttactctgagtcacttggcttctaaggaaatgcaacgtaccatttttaatgagttgcaaactgcctggctgccccaaccccctttagtctgcccttcaccattttgaagtaattctagagaatataaactatgaaaaatatacatttctttcaagtagctgctatttgcaccaagcattgtgataggcaatagaaatattgctactcctaattccaaaaacatatgtcatttatagtgtgtgaattaatatttttacatactttaatccagttttccttaaaacaaccatatggggcaggcactcttcttgtctccattttagcgataaaataaagcacagaaagttaattgctcaaggtgctactaagtggtggagctgaatctgcacccaggcagcattactccataatctatggagtgattaaactattakaattagtagcaaagtcattgtccttgttgggcttgcaggt

SEQ ID NO: 516829 - DNA, 546 bp, Homo sapiens
agctccagcccctgggaagcaccctcttccaagcacgaggtcacctattcaggctggggttaggatctgcacaaaaccaaaattccaaacctttttctgtgcttgttgaacaagcccctcatcaagttcagagctatttcttctactccccagcacctacgaagttttattgaaaatcagtgcaggcaaatattaggaattcttctgcctgagcttcactcctgggtgggatctgtgtcagatgatgtaatgtgaggtctggggtgaatctgggatccgccacttcccagccctttgaccttgggcacaatgctcaccctccctgagcctcctcctatcactggtagttagcgcttctgccaggagaggctatgagaatggagtaagaaagattaatactgtcaaaagagtctagctgtgggctaagcatggcggctcatgcctgtaatcctagcactttggaaggtcaaggagagtgaattgcttgagctcaggagtttgagtccrgcctaggcaacgtggcgaaactccagctttaccaaaaga

SEQ ID NO: 516830 - DNA, 336 bp, Homo sapiens
atggaacaatttaaatgatcactttggcttctctgatgtcctctaggcatctcaagctcagcatatcccaagccaaacttaatatccttcctcyaaaccttttctgtctccaggattccccacctcataaacagcaccgtcatgttcccagttgctaagtcggaatttctggtttttctttacccactcgcatgtccatttttctatcatgtttattttacttcatcttttatgtctaggtttctgggaaaggatatagcagtcccttcaggccaggataggtccctgtaagatgcgctcatagaacccctatttctcccttggagagtcttcccc

SEQ ID NO: 516831 - DNA, 406 bp, Homo sapiens
cacacagcctcctgcatgtttcttgtcaggtcacctgcctggatgctgtgtccccagagtgtgctgaggacatggggagtgagctagggccaaggcagggatggtgaagggccaagcacggccgcctccctgctgggatctttcctgaggtcaacctaccctcacgcagtggacacggtcactrtgggatgtcccagggagtgtgggagatttgaacagggagaggaggcttgaggggacctagagctgggcctcccacagacagggtgctggtgaactgggctcctgtgcagcttctgcagagccaggagccccttgcagctcctcagggcccactatccactcctcatccatgacactctcctgaccacagccagtgggccaagactttttcgctgctctacct

SEQ ID NO: 516832 - DNA, 607 bp, Homo sapiens
gcagtagcacctctcagtgcttgtgttcaagaaacccttattttacttaataatggtctcgaagcacaagagtagtgatgctggcatactgttataattgttctcttttattatcagttattgttattaatttcttactgcggctaattaatatattaaactttatcatatgtatgtatgaaaaaaaaaccagccgatataaggttgagtaccattggtggtttcaggcactcactgggggtttgaaacacatcccccatagataacggagggctactgtatactaggagcccacgtgtctctgtgcctttgcacatgctgttgtttttaccactagcaccctttctctatatttctctgcccagataatgcctacaaatctagctatgcttctcaatctctttgtgcttgtttcttcatgtgtaaaatgrgtaagaacatcaacccatttaatccttacaaccatcaatgaggtaggtattgcatattaaacacttagaataatgtctagcatgtgtaggcaaacagtaagtgtttgctgccctgattacatgccagtttaacaggtggggaaaccagaaaagcaactttcccaatatcaaatgtc

SEQ ID NO: 516833 - DNA, 480 bp, Homo sapiens
atatatttactaattttaatttcttttatgtgagctgtttgtttatgctcttggaatttcagtgtttttcttatcaattygtatgaacattttacataataaagatgcaaggcctttggctgtcgcattttctgaaaatattttcccatgttgtctgagtttgaattctggttactattatagtattttgctaacatacgtttttaatatttatgtagtcagatttgtcatttttattccccttgtgatttcttcttatccttctaaatgcacaaaatcgttgccccttcagaagtactactgacatttggatcattcttttaattttctatttgtaagttaactctttaatccatgttatttattttagtgtatgtcaaacagttaatcaattatcccaccagcatttgctaaataattctgtccttccctacttgtttcatgtctctaccaaatacttaagtgtctcatacatacgaa

SEQ ID NO: 516834 - DNA, 657 bp, Homo sapiens
ctttgccatgatctccttgcagctttgaactaagtcacatcaggccaaggcacaaggaataacatatagactttggggcatcagggaaatggcttccttgcctcagaaagctcaatatcacatggtttatggcattttgaatagagaagattgagggcaacgttttgatctttttctcattaggcttacctgaaacatagatggtattracgccataagggctgttttaaatatgctttcagagggatatggctgtgtccagccatccctccaaccactgcctggtggcctgaacatcagaagtaaggctctgtccactctatatagtttgttcaggtcttttgatactactcgagtctatacaaggtacagcccccagttcccagagcgaaattgtttctccaggcgaaaacgggctaatgtccaactttgattctaaataagtgagatcgtagagacctgaccagggctgtgaggaccactctcatttctatccatcttgacaacagtcactcacgaggcatttctgaattcctgacataactatcgcacgaggttaactgctataaaagtcaatgaaataagtaaagtcactccctactgtaagaaaaaaacaacaacaaactcattaatttctcaatttaaagggaaattttt

SEQ ID NO: 516835 - DNA, 657 bp, Homo sapiens
ctttgccatgatctccttgcagctttgaactaagtcacatcaggccaaggcacaaggaataacatatagactttggggcatcagggaaatggcttccttgcctcagaaagctcaatatcacatggtttatggcattttgaatagagaagattgagggcaacgttttgatctttttctcattaggcttacctgaaacatagatggtattaacgccataagggctgttttaaatatgctttcagagggatatggctgtgtccagccatccctccaaccactgcctggtggcctgaacatcagaagtaaggctctgtccactctatatagtttgttcaggtcttttgatactactcgagtctatacaaggtacagcccccagttcccagagcgaaattgtttctccaggcgaaaacgggctaatgtccaactttgattctaaataagtgagatcgtagagacctgaccagggctgtgaggaccactctcatttctatccatcttgacaacagtcactcacgaggcatttctgaattcctgacataactatcgcacgaggttaactgctataaaagtcaatgaartaagtaaagtcactccctactgtaagaaaaaaacaacaacaaactcattaatttctcaatttaaagggaaattttt

SEQ ID NO: 516836 - DNA, 631 bp, Homo sapiens
gctgcagagcactttgaaagcgagtgacctgcctaaggtcatacaaatagttttgggcaaaaaagaaagaagctgtcccctgactcccgactagttttcactaggccacactgtgattctttataggttcctgctgaaaaactgtaaaactgtcatattactacagtggaacaatagagaaataagtcgtaacagaaaaacaaccattgtcacggataagttaaatttcattgggcagtcacccacattaaagtcctttattcacaccttatactcacaggcaacatgaaattctacaatctctataaagtaaccattctacatattttttacaaattgttcagaaggacatccaatattaagaatagtttcaatcacattataaagagtaaaattcagataaaaagctattaggcatggtcagagattttaatggcttaagactgacgttaactaaagaaaaactaagagaagaaagaagccatacttatacatgatttacaatatacagcatcataccttgacaaaggaaatttcttgttctagatctatttacackaaacctctgacatctgtgtagcttaacacatttgttaaatagctgaagctctccctctagaaaaataattgt

SEQ ID NO: 516837 - DNA, 540 bp, Homo sapiens
gcttttttccccctgaactcttagcaaatgatctaagggcttaaacacattaaaggccacaatttcaacttctggaatcaatagggcaaaggaatgtgggcatattcatttaaatatgaatttgctgactccattcttactctcttgggttcctccataagcccagaccttacactaaaaggcagctacttctcacactgcagcaggattttgagaaccatcgccctttgtcatcttcaccctgacccttctcatcattttttctgattctcagaacctcctggcatttatttccaattcagttctgtttcctttcaccaactcrggttagttgaggctggaccctagcatgcctgttttgtcatactctgatgaaaagcaaattaaattcttggatggtaaactcttttcttaaacttctgtctggttctttggaaaaaaattaaaaattatatttctgttaatatcaaccaaaatattgaatccatctcaggatcctacatcccttgaccaacaagctgataaaactgcctagctcat

SEQ ID NO: 516838 - DNA, 569 bp, Homo sapiens
aaacaactaatatttattgagctcttattatgtgttaggcattttacatgtcttttctcagttttctcaaaataaccccaaaaaaaaagtagtatgttcttttcatggaagagaaagaaacaaagtaacttcactaaggttttacaactatttaagtggcagagctgtgatctgaacccaggccatttcattctcggcatcctgggatcctaaccatgtagctattctgactattgtccgtaacacctaggtggagattcattgtgatctctactgaaaactggactttggaggacaacgcaatctcacatmtaggaaggctggggagactgctggtttccagcatagggagagatgtcaggagacccagaatctggtcctggcttttgttatccacttgctaagtgaccctgggtaggctgtatctttctgcacttcaaattttccaactatcaaaataggagaatccctgcctctttctttaatggggaaaaggaactgaagagaatgaatatatttaaacattttgagaaaaagatactttgagataagggtgactgtactgcggg

SEQ ID NO: 516839 - DNA, 569 bp, Homo sapiens
aaacaactaatatttattgagctcttattatgtgttaggcattttacatgtcttttctcagttttctcaaaataaccccaaaaaaaaagtagtatgttcttttcatggaagagaaagaaacaaagtaacttcactaaggttttacaactatttaagtggcagagctgtgatctgaacccaggccatttcattctcggcatcctgggatcctaaccatgtagctattctgactattgtccgtaacacctaggtggagattcattgtgatctctactgaaaactggactttggaggacaacgcaatctcacatataggaaggctggggagactgctggtttccagcayagggagagatgtcaggagacccagaatctggtcctggcttttgttatccacttgctaagtgaccctgggtaggctgtatctttctgcacttcaaattttccaactatcaaaataggagaatccctgcctctttctttaatggggaaaaggaactgaagagaatgaatatatttaaacattttgagaaaaagatactttgagataagggtgactgtactgcggg

SEQ ID NO: 516840 - DNA, 641 bp, Homo sapiens
agcaagcatccactcctgcccctggtgttcagtgccagcctgatggtctccagctaatgttctctgtgcacatgcaacatttgagcccagcaggagctgagcacataccacagaccaccatgttcacacgtttgctcttgctcctccctcccctcagaagttcccacccttctctcttctggttgaattcctactctgacctcaagcctycttctcagagccttctgccttttctattattcttgtcatatttttcctttattgtagttacatgtatgctggacacatcttcttcaatgaaatgtagactccttgcatggagaaagtgtctccttcctcctctttgagtccctgtggccctagcacaggctgagttgaatcgtaactaaagtgctccaggtctcctcatcatttcccctgctgtcttctatttttatcccgtcacctgtaggaactgtgtcggaagaactaactgctagagtttctccaaagtgtcgcggccagtggcagtccagtagctgtcttgagtccatcctgactcttcgcggcccatccccaagtccaggtcacggtcatttctcacctaaaaggttgcaattgcttctttattgctctccccactttcaccgatgctgacccaa

SEQ ID NO: 516841 - DNA, 598 bp, Homo sapiens
aagccactggacacttcttcttttttgttttttgcttttttgtttgttttgttttgttttgttttttagatggagtcttgctctgtcaccaggctggagtgcagtggcgcaacctcagctctctgtaacctctacctcccaggttcaagtgattctcctgcctcagcctcccgagtagctgggattacaggcgtgtgccaccacacccggctaatttttttgtattattagtagagatgggatttcaccatgtgggccaagatggtctcaatctcttgaccttgggatccaccctcctcggcctctcaaagtgctggattacaggtgtgagccactgtgcccagcctggacatttcttaacttatatactaagccatgtccttcctttgactaacgccctttcttcctggctcttaccaaatttttaaattatgcaatttgtagatttgcttggtttttgtctgtttcctccrcgtgcctgtaagctctgtgggggcaagaaccgtctttgtgtggctcactgaatccccggcctctacatggcacttggagtacatagatgctcccagacctttgttgaatgaatagattaaaagtg

SEQ ID NO: 516842 - DNA, 598 bp, Homo sapiens
aagccactggacacttcttcttttttgttttttgcttttttgtttgttttgttttgttttgttttttagatggagtcttgctctgtcaccaggctggagtgcagtggcgcaacctcagctctctgtaacctctacctcccaggttcaagtgattctcctgcctcagcctcccgagtagctgggattacaggcgtgtgccaccacacccggctaatttttttgtattattagtagagatgggatttcaccatgtgggccaagatggtctcaatctcttgaccttgggatccaccctcctcggcctctcaaagtgctggattacaggtgtgagccactgtgcccagcctggacatttcttaacttatatactaagccatgtccttcctttgactaacgccctttcttcctggctcttaccaaatttttaaattatgcaatttgtagatttgcttggtttttgtctgtttcctccgcgtgcctgtaagctctgtgggggcaagaaccgtctytgtgtggctcactgaatccccggcctctacatggcacttggagtacatagatgctcccagacctttgttgaatgaatagattaaaagtg

SEQ ID NO: 516843 - DNA, 611 bp, Homo sapiens
gcctcccaaagtgctgggattacaggcgtgagccaccatgcctagctgagccttggctttaattgtgctctgaaaaactcaaggcactkctatatttgtcttctctcacttgggcaagagattgggtagggcacacagagaacatgattcccatttcacaactggaagaaccactgggattggatctttgcttacaatgtcctctggaaactcacagcagatgctgagcttcactgaaggaagacttcattgttcaaaaaagaaagcgtatagtttctttatattgattcatgtactgggggtggtggtggggcagtgttaatgtctttaatcaagatgggaacatcatctgagacctcatgatgggcagggccaacgtgcttccttatcaatccagagaggcccatggtttatggcatgagaatgggtctttgtagatgcccaagaacaggaagaacttgatatctctgggtcaaagtgacccttcttttcctaaattctaagcctttcctatgtggaggaaattgaggctaaagtaaaatcctttatagcatgtgtcttagccagcattctgagttttggtaatcactagtctcacggaaaaatgacct

SEQ ID NO: 516844 - DNA, 611 bp, Homo sapiens
gcctcccaaagtgctgggattacaggcgtgagccaccatgcctagctgagccttggctttaattgtgctctgaaaaactcaaggcactgctatatttgtcttctctcacttgggcaagagaytgggtagggcacacagagaacatgattcccatttcacaactggaagaaccactgggattggatctttgcttacaatgtcctctggaaactcacagcagatgctgagcttcactgaaggaagacttcattgttcaaaaaagaaagcgtatagtttctttatattgattcatgtactgggggtggtggtggggcagtgttaatgtctttaatcaagatgggaacatcatctgagacctcatgatgggcagggccaacgtgcttccttatcaatccagagaggcccatggtttatggcatgagaatgggtctttgtagatgcccaagaacaggaagaacttgatatctctgggtcaaagtgacccttcttttcctaaattctaagcctttcctatgtggaggaaattgaggctaaagtaaaatcctttatagcatgtgtcttagccagcattctgagttttggtaatcactagtctcacggaaaaatgacct

SEQ ID NO: 516845 - DNA, 505 bp, Homo sapiens
tgtggtgatatcttgcttggctttggtgctctagtttgctttatgtttttcctgttgacctgtttatcgttgataatttcatcatagttgctgctggcagcctccaggtttgtgtatcctgcttggtttctgcgtgtagcaattacctgatataatctgggcttctaatattcctggagagcataatgcatcagcaatagctattctgaaaagtaataacataaacaggaatgttttctacccccatcttttctagacaagccttccatttagtggaatattttaaaatatcccatctttagcagacaagataaagcaaaatgtgatattctggtgtgatggtgacagaggactcttgaattatctcaatctagccaattcagggcatttacagargttgttgtaggaaatgtgattttcttggagaagcattgtgaagacaacttgcagaaaaataaataaatagataaataaaaaacacaaaacaaaaaaccaccaaatttta

SEQ ID NO: 516846 - DNA, 359 bp, Homo sapiens
tgcttctctaggattattaaaaaaagcaggaagggggtgacttgcactgtaaggtttcttggcatctgaggacgaaattctgctattacaatagaaggatttttacaatggctaagaaaaaaaatattttgaatatggaagaamgtgcctaaagtgagtattctttttaaacagttgagttgtgtttctagtttgtatctttggttaatcctccaagaatctctgatcagggccagcactgattaggatcttggtcctgggagcatcttggttcatttggctgtgctcatggccccacggtgggaagaccaagttctctttttctattcttctgcaactggggctcaacatccatttaa

SEQ ID NO: 516847 - DNA, 611 bp, Homo sapiens
gctcgaggctgtaccctgccaagccacaggggtggaacgtcccgaggctgtgggagcccacccgttgcatcagtgtgccctggatgtgagacatggagccgaaggagattattctggagctttaggatttaacgactacctgctgggtttcagacttgcatgggacctatagccccattggccaatttctccccttggaatgacagcatttacccaatgcctgtactgccattgtatcttggaagcaactaacttgttttttattttacaggcttataggcaggagggacttgccttgtgtcagatgagacttttgacttggacatttgagttaatgctggaatgagctaagactttgggggactgttcgggaggcatgattgtgttttgaaaygtgagaagaacatgacttttgggaggggccggggcagaatgagatggtttcgctctgtgtccccactcaaatctcatgttgaacattgggattatatattatatattatattaaatatatattatattatatacattatatatataaagctcagaaggctttttgctatttatatgggataattataaattatttcataagaatcaaggaattaagg

SEQ ID NO: 516848 - DNA, 680 bp, Homo sapiens
agatatgagaatgtcagtttccagagctgcttgagagatataattaatatgatcagttaccagttacatgacagatgtgtgtggttaagtcaagaccaatctcaagtactattcacttctctayattttatattcttatacattaaaattttacagtacataaatgaggtaaaaaacaaaatacccccaagtagaactgacaaaatactgatttaattaagtgaaatagtttcagagatggtaatggataaatacattacaagtttatggcataaataagtcacacatttctaaaattcaccacatatggatacaattttaaaatactcttctaaaactattgatttttttgttgttgttgaacatcttcactttaatgtcttagactgcaaataaaactattacttataccctcacaaaaaatctagtccacttaaaaaaaaacttgaaaaaatatacattccagttaaaattttagatgtcatttttttaaagttgatttgcattaataataattttctcaaaaaaccctaaagattgaattccattttttgtgtgtgattggtttctttacattttggaaaaaataatttgagcaaaagaatttacactgcttgttgggggacccatcaggtctttgaagagtccagtccctcttatgggaatagcctcacacttga

SEQ ID NO: 516849 - DNA, 680 bp, Homo sapiens
agatatgagaatgtcagtttccagagctgcttgagagatataattaatatgatcagttaccagttacatgacagatgtgtgtggttaagtcaagaccaatctcaagtactattcacttctctatattttatattcttatacattaaaattttacagtacataaatgaggtaaaaaacaaaatacccccaagtagaactgacaaaatactgatttaattaagtgaaatagtttcagagatggtaatggataaatacattacaagtttatggcataaataagtcacacatttctaaaattcaccacatatggatacaattttaaaatactcttctaaaactattgatttttttgttgttgttgaacatcttcactttaatgtcttagactgmaaataaaactattacttataccctcacaaaaaatctagtccacttaaaaaaaaacttgaaaaaatatacattccagttaaaattttagatgtcatttttttaaagttgatttgcattaataataattttctcaaaaaaccctaaagattgaattccattttttgtgtgtgattggtttctttacattttggaaaaaataatttgagcaaaagaatttacactgcttgttgggggacccatcaggtctttgaagagtccagtccctcttatgggaatagcctcacacttga

SEQ ID NO: 516850 - DNA, 639 bp, Homo sapiens
aaaatattgttataacatcttacattggttaaaaaaaataaaacccttttgccttttcaaagctcttcctagacataattacattttgtttttcacaatgtccttacatgtaggggagagcagcatgtttatatacattttcccggtaagatttactcagtcatagaaagaataagtcacttgcccaaaggattgaattcacatgagcctccttttyaaaataccagagacttttctcaggtcagttctctttctagttcactgcaaatggatgtggcacttaatgtttggtatatatcagaatcacctgagacgttgtttagacacagatacaggctccactccagccatagataatcgggatctctggtggtcagagccttggtacatgaattattgcacagagatcgaatgaggtcagtaaggcccacagctctaatagacacccctgcatcagaatcacgtgatattcttgttaagaatgctggttcctgcacctaactaaactttcttaaccagacttactgggttgatttgggaccaaagaaactgtgcttttgaaagtttatcaggtgatggatatacaagttttagaaccactattctatgacttcatttttacactgttctactttttca

SEQ ID NO: 516851 - DNA, 639 bp, Homo sapiens
aaaatattgttataacatcttacattggttaaaaaaaataaaacccttttgccttttcaaagctcttcctagacataattacattttgtttttcacaatgtccttacatgtaggggagagcagcatgtttatatacattttcccggtaagatttactcagtcatagaaagaataagtcacttgcccaaaggattgaattcacatgagcctccttttcaaaataccagagacttttctcaggtcagttctctttctagttcactgcaaatggatgtggcacttaatgtttggtatatatcagaatcacctgagrcgttgtttagacacagatacaggctccactccagccatagataatcgggatctctggtggtcagagccttggtacatgaattattgcacagagatcgaatgaggtcagtaaggcccacagctctaatagacacccctgcatcagaatcacgtgatattcttgttaagaatgctggttcctgcacctaactaaactttcttaaccagacttactgggttgatttgggaccaaagaaactgtgcttttgaaagtttatcaggtgatggatatacaagttttagaaccactattctatgacttcatttttacactgttctactttttca

SEQ ID NO: 516852 - DNA, 591 bp, Homo sapiens
ctgccattgcctactctgaccatgatttattttccccaggtcatgaccattgttgcagtaagactgacacctgtcatttttgctgcctgtccatcaagacaggccactttcaaaaacttttcaggtgttctttctagaaatagctaagcaggcaagataaayacaaatgttctaagagttaactttactatctgtattgtagcttgcaaggcaaggttaatctcactgtcatgtctgctttctattttgatagatgttgtggtggtttctatatccccatacatgggtgctgcatcatgagaatttagtttatggaattcgattctacttgcttggcaagtagaataagagaaaaaattattcaccatgtcgtgtttaaatattttgcttgatgcatagtgtcgtataagacccccactaacctcagcagggatggcaccatatttgagaggccaaagaagagactcagagccagtaaacaagatatagggttctattagcgggtaacttacagggacggtctagtgacagcaggatggagaggagaaccgtaaatgcttacaaaaagcattcagtttatatagcattttc

SEQ ID NO: 516853 - DNA, 602 bp, Homo sapiens
ccattgcctactctgaccatgatttattttccccaggtcatgaccattgttgcagtaagactgacacctgtcatttttgctgcctgtccatcaagacaggccactttcaaaaacttttcaggtgttctttctagaaatagctaagcaggcaagataaatacaaatgttctaagagttaactttactatctgtattgtagcttgcaaggcaaggttaatctcactgtcatgtctgctttctattttgatagatgytgtggtggtttctatatccccatacatgggtgctgcatcatgagaatttagtttatggaattcgattctacttgcttggcaagtagaataagagaaaaaattattcaccatgtcgtgtttaaatattttgcttgatgcatagtgtcgtataagacccccactaacctcagcagggatggcaccatatttgagaggccaaagaagagactcagagccagtaaacaagatatagggttctattagcgggtaacttacagggacggtctagtgacagcaggatggagaggagaaccgtaaatgcttacaaaaagcattcagtttatatagcattttcatttagcaccctca

SEQ ID NO: 516854 - DNA, 259 bp, Homo sapiens
tgcgtccacaggacttttgctgagaggcagtggaggagtgagaggaccctcttcacaatgcggaagtctccctaactgatgatccagccttaaatctgtgaaactagatgagaaatagaactagcwtgggtaatttaataacttttttattttttctgacgcctattcccacagatcatgatgtgcagacattaaaaaacaactttgatgaggcagtggcaggaaaaaagtggagaaaaattaaaagattacatgctcc

SEQ ID NO: 516855 - DNA, 690 bp, Homo sapiens
ctgggctttttgtgatatttgaagtgtccgtgtgacatagccatgaaagaaccccaatttgtaccaccatataataaaaataaactattagctagatttagttgttttaatacatgttttgttaggcattttaaaaatatatagatctgtcttcattgctagttaccgatatgacacaatatatgcactttttcttggtaaagttttatttaggaacagatggttggttgaggtgggaaataagagacacagagcatgatgaccaagatcttaagaggataacagcttgaatcacaattacagggcattctatccagcasaaacgtgttggttttctttttaaggtttctgctaactttgagtgtaaggaggatttctttccaatttactgtcaaagccagagaggaaaggattctgctgggaagtggctattttagaacagtaaattgggatgtcttaggaatcttcttagatgcatgcttcaggaacatgatgcaggattctagtgggtttggagtgagaatcctttaattgatagtaagctctttaggtgctgagactgaaagtagggccaatgacactttgctcttaaaaaagctcaaagtggagttatgacgttttcaaatacagtgactgatcccagtgaaatctttgggctaccaagtgagcttcacactcaacacttaataa

SEQ ID NO: 516856 - DNA, 533 bp, Homo sapiens
ttagcaaccatttcaaattatttagtatacttaacagtcatttgtttggggttaggggagggtttctttggatggtgtagccatgaaagcctcygctgggttagcttagtggtcagctaatgattgaaacgacattttcttgaatgcctagaaccaataagtttcccaatcttttgctaagggactctgtgttgggcatgacttcaagacccaaccaggcaattgagaagtgtcctttattcttcaccttctgcttgcaccaagtctcaaagtaagccaaaagtgagaacttagtgccttctctgttacttcttcatatgcagaaagtcctgggcatgcacgcagtcatacaaatacatatgggcttgtttccaggaatatctctgagcttgctcaaagacaatatgaacatgttatttcccaactttcaccagcaagtgttttgaatagcctgttgttgtccccaactattatctattgtcccaggaaaccagaaatgtaaacaatttattctcattatttttgaaatatat

SEQ ID NO: 516857 - DNA, 527 bp, Homo sapiens
cctcaagtactgtgaaacaggcaggagccactgttcctggccaatgtttatcaattaattacctttgtaaagatgcattgtagaatgtttgccagggatcaatattaggtttaaagcttggtgtctaggttgtctatttactagtkgtcaaaccttggatttattactttacctctccatagatctttttcaaatgagaataaatagccttatatgttttgagggaaccaaaattgttcattatgtaaatgatatagaggagtgtatacaataaagatctaatatatgttagctaatactatgtttgagaaatggagctataaatagaattttttctttatactctattataatttattaataattataaaccatttttatagggcaaagacaatttttagaaattaagatgtagcaaacacaagaacacagtcacaaaacagtatattaaataaattatgtctaaaagcttcacatcataaaagacaggatagattgaaattgcatccaattaaaagatcaataga

SEQ ID NO: 516858 - DNA, 563 bp, Homo sapiens
taaggagcagtgctaaagatgcttgttagaaaaacaaattataatcagtgcaaaaacttaatggagtgggaaataaatagagcaaaaagcatttcctcaaaaatatctttagataatttttaaaggaatcaggatttcagtagaatttttttccggtacagacactaaacaggcttttaatgacagttgcaatattcaatgatgatcctaaacatgctgtgaagataaattccttatcccataaaaagttcaattctccctgtgctggagcttttctgatgatattacactacarcccaacatctatgcacagagttcagtagctcgaatatgaatactattgcacttattaaaaaatagtgacagttattacaaaggaatatgttttaaacaatactttggatgttgcctatagggtattcagaacaatttcctgctggtttctggtttcaggacaatttcctggaggcttcaattgttttagcactttccagattccatttctttgggcaaagggagaaatgggggagaaaaatggtacttattacaagagcaatcttgaa

SEQ ID NO: 516859 - DNA, 490 bp, Homo sapiens
gtttctctaacaaatggaagagaatacatacagaaaaaatgaatcatatagctactaaagtataatagaattatagtctgagtctatacagcygttataggaatacagaagcctattatttaagctgtttccataggatgaattattcttcctcacctattctactggatctgtaaggcagttcacatcttccacagtcaagctaggcttagacctcagaggacagctttagtctcttcatttgctatgtgaagtactgtaggattccttgtggacatgaagaagataatgggactaccagggagaatgctgagtggtaaaattaatgttacttttctttttatagttaaccttttgttatggactaagttcaaagaaaagtaaaccaaaaggcattacttgaattccaggcttctctaattattatagctatgttgcttgatataaaattactaaaattctttgagcctcaacatcccatttattaaat

SEQ ID NO: 516860 - DNA, 585 bp, Homo sapiens
ctgtttgtgcactcaattcattaaaaacaatcagaggtctccactgacctgggagctttagggatagatatcatcagtattggaagacttctcagcttacagtggaaagtactgaaaaattaactcagaagcaactacctacaagcaagtgttctgtgataacaggtgcctctttgtgtaggaaaagagacacaaactgaccctataggggcaagggttggggacagagtgcccagcatgtaggtctttcagaaggcacaggactgaggtcgctcagggaagaaattacagatcacttcctttgttatttatgcctaaaatagcttcttgtgaccttctaaaactcaagaggatacaatttaagcccaacatggaaatgtccaatatattggcgttgttagataatgtactcagtgggtaaaatagtgaagcattctctttaagcaagcactcagcactcatgtgtctcctgtcactagatacactcagctacatgcctgtattttaatcagagatttacatacaaccaaagattgcagatggtcttaggttcttatcwtattctcccaagaaatgttagcaaga

SEQ ID NO: 516861 - DNA, 638 bp, Homo sapiens
aactcttccacctgactttcttcaccttggacaataggagacttgataactagacctgttgctcaaagtggaacagcatatggtagttagttaaatccattggcacttagaaaaactttaattcaagttcttatcattttaaacattctcatgattagctcagctgttacttcagctaatttattttattgattctgcacagagctccaaatggccctgtggaagtttacattagaatagttcttatcccaaatcatttgaagagttagaacatggggrtcgagcccttggagtggaggattgaaagacaaggagatgggaatagtctgtttctgagaaacacaatctgtaccatatttaagataaaatataatgtattaaaaagttgctctatcccaaagtcagttttgtcactttgcgttttttagaaaacatattctaatttcaaataggatcatttctgtgtctggcagctaattttaaatggttccccttttcagctgacattaagagccaattgagataaatttatttttccataaaagtaatatatgtcaggactagatttcctaagccaagcccttcaggcaatcataatcattttgtaaactgtggataatgtcatctttgagaaaaaa

SEQ ID NO: 516862 - DNA, 638 bp, Homo sapiens
aactcttccacctgactttcttcaccttggacaataggagacttgataactagacctgttgctcaaagtggaacagcatatggtagttagttaaatccattggcacttagaaaaactttaattcaagttcttatcattttaaacattctcatgattagctcagctgttacttcagctaatttattttattgattctgcacagagctccaaatggccctgtggaagtttacattagaatagttcttatcccaaatcatttgaagagttagaacatggggatcgagcccttggagtggaggattgawagacaaggagatgggaatagtctgtttctgagaaacacaatctgtaccatatttaagataaaatataatgtattaaaaagttgctctatcccaaagtcagttttgtcactttgcgttttttagaaaacatattctaatttcaaataggatcatttctgtgtctggcagctaattttaaatggttccccttttcagctgacattaagagccaattgagataaatttatttttccataaaagtaatatatgtcaggactagatttcctaagccaagcccttcaggcaatcataatcattttgtaaactgtggataatgtcatctttgagaaaaaa

SEQ ID NO: 516863 - DNA, 579 bp, Homo sapiens
ttttcctatgtctctcaaatcatccatcatcctcaaagccttaaaatccctttgctctgatgggggattgcttccaagatggccaaatagaaacagctctggtctgcagctcacagcgagatcgaaacagaagttgggtgatttctgcatttccaactgaggtacctggttcatctcactaggagtggttggcagtggatgcagcccatggagggtaagctgaatcagggcagggcatcacctcacccaggaagtgcaaggggtcaggggatttccctttcctagccaagggaagcagtgacagactgtacctggataaaaggtacactcctaaccaaatactgygcttttcccatggtcttagcaacaggcagaccaggagataccctcccgtgtctggctcagcaggtcccatgcccacggagccttgttcactgctagtgcagccgtctgagatctacctgcgacactgaggcttgatggggggagggggcatccaacattgctgagggttgagtagctcacagtgtaaacaaagtgactgggaatcttgaacagggtggagccacggcagctcag

SEQ ID NO: 516864 - DNA, 579 bp, Homo sapiens
ttttcctatgtctctcaaatcatccatcatcctcaaagccttaaaatccctttgctctgatgggggattgcttccaagatggccaaatagaaacagctctggtctgcagctcacagcgagatcgaaacagaagttgggtgatttctgcatttccaactgaggtacctggttcatctcactaggagtggttggcagtggatgcagcccatggagggtaagctgaatcagggcagggcatcacctcacccaggaagtgcaaggggtcaggggatttccctttcctagccaagggaagcagtgacagactgtacctggataaaaggtacactcctaaccaaatactgcgcttttcccatggtcttagcaacaggcagaccaggagataccctcccgtgtctggctcagcaggtcccatgcccacggagccttgttcactgctagtgcagccgtctgagatctacctgcgacactgaggcttgatggggggagggggcatccaacattgctgagggttgagtagctcacagtgtaaacaaagtgactgggaakcttgaacagggtggagccacggcagctcag

SEQ ID NO: 516865 - DNA, 572 bp, Homo sapiens
acacttcttccattatcactgccctttcatttgctaacatggaaagtataggatgaatactcatttaggaaagctgacttagagtgggaatgtgctcaaaggtagcatcatttaatttatattttattcattcagttgtgaggtgccaaactgcccagtttattttttagagggagttaatgattaatagtagcttattaaatttggaaacaacataatcarctacagatttttttaaaagtggctgtaatttcctatctaccttcagatacataaaatagacaatattactttaatttttaaaggagaggtgttctttcttaaccagcatggcacatgtatacatatgtaactaacctgcacattgtgcacatgtaccctaaaacttaaagtataataataataataataataaaaagaataaaagaaaaaataatgaagacaaaaaaaaaggttcactgaaaaatatttcatacaaaaaaaaaaaaagtctgtgaaagccaaggaggctttcaaattattttaaagaccacttaggtgaaatttgcaatacacttttaaaatatgccact

SEQ ID NO: 516866 - DNA, 565 bp, Homo sapiens
ccaaatgttaaacatggtaataatagtagtaataccttgtatttatacagtgactatctgagaaactcaaagtactcaacaaacagtacatagtatattcattgtcagcaacatcgttttgcataaagttagtgggaggtagtattactttctttgctatcaggccaataacatgttctttgtgtttatagttctctctgatgtaggggaggtggcagacaggaaggaggatggggatatggcgtgtgtgtggtggcagtgagtggattgaagagttttgtgtatcttttgaagaactaacccaaaaggaatccttttgctgtgtaatggttgtaagagatttggataaacatgatggttaatccagtctctccaggcatcagaaattaattatagcatattctaatcagaatgcactcctgaggaaattaacttgatgtactctgcctgctgagaggaggaagagcccttagsgcctttggcaggtttcctgacatcccaaagctgacatgctcatgctgcttctctgagtgactggttcctggccctgcctacctactcacag

SEQ ID NO: 516867 - DNA, 690 bp, Homo sapiens
gtgatgaacttgaattgttactttagtatcattgttcaaagcctctggaactgccttaaagaagatgggaaaaatttatagctatagtttacagccaagactgtaaaagaactttcctactgttaaccaaatgttaaacatggtaataatagtagtaataccttgtatttatacagtgactatctgagaaactcaaagtactcaacaaacagtacatagtatattcattgtcagcaacatcgttttgcataaagttagtgggaggtagtattactttctttgctatcaggccaataacatgttctttgtgtttatagttctctctgatgtaggggaggtggcagacaggaaggaggatggggatatggcgtgtgtgtggtggcagtgagtggattgaagagttttgtgtatcttttgaagaactaacccaaaaggaatccttttgctgtgtaatggttgtaagagatttggataaacatgatggttaatccagtctctccaggcatcagaaattaattatagcatattctaatcagaatgcactcctgaggaaattaacttgatgtactctgcctgctgagaggaggaagagcccttagcscctttggcaggtttcctgacatcccaaagctgacatgctcatgctgcttctctgagtgactggttcctggccctgcctacctactcaca

SEQ ID NO: 516868 - DNA, 670 bp, Homo sapiens
gtagatacggtggaattttggaatattaacttttaggtgtgaaaatagtcttgatgtatttgggtactaaacrtatgaaaacagcgaatttgcaaaggaacgttgtaaacgactgtctctttctcttttgtgcattaaacggactgggagaaagctttgggaaggataaaaaccccagggtccacatcagatgacaacctaatagtaatccagtctaatagctgcaggttatgcaccattgcatatgctttttgaagtactgttggcccaagaccgggcttggaagagcctcttcactaataccttggtcacggtgtataaacctgctagtaatacagttgtctttttcatagaaaatagactataagggtttttttttttttaagtaattaacaccacattagatttttctcaaaactaaggactattttattcaggtggacaaatacggttgctgtataatttttcaatcaattcgtatcaaactctgtggggttaaaactagctgggacattttggtaggcttcatgcactcaagggcttcctgcgggcttaactgttaagccgagctcatggaggtggtgttatcagaatgcttaatggggaccgagggaacgtgctggctgatgaggttctgcacatatcaagtaatgtcaactctgtgccactc

SEQ ID NO: 516869 - DNA, 487 bp, Homo sapiens
ccggggattatggatgagctctgcctgtaacttgcagtgtggccttgggtaagtcattttaccatttgtggacacctattaaggggattgggctgctatctttaatttcctcctaggtgtaatagtttatgattctagataccagtgtttgtgtactaagcgtgctattttataattgacatcmagtggtattaagtgctgtaacatgatgttactcagcaacaggcctgtatagtttacagctagaacagtaatcattcccgagagcagatgcctggtgtttaatgaattttgcctcttactactctttttgtgtgtgtgtgtgtgaattggtgcctcccttctccccctacctacttacataatcagagtctaaattctgttgacacaagttatgtagtctggattcttcagaaatttcagcttattttggaaactctgaattctataattttttttttggatcttgcagaataatcttttccac

SEQ ID NO: 516870 - DNA, 590 bp, Homo sapiens
ttgttttgaattaaaataataaattcaacgttataaagaagaggatgtttttccccgtggagtccaccctggatctaatcctattttgtaaaagcttaacattcatcagaacttgtttgtgacatcccctcttctgaagcagcccaggactcagtcctgccacccctgtgacttgggcaagcaccatctgtcaagtccaggttgggccaggctgtctragagaaggagaaggtatgagggtccactgagtttgcaggggcaactcctccactaggcttctgccactcatgtgctgtgcttcaaagacacaatccccagcctacagaaggatgagaatgggcagttacatctacaggcaaatgaggcatagactcacagttggatccccttttttctctcccaaattccaatctctctaaaaaatactgaacttgtattcagaacacctaacttcccatttggaccctgctaccactaactgtgtggccttcagtatgtcactcaacttctgtatacttagtttcctcatactcaaaagagagcaatggactaaattgggaatggcaaatacaagacttgcacattatcag

SEQ ID NO: 516871 - DNA, 534 bp, Homo sapiens
gtggagtccaccctggatctaatcctattttgtaaaagcttaacattcatcagaacttgtttgtgacatcccctcttctgaagcagcccaggactcagtcctgccacccctgtgacttgggcaagcaccatctgtcaagtccaggttgggccaggctgtctaagagaaggagaaggtatgagggtccactgagtttgcaggggcaactcctccactaggcttctgccactcatgtgctgtgcttcaaagacacaatccccagcctacagaaggatgagaatgggcagttacmtctacaggcaaatgaggcatagactcacagttggatccccttttttctctcccaaattccaatctctctaaaaaatactgaacttgtattcagaacacctaacttcccatttggaccctgctaccactaactgtgtggccttcagtatgtcactcaacttctgtatacttagtttcctcatactcaaaagagagcaatggactaaattgggaatggcaaatacaagacttgcacattatcag

SEQ ID NO: 516872 - DNA, 694 bp, Homo sapiens
gggctgatcctcttccacatgcttgaaggtctttgttccatacagatctcaactctggtgattgttctgaacccaggcataaatacctgcaggattatgccactaataggcattgctgaaagaaagagggaacaaaagagaaaagaaaaatacctttctttgtattaaaattttgtcaaatggcattttctaatactgtgtccttcaagcatatctcacccatggtgaagatctcctgggcttgtaaatgcattttctgtagaaaaggcaatccggctgggtgcagtggctcacgcctgtaatcctatcactttgggaggccgaggcggacagatcacgaggtcaagagatcaagaccatcgtggccaacatgatgaaacctcgtctctactaacaatacaaaaattagctgggcatgttggtgcgcacctgtagtcccagctactcgggaggctgaagcaggagaatygcttgaacctgggagatggaggttgcagtgagatcacgccactgcacttcagcctcgcaacagagcaagactacttctcaaaaaaaataaaaaataaaaaaaaataaggcaatccattccatttaaaggggggtacgatgtgctttgtcacactcagatgtgggtttcttgcctttcctctgtgctcagtgacgagccactcatatggccttgtatgcaacccac

SEQ ID NO: 516873 - DNA, 634 bp, Homo sapiens
ttgacccaagggccctccataataaatacttatcctgcctactatccacctcgctgtctgcttactggagaacccaatctgcaatggttggtcctggaagtgatttgagaaagagaagatgactcggtatggtggctcacacctgtaatcacagcactttgggaggcgaagttgggaagatcacttgaagccaggagtttaagaacagcctggccaacacagtgagaccctgtaacgattacattttttttcaatgagttgggcatggtggtgcactccttaagtcccaactactcrggaggctaaggcagaaggatctctggaacccaggtgtttgaggctgcagtgagctatgattgcaccactgcattctagcctggctgacagagtgagaccttgctgagaaagagagaaggaggtgggggaagagggagggaagaaagaagggaaggaaagaaagaaagagaaagaaagaaagaaaaaaagaaagaaaggaaggaaggagagataagagagagagaaaggaaggaaggaagggaggggaagaaggaataaagaaagaaaaagagaaaggaaggaaaaagggaaaggaaggaaggagggagggaggaagaaaaggaaagcaagtggctag

SEQ ID NO: 516874 - DNA, 617 bp, Homo sapiens
tgctaaccttgaagaccgtcttttaaaaaraatttaactcttggttggtagtataggctttgagattgatcctaaggaataaaatgctaatcatgttgaagaaagacaaactctctcctttgcaggttaactgcatctgtgcagacctgtttgtcttcatctttgacccaaaacatcacatctttatatccttggtcagtataagatcttctagaatcatcctgttatccacactggcttcatgatgatgacgtacaattttattttccttgccttcttttcatgggagattttttcagaaaaggatctctactcggggtcctaagaagtgtgaggcatagtgtaattgtaaagaaaattgaaatatattgcaaattttgtatgaaatgtgaaggccatgaaatattgcagtaaaaaaaatgatttgaggcctagtaggcaaaaaatatgagaaaaagatgtaggcagcaatgatgcatgaaatgtttgaaaccacagaggaagtgcctgacaagataggtaggaacaaggtgaacaacatatcaaagactgagaaggaacagcccttgagaaaagacaagagatgaagagaaggagtttgagaaggtgtttaattt

SEQ ID NO: 516875 - DNA, 617 bp, Homo sapiens
tgctaaccttgaagaccgtcttttaaaaagaatttaactcttggttggtagtataggctttgagattgatcctaaggaataaaatgctaatcatgttgaagaaagacaaactctctcctttgcaggttaactgcatctgtgcagacctgtttgtcttcatctttgacccaaaacatcacatctttatatccttggtcagtataagatcttctagaatcatcctgttatccacactggcttcatgatgatgacgtacaattttattttccttgccttcttttcatgggagattttttcagaaaaggatctctactcggggtcctaagaagtgtgaggcatagtgtaattgtaaagaaaattgaaatatattgcaaattttgtatgaaatgtgaaggccatgaaatattgcagtaaaaaaaatgatttgaggcctagtaggcaaaaaatatgagaaaaagatgtaggcagcaatgatgcatgaaatgtttgaaaccacagaggaagtgcctgacaagataggtaggaacaaggtgaacaacatatcaaagactgrgaaggaacagcccttgagaaaagacaagagatgaagagaaggagtttgagaaggtgtttaattt

SEQ ID NO: 516876 - DNA, 562 bp, Homo sapiens
accggtgcatgccaccacacttgtctaatttttgtatttttagtagagatgggattttaacatgttggtcargcttttcttgaactcctgaccttgtgatccaccctcctcggcctcccaaagtgctgggattacaggcatgagtcaccacgcccagccagaatttttaattaaaaattttcccagagcatagtgatgatgaaaatcagacaccttagtgggtttattgttgtttttaagtattctacagtcaatattcctcctttgttgcctaaacccagggcagatggttcccagctcccttggtataactggatactttacatgtcttacccttacttctgatgttcaaatgtccctaaagacaactacatctaatagtctcagtatttttcaattttaccttttatctccatttccccttccagctttattcactatcataccctgcaaggacttatgcatacatttttatatatggaaatctctcagcatccattcatgccactctaatctattctacacaaattatccttagtaatctttgtaaaaagcagaattg

SEQ ID NO: 516877 - DNA, 305 bp, Homo sapiens
ggcacatctcttctgctgctaatgccacactgatctgcttttgcaaggttccagaccttcttttatcaccttaggggctacctcctggccaggctttgctcttcttcccygacccttccatatgcccctctcccccacaagctccagcatcaaccccctggccagatttaatttcttatccatgtctattcaagcagacacgaaaacaaaaatagaatttccctggaaagagcttcatttcccatggccaaacttagcatagctttcaccatcaggacacatcttccagggttctgctgagtccc

SEQ ID NO: 516878 - DNA, 582 bp, Homo sapiens
tttttcttttttgagacgaaatcttgctctgtcacccactctgaagtgcagcagcatgatctcggctcactgcaacctcttcctcccgagttcacgtgattctcctgcctcagcctcccaagtagctgggactacagttgcccrccaccaagcccagctaatttttatgtttttactaaagacagagtttctccatgtttgccaggctggtctcaaactcctgacctcaagtgatccacctgccttggcctcccaaagtgttgagattacaggcatgagccaccatacctggccaaggcttagcagccacttctaagtggcatctctccatttggtctcctccctcgtgccacatcagttgagacctcctttctctggccttcatgatgtcttgccccctccactctcagccagacctccagaagccttattcatggccttcaatcaagggcaagttcctggagctttccttctgctcagcacctcttcaggaaggagataaggacatccacgagacaggctgtgactcctccatagagacccctcaggatttcagcagcactgccctctctactgccggct

SEQ ID NO: 516879 - DNA, 582 bp, Homo sapiens
tttttcttttttgagacgaaatcttgctctgtcacccactctgaagtgcagcagcatgatctcggctcactgcaacctcttcctcccgagttcacgtgattctcctgcctcagcctcccaagtagctgggactacagttgcccgccaccaagcccagctaatttttatgtttttactaaagacagagtttctccatgtttgccaggctggtctcaaactcctgacctcaagtgatccacctgccttggcctcccaaagtgttgagattacaggcatgagccaccatacctggccaaggcttagcagccacttctaagtggcatctctccatttggtctcctccctcgtgccacatcagttgagacctcctttctctggccttcatgatgtcttgccccctccactctcasccagacctccagaagccttattcatggccttcaatcaagggcaagttcctggagctttccttctgctcagcacctcttcaggaaggagataaggacatccacgagacaggctgtgactcctccatagagacccctcaggatttcagcagcactgccctctctactgccggct

SEQ ID NO: 516880 - DNA, 550 bp, Homo sapiens
tgatgtagaatagccacttagaaaatatttattaaaactcactctgaatagtttgaatacttgtatttattgagttaataagtaggatgctcactagtacatatctgtactactgccagcatttggcagttctgttggttcctgggtaattacattgcactttacttctgtgtatcatctggataataaaataatctcttcttttcagatacatgagcaagttayctgaacacactgaaagtggtaagaatgcatagagtaggtttcataccaagcccagctccccgatagggtgaattattcagatgatggatgcaattatttacatactgtaacaaaaagtgggtgatcatttatccattctgggcaacagaaacataaagttgactcagacacatgacgtttttcctaggagatctcagaatctacctagggagacaaacacacaccgaactgactgtgatctatgttacaataagataatggttaaatgtaaagaaaagaagatctgagaatcacaaagagatagtaactgattctaaggagatct

SEQ ID NO: 516881 - DNA, 587 bp, Homo sapiens
ttattttcagtgtgtatatttttttgttccaaacaagccattgttgttttgtgagtatgcttctcttctctcctaccaaatgctgattatttcctcttctgcctcctgagtgggtgactttgttgaggatagggacaatagctcctgtatttcttttcccagactccaagagatggatccctatgagtactggctgggcttctcctgcatctcctctccaaggtcctcctgaaaggacttgggccttccccaattctggtgcctttagtctgtgagtctccagaaggcatggcctgtgttttttcctcttcagtttctctcactttgaattttctattgtccaatttaggcgttctgctcttctgtgtgtttacctcatgaagccatccatgactacattaggtctccttggtccctgttcccaaaaccctatagcatttgartttaaatcacatacaaccagggagccaattgtgtcagcacaaatggcagatatgtgtgtgtgtgtttgtggggggtagaggatgttgttgaggtacagatgccatctggtaaacctcttctattaagaagtagaaggactgcag

SEQ ID NO: 516882 - DNA, 581 bp, Homo sapiens
atgcatacttgttatatttattttagtttggggtcatatacttagctgataggtgccagtattttgtatgcttattgacattatacttatccccttcatagttagtttactttgcactcttttcttttatatgtaaactaggaatggaagctcagcagatattggctaaatgtggtattatgctaatgagaatggtcatgattagtgccccaaagaactggtctttcattctcacagggtaaatgtttaacgtgtcttgttcacagcattgcagaatactcccttctaagcaggttagtaattgcatcacatccagctacatttttagacctcaggtaatgaaaggtttgcttctgaagtcagcctttaatatgaaacacagctgtaacaatattctactcagtatttttatatgtaaatattctcacaaaattcagaaaaaagtaaatagaatgatataatacagaaatataatatcagttttgtgacagtcatctttcagcatagaacattcttctcgtattagaaagaaagacrtgctgacagtaaagaggacattttagattaggtttcccttttcc

SEQ ID NO: 516883 - DNA, 616 bp, Homo sapiens
tggtatgtgaatctggtctcttaattccaaagctatgttctggtgtatcacaataaattctgcatgctgcacatctcctaacactcaaggtatagctgggtcagcaactttccccctctcccctccagccaacatacacgcacactccaggctcattttaaacaagctatccattttcaaagtactgatcaatctgcatctaatgcaaaagcaacactgaagcccaagcagtatattcccacccactaaaaaaaatttttaggcaggttttttttttaatgtgcttagcatagaaactgaaggtagggggaagcacaagaatcatttgctatgaaaacaaagttcaccaattccatgtactttctgacaatcacccatgagatttataggatcctgtctttaaaacttaaaagggtcagacagaaattgagtaagtatcactttttcttgatttaatattttctgcactctactacaaccccaaattttatcttggcatacaaacagtaatttacattatcttctatcctsaattcctggatttataataactaaaaataggtattaagcttaccactcaaatttgatcttatcaaacaagcccatgacccaccta

SEQ ID NO: 516884 - DNA, 406 bp, Homo sapiens
ctgtcacctgtattagaatgacaagacctttcatggccgtaattcccaatgtgctttcgtgtctttccacttgtgtacttaatcattctttgtgtttatcatatatacatagatacattttgtgttgcttttcccactgtctcttcattccttccctctaccactttccatgcacaccactgtcccatctacctgtggttagcctagggttagggatcaaatagatattaaataaatgatccttattaatgcagatgtaacaagagtcctatacatcagttaatgacttctcctgtgtgamtttcttttgacctctctctccagagacattgcagtacctgaacacgtctctgtgaggaataggcttgtattgtaaatgaatgcagtccacgctgggtgtaacagg

SEQ ID NO: 516885 - DNA, 330 bp, Homo sapiens
ccctgctgccacgcgaggagtggggagcggcagggcctaggcgtcccgagtggaggatgagccggagacgcctgcgggtccggagctgcaccgcgcccgtgcgcccgcgccgccgcctcccgcgctctccctttggcagcagccggaccgcctggcgcgtgcaggacctggggmcgcggcgctcgcggggacgcgggagcccagggtcgcgtgcaggcagcggggcggcgccagcaaggccagctccccggggaccctggggcagcctcgcgccctgcctgcctccctggactgagacgccgcggggcctgggcagcgctctgccggcag

SEQ ID NO: 516886 - DNA, 616 bp, Homo sapiens
gctgtgacatcaacctgctgtgtgacctcaagaagttgttgaacctcctcgtgcctcagttttctcatctataaagtgggcatgatcatagttccttcctcacagggttatcaagaaaattgttcgttacatcaaaacacttagtgcctggctttggatgtgaactgtaagcgttaggtatgatgttaatcacgctggacttttaaacttcaagatgattattacttctacattacctttaatgatgatgtttgtaggggtacataatataggcagaatttaggttacttctgttttcacacagacactgacagtttggtacatatttgctcacactatgattattkgctgagggagtggcatgaccgtgtcgagaggcagtgatagatcagtcttattggatacacaccatgtgccttgcactggaagtgtttgccttagggaaccctcttggaggtgggctccattggtgctcctatatttgtggaggaggaaacaggcttaagaggggttacctcccctgaggtcacagaatggtggagcgagccactggtctggttcttgaaggtggaagatgccccatgctcaaatcccagtggagagtgccaatgctgca

SEQ ID NO: 516887 - DNA, 674 bp, Homo sapiens
acaaaacacatagcctcagaatatctccccataaaatatttattaattacaaaagatcaaaaacaacacttttgtaataagacataccaacatcatatgtctcctgatacgatgcacagaamacagagcatcacttctggtagatttctgcccaaaatgcatacgtcgaatctaatcatgatgaaaccataagagaagctcaaactctgggacattctacaaaataaccaaccagttctcaaaactgaaaggttataaaagacaaagactaaggtaccagccaaacacataagacataacaactgaatgtggaaacgttttcttttcctacaaagacatgattggaacaattgacagaacctgagtaaggtgtacatattagctagtaaaataatgtgttgctgttagcttcctgatttggatcattgcacaatggttatccaagagagtgatcctttttgttttttgtttcttttttttttttttttttttgcggggagggagattccacctacggtttagaaacaaaatagttcctcacttcaacataccttctagtctagataaagcccccaaaagtgaatattacttcgtttaattctctgcagaactctcactgtctacacagtccaaatttaaaaatattctaaattctttaaattaaaacaaggcag

SEQ ID NO: 516888 - DNA, 707 bp, Homo sapiens
cgaggtcagtgaagtttatgcttggaaatgagtacatcattatttctgtaaggaccctagtgtggaacattgtgttatagtcaggagttgtgcttggttcaaacattgttgctgatatggttaccttcagtgcagcagtttcaaatagttctagtgatacctagtgtttatgttgtggattatawcactattatttttacaaaacgtgctagcatggcagtggggtacacaggagaaaggagcattttctaatgttctgatcaaacttgcaccttaaagaagcacagtaaaactgagtatgggagtaatgcactgttttattaatcttcacagaaatgacatgtcagttagttacacaatggtaacatcttagctagaaaactgggggaatagagaggattggggggaatatttatatgaatgttccaaagttaccttggtgacataaatataatctctgtattgtgtactagaaacataatatataaagtattatgtgaaaattataataaataagttataggtacaattactgagtaataattttatactgtttatataacaattaatagagtagtttgtttgtaagtaccagggtcactagccaaaacagtaaagatttctgtttctgtatccctcttaaacttttactgccttcctatcaagatctcccgtgatcagttttcaatacttagttgacctgtcag

SEQ ID NO: 516889 - DNA, 573 bp, Homo sapiens
tcagtgcagcagtttcaaatagttctagtgatacctagtgtttatgttgtggattataacactattatttttacaaaacgtgctagcatggcagtggggtacacaggagaaaggagcattttctaatgttctgatcaaacttgcaccttaaagaagcacagtaaaactgagtatgggagtaatgcactgttttattaatcttcacagaaatgacatgtcagttagttacacaatggtaacatcttagctagaaaactgggggaatagagaggattggggggaatatttatatgaatgttccaaagttaccttggtgacataaatataatctctgtattgtgtactagaaacataatatataaagtattatgtgaaaattataataaataagttataggtacaattactgagtaataattttatactgtttatataacaattaatagagtagtttgtttgtaagtaccagggtcactagccaaaacagtraagatttctgtttctgtatccctcttaaacttttactgccttcctatcaagatctcccgtgatcagttttcaatacttagttga

SEQ ID NO: 516890 - DNA, 617 bp, Homo sapiens
ttcactaaatggttaaacttttattgtctaatattaagcaaaagacaagagaatacttatgtrtatattataggtaagtaattttaaatacttttatttaatcctaacattaaacctgtaatatagatactatcactactatttcgcagatgaagttattgagactaatgcagtttcaataacttttcaaggaaatatggatagtgagcaggagaaattggcctcaagcctagaattgatattcctaatctcaaaatgcagataataaatatcttaagagtttctgtgattcttaaataagagagtgtattaaagctgtccatcacaagattcagtttacattatatgttaagaagaagaatcctttcttcttagtaataaggatacttcaatacatcaagtgtttcaactgctttagaacaattcttttggcaaatatcatacatattatagactttcacttaaattttctaacattagggttgtacatttcagtaactcctagaaccagttaaataacagcaacctcctagtggggctgatagggcttgaagaatattggacagtgtatgccacaaccacaggtattcaattgaaaacaaaacaaagcatgccag

SEQ ID NO: 516891 - DNA, 628 bp, Homo sapiens
tctgaatcccatctgctatttggggctctttctcaagcttactgcaggttggcgcagctataagactgaagtcaatgcttttctattggtccttgaaaagcagtcactcagttcctagagggtacccttaggtttcagccaagaggccttcccaaagcagcttaggtcttcaaaacaagcaagacacactctctctgtctctcattctatgtagctctatctccatctctatctctgtctctctctctctatgaaaggtctggaccctcttttcaagggctcatctaacttgtcaagcctagcaaggttaatctcctaattaccttaaagtcaaatgacaagtcaccttaattacataggcagaatcccttcaccactgccacctttcmtggagtgaaatccgaggacatccacaaatcctactcatgcttaaggtgctcacttccataagtaacacaagaacctaagagatcttcaactacatattacgttatttgacttttgttcttttattgtcatgtattatttaacctcataagacattggtatcatcgtaattttctacagtgaacatgcattatattcacaggtttatttattctgtctccactttttttttcctgttttg

SEQ ID NO: 516892 - DNA, 597 bp, Homo sapiens
gtctagccctagtttctgggtttagcagtacagtgtttgatagacactcactagtaggttcaccctggatcacatgtccctacagccaatcgcctaccactgaaagggtgggatcatttggtttaaatatggcagtctaagaagctccttccagaagaggggaggctttgagtgggatagattattttagaagattaggcagggaagaagtgaatggcatctatagaacaaatataatactatccagaaatcattactgttaacatgtcagtgtgtttccttagttgatatgctgtttgtagaagtatatatgtattatatagttgataaatgataaataaagctctgtgacctgagcttttcatgtattataataatctatcataaacatttctttttatcattaaaattttttytccaattactttaatggtggcataatactccactgtagagatattattataattgataaactactgaatattcatgtgatttccaagtatctatcattttacataaagctgcaatagacatccctatactttaatctttgtgcttatttctgattattttcttagaggtacctagaagtgg

SEQ ID NO: 516893 - DNA, 597 bp, Homo sapiens
gtctagccctagtttctgggtttagcagtacagtgtttgatagacactcactagtaggttcaccctggatcacatgtccctacagccaatcgcctaccactgaaagggtgggatcatttggtttaaatatggcagtctaagaagctccttccagaagaggggaggctttgagtgggatagattattttagaagattaggcagggaagaagtgaatggcatctatagaacaaatataatactatccagaaatcattactgttaacatgtcagtgtgtttccttagttgatatgctgtttgtagaagtatatatgtattatatagttgataaatgataaataaagctctgtgacctgagcttttcatgtattataataatctatcataaacatttctttttatcattaaaattttttttccaattactttaatggtggcataatactccactgtagagatattattataattgataaactactgaatattcatgtgatttccaagtatctatcattttacataaagctgcaatagacatccctrtactttaatctttgtgcttatttctgattattttcttagaggtacctagaagtgg

SEQ ID NO: 516894 - DNA, 603 bp, Homo sapiens
tgcctccttgactaacgatgtccttccatttaccttcctcatgccttttcttacccttcttcatgctgttatgtgtgaactctgcccttcactttagagttcttccagtgacgcctatttaataactttttaggacacacctgaattgtgatggttagaggtttccaacttggtcaaaggaggaaaaatcatgttgtgtcttgagacatagtgtgtagaaagtaggtaagtataaatgctgaggtgagacagaaaggaaagaaaaacatgtttatctcaaaatctcaaaaattaaatcaaaagccagaaattctagaaatgctagagacattatgggsaaataatcttggggaaaaaaatctcatattcatatcgtaacttctaaataacgttaagtctaacatgtgtccactgctaacctatttttttcttccctgattttaaatgggatgtgtggatatgccctcccaattaccattttatctaaggtgtcattagtagtaagacataccattattttaccctctattaagaaagaaaaaaaacctccccaattaaactatgacatgccatcaattttaagaaggctcctgatttcagaaa

SEQ ID NO: 516895 - DNA, 621 bp, Homo sapiens
gcaaataaaagaaagctgagggtctagcacaggacttaatcagtgagtagcagagctccagagaaaattaaactctccatccagagaaagctgcttcattaaggtcagaactgggaaggaaggggacactgatatttaaaagggaaacatctggattgatgcatagaaattctagaacgcccagatttccctgaatcttccatgcctacctaatgggctcatttctctctattgaaaggtggtgttcccccttgcttggaggaaatgcagagactgccttgtgcctccttcstgaaatttctctcttcttgcccacaaaaccaacaacatgatctagctagggaagtgacagacttgctacaaaaagacattatctgtaatccaaaggcgctgcgttacatagtcagtaaatactggcaggaaccaagagagtacgtacaggactgaatcctgagggtgctggatcaaaggagttgaaatataccattggatatagaaaagtatgtcaacacgtcattattgtataagatgcagaattgtataccttgacaatgaccccattagaatgagtttggattgctctcagaagcagtagccacagaataagtgaagtagaaatat

SEQ ID NO: 516896 - DNA, 629 bp, Homo sapiens
gattttaaaataggaagattatcctgtactatcttgtggattcaatgtaattgtaaaagccataaacattggagagagaggtaacagagttagtgtcaaagtgatgcaatgtgaggaagattcatttggccattgttggctttgaaaatgtaagggggccacaagccaaggaaaacaggcagcaacataagctggaaaaggcaggaaatcaacttgtccctcagagccccagcaaagagcacaggctcgctgatgcctgcattttagcccagtgaaacccatttcagacttctgacctgaaaagtaagataattcatatgtgttgtttaaatccactagatttgtggtaatttgttagagcaacaataagaaactagytaatactatttttaaaataagatttatatgtgtctgaataataaggacaaatttttctcaaattttaattgattagaaacaaagttaaaattttccataaaatgacagtgtttactcttaaccttctataaaactttgcattttgagcaataaattaaataagatatagcattcttcaacttttcctttctatgaatttagtctcagatatttaaaactatactacaagattgatttttttacagaaaaca

SEQ ID NO: 516897 - DNA, 629 bp, Homo sapiens
gattttaaaataggaagattatcctgtactatcttgtggattcaatgtaattgtaaaagccataaacattggagagagaggtaacagagttagtgtcaaagtgatgcaatgtgaggaagattcatttggccattgttggctttgaaaatgtaagggggccacaagccaaggaaaacaggcagcaacataagctggaaaaggcaggaaatcaacttgtccctcagagccccagcaaagagcacaggctcgctgatgcctgcattttagcccagtgaaacccatttcagacttctgacctgaaaagtaagataattcatatgtgttgtttaaatccactagatttgtggtaatttgttagagcaacaataagaaactagttaataytatttttaaaataagatttatatgtgtctgaataataaggacaaatttttctcaaattttaattgattagaaacaaagttaaaattttccataaaatgacagtgtttactcttaaccttctataaaactttgcattttgagcaataaattaaataagatatagcattcttcaacttttcctttctatgaatttagtctcagatatttaaaactatactacaagattgatttttttacagaaaaca

SEQ ID NO: 516898 - DNA, 617 bp, Homo sapiens
tcacttttactgctttttaggcatgaactaggtccttatttgtgcaaataaatattggtgagacttaacgtctttaagccagaatggaactgaaatattattttaaagaattaattataattgaacatatgccaaaagtacataaagaaaaaaaaaattctggcatgctacactgccagaatagaaatagattttggactcaattcagtttctagtaaattaatgctcaaaagcacacaggagcaaatgtgcacacatttgtaatctcagcaaagaggccagggtacacatggatcctagaatttcatctttccctcgtgtccagagggtaatctcatccatggtctctatacaatgtttaccaacstctctgtgatgcttcctgaagtctatcttttacaggactctgcatacatgaattaggaatgcagttttattgctattcctagtaaaggacacattttaccccttctatatagtaaaaatgagtcacagtgcatttagctgattggtttccataaggatctgcaatgtgatactcattgaactatttacgtttattagaagaataacagttgtgtatatacattcatcacatcttatcaggttatgcctat

SEQ ID NO: 516899 - DNA, 447 bp, Homo sapiens
taattttagccagtgttagaaaaattaagttctataacatttcttttgctttgaataaatgcagtattagctttggtggtgagtctcttgtgtacctgtttcattttaacaaatgaragaaactgagagatatttaatgtctagctcaaggacacaaggagttgtgatacaactcaaatctgttgacttctaatccaggacatttttcactacttttcattctttttatagttcttttaattataaaatcaccatagaaaggactaatggtatggactgaatgtttgtgtttccccaaaactcagatgtcaaagccccaaattctcagtgtgatggtatttgcagataggactcctacaaaagtatttagggttatatgaggtcatgaggatagggccctcatgataggactacagctccttataagaagagacaccagaaaacttg

SEQ ID NO: 516900 - DNA, 553 bp, Homo sapiens
gaataacgggtttgaacccacatgggttcacttacatgcaatatttttttcagtaaaagttacactgattgtaaccctcctgtctcttcttccaccttctctaccacttatggctctgtcacctctgaggcaacaaaaccaatctctcctcttcttcctcctgttaagactactcaatgtgaagacaaggataaagatgtttatgatgattcacttctacttaatggacagtaaatatatcttctcttctctcattatttccttaataaaattttctgttctctagcttacttcattttaagtatataatacatataacatataaaatatgttttaacggactgtttatgttatcattaaggcytccactcaacaataggctattggtagttaagtgttttagagtcaaaaattatatgggaatttttgactgcatgggggttggtgcccctaacttttgtgttgttcaagggtcaattgtacatgtgtctttacaggtgaggtcagttccttgtaggcagcatatagttgtgtcatgttatctttcattcag

SEQ ID NO: 516901 - DNA, 531 bp, Homo sapiens
ggaataactgcattaaaatgatctaaaattgccttgcttccaatttcactaccagagcaaaagaactgaagagtggacaggagraggagttggtgagggtgctggtacaatctatgtagagggctcttcatgtacaaagctataaggatagaaaatacccaggggctaaggatgctggctggaatacacattgagactggtaagagtgatgggagaaaagatgaagctggaagtgtagacagagtctaatataaaacggttttgtctgccatttaaaaaattagaagtttatttggaatgtcatgggggagcatttaagcatcatgttggtgttgagtgctgaaggaaagaattaagagtgggattagaaagactgtgtgtggataaattaggtgatattttgggttttaagtaatactctctgggctgctgagtaaagaatggattgaaggagcggtgtgcctgaggcagtggggggtgactggaaaagcctgctggagagctaatgacagtaatggggagaaagggaca

SEQ ID NO: 516902 - DNA, 531 bp, Homo sapiens
ggaataactgcattaaaatgatctaaaattgccttgcttccaatttcactaccagagcaaaagaactgaagagtggacaggaggaggagttggtgagggtgctggtacaatctatgtagagggctcttcatgtacaaagctataaggatagaaaatacccaggggctaaggatgctggctggaatacacattgagactggtaagagtgatgggagaaaagatgaagctggaagtgtagacagagtctaatataaaacggttttgtctgccatttaaaaaattagaagtttatttggaatgtcatgggggagcatttaagcatcatgttggtgttgagtgctgaaggaaagaattaagagtgggattagaaagactgtgtgtggataaattaggtgatrttttgggttttaagtaatactctctgggctgctgagtaaagaatggattgaaggagcggtgtgcctgaggcagtggggggtgactggaaaagcctgctggagagctaatgacagtaatggggagaaagggaca

SEQ ID NO: 516903 - DNA, 470 bp, Homo sapiens
caccatgttacatttccctcagttgtgtacaagggttccaattactccacatccttacctccacttgttattcttatttttaaaaataatagccatgctaatgcacatgaagtggatctcactctgaatcttcaaatgrtttggttttatctgcttgtcttccacatctctgaattattttgcatcttcaaaaaacaatctttgccacattaaatcgatttgattccatcatcttgaatttcttcattcctttatttatctggccctcaaatagatctctcgacatctgccaggtactgtcctagttgcttggaaaccctgatgtacagcaccctcatagctctctcaaagctcagggttgagtttagtcatacagcaagcagagaattatggtggatttttacccaatggtataaattttgccatttatagctaaatctgaaaagatcttcatttaaattatatatgat

SEQ ID NO: 516904 - DNA, 618 bp, Homo sapiens
atttgttaagataggagtcttgaacatattgcatttaaaaatttggtagcttgatttataaattttaaacattcagaattatggtatgtgggcctccacttacactcttgtcctagagcctgtagatgatggggtgcccttggtcagaagaaccatttttgttttcaatttttgattttcaatcttaattaattaatttttaattggcaaatgaaaagtgtgtatatggtgtacaatgtgatgttttgatgyatgtatatggctgtggaatggttatatcattatactgataacttgatatatatgttatgtattaacatatatatgttaatatgactgtattaacatatccatcacctcacacacttatttttgtgatgagagtatttaaaatctactctcagcaatttttaatatacaatacattcttattaactgtgctcaccatgctgtacaatggatcttcagaacttactccttctgtctaacttgaagaaccatttttgagatgctattttgccttttactagatatgtaaccttgagcaaatcattaaacatgcctcatatgcaggtttatgataatatctcacccattgcctcctagggttgttttgag

SEQ ID NO: 516905 - DNA, 633 bp, Homo sapiens
gtgttttgaggagcagtcatggcaaaaactccaattagttgtgaaattattgaaataggatctgcatgtgagagttgagaggacatcttgtgatccttaaaagcaaatggtaatgtttgcttttatcctatttgtttttagagaaatctgcaatggcagtaaaaaccagattataggctaacaatgaagagtcaataatgagccacttcaggcgagaatcctaaaatgacccctgccaggtgctccagatgtttcctcttgccttgcctcatcttttcaattttatctgtattgcacttttgccaatttcttctacctaattgcaccccccccacagtaaccaatactccctttaatgtctttaaataagccacagactaagagttgagaaaggacgtgttgacaagagtgatcgtaattctccaagcagtgtctacttatccacaagtgtaaaaacacrtccttatctcttctcaactcactgaatgatatttccatgccatctccagaaggtgtttgggtacctatgccaacagtttttctgaagccatagagtgaaaaaagaattttccccagaggacagaagattatttatgttggagctacccagatattttgcaggatcctgtacga

SEQ ID NO: 516906 - DNA, 628 bp, Homo sapiens
gactccgctgcatgtgcaggtcaggttacctaaatttttcaagtttcagtttgttcaggtgtaaaatgaggtgggtgataatacctcctttagatgactattttttaaacccgaatatagccgtgtcaccaacctgcttatatacttcaggattttcccatcgataggataaagacaacctcttttccatgttctctgaggttttgtcrttgttcgtctctccttcagcccttgctttttctgcccgagctcttctacccttccttgggcttgcacggttcccttggccccaggaaaagccttctctggctggagctttctctttgctcctcttggttttgttaatgccggaatctcagctcaaacctctctacccatgaccacctcgtctaggtcaactatccctttccttgccccattcctgtcagctaaaggctttcacagctttctgtatgccatttgtcatccttgcaacttgacacttgtcttcctcacaaggtttttagtgcatgcccatacctagactggtgtttgttcaagagtaggtgcgcacacatacacgctctttcgctctcgctctctctctctctctgctgctgtttcatggcaaaagcgtgtttctgtcatt

SEQ ID NO: 516907 - DNA, 652 bp, Homo sapiens
tgagcttgctatttgattaaggaattggagttgcatgggtgggtttattggaaatggcagacactgaactgacagatgtctgccctgaaggtttacaattctaaatcttttgttttcaaaatatttaaggtaaaatgtttacattgaaacagaatcctatggatatttcagtatacatattgcacgtataattaaggctacctacattattttgaaagctagtgacagctacagagagtttataccactaataaatgtaaacagaaattactgaagagtttggcatattactttcttgaataaaacatcatatacatgaacgtgaatattataktgagagaaaattgaaagtaggctacaaaattaatagtgaagtatttgcattttttcccatgaggattatagatgtttttaaatgtggctataaaaatacaaatatttttctttttaaatatagaaacacatctgtgcttgtacctgcaagagttgatgcttttgtggataaaagtctatactttcaaaataagattttccgagtcaatgtagccacttccaatagttgatatagcgtagtggttaagaatatgagtgaagtttttagaatagctctagaaaatattaagtactatgtgaatattagctcttggctaat

SEQ ID NO: 516908 - DNA, 636 bp, Homo sapiens
tgctttgaatggtgctctggaggtttggatggtatcagaaagctctcctcccccagtgagagccataatgaaggaagcataccataaagccagatccaactgacattgagttgccggattttaacacactttacaacagatgttaagtctgtgtggtatggttgcagaggaacatattttttgcctaaaaaaatatagaatcttaggaagttgtatacctgtaatatgtattaatatttatcacctcattaacatctgtctaaagggaaacatcgattgcatttgaatatgcgtgaatatacttataaaatatatatgtaaatatttatgtcttttcattcaaatacacacatacatttacttaaaaaacaaaaccctagattcttattttaaactgtgacaaagaacagagatacatctgagtttctggaagcaaaaaatgaagcatactaatgttttccattggatcctatgcctatgtaggcatctttctgaagtcttcctataaagatagatgaactatatatagtattaaaaatctccctccgagttgcatagaccctgaaaaatatgagccacgtgacagctttaacttcaaagaaaaaygatggagcaaagaatagagtaaacacaact

SEQ ID NO: 516909 - DNA, 602 bp, Homo sapiens
agctggcaaagcagcttaatatctcagccaatcattttaagctctaaaaaattcaacactctctagtgctgttaaagagtaacctcataatgttacgcagcctaagaaacgagatactacccctccctttttttcckctttttgatttttttgcacttttcagttgagctttaaactgttttataactgtctgataaatgagttacaagggcaggtcaaaattaggcaaaagaaactttgatgctagattatctggcagtaaaacattcatttattaaacaagcagttgttatgagccttcttctctgtacgttaagggctgggaacagcaaagatggggaggactttgttctggaggtgctccagtgaggggagaaaaacacataaagataccttcaggctgggcgcagtggctcacgcctgtaatcccagcactttgggaggctgaggcaggtggatcacaaggtcaggagatcgagaccagcctggccaacatggtgaaacccgtctctactaaaaatacaaaaaaaaattagctgggtgtggtggtgtgcactgtagtccagctactcgggaggctgaggcaggagaatcgattgaac

SEQ ID NO: 516910 - DNA, 602 bp, Homo sapiens
agctggcaaagcagcttaatatctcagccaatcattttaagctctaaaaaattcaacactctctagtgctgttaaagagtaacctcataatgttacgcagcctaagaaacgagatactacccctccctttttttccgctttttgatttttttgcacttttcagttgagctttaaactgttttataactgtctgataaatgagttacaagggcaggtcaaaattaggcaaaagaaactttgatgctagattatctggcagtaaaacattcatttattaaacaagcagttgttatgagccttcttctctgtacgttaagggctgggaacagcaaagatggggaggacttygttctggaggtgctccagtgaggggagaaaaacacataaagataccttcaggctgggcgcagtggctcacgcctgtaatcccagcactttgggaggctgaggcaggtggatcacaaggtcaggagatcgagaccagcctggccaacatggtgaaacccgtctctactaaaaatacaaaaaaaaattagctgggtgtggtggtgtgcactgtagtccagctactcgggaggctgaggcaggagaatcgattgaac

SEQ ID NO: 516911 - DNA, 587 bp, Homo sapiens
ggaaccaggtccgagcccagacatttcacaccagtgcccaagctccaccatctccccatttgaagtctaggtttaaagtgatgtttttatgatgacagtgtcacaggtgagtgatgctgcataacagcatagcccatatccagggctgaaacataggtcagtcagaagaacatagaatgcagagaaagtcttggaaggttaatatatatagaaatgcttctgtattctttataacctgttaactcagagaggaatgctcatgggctgctgtgatggaraaaactgacttaattttcttttagtagctatggaaaacaatgcacagccatgaactttgaaaatctatttcctttattgtatattctctgtactctgtaccctctgtctccctaaactctccattatttagtttcccagtgaataatctacgtttaaaattactgttaacactttaccctctcttttctctctggccactacaaaaaaaaaaaaaaaaaaatcctgaatgcaaccctccctccctccctccctcctttccttccttccttctttccttccttccttccattcttttagtcatcactttt

SEQ ID NO: 516912 - DNA, 587 bp, Homo sapiens
ggaaccaggtccgagcccagacatttcacaccagtgcccaagctccaccatctccccatttgaagtctaggtttaaagtgatgtttttatgatgacagtgtcacaggtgagtgatgctgcataacagcatagcccatatccagggctgaaacataggtcagtcagaagaacatagaatgcagagaaagtcttggaaggttaatatatatagaaatgcttctgtattctttataacctgttaactcagagaggaatgctcatgggctgctgtgatggagaaaactgacttaattttcttttagtagctatggaaaacaatgcacagccatraactttgaaaatctatttcctttattgtatattctctgtactctgtaccctctgtctccctaaactctccattatttagtttcccagtgaataatctacgtttaaaattactgttaacactttaccctctcttttctctctggccactacaaaaaaaaaaaaaaaaaaatcctgaatgcaaccctccctccctccctccctcctttccttccttccttctttccttccttccttccattcttttagtcatcactttt

SEQ ID NO: 516913 - DNA, 520 bp, Homo sapiens
ctgtggacatttgatgagtctatgcaaagtccttattcacccgttgaacccctaacttcaggtgttaattgtcttagtgggaaaatgggctcaagtcctattagaatccatcaaccttgcacagagtaagcatcttcactgattgacttaatttttaaaaatccatcagcttcctttcaatcattccctaagttcaatgaaagccattacaattttaaattagactaaaatagctgctgctttaccaaaatgtataaatgattccttcatcaaaaaagtacactagaaatgttaatttcaagtttcartagggcagataatagcaattgcacaggtactttagataaaaatttcgagctacgctgattcagttctcattggaaagaacctaaggtcaatagagtaaaagttttaagaaggaaaatggtatcacattcagaaagttatgttaaattctttcaaaagtttaatcatagatttgagaaaagtctcgacagagaataggggagagttttaagaa

SEQ ID NO: 516914 - DNA, 640 bp, Homo sapiens
ggcctctgctcaagaagaggaaggcgcgggcagatgccttctgttgtctaaagccagggatgcatgttggcctaatttcctctttgggaggattacagggcagagtatgctgtggtttcagtgaaacattttacaaagtttctcatgatctactcaaggtcaagatgaaaacgtatactcttatcataggcagacttctaaygggtaaaataaccatatacaaggaatgtcaatttctgaaataatatatcaagttatgaataacgtatccaatatgctgatgatgagtactagcagtaatactactaccaacactatgataaattaatattattaacaaggtcaataatcagtggcattcaatattattaacaataataacagccgaattctaataagagcttcattgatctctgtgaaccacaggccttttatttttatgtactgataaatacttttattatcccttggttgcatttataaaatccaatttttaaaatgacaaaaacttagcttaaaagcaagattccaacaggccaaagagagactgatggatttaacaatgtggaatgaagatttaaacagaccagctacttacgtgtaggaggagaaaagcagcattaaaaaaacaaaacccata

SEQ ID NO: 516915 - DNA, 640 bp, Homo sapiens
ggcctctgctcaagaagaggaaggcgcgggcagatgccttctgttgtctaaagccagggatgcatgttggcctaatttcctctttgggaggattacagggcagagtatgctgtggtttcagtgaaacattttacaaagtttctcatgatctactcaaggtcaagatgaaaacgtatactcttatcataggcagacttctaatgggtaaaataaccatatacaaggaatgtcaatttctgaaataatatatcaagttatgaataacgtatccaatatgctgatgatgagtactagcagtaatactactaccaacactatgataaattaatattattaacaaggtcaataatcagtggcattcaatattattaacaataataacagccgaattctaataagagcttcattgatctctgtgaaccacaggccttttatttttatgtactgataaatacttttattatcccttggttgcatttataaaatccaatttttaaaatgacaaaaacttagcttaaaagcaagattccaacaggccaaagagagactgatggatttaacaatgtggaatgaagatttaaacagaccagctacttacrtgtaggaggagaaaagcagcattaaaaaaacaaaacccata

SEQ ID NO: 516916 - DNA, 429 bp, Homo sapiens
atttacaggcatctgtggtctggtggcttctttctagaattaggaagctcatcttaatttccaaagtgacatctagttagatgcctaggggaaggtatcgtatggtccaatttcttccacacttgtttctaaactcattgtaattactggagatgtgggtttcagagagggcatgaataagtacagttgatgtgtaggaaaaaaaaagtctcttagcagaaaaggttaaaaagaaaactcctgctcaagcgcsataagttttaaacaagccagttgtccgtgactttgtttatactgcagttgggtattgtttgacttaggaagctgttcagtcatcatggtactaatgagttaataagtaagtagatgcctatattttccaattacgtgccccattttatttctgggtagtaacagtgtgaataattt

SEQ ID NO: 516917 - DNA, 429 bp, Homo sapiens
atttacaggcatctgtggtctggtggcttctttctagaattaggaagctcatcttaatttccaaagtgacatctagttagatgcctaggggaaggtatcgtatggtccaatttcttccacacttgtttctaaactcattgtaattactggagatgtgggtttcagagagggcatgaataagtacagttgatgtgtaggaaaaaaaaagtctcttagcagaaaaggttaaaaagaaaactcctgctcaagcgccataagttttaaacaagccagttgtccgtgactttgtttatactgcagttgggtattgtttgacttargaagctgttcagtcatcatggtactaatgagttaataagtaagtagatgcctatattttccaattacgtgccccattttatttctgggtagtaacagtgtgaataattt

SEQ ID NO: 516918 - DNA, 630 bp, Homo sapiens
gcatgagcgtctcagaggaagacccttagcccatcatccagcacgcactgatccacgtgtacctcaatcccagycccttctgtcacctcacagagcttctccctcgagcctttcctctctttttctctatcttctcctccatggattcctcccctttgtgaccacgtcccaatctaactgaagaaaacgtcctctgtgatgcacagcctcctccagccagtgccctctgctaccccttctgctctgctcacagcaaccgccgagagatgggtctgcacttgctgtcaccccctccccacaggcctctcgttcctcattctgtggtcgtccagcttctggtgccatcgtaccccctggtcactggaggtctctcgcccctagctccacaggcgtgcttctgccctgctcccatgtggcttctgtggctctgggctcattcgaacatgctccctttcagttcccccggctctgtggcactacactctcctgggccacctcctctttgtcccctctgtccctggctcggggcaggttccctgctctgctctgctgtcccttgagccctggtgtccacgaggtcgtgtcttgcttgtcttctctccctgcaccttcccctggtgtgatttcacc

SEQ ID NO: 516919 - DNA, 484 bp, Homo sapiens
gcagcggtcaatatatgaccaagagcaccttgaactgcaaaccaytgtttagtgctataaggcttgggaacaatgtctctctgatattgttcaccaggcaagctttagaaataggtcaagaaaaaaatataaggaaaatatacacaacccaaggaagtctgcgtcatgtgtgtgtgtgtgtgtgtgtgtgtgtgtgtggtcttttcataggcacaactttgtgctcagaatgaagcctacatgtctggattattctttaattacattttcttctaccaagtgtcctgtagttctgatcatctcaactccttgtaagaaaataaacagagattagatttgcctcttcagaatttgagtttcacagacaataaactgaagcaagcagcaaaaaaataagagaggagaagtccgatcggggaggaaggattttacagccaagtccacaggccggattcttggtatcttccctggctgatggagacag

SEQ ID NO: 516920 - DNA, 384 bp, Homo sapiens
tctatctctgtctttttattctactttctgggaggctttgtcagtatttactttaatctcttctctggactttctaacctttgccattatggttttgttttttgttgtttttttttttcttaaatttctaagagtttctttatattatctgattttttaatattatgctattattgtttcaggaacataatatcctctcttatcactctgataatattagttatcattattattctatgtttccttccagctctttttttccagtttatttgtgttggtctctmtttcctgtacgaggcttcctcagttgtctgctggccctggtctgttgcttcacacttagaaactaagcagatgctccatttcagggtgggatggtccccc

SEQ ID NO: 516921 - DNA, 537 bp, Homo sapiens
ctgtcaaagccatgtggaagatttccatattttgccagagcccctgtcccacccctgsggccgcccactaggtctttgtgactgaacacctcggtggcagccccagcacctcatggcaaccgaagcccatcattcctactcctcctccaacccgggtcatcttgttcttgcacctgctttgaaagcaagcccacagttctccaaattggccaggctttagaagccaggaaatttttttctgtgcccatcaatgacatccttaagtcttgcctgttttttcactggtaagggaacaactttccttctcctctccaatacatgccccagtgtagacatttgccaccctggactcagcatcctctgtgtgcccattgtcaccagagcagctccttgccaccctgcctagttccatgttcctggccatccccgtttgtcctatatgacacaaccagagtatccatccttccaggctccttcatgacttacccctgctcaggagccatcaacagcccatactattggattgctctctttgac

SEQ ID NO: 516922 - DNA, 492 bp, Homo sapiens
gtgtcctctctgcagggagtggttacactgctgctgggatgccccagcagcccaggcaccacctccttgcacaataatgttcaaaagcaggaaaggggctgggtgcagtggctcacgcctgtaattcccagcactttgggaggctgagacaggtagatcacctgaggtcaggagttcgagaccagcctggccaacatggtgaaatcccatctctactaaaaatacaaaacttagccaggcatggtggtggccgcctctaattccagcyactcaggaggctgaggcaggagagctgcttgaaccgggcaggcggaggttgcagtgagccaagatcgtgccactgaactccagcctgggtgacagagcgagactatatctccaaaacaaaagcagaaaagagactttcttcccatcgtgactctttttatcatagaggaaattattccccagatgtccctccccactcctcgattccggactccaccccagacc

SEQ ID NO: 516923 - DNA, 641 bp, Homo sapiens
atgaaaaatattatcatctactttagccttcatttacataataagaaacaccacaccaaaaaaggatatgaaatcagaataaagcactgtcttttatttttatttattttttttagaggcagggttttgctttgtcacccaggctagagtgcagtggcrtgatcatagctcactgcagccttgaataaggacagtcttttaaataagacacatttagctttattgaaagtttacataacatttatcctatttttctcattttgccgctgaccaacagaaaatataccagcacttaagagccaccaatgcgggaaaagctcgcactttgtgaaagtcagatccggtttgaattctgtctcatctcatgtagatggtctgtggccttgggaaatgtttttacctttatgaacctcaactttctcgttactaaaatgggaattataagtaccttgcaggattttggtgagatttagagataaggaaaccaaccacctgatctctggaagatgggtgtccaatcagtgggggctgggaccatcagaaggctggctcagtgttattgactgggctcatgcacgaatgaatggctagcagagacaaaagttcatgatctgtttcctcatttatttgagacaaaaggg

SEQ ID NO: 516924 - DNA, 641 bp, Homo sapiens
atgaaaaatattatcatctactttagccttcatttacataataagaaacaccacaccaaaaaaggatatgaaatcagaataaagcactgtcttttatttttatttattttttttagaggcagggttttgctttgtcacccaggctagagtgcagtggcgtgatcatagctcactgcagccttgaataaggayagtcttttaaataagacacatttagctttattgaaagtttacataacatttatcctatttttctcattttgccgctgaccaacagaaaatataccagcacttaagagccaccaatgcgggaaaagctcgcactttgtgaaagtcagatccggtttgaattctgtctcatctcatgtagatggtctgtggccttgggaaatgtttttacctttatgaacctcaactttctcgttactaaaatgggaattataagtaccttgcaggattttggtgagatttagagataaggaaaccaaccacctgatctctggaagatgggtgtccaatcagtgggggctgggaccatcagaaggctggctcagtgttattgactgggctcatgcacgaatgaatggctagcagagacaaaagttcatgatctgtttcctcatttatttgagacaaaaggg

SEQ ID NO: 516925 - DNA, 634 bp, Homo sapiens
ttcagcttctgtttgtttcactcttctcaatcaagagggaaatgaaaggaatataaatgaactgcactctctccccaaaataaatcccargtagtttataaagttaaattttaaaaccaggtagatgattatttaccatgtttctctaagcctaaaagcaatgaatgagccaaaaaggaaaaaactatggatttgactaccataaagatcattctaaacaataaattatactccacaaggccccataagcaaaagtaaaaagttaatgtaaatttcaggaaggtattgtaacaactataatgggaattactatattaaagataaaatcatttagttagtagataattacaacttaattagaagaccactaacaccttccaggaaatagaatgcaaacagctaaaaagtccagatccttggactctgtcatttctcttctaggaattttccccatcgaaacaagagaaatagaataaagaattattcacagtaatgttcaccacaatgtgttcactcaagtgcttatagcatctttattatgtgccagggatcttattaggtatataatgatgaatgtgattttgctcctatacttaaggaacttctatgttctgtagaggaaatacccaagtta

SEQ ID NO: 516926 - DNA, 634 bp, Homo sapiens
ttcagcttctgtttgtttcactcttctcaatcaagagggaaatgaaaggaatataaatgaactgcactctctccccaaaataaatcccaggtagtttataaagttaaattttaaaaccaggtagatgattatttaccatgtttctctaagcctaaaagcaatgaatgagccaaaaaggaaaaaaytatggatttgactaccataaagatcattctaaacaataaattatactccacaaggccccataagcaaaagtaaaaagttaatgtaaatttcaggaaggtattgtaacaactataatgggaattactatattaaagataaaatcatttagttagtagataattacaacttaattagaagaccactaacaccttccaggaaatagaatgcaaacagctaaaaagtccagatccttggactctgtcatttctcttctaggaattttccccatcgaaacaagagaaatagaataaagaattattcacagtaatgttcaccacaatgtgttcactcaagtgcttatagcatctttattatgtgccagggatcttattaggtatataatgatgaatgtgattttgctcctatacttaaggaacttctatgttctgtagaggaaatacccaagtta

SEQ ID NO: 516927 - DNA, 634 bp, Homo sapiens
ttcagcttctgtttgtttcactcttctcaatcaagagggaaatgaaaggaatataaatgaactgcactctctccccaaaataaatcccaggtagtttataaagttaaattttaaaaccaggtagatgattatttaccatgtttctctaagcctaaaagcaatgaatgagccaaaaaggaaaaaactatggatttgactaccataaagatcattctaaacaataaattatactccacaaggccccataagcaaaagtaaaaagttaatgtaaatttcaggaaggtattgtaacaactataatgggaattactatattaaagataaaatcattyagttagtagataattacaacttaattagaagaccactaacaccttccaggaaatagaatgcaaacagctaaaaagtccagatccttggactctgtcatttctcttctaggaattttccccatcgaaacaagagaaatagaataaagaattattcacagtaatgttcaccacaatgtgttcactcaagtgcttatagcatctttattatgtgccagggatcttattaggtatataatgatgaatgtgattttgctcctatacttaaggaacttctatgttctgtagaggaaatacccaagtta

SEQ ID NO: 516928 - DNA, 634 bp, Homo sapiens
ttcagcttctgtttgtttcactcttctcaatcaagagggaaatgaaaggaatataaatgaactgcactctctccccaaaataaatcccaggtagtttataaagttaaattttaaaaccaggtagatgattatttaccatgtttctctaagcctaaaagcaatgaatgagccaaaaaggaaaaaactatggatttgactaccataaagatcattctaaacaataaattatactccacaaggccccataagcaaaagtaaaaagttaatgtaaatttcaggaaggtattgtaacaactataatgggaattactatattaaagataaaatcatttagttagtagataattacaacttaattagaagaccactaacaccttccaggaaatagaatgcaaacagctaaaaagtycagatccttggactctgtcatttctcttctaggaattttccccatcgaaacaagagaaatagaataaagaattattcacagtaatgttcaccacaatgtgttcactcaagtgcttatagcatctttattatgtgccagggatcttattaggtatataatgatgaatgtgattttgctcctatacttaaggaacttctatgttctgtagaggaaatacccaagtta

SEQ ID NO: 516929 - DNA, 400 bp, Homo sapiens
aaacctctagtggcatcggagcaagacacatctgagaaacagggacgctcgagaactagagaaccaccagtcctacacggaggtcccagttccatgaggtcaaaaagaagtccccaaccctccccattccaatacagagctgcagggagagcttggggacccgtagtgcttccatagggggaagtttccacagtgactttgacatccacayggagcagtccatctgggctagaggctaccgcctttctgtttacataaccaagtactttggaaagggttctgctggaatgtcgctggcagggacttcttggtcttgcatgagctgtgctggcagatccctccttccattcttcctgggggaggttttgacactggctggctgccccatgaaccatcccag

SEQ ID NO: 516930 - DNA, 658 bp, Homo sapiens
tgctgtgctgtcaacgacaaagaagatacggtcctacccctaaaaagcgacggtgggaggcatgtgaacaggtcgtcactgtccataggatcgaactgcgactgccttccagcacgcatgcttctggagaatagaggagaggaactcgcttctgcttggaggaacaggagcagggaacactggaggctccaagtaaagaatgagtaggtgcgtcccaggcaggaaagggatgggaggggaatggcaatgtgaagggagcaattgcaaaggctgaagtccagatgaggtcaaatgtgcttggggagaggcaagggtgtgtgtgtgtgtgtgtgtgtgtgtgtgtgtgtgtgtgtgtgtgtgtgatggttaacataagaaaagamgtttaagaaataagaagcctctagattgtgacgggctttttcttccatgctaaggactgtggtctacgaagaatgcagggtgctgaggtgggggttgtggatgtggtcaggggtataggaagctggccaaaggataagctgtgatgattttataatgactcaggaaagagagcccctaaactatgacaatggcagtcagcacctcaccctaaaagaatgtgggaagacaatgtatggaccgaggcattggagaaatttgattggaaagattagct

SEQ ID NO: 516931 - DNA, 658 bp, Homo sapiens
tgctgtgctgtcaacgacaaagaagatacggtcctacccctaaaaagcgacggtgggaggcatgtgaacaggtcgtcactgtccataggatcgaactgcgactgccttccagcacgcatgcttctggagaatagaggagaggaactcgcttctgcttggaggaacaggagcagggaacactggaggctccaagtaaagaatgagtaggtgcgtcccaggcaggaaagggatgggaggggaatggcaatgtgaagggagcaattgcaaaggctgaagtccagatgaggtcaaatgtgcttggggagaggcaagggtgtgtgtgtgtgtgtgtgtgtgtgtgtgtgtgtgtgtgtgtgtgtgtgatggttaacataagaaaagaartttaagaaataagaagcctctagattgtgacgggctttttcttccatgctaaggactgtggtctacgaagaatgcagggtgctgaggtgggggttgtggatgtggtcaggggtataggaagctggccaaaggataagctgtgatgattttataatgactcaggaaagagagcccctaaactatgacaatggcagtcagcacctcaccctaaaagaatgtgggaagacaatgtatggaccgaggcattggagaaatttgattggaaagattagct

SEQ ID NO: 516932 - DNA, 622 bp, Homo sapiens
ctatatacttcttcccaggcatgtggcgagacgtaatggtrcattttctggttatgaatggcacagctcggcaactcgccgattattatttccattccctgtgatgcattatcaatctaattccccattacctgccgtttttgttttttttcccatgcgttccccatacagcaaggacaaagaaaggcaaaaaccctgcaaagaaggctgcatcaccaatgaacaggctaatcccacaggaaattgtggagtggtagcttcaagtgtgcagggagaggttttggctaatttgaagtgcaaaatatcattaaaaggtttgggattctgcattaggaccaggactccggactttaaggttggtaatgcattactaactgaggaagaggggccataccacagcacagactaagaaaagttttgacacaggtgggcctaacaagcgacactgtgctttagaccactggggttttccagatttctttcttttttttcctttatttttatttttttagagacaggttctccctctgttgcccaggctggagcgcaatggtgcaatcatagctcactgtaacctccaactcctgaactcaaacaatcctcccattttagcctcctggag

SEQ ID NO: 516933 - DNA, 622 bp, Homo sapiens
ctatatacttcttcccaggcatgtggcgagacgtaatggtacattttctggttatgaatggcacagctcggcaactcgccgattattatttccattccctgtgatgcattatcaatctaattccccattacctgccgtttttgttttttttcccatgcsttccccatacagcaaggacaaagaaaggcaaaaaccctgcaaagaaggctgcatcaccaatgaacaggctaatcccacaggaaattgtggagtggtagcttcaagtgtgcagggagaggttttggctaatttgaagtgcaaaatatcattaaaaggtttgggattctgcattaggaccaggactccggactttaaggttggtaatgcattactaactgaggaagaggggccataccacagcacagactaagaaaagttttgacacaggtgggcctaacaagcgacactgtgctttagaccactggggttttccagatttctttcttttttttcctttatttttatttttttagagacaggttctccctctgttgcccaggctggagcgcaatggtgcaatcatagctcactgtaacctccaactcctgaactcaaacaatcctcccattttagcctcctggag

SEQ ID NO: 516934 - DNA, 409 bp, Homo sapiens
tcaccaatgaacaggctaatcccacaggaaattgtggagtggtagcttcaagtgtgcagggagaggttttggctaatttgaagtgcaaaatatcattaaaaggtttgggattctgcattaggaccaggactccggactttaaggttggtaatgcattactaactgaggaagaggggccayaccacagcacagactaagaaaagttttgacacaggtgggcctaacaagcgacactgtgctttagaccactggggttttccagatttctttcttttttttcctttatttttatttttttagagacaggttctccctctgttgcccaggctggagcgcaatggtgcaatcatagctcactgtaacctccaactcctgaactcaaacaatcctcccattttagcctcctgga

SEQ ID NO: 516935 - DNA, 554 bp, Homo sapiens
ctgggaacacaggcacacgccaccatgcttggctggtttttcaggtttctgaagtctaaacagatccatgttggagtgcggtctgmtacactcactcagcgatttgcttatacaaccagggtccggggagtgctcaacatgagcagcgagttaatgtagtgagtgtatgcaagcaaaacatacgcagtagccacggattggcaaataattgctaagaaggcaggagcaaaaaggaacatgtgaatgtaagtcagagtttggggcaaagggtatggatgtaccaatgctcctgaccacagacaacacgtttcttcttgtattgcatcattgaatggctggagctctacctttaaaacaaaaagccagaaaacatcacacagtgtagagatcgcccttcctaacaagctagagcctacaaggaacttctctgaattagaattaattatgctggtacatctgtagagaggttttgatttgactcaaactgagactaccactcatttcttcttgattatttggtagtaataaggcccctgaactgaaccggatccccc

SEQ ID NO: 516936 - DNA, 524 bp, Homo sapiens
gggaacacaggcacacgccaccatgcttggctggtttttcaggtttctgaagtctaaacagatccatgttggagtgcggtctgctacactcactcagcgatttgcttatacaaccagggtcckgggagtgctcaacatgagcagcgagttaatgtagtgagtgtatgcaagcaaaacatacgcagtagccacggattggcaaataattgctaagaaggcaggagcaaaaaggaacatgtgaatgtaagtcagagtttggggcaaagggtatggatgtaccaatgctcctgaccacagacaacacgtttcttcttgtattgcatcattgaatggctggagctctacctttaaaacaaaaagccagaaaacatcacacagtgtagagatcgcccttcctaacaagctagagcctacaaggaacttctctgaattagaattaattatgctggtacatctgtagagaggttttgatttgactcaaactgagactaccactcatttcttcttgattatttggtagtaat

SEQ ID NO: 516937 - DNA, 446 bp, Homo sapiens
tcgagaccatactggccaacatggtgaaaccccgtctctactaaaaatacaaaaattagctgggcgtagtggcacgtgcctgtattcccagctacttgggaggctgaggcagggtggcagaggttgccgtgagccgagattgcaccactgcactccagcctggtgacagagcaagactccatctgaaaacaaaacaaaacmaaaacaaaaaacaaacataactgaacgcacacacacactcattagccccccaaataagcattagtgcaatgtactaaacagtagcaccagctctgaccatcttctgtaaacgtaagagaggaacagtgatagggatttttaaaataatgccactggtggtagagctggttacttccaatgtaagggtgtgtctaaattattccttataagagaaggatgtgctgattccatgagacaacggaaag

SEQ ID NO: 516938 - DNA, 446 bp, Homo sapiens
tcgagaccatactggccaacatggtgaaaccccgtctctactaaaaatacaaaaattagctgggcgtagtggcacgtgcctgtattcccagctacttgggaggctgaggcagggtggcagaggttgccgtgagccgagattgcaccactgcactccagcctggtgacagagcaagactccatctgaaaacaaaacaaaaccaaaacaaaaaacaaacawaactgaacgcacacacacactcattagccccccaaataagcattagtgcaatgtactaaacagtagcaccagctctgaccatcttctgtaaacgtaagagaggaacagtgatagggatttttaaaataatgccactggtggtagagctggttacttccaatgtaagggtgtgtctaaattattccttataagagaaggatgtgctgattccatgagacaacggaaag

SEQ ID NO: 516939 - DNA, 574 bp, Homo sapiens
ctccgccccccatatctggctatagcgtcctccagaaggttccaagactgcgatgagggtggctcctctcattttgatgaaggctttttttctttttttcaggtgggggacaaagtcttgctctgtcgcccaggctrgagtgcagtggtgtgatcttggctcactgcaacctccgcctcccaggttcaagtgattctcctgtctcatcttcccaagtagctgggattacaggcgtgcacaaccacaccgagctatttttttttttttttttgtatttttagtagaggcagggtttcaccatgttggccaggctggtctcgaactcctgacctcaagtgatccactctccttggcctcccaaagtgctgggattacaggtgtaagccactgcatccggcctgataaaggctttttttaaagtacatttccaactggtggaaacaattttggaagacagagcagaagatgctgtctgtgggctgaactgcagggcaatctgtctatgcaacctgcatgtgtccacaaccaaggctgcaggcatgctctggggctgaatgctcacgtcaccttccag

SEQ ID NO: 516940 - DNA, 574 bp, Homo sapiens
ctccgccccccatatctggctatagcgtcctccagaaggttccaagactgcgatgagggtggctcctctcattttgatgaaggctttttttctttttttcaggtgggggacaaagtcttgctctgtcgcccaggctggagtgcagtggtgtgatcttggctcactgcaacctccgcctcccaggttcaagtgattctcctgtctcatcttcccaagtagctgggattacaggcgtgcacaaccacaccgagctatttttttttttttttttgtatttttagtagaggcagggtttcaccatgttggccaggctggtctcgaactcctgacctcaagtgatccactctccttggyctcccaaagtgctgggattacaggtgtaagccactgcatccggcctgataaaggctttttttaaagtacatttccaactggtggaaacaattttggaagacagagcagaagatgctgtctgtgggctgaactgcagggcaatctgtctatgcaacctgcatgtgtccacaaccaaggctgcaggcatgctctggggctgaatgctcacgtcaccttccag

SEQ ID NO: 516941 - DNA, 503 bp, Homo sapiens
ctgagattccaggggtctatggcaagagcagaccactccttacctgttcaactcacctcttccccagggatctctgggggccgggagtragccccattgctcatcagccccatgcagggttcccagcttactcccccttcagcccagtgtctgcatcctcccttctccactctcaatgccttccctctgaagatctgcctggagtgtgactgtcttcccaatgttcaagtctctcagtgggagatattcctcctggcagcatctagtagtccttcttggtcgcccttccatctcaacctctattatcctattttccaggtgaggaatctgaggctcagagagattagatgacttcacagatagctgtggagttgaaggctacactgtgaggcagcagtggagtcaagatttgaagcaatctgtctccagaatttgtctttttaaccctaagcacactgtcttgtgaccatagttatgatcttgttatagctttgcttttaatc

SEQ ID NO: 516942 - DNA, 581 bp, Homo sapiens
ctgtaagagagactcagacaatcaccagaaccctctctccttcctaagacatgttggtcacagttcctgcacatttttcttgctctccatgacctagtatctgccaaaatataatcgatgttggaaaaatttttacccccagccccatgtaagtatgttgtatttccccaactagtcacagactgaaagctgaggacaagaagcctgcctttcatattgtgagatatgctcccaataatggatactcaccgaatattaactggctgctgatggaacaatgagttttactatacctctttatctaccttgcactcttgttgccartgaacaaaccacatcctggaaaggattttcaaatggagaaaaagtactgaaaaaataaatttcctcatttggaacaaaggtttgatttgctatgtacttagccctctctgaggaccacccatgtaatttctcccctgaataatttgtgaggttacctctcctctgcccactaaatgatttgaaggtagattatatgtgaactcatcttttatcacacaatatcatgtataatgcttagcacaaagtaggaactcaga

SEQ ID NO: 516943 - DNA, 415 bp, Homo sapiens
tgccagcaaacctgagggaaagagagaagattagtgctcggggtcaccatgatgcctttgatcgatgctgctccagtaactacagtggcattaggacttaycgcttagatgacaatagtgctctttacatgttttctgtttgaacctaaaatagcagttgacatggtggtcctgaagcaaagcctttcaccagtaaaagatgttttctattgttgcaatgaccttgctttgctctgattataatttgaaagactgtaggaaacacttcaatgtagtataagagtctgtaccttgctggaatattcaagaagatgaaagaataatatattgggtacaatagattactatggtacagaaactgggctattccctttcttcaagtgaaggctgtgggatctattactgcaggccggtg

SEQ ID NO: 516944 - DNA, 615 bp, Homo sapiens
agacacacctagcagtgtgccatgtcaatttatcattgccatggcaacacctgggagttactaccccattccttagtgatgacccaatgaaccaaaagctacgaccccttccctagaaatttctgcataaaccaccccttaacctgcatgcaattaaaagtgggtataattatgactgcaaaactgccctgagctgctactctctgcccatgggrtagccctgctctgtaggaacagtcacagagttgtaacactgcctctttaataaagctgttttcttctacctctggtttgctcttgaattccctcctgggcaagtccaagaacgcttgtagaccaagccttactttggggcttgccttccctgaatcaaaactgtaacagggcagctcatacctgagccactacgttaaaattaagaacacaatgatgtgtttcttcggaagaaatgcagtgggagtctccatgaaaaagtcatagtccagctcaaatagttacactggatgatggtacacccatccttctttccctcaccactgaagatggctaagccaggattctgcagcccaaccccgaaagactcacaccgttcctctctagaaaggaggaactcag

SEQ ID NO: 516945 - DNA, 615 bp, Homo sapiens
agacacacctagcagtgtgccatgtcaatttatcattgccatggcaacacctgggagttactaccccattccttagtgatgacccaatgaaccaaaagctacgaccccttccctagaaatttctgcataaaccaccccttaacctgcatgcaattaaaagtgggtataattatgactgcaaaactgccctgagctgctactctctgcccatggggtagccctgctctgtaggaacagtcacagagttgtaacactgcctctttaataaagctgttttcttctacctctggtttgctcttgaattccctcctgggcaagtccaagaaygcttgtagaccaagccttactttggggcttgccttccctgaatcaaaactgtaacagggcagctcatacctgagccactacgttaaaattaagaacacaatgatgtgtttcttcggaagaaatgcagtgggagtctccatgaaaaagtcatagtccagctcaaatagttacactggatgatggtacacccatccttctttccctcaccactgaagatggctaagccaggattctgcagcccaaccccgaaagactcacaccgttcctctctagaaaggaggaactcag

SEQ ID NO: 516946 - DNA, 615 bp, Homo sapiens
agacacacctagcagtgtgccatgtcaatttatcattgccatggcaacacctgggagttactaccccattccttagtgatgacccaatgaaccaaaagctacgaccccttccctagaaatttctgcataaaccaccccttaacctgcatgcaattaaaagtgggtataattatgactgcaaaactgccctgagctgctactctctgcccatggggtagccctgctctgtaggaacagtcacagagttgtaacactgcctctttaataaagctgttttcttctacctctggtttgctcttgaattccctcctgggcaagtccaagaacgcttgtagaccaagcctyactttggggcttgccttccctgaatcaaaactgtaacagggcagctcatacctgagccactacgttaaaattaagaacacaatgatgtgtttcttcggaagaaatgcagtgggagtctccatgaaaaagtcatagtccagctcaaatagttacactggatgatggtacacccatccttctttccctcaccactgaagatggctaagccaggattctgcagcccaaccccgaaagactcacaccgttcctctctagaaaggaggaactcag

SEQ ID NO: 516947 - DNA, 615 bp, Homo sapiens
agacacacctagcagtgtgccatgtcaatttatcattgccatggcaacacctgggagttactaccccattccttagtgatgacccaatgaaccaaaagctacgaccccttccctagaaatttctgcataaaccaccccttaacctgcatgcaattaaaagtgggtataattatgactgcaaaactgccctgagctgctactctctgcccatggggtagccctgctctgtaggaacagtcacagagttgtaacactgcctctttaataaagctgttttcttctacctctggtttgctcttgaattccctcctgggcaagtccaagaacgcttgtagaccaagccttactttggggcttgccttccctgaatcaaaactgtaacagggcagctcatacctgagccactacgttaaaattaagaacacaatgatgtgtttcttcggaagaaatgcagtgggagtctccatgaaaamgtcatagtccagctcaaatagttacactggatgatggtacacccatccttctttccctcaccactgaagatggctaagccaggattctgcagcccaaccccgaaagactcacaccgttcctctctagaaaggaggaactcag

SEQ ID NO: 516948 - DNA, 621 bp, Homo sapiens
agtaacttcagtggcttctttaggcaaatgcaggtttaatttattaaaagctcctgaaatctcaacagcagaaggaataccaatgcagccaagtgactcacttttaaattgaatttacttcattgccatactgcatggccaatctataaacccagatcttctccaaatgcattggcctgaatggataaaacaaactttattggtaacaccttgaaagtcacttttagaagccttgattgcacctaatttcaaatatgtcgttatggtttgaggattctattaaaatycattttattctgcatacagaaaatcacaagataatgtttctgcctaacataatgcaactatcctgtaagttttttcggattttagacgttagagatgttagattttagggatttaggctagagggattttgttctttagggatttcaatatttgggactttggcattcaggattgtgtcttcaggataggattattatccaaaatctgtatgctttttgagaggtcctcgtgagtttaaataatacagtcaatgaagatcctgtcaagaagatgacattgtgtgaagattagagttagctgctacgtagatctagagggaatgtatttctggca

SEQ ID NO: 516949 - DNA, 621 bp, Homo sapiens
agtaacttcagtggcttctttaggcaaatgcaggtttaatttattaaaagctcctgaaatctcaacagcagaaggaataccaatgcagccaagtgactcacttttaaattgaatttacttcattgccatactgcatggccaatctataaacccagatcttctccaaatgcattggcctgaatggataaaacaaactttattggtaacaccttgaaagtcacttttagaagccttgattgcacctaatttcaaatatgtcgttatggtttgaggattctattaaaattcattttattctgcatacagaaaatcacaagataatgtttctgcctaacataatgcaactatcctgtaakttttttcggattttagacgttagagatgttagattttagggatttaggctagagggattttgttctttagggatttcaatatttgggactttggcattcaggattgtgtcttcaggataggattattatccaaaatctgtatgctttttgagaggtcctcgtgagtttaaataatacagtcaatgaagatcctgtcaagaagatgacattgtgtgaagattagagttagctgctacgtagatctagagggaatgtatttctggca

SEQ ID NO: 516950 - DNA, 648 bp, Homo sapiens
ctgtaaaaatgactgatcacttatttccattccaaaataaatgcatgcatatctttcaggaatatcctaaaaagaagtgtggtgatayacaaagcaagatccagacatcctatgttgtttctggataggctgtggtcctacaaccgctgcttagaagtactacatgttggtagccagtacatgtgaagatgtggagaaacaggcatgctctacatactggtatgggcatataaaataaacaacctatctgtaggaaaatattacaatatatattaaacttatgaacttatcctaggaaaacaatgttaactgaaaaaaaagtatgaacaaatagtaaatactatattatttgtatagtggaaccctcgagagcaacttaattgtccacagtataagattgatctagaaatagaatacataaatgccataaaactctgtatagaatactagttgagagtctgagtacctaacttggacagcctaaattcaaatctcgtctttgttactaactacctgggtaactcctgtttaagccccaagtcttccatcatagaattactgtgaaagaaggtaaaatatgcatttcatagggttattgtgagaactagtgcataaaatattcagcacattgcctgacatgagttagat

SEQ ID NO: 516951 - DNA, 648 bp, Homo sapiens
ctgtaaaaatgactgatcacttatttccattccaaaataaatgcatgcatatctttcaggaatatcctaaaaagaagtgtggtgatacacaaagcaagatccagacatcctatgttgtttctggataggctgtggtcctacarccgctgcttagaagtactacatgttggtagccagtacatgtgaagatgtggagaaacaggcatgctctacatactggtatgggcatataaaataaacaacctatctgtaggaaaatattacaatatatattaaacttatgaacttatcctaggaaaacaatgttaactgaaaaaaaagtatgaacaaatagtaaatactatattatttgtatagtggaaccctcgagagcaacttaattgtccacagtataagattgatctagaaatagaatacataaatgccataaaactctgtatagaatactagttgagagtctgagtacctaacttggacagcctaaattcaaatctcgtctttgttactaactacctgggtaactcctgtttaagccccaagtcttccatcatagaattactgtgaaagaaggtaaaatatgcatttcatagggttattgtgagaactagtgcataaaatattcagcacattgcctgacatgagttagat

SEQ ID NO: 516952 - DNA, 648 bp, Homo sapiens
ctgtaaaaatgactgatcacttatttccattccaaaataaatgcatgcatatctttcaggaatatcctaaaaagaagtgtggtgatacacaaagcaagatccagacatcctatgttgtttctggataggctgtggtcctacaaccgctgcttagaagtactacatgttggtagccagtacatrtgaagatgtggagaaacaggcatgctctacatactggtatgggcatataaaataaacaacctatctgtaggaaaatattacaatatatattaaacttatgaacttatcctaggaaaacaatgttaactgaaaaaaaagtatgaacaaatagtaaatactatattatttgtatagtggaaccctcgagagcaacttaattgtccacagtataagattgatctagaaatagaatacataaatgccataaaactctgtatagaatactagttgagagtctgagtacctaacttggacagcctaaattcaaatctcgtctttgttactaactacctgggtaactcctgtttaagccccaagtcttccatcatagaattactgtgaaagaaggtaaaatatgcatttcatagggttattgtgagaactagtgcataaaatattcagcacattgcctgacatgagttagat

SEQ ID NO: 516953 - DNA, 656 bp, Homo sapiens
tgctaatttttaaaatttttgtagagaaggggtttcatcatgttgctcaggctgggctagaactcctagcctctggaagtgctgggattacaggcgtgagccactgtgcgggcctaagcataactttcaaataataactccagcaagagagagacatgcagtaagcatggtgaaacaagcacctcagtttaaatcccccaaatccttcactatggccagtgccagagagcctttctataggaatacaatgtgagcagcttcagtggggcatatctgccgaccagcctggggttagagctgagcactacctgagtgagtggcaagttgactgtaacaagagrttcaatatcagccactatcaatgagagttgtaactcaggtggtgattctggaactgtgtcactcttctagtcttccattttggaatgaatgcaaggtctacctcgtttttcatacaaggaattctgctgaattcaactcttcccaatgccagagaccccaatttaaagctgtgactcactggcagcactttaagccgctactggaaattcttatagagtgaggaagatattcaactgacaaaggcattttcagtcatcatattttgtgggtccaggctttcaagtgtgaaggtgaaaattttggatatgtggaag

SEQ ID NO: 516954 - DNA, 592 bp, Homo sapiens
tgtgtgtgtatttacaaagcctttatcatattttttaaagcaagcttgtccaacctgcagcccacacaccacatacaactcaggagggctttgaatgctgcccaccacaaattkgtaaactttcttaaaacctgggatttttttggtgagtttttttttaaagctcatcaactatcattagtgtattttgtgtgtgtggcccaagacaattcttcttcttccaatgtggcccagggaagccaaaagattgaacactcttgttttaaaaccttggtcttataattttaaaaaccttaataataatggtttgatatttcttaaattatccccaatgagaaactttgacaatgtttataaaatgtattttcagatcatatgtgtgggtgtctgtgtgtatttcaaaccatatatttatatattttaaaatacatgtgtataggtagatatagataatatagatatagaaagcaagtttagacattatttttatgatccctactgggggcaaagcagatttggggagagtgagatttatccaaatttagtattgcaagagtcaacctcaagcctttggtatgcatggaggtgctca

SEQ ID NO: 516955 - DNA, 511 bp, Homo sapiens
  misc_feature (1)...(511): n = A,T,C or G
tacatgagataagagatagagcaatgggaggagaagcttctaagcttgtgtatggagtgtgtgtgtgtgtgtgtttgtgtacntggccggcacacgcacacttataggtctgaattatctatcaatactaccctcctctgccaatgcccatgataacctctcaagcacatttcacaagagaagcgtgagtctcccctgaagcgggtgggatgagaactgagacatgcacgtgtgagatctgagagcccttagcgatcgagaatgtcaagcttcaggatgaaattacacaaatgtgctgcattatctcttgtactgtctttaaaaagtaaaataaataaaagcttttgcggggaggaatgtttttcctcaccagcttcagagctgctcttaggcctgacagttgagctgggcaggcctttccttcgactccgcgctgccgcattattcggatattcggcacagggggctytttagagtcacaaggcgatgtacatcaagcctttcttctctc

SEQ ID NO: 516956 - DNA, 580 bp, Homo sapiens
aaataattagaacagtgcctggcacattatccagcaccttttcaagtttcaggtttttttaaataaaaaattgagcatcaagcttattttatatcttaaagtaaggattaaataagatactgcaagtaaagaatccagtcttacgcctgtttcgttagtagacagtcattcatttattgaaaatgtatttatagacttcctatgctagattttctacattttaaggrctgggcatttagagaagtttcaggcatactacagtctatggtcttttgatttattaaaaaaatagttagttactgttgttataacagataaggactgagtatagacctaatctacaaatcttagtcaaatcatgtttgtttttcttatctttcatcctcacttctgaggatatctaatttccctttgattcagagtttagaatccaattttccatcccacaaacagtatttgaatgtatctaactcaacgctgagctaataaggataacgaacattctggggccattttgaagtttgcaaagggctttcatgtgcagttttccccttggtgtacccctgatgcggtgagggac

SEQ ID NO: 516957 - DNA, 446 bp, Homo sapiens
aaaaccagctaagtgttgatcacaaccatcaaaaaaattcttgtctttacttacagtgtgactgtaactttcagaaagtaacacatcagtaaaatgcaggtaataatggtagctgcttttactagtgtgaaggaatgcttaagtacatagttcctaaaagacagtaagatttgaaaaatacattatacgtgtatttaaaaggacttaagtatgtcttgcaactctatcttattacagaatcatttgcttttaggtatatcattctgccttcaaaaaggaagaggagcaagtattttcaagggcaggcactsgttttttattctggaaccctagagattcagaccaggaaacctgttaggatgagggcttttaaggaggcaggaagagagaagctgtgacttgaaaacagatgaatccagaagtcacacacacaactgttcatcacc

SEQ ID NO: 516958 - DNA, 446 bp, Homo sapiens
aaaaccagctaagtgttgatcacaaccatcaaaaaaattcttgtctttacttacagtgtgactgtaactttcagaaagtaacacatcagtaaaatgcaggtaataatggtagctgcttttactagtgtgaaggaatgcttaagtacatagttcctaaaagacagtaagatttgaaaaatacattatacgtgtatttaaaaggacttaagtatgtcttgcaactctatcttattacagaatcatttgcttttaggtatatcattctgccttcaaaaaggaagaggagcaagtattttcaagggcaggcactcsttttttattctggaaccctagagattcagaccaggaaacctgttaggatgagggcttttaaggaggcaggaagagagaagctgtgacttgaaaacagatgaatccagaagtcacacacacaactgttcatcacc

SEQ ID NO: 516959 - DNA, 648 bp, Homo sapiens
ctgtatttgtttaagctcttggattgatgcctggcacattataatcattattattattattattgttgtcatggttattaacagtagcagcggtagtggcagtagctttgtgttacttgtctctattgaagaggtgacactagaccttrcttcccagatataagggattgtagactgtgagagatctgaagaatggaaaggagaaaacaattgttcaaattgggacacgtgtttgtgagtacaaatatgttaatttgggataactaatgtagagaaataaattttttcaagcagtttatacatttagtcaatatgcaaaacaaatttttaaataaatacataaagaactttgtaaaacagaagtctatgtttcattatgtctctattggatacccctcctcagggtaataatgcctttgggttaaaatatgagctgtccaccaaataacatactctccacacctctgcagtcacagagtaggaggatacagaaagttagttacagccaccaattgttaattattgaacaagacaatagtaataattaccatacctcaaagaaagtaaatatagtatagtttgctatcttgattctgttaagtgagcatgggctctggtctgactgtaagaactatagtcacaaaaata

SEQ ID NO: 516960 - DNA, 623 bp, Homo sapiens
caggaacccctaacaaagctgagcagggcttcagtttgcaggagctggtagagccaccagagaacatttctttggtctctactttttttgccatcttcttgctagtaaaaatttagtactaccaagtctgattagcagagcctatgtcttatgcccaggccctaattataaagaaagcaggrtggtgaatgtttggcattttcagcttttgtggctggggaaatccacacatgcaggaaaggcttcagttgctggaggattataaaggatgatcaattctacaatagcaagaatctcttataactcaaacattccttaacactaacaaccttttcttatattgttcctagactcaaaaatggttaataacactttggtatttataaaggtgacttatttatttaaaatattaactatccacagtggccattatatttgcatacagttcaatactcaaaagatctgtgaggttttgaagcagaaaaagaatttcatttcagctaagggatttagattatatataagatggtatatataatttactcttgaaatgggtaattgaattgttgctgaataaatatgagatgatatattgaaatagatacagtttgcaaatataaata

SEQ ID NO: 516961 - DNA, 628 bp, Homo sapiens
ttaatttaacagagaaaaaggaaattacattctgaatgtgtgtactttgtgttgtacgttctttcctgatacttcgaaaattaccagtgcagttaagggcattgtaataattaatcaggataaggaatcaaatgtaattcttgttcagaccttacctagcaaacaccacagggcaatttcaggcctcaatacgtctgcaggaccttttagaaactatatgcctcaggggcgtgaacacttgaaaaaattctgcaaaatattactcagtgtaatgttacttacattaattctctcaattttattttatttttattttaaaaaattattttatttataatttcaacttttattttagattcagggggtacatatgcaggtttgttacctgggtgtattgtatgttgctgaggtttggggtacaattgatcctgtcacccagtgctgagcatagtacccgatagtttttcaacccttacccacctscccttgcctccaagtggtcctcagtgtctattattaccagttttatgtccatgagtactcattgtttagctcccacttataagtgagaacatgtggtatttggttttctgttcctgtgttaatttgattaggataatggcctcca

SEQ ID NO: 516962 - DNA, 723 bp, Homo sapiens
acccagtttgagcttcctggctgctttgtttacctaytcaagcctccgcaatggtggacgccccttctgcagccaggcttgacaccttgctgttcgatctcggactagcagtgagcaaggctccgtgggcgtgggacccactgagccaggcgtgggatataatctcctggcgtgtggtttgctcagaccattggaaaaatgcagtgtttacgtggcagcgtcctgattttcccagtacagtctgtcactgcttcccttggctaggaaagggaaatcccccaaccccttgcacctcccgggtgaggcaatgccccgccctgcttcagcacaccctctgtgggctgcacccactttccaaccagtcccagtgagatgaaccaggtacctcagttggaaatgcagaaatcacctgtcttttgctttgatcatgctgcgaactgcagactggagctgttcctatctggccatcttggaactgactcccatctaaatctctttttatacaaaaatggtgtgactgaagaatggtaagaaaactcacatcatttacactagagataatccagagatgtaatatgaaattaagagactcctgggaaatttttgaagatttcactgaagaggtataggttttgatggattctaaaccactcttttccccttctttttgaataattatatatctatcaactgaaagtgaattataaaatgtcatttgatcag

SEQ ID NO: 516963 - DNA, 634 bp, Homo sapiens
cctttgtgagtactggggaaagttgaaaaaaggagttggaagcaggatacattaggaagtttcctctctttctatgaggcttggaactttaaaaataatactatctgccttttgagtatgacatctgaattattatttaggtgaaaagattctggatttttatcctgaacatagagttttcaaaaatcccttggtgattactcgtggaccctgcaatgaaaagtagaccataatgatgagctagtcataaaatgcatcattaatttgtccactctgatagaagttatttattgagatcagtgcatatttcactgtctctgagtaaccgccagcaaccctgattttgctttttcctttaaagggaggcagcaagcttaatcatgcactaaaggatttaaamattacaactcccaagacctgacaaaatacttttctgtcccactgactggaataaaatgcaaataataattctgcattgcttcccgaggaacaccgtatggaataactagttaatgaatgtcaagaacttaaaaaataacgattaaacatgaaacaaaggctaaacattattgtagtttattttttctcattgtggaactatctcatttcagtggcctagaccttctttttctac

SEQ ID NO: 516964 - DNA, 612 bp, Homo sapiens
tttctctgttttgttgcagaccaatgacaatttagggaccacaccagtctatagataacacttagagtagcaccagttgaccagatccctcaaatatttgattgattgattgactgatcgattgatttgagatgaagtctcactctgtcgcccaggctggagtgcagtggcgcgatctcggctcactgcaacctcccctccgcctcctgggttcaagcgagtctcctgcctcagcctcccgagtagctaggttkacaggcccacgccaccacgcctggctaatttttgtatttttagtagagacggggttttacatgttggccaggctggtctcgaactcctggactcaagtgatccacctgcctcagcctcccaaagtgctgggattaacaggtgtgagccactgtgcctggcctggagggaacttatttaatgctcaagaagtcagatcaggaaatggcagatgggtgctatgcctcttgtatcaaggctcagaagaggaggcagtgtgatgctcgttgcagtgctgtgttggtcaggaatcttggggtgcaacatccatgaaccccaattaaaccagcttaagccaaaaaggaaaggcatggactcaca

SEQ ID NO: 516965 - DNA, 612 bp, Homo sapiens
tttctctgttttgttgcagaccaatgacaatttagggaccacaccagtctatagataacacttagagtagcaccagttgaccagatccctcaaatatttgattgattgattgactgatcgattgatttgagatgaagtctcactctgtcgcccaggctggagtgcagtggcgcgatctcggctcactgcaacctcccctccgcctcctgggttcaagcgagtctcctgcctcagcctcccgagtagctaggttgacaggcccacgccaccacgcctggctaatttttgtatttttagtagagacggggttttacatgttggccaggctggtctcgaactcctggactcaagtgatccacctgcctcagcctcccaaagtgctgggattaacaggtgtgagccactgtgcctggcctggagggaacwtatttaatgctcaagaagtcagatcaggaaatggcagatgggtgctatgcctcttgtatcaaggctcagaagaggaggcagtgtgatgctcgttgcagtgctgtgttggtcaggaatcttggggtgcaacatccatgaaccccaattaaaccagcttaagccaaaaaggaaaggcatggactcaca

SEQ ID NO: 516966 - DNA, 480 bp, Homo sapiens
ggatcttgactgctgtattcatctctactcatgtctagtcctcctggtttcctcaaatgttcataaatattaacatattctaaacccaaatatagccaattactccaatccacctagactgtgatttttctcctaatccactcatgattggaatgggaaatggtcttggcrttttttgtggtaacttttatttatttttttactttaataaaccctaagagtgctgagagaataaacatggaaacaagggagtgtcttgaaaacacagtttcacttttctttccttggcagctcatctccaacaggtgaaccaaatccacaaaaattgattggaactgcatccctgttgcacatggttcctgcttcacaaggttgttcagaagccgacatcagaaatgaggagcaaaaacacaagcactccctaagttctggaaggccatcctacaagactgcctgccttgtttagagacatgcaccagc

SEQ ID NO: 516967 - DNA, 480 bp, Homo sapiens
ggatcttgactgctgtattcatctctactcatgtctagtcctcctggtttcctcaaatgttcataaatattaacatattctaaacccaaatatagccaattactccaatccacctagactgtgatttttctcctaatccactcatgattggaatgggaaatggtcttggcattttttgtggtaacttytatttatttttttactttaataaaccctaagagtgctgagagaataaacatggaaacaagggagtgtcttgaaaacacagtttcacttttctttccttggcagctcatctccaacaggtgaaccaaatccacaaaaattgattggaactgcatccctgttgcacatggttcctgcttcacaaggttgttcagaagccgacatcagaaatgaggagcaaaaacacaagcactccctaagttctggaaggccatcctacaagactgcctgccttgtttagagacatgcaccagc

SEQ ID NO: 516968 - DNA, 607 bp, Homo sapiens
tttagtcatgttgccaagaagaaaagaagacagaatgcctctagataaagaaatgctattcctatgtcaacttgctatgcaaagtgtggactgtggaccagcagcatgtgtgtcgcctggcagcttgttgcaaatgcagaatctgaagctctcatctagacctactaaacagacttcactttaacaatataaccgggcaagtcatatagtcattaaaatttgagaagtatgatctagcatagatattacttcataataaatgtttaatgtttcagttactattgctgcatagcaaaacaccccaaaattaatgacttaaaatgacaactaccactttattgtgaggaattcaggaaaggctcatttgggtgtttggcttatgatctttcatatgggtgcagtcagacaatgtctggatctgggactctggkggactgaagcacctggtcactggtctgacatctttttttcttcttatacaatctcagggcctctctatgtaatcttgctgctaggctagtttgggcttcccaaagcctggtagcctgaggtcagttggactgcttacacatggccgatggcttcaaaaaggagtactctagtggag

SEQ ID NO: 516969 - DNA, 360 bp, Homo sapiens
acttccaatatttgcaaactcagtaactaaataaagctttgggtttaggaaaacagttacattatactatatgagaatatgtttttgcaatcttaagataaattattgcaatgatartttaacactgattatctctatttttcagaagcagattttgcaaagagtggtatgtaaaaagcaattatcatgtaaaaaaatcattatgatttacatgagaagttaggaggtagtaacttccatgacagggatgcctgtaagatagtgttcacatttgtgcttgatggttttagttcattccggatgctgagagttgctaagagtttacatccaaacttaaaaatgtcagagaccaaggaaaaa

SEQ ID NO: 516970 - DNA, 494 bp, Homo sapiens
ctcagcctatgggaattacccgcattctgacgtttgccatgaataatgtacttagcatgaaatgagttcctcaatcttatcaggtatttggctggctggaagaaactttttatttaattttataaaactgtaatatacatgaatgtgggataggattatgggtggaagtgaattatgtctsatatccatagatagagtggatgtcaaatattagttgtactaagagatttttttcctcttgttttaataatgacttacagcataattaagtggccatcctagtccttccctaaaaggcaaagaaccctgtcctagtctttacaaagtgattcttacagtttgaacccactaaggacaaagcataaatattgtcatatgccgtcaccctacacaaacttgaaagacttccgtgtgatacaaatgaacctcaggggaaaatacactcaacgaggttgccaaaggcatgtttatcccctggctgtgcttcctgagtt

SEQ ID NO: 516971 - DNA, 707 bp, Homo sapiens
atcattgaaaattgcaagacattaatttgtggaatgaatatacagagagagctgatatattgaagcaacacacacaggaatattccactttagcctcacttccactctaggtaagagaatgttctattttaaacttacrtttagaattggataagcagttttagacaaagcaatactttgaataatagcagaaataatattatgagctaaattattcagtacctgttatgtgccaggccctgtgctcagtacttcacacatatgctttcttattttgttttcttatttttaaattttatttttagaaacagggtcttgctctgttatccaggctagaatgcagtggtatgatcattcataccaccttgacgtcctgggctcaagtgatcctcctgccttaacctcctgagtaggtaggactacagcggcctaaccctgtacctgagtagtttttcatttttttgtagagatgaggtctaactatattgcccaggctggtctgaaactcctggcctcaagtcttggcatcctggcctcctgcattggcaccctaaagtgccgggattacaggcatgagtcatcatgcccagcccatatatgctttcatgtaatcttaactaccacccaatatagtagaacttatttaaattttattgccagagaaacagaaactcagagaacttaagttattttcccaagaccatagt

SEQ ID NO: 516972 - DNA, 707 bp, Homo sapiens
atcattgaaaattgcaagacattaatttgtggaatgaatatacagagagagctgatatattgaagcaacacacacaggaatattccactttagcctcacttccactctaggtaagagaatgttctattttaaacttacatttagaattggataagcagtttyagacaaagcaatactttgaataatagcagaaataatattatgagctaaattattcagtacctgttatgtgccaggccctgtgctcagtacttcacacatatgctttcttattttgttttcttatttttaaattttatttttagaaacagggtcttgctctgttatccaggctagaatgcagtggtatgatcattcataccaccttgacgtcctgggctcaagtgatcctcctgccttaacctcctgagtaggtaggactacagcggcctaaccctgtacctgagtagtttttcatttttttgtagagatgaggtctaactatattgcccaggctggtctgaaactcctggcctcaagtcttggcatcctggcctcctgcattggcaccctaaagtgccgggattacaggcatgagtcatcatgcccagcccatatatgctttcatgtaatcttaactaccacccaatatagtagaacttatttaaattttattgccagagaaacagaaactcagagaacttaagttattttcccaagaccatagt

SEQ ID NO: 516973 - DNA, 707 bp, Homo sapiens
atcattgaaaattgcaagacattaatttgtggaatgaatatacagagagagctgatatattgaagcaacacacacaggaatattccactttagcctcacttccactctaggtaagagaatgttctattttaaacttacatttagaattggataagcagttttagacaaagcaatactttgaataatagcagaaataatattatgagctaaattattcagtacctgttatgtgccaggccctgtgctcagtacttcacacatatgctttcttattttgttttcttatttttaaattttatttttagaaacagggtcttgctctgttatccaggctagaatgcagtggtatgatcattcataccaccttgacgtcctgggctcaagtgatcctcctgccttaacctcctgagtargtaggactacagcggcctaaccctgtacctgagtagtttttcatttttttgtagagatgaggtctaactatattgcccaggctggtctgaaactcctggcctcaagtcttggcatcctggcctcctgcattggcaccctaaagtgccgggattacaggcatgagtcatcatgcccagcccatatatgctttcatgtaatcttaactaccacccaatatagtagaacttatttaaattttattgccagagaaacagaaactcagagaacttaagttattttcccaagaccatagt

SEQ ID NO: 516974 - DNA, 610 bp, Homo sapiens
ccagcatacagattctgtgtgccatgcagccgctgctaggaaggtaggaaaggagtggcaatggcaattcaagactgttttattctgcccttttcagtacctatttcagtaatatgaggttaactagaggaactgtgattgctcacctgatttttggttgttataaagtacatactttttttgtgtagatggttgttaaatttggtgttcctgtaaggggtagggggaataggtcctctgcccccacccagagaataacctaccttatctttcttggcagatagttctcattaaaaataccttgtcctgaacattttgtgtttattttagtaactgycaactatatgacaatgaacaaatgtatagaaaagtgaacaatagagaatgacaaatctatttggccattgtatagtgtgtgggaatttacacttactaaaaggttttctgctcgaaagagctatgcccagggttattggatccaaagtttaacattatgcactctgttgatacaaacattttactgaactttcagaggcaaaatttggggtgccttagtgagagtgaagaggaggtttcatgcaaagcatgtgcctacttttctaagtgttgc

SEQ ID NO: 516975 - DNA, 556 bp, Homo sapiens
ctggagttcatgtgggtaggcttgcgaggggccaaggccaagctgaggtatcactgggcatgggcgaagattaagrtattgactttaaggtgcgttgagcccaagttgcaggtgtagttggttttattcagtgctggattttgaaggaaagacttgaagaatggactctggatgtgtccagcgtctattggaagtgtatgtaaaagtactggggaaactggaagtgagagcctattgaattgtgcaggatgcaatagccaatggggtaggaataaggcaagggtcatagagtgggcttagaaaatcctctctattacctgttttttttttctcggattacttagtccataaaacagctatctatgggtgatactgtaatgctgctatattgaatattatccaaatagactaataagtataaaagtgctatatctgccttttcgttagtattttcctactgaatctttttccatccctttatttttaactttttccttgatttttttttcttttttttgaaaccgactctcgctttgtcacccaggctacagtgcaa

SEQ ID NO: 516976 - DNA, 470 bp, Homo sapiens
catgctccttgtctcagtggagctcccctttgccccctgactgagtctgaggggcttctgcatgttccctcccattgctgyctccaggatgcatctttctggcatctctaacctcactctgagagtggcagccctgactgcctggcacctcatacacactgctagctcagaactcctcagggttcggtcataattgttgtgatgttgtatccctgaaggccagattttatctttcaactttctatccccaggcctggcccagagcctagtatataggatgggcttaatccatgtttttgagtgaacgaccaatacataaatccataataatcaagcacactgtttcagcaaacagctcaacaatatagctatcagagcgacttttttcttttcttttttctttttttttttttttttgagacagggtcttgctctgtcacgcaggttggaatgcagtggcacaattgcag

SEQ ID NO: 516977 - DNA, 454 bp, Homo sapiens
cagcaaaatgaacatcccaatgtcacactgcactcccttatgtgtttggaaaatccagactccaaaatgatacaaagcaatctgactgggtttttgaatgaaattactagagaattatgggagaactgtagtccctgctgttaaacgcacaagaagacatcactggaatctcttctgctttcctagaactgaagaaagaagaaaaaaaaaaaaaacagagacagayagaacaagaaaaaaaaaacctggtgtctatgaaaaagcaatataaggagaaaaataaggataaagaagaaaaaagaaagcagagaaaaaggggagaggtcttaaagcccaagaaaatgtaaattcagatctccttctcctaaaagaggatcctaccctgtcaggagcaagagaatgcacagtcattttcaatctccccatcacagaaccaagaggcagagaccttccc

SEQ ID NO: 516978 - DNA, 653 bp, Homo sapiens
tgtttctgttagcggtccttggataagttactcctctagatctactcttttcatctataaaatggggatatgactatctgagggccttgaagaggacaataaatgtaaaaaacttatcacaatgcccaccatattaaatattcaataaaaattagctatactgccagtaatctatggcagtctttctgatttggtggaggaaaaggtttcttataggcaaattaaaatatctagctttatcaaaacactgttacaatgcattaaacagaaaagtggaaatggatatagtatatattaaatatyctaactcctttgttagccttatggctcatttcctctcttaatcttaaaccaattcaattatacagattataacagttacctagccactcttgagatttagtatttatgtaccgtatagcatcaagaatcatagagtaacacacttttaactaatttgacaagtatccgttagtgtttgtctcacctttgagttcagtgaagtggttgcactatttaacaaagtttctctgtcactcagttccacaggtcgagacatgtcagtcaagatttcaatgcccttttccagggccttctggaatgactcagaaatgatggttggatgaatccctgtaatttgtgaaagtctagtt

SEQ ID NO: 516979 - DNA, 438 bp, Homo sapiens
ctgggcggggaaccggacagccctcagcctgcacccagcccatgcgaggtcccagcccaagtcccgccccagtattaccgatgccccagcggtactgagccactttctcctcctcttcgtcctccaagagtccctcccgtgccgccagggcctttaaggggtcttcgcgttcgtactggcgacccgcgctccagtgatgggatttaccggggtctggagactggaggccaccacttcgccactcggtgggaggtggccatcgccccgcctccgaggcctgagcgcctgcgctggcccgggrcgggaaagctggtgcgcccctggcaacccgggggcgcctagctagggagccggttgctatgggcgccgtaactggggacgctacaggagccgccagggaccaaaagtcacgcaaaatccactcaggctgccagagac

SEQ ID NO: 516980 - DNA, 608 bp, Homo sapiens
gggcttcctctctgctgagagctgaacagtcatcaggatgagtgttgtcaaagaggagccacccacttcagggcctcctctctgctgagtgctgaacactgatgggacaacctggctacagagaggagctacccactgtgggtctcctctgagctgttctaacactcaatgaagctccatcttgctcaccctccacctgtctgtgtagctcattcttcctgggctcagaacaagaactcaagcaaaggcatcactggccacagacgtttctggccataagagcgacaccccaaagatgccttgactctgttactttgacagtctccaataaaccacaccttcctgcctttatgtagttcctacccacactgactctggacaggacaatttggacagacaaagagacatgaggaattgagatgcaagcagaggcttcataatgacttgcatactgaggcttgtctccctgtaatgttggctcttaggatactctctgttagaatcaatcccagagccattttgtgggaagccctgcttaggcatgtggacagccatgcagtaagagatcgaaaccctcagggrccagcatcagctgagcttcctaatga

SEQ ID NO: 516981 - DNA, 597 bp, Homo sapiens
aaggatccaggatcatcattttacagaatgtccttctgtgtggattttcctgattgtttcctcttctttagattcaagctattatagtatttgtttctggttttcctggcagcataaatccttggtaaaggttcccatctcctttgggacttctgctaaaaattcaagctccttttcagtcattgtattaattagggctgggactaagctactataatagagagatcacaacttwggggctcaaagaagataggttttaatttctcttttacataacaatctacaagtgagcagtctgcagtcctggtgaaatgacttttgctccacaaagtcatccagggacccaggctccttctatcttattgctccatcattgtcatcctcaagaattgattcttacaaagtcaaagctctcttactagcactgcattcaaatttcagcctgcaggaaggggcaagagaaagttaagagcatgcaacgccctcttttcaaagtatgagatctggaaattgctcttgtaactttcatttgcatgcacatctagtcaccaaggaggctgagaaaagcaatcaatacctcggaagccaattccccag

SEQ ID NO: 516982 - DNA, 597 bp, Homo sapiens
aaggatccaggatcatcattttacagaatgtccttctgtgtggattttcctgattgtttcctcttctttagattcaagctattatagtatttgtttctggttttcctggcagcataaatccttggtaaaggttcccatctcctttgggacttctgctaaaaattcaagctccttttcagtcattgtattaattagggctgggactaagctactataatagagagatcacaactttggggctcaaagaagataggttttaatttctcttttacataacaatctacaagtgagcagtctgcagtcctggtgaaatgacttttgctccacaaagtcatccagggacccaggctccttctatcttattgctccatcattgtcatcctcaagaattgattcttacaaagtcaaagctctcttactagcactgcattsaaatttcagcctgcaggaaggggcaagagaaagttaagagcatgcaacgccctcttttcaaagtatgagatctggaaattgctcttgtaactttcatttgcatgcacatctagtcaccaaggaggctgagaaaagcaatcaatacctcggaagccaattccccag

SEQ ID NO: 516983 - DNA, 597 bp, Homo sapiens
aaggatccaggatcatcattttacagaatgtccttctgtgtggattttcctgattgtttcctcttctttagattcaagctattatagtatttgtttctggttttcctggcagcataaatccttggtaaaggttcccatctcctttgggacttctgctaaaaattcaagctccttttcagtcattgtattaattagggctgggactaagctactataatagagagatcacaactttggggctcaaagaagataggttttaatttctcttttacataacaatctacaagtgagcagtctgcagtcctggtgaaatgacttttgctccacaaagtcatccagggacccaggctccttctatcttattgctccatcattgtcatcctcaagaattgattcttacaaagtcaaagctctcttactagcactgcattcaaatttcagcctgcaggaaggggmaagagaaagttaagagcatgcaacgccctcttttcaaagtatgagatctggaaattgctcttgtaactttcatttgcatgcacatctagtcaccaaggaggctgagaaaagcaatcaatacctcggaagccaattccccag

SEQ ID NO: 516984 - DNA, 624 bp, Homo sapiens
accttcctgccacctaggtatcagcaaattcctctgacctgttcttctgtcttttcctcattccctcaaacactctgtctcagaagtgtttctgtgatttcctctttatccctttctcatgctcagagtgtaaagtaaagctctggagtctggtgccagcactatggctcttgctatattcagggaraaattgtaattgaaatacaactttctcctctctttacagtcaggctctcaagactgctatctccctacatcattgctgagattgagttgatggataatctccttttctaagtgatgtctgtcctcgccttccctgggacttaatatgtcttcttggtggtttagtaatatcacactattagattcatttataattgaatcatacatctacagaagcacatctacatggaaataaaggaaggagaataagattgtgaaaaattccaaaatgaggcgtttgagatatggtagacgactttactcagaagctacctgggttgtgttcagaatcttgggcacacctttagttcgtttgctcatttgcttggtatttacagtcatggatgtttttatcacaggctttaagcttggtattaaataaagaaaaaagtcctctga

SEQ ID NO: 516985 - DNA, 616 bp, Homo sapiens
tagtagccccacgtggcttttattagctgtgtaggacagctatcaccaggtctctaatgcctcatgttgttcagaggattgcatgagagggagaagttttccacactggacctgcagaggtttttaggtatcaaagcctgcagaggtctttgtggtatatcaagaaaaattatttccaatgtttcagagctctccagattgctcaaggcagctagtctctgttacacttcagtgcataacacacatcactgttccgtccgcctccctcatcgctgcacagattttattcagtcgagagaaagttctcctgcatgctctccactgctcagggtgtggtgatctacagcacatgggtctcttatctttagctctaatctcaggtatttgacacacttatcaataacccccaatttttgtacatctattcatatggcaccatactacacagacaaatcaagccgtagactatcccaggattcccacacttgtcaatgaatcatccttaacttgtaagtttacagggaaraatcaatgcatgtgtggccttatatgaacaaacttcattttctcagcctgaaatccttgcttggatagagctaactctcactacctgaag

SEQ ID NO: 516986 - DNA, 565 bp, Homo sapiens
tgttaatattttgttgttgaccttctaatctttttttctatgcatctatatagacaaaggttggagacagcttgcagagagtcagtatacagcagtatttaaagaagaaactggcatgaagagaaaaaaaacaagagcctgaaaataagataagtccaggagttacttttcccataaggcttattcttttccctcagctccagaaggggtttttcatgaaaaagaatcttctacaaggagctaaaaagtgaaacctttgtatggtggatataatttcccttttaaaaggcccccctctgcccccatccctggggagctctacggctgaggaccttgtaattgctgaactgcatttcaaatcagagtgcaattgtgatcaaaccaagtgactctcattactcctttgcctcttgcatcaaaaccactcacattgacactgagcaaagcccagcrcacttagcctgtgattcttggcaggccggcttcccttttaataggcagggtagcacaagagggcggggcagccggtgctgtctgcaggaggagggtggtaggtggcaagagg

SEQ ID NO: 516987 - DNA, 637 bp, Homo sapiens
aaaataatagcttccatttattgagtatctacgacagggcagacagtaggttagcacatgtgctctctaatttaatcctaacagccaaccctgcaggatagtgctaactctcacattttacaaaggtaaagaaatgcaaattgtgttagtttctgccttgcttgcaggcctttgctaatgaaaagtcatttttacttttttataaagcactgcagtccatactaaggagmaaatgcagtcagcatttgtatatgcttgcccaaattggataaagataaaaagtcaagaagaaatacataggcagatacatttcctgaactggattttttttcctctaggatggacataatatagcgtggagctttctctacatcacttgcacatctatgtgggttacctatccactgctgggagatggctgtggtccacagatttgtcctgaagcaacttcagagaccctcgtggtgacaaatgtactactaaatccccacaagggtgtccctgaccaattccatctcctgatcacccaagtaattaagagggccaacttctatttcaaccactcagagaggatttaagaccaagagcaattggtgccattagtctcttgttgcagatgcacaagtctaagcccagg

SEQ ID NO: 516988 - DNA, 449 bp, Homo sapiens
cctctgctctctgcatgtttgttttctccatgttttatttgggcaaagattgcctggaacacctgcagtaagttccacttccctgctccaatcacaggcgccgacggactttgcataaatgcctgctcacctaccacataattctgctggggaatgttgacggtgccctctggagtgtgatgtgtcccagatcacacaggaagggtttcagaagcattacaaatccttgtataatatgtccgcccttcctccctttccccaaagaaaagtttgtttttgagaatgaagtgagagggtctctggggrgtatattttcataaaaccatgagaaaagctaccaaatcaaattaacttggatcttagcattatccttctaaaggaatccccaataattcacatcaccagtctgtgaatgcatctttcatcttccccaaaaagaaaccattatc

SEQ ID NO: 516989 - DNA, 655 bp, Homo sapiens
acctgcaatggccctgcttccaaataaggtcacattctgaggtcctggggattcagactgcaatatattagtatcttttggacccacagcattcgttcccactttcctttctcccacttcaagcaagaaatctctttttttttctttttttyttttttttttttgagatgcagtctcactctgttgccaggctacagtgcagtggcgcgaccttggctcactgcaacctccgactccctgcctcagtctcccgagtggctgggattacaggcacgtgccaccacgcccagctaatttttgtatttttagtagagatggggtttcaccatgttggccaggatggtctcgatctcctgaccttgtgatccgcccccgtcagcctcctaaagtgctgggattacaggcgtgagccacgcacactcggccaatctctctttttactttttgcttcaggggagggatgggagagccagcaagcccctatggcttttgtgttttctagaaacctaaggacaattgggatggggacatagtgccttggccagaagcagagaacacgtaggggcttccctccagatttgaaaaatccccaacagcgtggctagggtgggtagcaagatcctgacagtcccgaggccctatttttctaccacaa

SEQ ID NO: 516990 - DNA, 655 bp, Homo sapiens
acctgcaatggccctgcttccaaataaggtcacattctgaggtcctggggattcagactgcaatatattagtatcttttggacccacagcattcgttcccactttcctttctcccacttcaagcaagaaatctctttttttttctttttttcttttttttttttgagatgcagtctcactctgttgccaggctacagtgcagtggcgcgaccttggctcactgcaacctccgactccctgcctcagtctcccgagtggctgggattacaggcacgtgccaccacgcccagctaatttttgtatttttagtagagatggggtttcaccatgttggccaggatggtctcgatctcctgaccttgtgatcygcccccgtcagcctcctaaagtgctgggattacaggcgtgagccacgcacactcggccaatctctctttttactttttgcttcaggggagggatgggagagccagcaagcccctatggcttttgtgttttctagaaacctaaggacaattgggatggggacatagtgccttggccagaagcagagaacacgtaggggcttccctccagatttgaaaaatccccaacagcgtggctagggtgggtagcaagatcctgacagtcccgaggccctatttttctaccacaa

SEQ ID NO: 516991 - DNA, 439 bp, Homo sapiens
aacagacatcttaggtgacaatgcactggggaataaagtccaccctattattccacgtgtctgagacatttcaccaacatctcgtttagttttgcaacatctctgtgtagtaaagcaagggcaagcttcactctacaggcatcaagaagtcagacgacctttagaaaaatcccctaagtcagcagcaaacctgggaataaatccagggttttctgattcaacttttgtatctgcgtgtgaatgtttgctctagaccttgctrccttagtaaaatagaacaaagtactgtgtaaacagccagcaccttgtaaattctagataatgaccctgctcagcctagaagagatggtctgttcacaagggaagtattctccttttggggttctacacccattcccaatgctggtggagaaggtgtggctggactgcttgggcacag

SEQ ID NO: 516992 - DNA, 634 bp, Homo sapiens
tgcgtagagcacatggccccactcctgctctccgttgcccatgtcaggcattrtcaatcaatcacagcactcttcacgcacagccaagggctgcagacatcactggaaaaggattcctggaagcaggaatggtctgcagcgtcagatgccgcggttagctcaaacaggatgacgtctgaaacaggctgggggatcaacatctgggaaggcattgatcttttcttacctctctcaaagaaactattttttattgttgttttaatattatgtttatattttcttttatgaaagtaaccttccaaaatttgaaaatactgaatcacacaaagaaatggtgaaattataggtgataatttccagtctttttgtgtgtgtgtctctacagctatacatagttgcaatcatactgtatacacaatttttgtgtatttcctgatttttcactggatattatagcatttccaattatttatttaccttttctcttcactgttaagcatatgggaagtttccaaattttgttgttaaaataatgtttgtaataaactattttaaaacatagtttcctttgatttttaatatttacttagaataaatttctagaagtgtccgaaataaacattttaagactctt

SEQ ID NO: 516993 - DNA, 634 bp, Homo sapiens
tgcgtagagcacatggccccactcctgctctccgttgcccatgtcaggcattatcaatcaatcacagcactcttcacgcacagccaagggctgcagacatcactggaaaaggattcctggaagcaggaatggtctgcagcgtcagatgccgcggttagctcaaacaggatgacgtctgaaacaggctggggkatcaacatctgggaaggcattgatcttttcttacctctctcaaagaaactattttttattgttgttttaatattatgtttatattttcttttatgaaagtaaccttccaaaatttgaaaatactgaatcacacaaagaaatggtgaaattataggtgataatttccagtctttttgtgtgtgtgtctctacagctatacatagttgcaatcatactgtatacacaatttttgtgtatttcctgatttttcactggatattatagcatttccaattatttatttaccttttctcttcactgttaagcatatgggaagtttccaaattttgttgttaaaataatgtttgtaataaactattttaaaacatagtttcctttgatttttaatatttacttagaataaatttctagaagtgtccgaaataaacattttaagactctt

SEQ ID NO: 516994 - DNA, 634 bp, Homo sapiens
tgcgtagagcacatggccccactcctgctctccgttgcccatgtcaggcattatcaatcaatcacagcactcttcacgcacagccaagggctgcagacatcactggaaaaggattcctggaagcaggaatggtctgcagcgtcagatgccgcggttagctcaaacaggatgacgtctgaaacaggctgggggatcaacatctgggaaggcattgatcttttcttacctstctcaaagaaactattttttattgttgttttaatattatgtttatattttcttttatgaaagtaaccttccaaaatttgaaaatactgaatcacacaaagaaatggtgaaattataggtgataatttccagtctttttgtgtgtgtgtctctacagctatacatagttgcaatcatactgtatacacaatttttgtgtatttcctgatttttcactggatattatagcatttccaattatttatttaccttttctcttcactgttaagcatatgggaagtttccaaattttgttgttaaaataatgtttgtaataaactattttaaaacatagtttcctttgatttttaatatttacttagaataaatttctagaagtgtccgaaataaacattttaagactctt

SEQ ID NO: 516995 - DNA, 523 bp, Homo sapiens
ggcctgggcagccaccaccccattctctcgcccctcttgagaatccagcctgtggacccaggtgtgtcagcctgcagtcagaccacagtctgtctcgggctggtgctgggggtggcagaaagggggtcctgacgcagcccctgctcccccgagtctctcagtctcctggggaagagatgacagacamaacataaaagagaaatcatgctataggggaaggaatgctccaaagacacggccgaagacaaaactcaggatatgggaagcggtcatgaatattcattgtaatcacatctcactggtttaaaaccaaaaaatgtcggggtgagttagactcaggatgtgcactgggtcctgggtcctgcaagtcccacaaattagatacattcacagggagctcagacacgctggtccatggagcaatcaatgcccgtggattggcctcgtcacagtccccatctccgatgcctccctgagctgcaccccactcttgaatacggaaaggctgccctttgtgggacag

SEQ ID NO: 516996 - DNA, 639 bp, Homo sapiens
taaggtgagtatttagcaaaggtaactttttaagtagattcactattctrttatccctgcctgggccccgccatggccgggccttctcctagaggaaggagagatggacggtgaggtggaaatgctggctgtggcctcaggctccagcgggggcagtgtgcttgtgtgccagtgcactgggcaccccacagaacacaccccctcccgccatctgggggaggcacagcggggaggctgtgaacctttcctcattaaggacttattttttatgccagttggattctgggcttgcctcgtgccaacctcccctttgcccctttctgaatgtgttaatcacaggggaagtgttatttctccaaactatcccccacccctggaacaactgaaaagcccgctggagttagaaggatcttggctggtgctggggctggggaccagatgggtttctggagcgtccatcggcttaagagccgagacagacactcctgccgccccgctctggctctcctctctatagcagagcgcaggtgagggcggcacccacagggctgtctctcacccgcaccatccctgcagacttccccagggccctccctgccgcttccaccctctcctttccagggcctcctccgctcagca

SEQ ID NO: 516997 - DNA, 639 bp, Homo sapiens
taaggtgagtatttagcaaaggtaactttttaagtagattcactattctgttatccctgcctgggccccgccatggccgggccttctcctagaggaaggagagatggacggtgaggtggaaatgctggctgtggcctcaggctccagcgggggcagtgtgcttgtgtgccagtgcactgggcaccccacagaacacaccccctcccgccatctgggggaggcacagcggggaggctgtgaacctttcctcattaaggacttattttttatgccagttggattctgggcttgcctcgtgccaacctcccctttgcccctttctgaatgtgttaatcacaggggaagtgttatttctccaaactatcccccacccctggaacaactgaaaagcccgctggagttagaaggatcttggctggtgctggggctggggaccagatgggtttctggagcgtccatcggcttaagagccgagacagacactcctgccgccccgctctggctctcctctctatagcagagcgcaggtgagggcggcacccacagggctgtctctcacccgcaccatccctgcagacttycccagggccctccctgccgcttccaccctctcctttccagggcctcctccgctcagca

SEQ ID NO: 516998 - DNA, 515 bp, Homo sapiens
ctgctccagttctctgggatggaggggcttcttcaaatgtgggacttcctgttttaaacccacacagtcctgggtaaaccgagactaattggtcaccctggatgctggccaaggacctactggcggcttgcttgctgatttttgtttggaggcaattggggccaggaaagggagtgaagaagccttaggctgggatgggaagcttgacctagctctgagccacacagctttatgctctggtgtctgtaatgctgggcatcccttcgctcgatgcatttgtgctcaggaaaggacttgctgaacaaatgtccagctcaggggrtgggacgtgaaaggagatgtgggcctgaggagcgtcccagagacaaacagggcaggaagttctctgttttaacatgaaaggggaaaaaacaggcttcaaatgtattcttcccactgtgctgggagttccctggagggcggagacttgtgcttcatctggtacccctgtcacctagggtgccaggtgcatgggg

SEQ ID NO: 516999 - DNA, 645 bp, Homo sapiens
tcataatcagagaataatataaagtgaatttaatgaagaaaaacaaagaatcgtgtcctatttgggtttaggactacattctcaaaggccctttaattcgaatttgattcaaatagcaatgccagggcaaagaagccaacaaatgaccttctgttttttttggagacagagtctggctctgtcactcaggctggagtacaatggcacgatctcagctcactgcaacctctacctcctgggttcaagccattctcctgcctcagcctcctgagtagctgagattacacgcrcctgccaccacacccagctaatttttttgtatttttagtagagacggggtttcaccatgttggccaggctggtctcgaactcctgacctcgtgatccgcccgcctcagtctcccgaagtgctagggctgcaggcatgagccaccgtgccccgcctagatgaccttcttaagcgctataagttacactgagtttatttaggattagggaatagactcagaagaaagagagggaagggggcaggagaaagcgcacgagtgtcggctgagttccgctggggtagtaagtggccccacgtcctcagcagcaagccaggacagaagtgcatttctcgctactgctgtacatgcatcaccg

SEQ ID NO: 517000 - DNA, 590 bp, Homo sapiens
ctgccggcgtgaatagcgagtccttcctcctctcacttctgctccctgcacacatcgagcttgttcagactggagttagacaagtcactgtggggtcacgggacaaagtctcagccggttttccagtggataggcmtatctcttccttatcaggtgctggcataaaatcaggaacacctggtcttagccttggccctctaaggacacagccatgtgaccttgggcacgtcacttaaactgattgatcacatatgacttagcgtttatagacctgctggcttatttggtagaggtgggtccctgattgggcaggtgacatgctccaaacacaagtcagccaccgcaggagctgcatgcacactcagtacacacggcacttctttggacagagggctctggggccccatcccacatttgaggctcaggggaccggttttcacccgtaaggctccaggcagtagcccaagtatctcaagaccttcaggtggtcagaacatggccttgaaagatagagaaactgttatcctttgcgggggttggtttgtttttgtttagactccattaaaatcaggacacaaggtcttaatgac

SEQ ID NO: 517001 - DNA, 590 bp, Homo sapiens
ctgccggcgtgaatagcgagtccttcctcctctcacttctgctccctgcacacatcgagcttgttcagactggagttagacaagtcactgtggggtcacgggacaaagtctcagccggttttccagtggataggcatatctcttccttatcaggtgctggcataaaatcaggaacacctggtcttagccttggccctctaaggacacagccatgtgaccttgggcacgtcacttaaactgattgatcacatatgacttagcgtttatagacctgctggcttatttggtagaggtgggtccctgattgggcaggtgacatgctccaaacacaagtcagccaccgcaggagctgcatgcacactcagtacacacggcacttctttggacagagggctctggggccccatcccacatttgaggctcaggggaccggttttcacccgtaaggctccaggcartagcccaagtatctcaagaccttcaggtggtcagaacatggccttgaaagatagagaaactgttatcctttgcgggggttggtttgtttttgtttagactccattaaaatcaggacacaaggtcttaatgac

SEQ ID NO: 517002 - DNA, 552 bp, Homo sapiens
ggttttcacccgtaaggctccaggcagtagcccaagtatctcaagaccttcaggtggtcagaacatggccttgaaagatagagaaactgttatcctttgcgggggttggtttgtttttgtttagactccattaaaatcaggacacaaggtcttaatgactccaaatgtctttgcaatcctgcagttttagaactaytagttctacctggatggaggtacccagggaggggcaggggggcgaactattctcagctaatctaatctcagcacagccactcagcaaacatctggttactttggtaaatattggcagtctctagcgactggaggtgggtgaggctgcgtgtccccctgacagccttgggactggtggcctatgacaacaaaaggaaatcctagagcagggtttgccaaatccctataggcgattttaggcggcaggtccaacctgttcttgtagctcagaggaagtctcagcgctgccctctggcagatgcactccgagcaggacccagaggtgttaggaccggcaggactggtctagctaacagc

SEQ ID NO: 517003 - DNA, 544 bp, Homo sapiens
aggctcaggggaccggttttcacccgtaaggctccaggcagtagcccaagtatctcaagaccttcaggtggtcagaacatggccttgaaagatagagaaactgttatcctttgcgggggttggtttgtttttgtttagactccattaaaatcaggacacaaggtcttaatgactccaaatgtctttgcaatcctgcagttttagaactattagttctacctggatggaggtacccagggaggggcaggggggcgaactattctcagctaatctaatctcagcacagccactcagcaaacatctggttactttggtaaatattggcagtctctagcgactggaggtgggtgaggctgcgtgtccccctgacagccttgggactggtggcctatgacaacaaaaggaaatcctagagcagggtttgccaaatccctayaggcgattttaggcggcaggtccaacctgttcttgtagctcagaggaagtctcagcgctgccctctggcagatgcactccgagcaggacccagaggtgttaggaccgg

SEQ ID NO: 517004 - DNA, 527 bp, Homo sapiens
ggttttcacccgtaaggctccaggcagtagcccaagtatctcaagaccttcaggtggtcagaacatggccttgaaagatagagaaactgttatcctttgcgggggttggtttgtttttgtttagactccattaaaatcaggacacaaggtcttaatgactccaaatgtctttgcaatcctgcagttttagaactattagttctacctggatggaggtacccagggaggggcaggggggcgaactattctcagctaatctaatctcagcacagccactcagcaaacatctggttactttggtaaatattggcagtctctagcgactggaggtgggtgaggctgcgtgtccccctgacagccttgggactggtggcctatgacaacaaaaggaaatcctagagcagggtttgccaaatccctataggcgattttaggcggcaggtccaacctgttcttgtagctcagaggaagtctcagcgctgccctctggcagatgcactccgagyaggacccagaggtgttaggac

SEQ ID NO: 517005 - DNA, 636 bp, Homo sapiens
tcctcaggctcgtatgtatgctttggaataaagcacacagaaaataaaacaggcccagctcacccagcaaggctagttccagaaccagcaggagaaaatattgagattggccggatctctggtcgaccacttgcatcggtgcccggggggctggctgcaggctgcaggaggtttggcccttcgatcttcgccaaatggcgccagctttctgctaaacctcaggtttatgctagcactgccctctggttccagaataatcccgcacatcccaggatgatgcttatttctgtcctgatgcktgttcatccatgatcccaacagcagccctgggaggtgtgcagagcaagtgtttccactcagcttggtttttcaaaggaagaactgaggttcagagaaatgactgatccaggacttggacctgggttgttgacacagaatattaatgctctggtctgaaagggaccttgaggaacatcccataacacatggctcattctacggacaaaaaaaaaacaaaaaacagtttccgcttaaaatggcctgctcaggtaggcaagtgcagagctcaggcttgtgagttcttagagctatctggccacagcacgccaggcctgtgatttgtcaggtctctgagtg

SEQ ID NO: 517006 - DNA, 514 bp, Homo sapiens
gcactttgagtaagccatgtccttttttttttttttccttacartcgccttccgtaagccagaggctgtctgtctgcttcaagtctgtgattcggggtccttgagtgctggtgattaggagtgacctgggggtcgcttgaccctctcctggggggaggcttgattctgtgcatctgaattttcaacccaggtggagagcaaaggtgatagtaaacaattgaagaaggctgggctagcagggaatccagcgttgatggcgttacggattgtaggtgttggaagatggggagaggcctagggatacaaccaggatgcaggcaggaggccccaaaacataaatcgagaattcggggactgctaggtgtgaatagttgagagtaagtgagagggggaagctccctgggacgcagtcagagtgagccggcaccctggggctccacacaccctgggcaggctccgactcacccgaggggcctcactgtgggcctcttaggtctgggggtttctcaccttc

SEQ ID NO: 517007 - DNA, 569 bp, Homo sapiens
caagtagagctgcaggctggaaagtactagattcggagctcacccagcatccctcttgtcgcccttctgtgacattgatgcatggcactttgagtaagccatgtccttttttttttttttccttacaatcgccttccgtaagccagaggctgtctgtctgcttcaagtctgtgattcggggtccttgagtgctggtgattaggagtgacctgggggtcgcttgaccctctcctgggggraggcttgattctgtgcatctgaattttcaacccaggtggagagcaaaggtgatagtaaacaattgaagaaggctgggctagcagggaatccagcgttgatggcgttacggattgtaggtgttggaagatggggagaggcctagggatacaaccaggatgcaggcaggaggccccaaaacataaatcgagaattcggggactgctaggtgtgaatagttgagagtaagtgagagggggaagctccctgggacgcagtcagagtgagccggcaccctggggctccacacaccctgggcaggctccgactcacccgaggggcctcactgtggg

SEQ ID NO: 517008 - DNA, 515 bp, Homo sapiens
aaacaattgaagaaggctgggctagcagggaatccagcgttgatggcgttacggattgtaggtgttggaagatggggagaggcctagggatacaaccaggatgcaggcaggaggccccaaaacataaatcgagaattcggggactgctaggtgtgaatagttgagagtaagtgagagggggaagctccctgggacgcagtcagagtgagccggcaccctggggctccacacaccctgggcaggctccractcacccgaggggcctcactgtgggcctcttaggtctgggggtttctcaccttccagctgcttccccaacttgcatggaaacttccaaggactagataaatctcaggtgtgtgtgtgtggttttttttttttcagcccagcagtagtaggccttgagagacacacgcttataatgaggaaactgagggttcagtggttaaattcagtgaacataattgaaaatctaaaatatttaatcttctttgcctaaagtcacaaagggattc

SEQ ID NO: 517009 - DNA, 575 bp, Homo sapiens
ttaactaatggaatccatcttggatttatccaactccttcacagcgctctttcaaactatagatctttttcttcctttaaaagtattcaggtctctcctccccagagatgccccacagaccagtctcaccacacccccttctaacaaacccccttacctcctctcagactcagcccaggcctaatgaaggtgaatgcctgtacttttgttttatgcattactttgtattaaattgtgttcaattcttgtcggtagattcaattgatgactcctaatgcagtcaggtaggggtcttaatttcttagaaggatctgtctctacgttacctcttacactgctgttagctgtctgtattgcatattttggtaaatattgattgattgattattaggcatctggcaccatgtgtggcagtttcatgaatgttaattattataattttcatgatgatcctgggagatttcccttttacacaaggaaattgaggctccatgaatttgaataatttactgagattgcataaccagtaaatggcaaactagagctcaaactcrggccctcggacaactccaaag

SEQ ID NO: 517010 - DNA, 615 bp, Homo sapiens
caaactcgggccctcggacaactccaaagttgtccctccaactgtacttatgagccacatggtgaatgtccggtagtgaaaacctacctttagctcttgttgggggctggtgacgtagcaggaaacctaggttggacctacaggyaagtggctcgttcaaggctcaataccttccctcccttcctagtgggcaggcttgtcctgaagcctcagcagcccggcaccagtgggacagtgcactgacctgtcatcagccctgcacacctgtcagctttgtgggctttccagccaagcctttcattggcctgaaccaaacatccttcccacaagtgtgagttaaggccctggagtcctaaaagggtttaatgtgagatggcaaagctctagcctcaattactgaattatgagttaagagaaaaatagaatggaatcacaagcacctgatgcccaagaactggggggtgttccttcttcaccccagaggcctcgtggcctgggcctggcagagcattctgctgttcaccccctggctaccacgggcaaattatttccttctcctgagcctgatttttcttctaagaatggagacagtacctgccttgcaggagtaagggg

SEQ ID NO: 517011 - DNA, 642 bp, Homo sapiens
ccacatgcccccctacaggtctgtggtctacactgaggatgtagcagtggagggcacatgaggctgctgccctcgtagggtttactttctktttttgagatggagtctcactctgtcgcccaggctggagtgcagtggtgcgatcttgactcactgcaacctccaccccctgggttcaagcaattctcctgcctcagcctcccgagtatctgggattacatgcgtgtgctaccatgcccggttaatttttgtattttcagtaaagacggggtttcgccatgttggccaggctggtcttgaactcctgacctcaggtgatctgcccacctcccaaagtgctgggattacaggcacgagtttctgtgccccgccagggcttacattcttgagggttctgtcccccctagccccagggacccccgaccagtgcctcggtctgagctggcaccttacacagggcacaggcttgcgtaggagcctgggttcctgtgcgtccgtcctgtcactcagtaagcagcactgttgagggtttgctttgaggctggcattcttccagacatgggacggagcaggcacgggacaggcgagagcttgccacccgttttcagtcttgctcctcccctcactgccccctgccctcca

SEQ ID NO: 517012 - DNA, 503 bp, Homo sapiens
  misc_feature (1)...(503): n = A,T,C or G
gacagagcgagactccatttcagaaaaaaaaaaaaaaaaaagaanctcaggaaaaaaacncccaagacactgtaaggctagacagcactttgtaggagtgttgttgtaaaggaaacagagaaagggggcagtacctggagggggatgggggccaggatggaattttgggggctgggagaggaaagcatgtagggtaccatggctgctgagaaggatccaggaggggtcctcccggatggggctgcacactgagcagctttcaataaattctctcttctcacgcaatccgaattctcggcttgaattatttcctgcacaagacccaggagccctctcttgcggtctggatcaggacgcctttttcaggcagcaagatggccatctgggggagcrggtcctggggagtctactgtgtcctgggcaacgcaggggccacttaggcttggggtcagtcgtctaaagtgggatgactccgcctggctcccctgcggctcctgccgggc

SEQ ID NO: 517013 - DNA, 558 bp, Homo sapiens
tgttgcaatgatctcaaagaaccttatgcaagcccatggtacagagttctacttggaaagttcctcactgtcccaagacctcacacaattcttaggagttagatttaggaacattttaaaaattaccttttgacccacatggcacagggagtgttgtcataaaccattatgtccttgagaaccacctgcatggctagagtttttgaactaaccatctttgagggctttggcrtgcaccaaatgcgtatttattgattatggcataaagtgctagtgaacagggacagagataaattctggaaaggtcatgcttgagtctagctcagggtttgtcagtggcttctgggaggaacacagcttcttcagagagtcaggatgatgctgtgcctctctagcacggcttggaggtcagtgggtctctgcctctgtgcacctggtcctctggaacatgagctggcgctctgctctgcaaatgctgccaagtccgaaggcatagcatgcaaatctattttttctggagtcttgttgagaagccatgactggcattctagagaccag

SEQ ID NO: 517014 - DNA, 558 bp, Homo sapiens
tgttgcaatgatctcaaagaaccttatgcaagcccatggtacagagttctacttggaaagttcctcactgtcccaagacctcacacaattcttaggagttagatttaggaacattttaaaaattaccttttgacccacatggcacagggagtgttgtcataaaccattatgtccttgagaaccacctgcatggctagagtttttgaactaaccatctttgagggctttggcatgcaccaaatgcgyatttattgattatggcataaagtgctagtgaacagggacagagataaattctggaaaggtcatgcttgagtctagctcagggtttgtcagtggcttctgggaggaacacagcttcttcagagagtcaggatgatgctgtgcctctctagcacggcttggaggtcagtgggtctctgcctctgtgcacctggtcctctggaacatgagctggcgctctgctctgcaaatgctgccaagtccgaaggcatagcatgcaaatctattttttctggagtcttgttgagaagccatgactggcattctagagaccag

SEQ ID NO: 517015 - DNA, 558 bp, Homo sapiens
tgttgcaatgatctcaaagaaccttatgcaagcccatggtacagagttctacttggaaagttcctcactgtcccaagacctcacacaattcttaggagttagatttaggaacattttaaaaattaccttttgacccacatggcacagggagtgttgtcataaaccattatgtccttgagaaccacctgcatggctagagtttttgaactaaccatctttgagggctttggcatgcaccaaatgcgtatttattgattatggcataaagtgctagtgaacagggacagagataaattctggaaaggtcatgcttgagtctagctcagggtttgtcagtggcttctgggaggaacacagcttctkcagagagtcaggatgatgctgtgcctctctagcacggcttggaggtcagtgggtctctgcctctgtgcacctggtcctctggaacatgagctggcgctctgctctgcaaatgctgccaagtccgaaggcatagcatgcaaatctattttttctggagtcttgttgagaagccatgactggcattctagagaccag

SEQ ID NO: 517016 - DNA, 604 bp, Homo sapiens
attctaacttctcacccagaagtacaagaatgctgccatggagacacagtgccaggaatgaccaggggacggatacctcccccagcctttcagaaccacaccatgaatttggagacgtaactggtgtcttatcagcttggctgctgtaacaaaatgccacaaactgggtggcttmaacaacaaacatttatttcttagagtcctggaggttggaagtccgagatgagggtgccagcaggatcgagttcttagagtgggccctcttcctgggtgatagacagccatctttttgctatgtcctcatgttgtggaaagagagcaagctagctccatcacccagttatgcctctgcaaggccccacctgcaaataccatcatactgaggggtactttgaattttggtggggacacaaacataccggccgtaagatctgtcaacgttctcatacattcatcacacattgtggtcccctttatgagagactagggggtcgctgctgccaacatgtgggtgtgcttcccaaccagacacctctgcttctcctcctctatctgagcctttgacccacacagagccttaaacacaggactagggtgttctagg

SEQ ID NO: 517017 - DNA, 585 bp, Homo sapiens
caaggattgcctgagacatttgaggaaagactccagaaggaaagaaaatgcaaatagaaccagaaaggggaagaaagaaatgagaactttgaaaatatcaaaacattgatgttggttgctcagagagatcaaagaaggtgctacagtcatacaaccagaggaacaggctatcaaaaaggagcattgagagaataaaaaggggaagctgcaatttaaaacaygattgttcacatttaaaaattagaataaatggccaggcgcagtggctcatgcctgtaatcccagcacttccagaggccgaggtgggcggatcacttgaggtgaggagttggagaccagcctggccaacatggtgagaccccatctctactaaaaatacaaagattagctgggcatgattgcccacgtctataatcccagctactctggaggctgaggcacgagaatggcttgaacccgggaggccgagattgcagtgagcctagattgtgccactgcacttcagcctgggcaacacagtgagactccgtctcaaaataaatacataataaaaatcattagaaaaatggtgggaaaggaatattt

SEQ ID NO: 517018 - DNA, 585 bp, Homo sapiens
caaggattgcctgagacatttgaggaaagactccagaaggaaagaaaatgcaaatagaaccagaaaggggaagaaagaaatgagaactttgaaaatatcaaaacattgatgttggttgctcagagagatcaaagaaggtgctacagtcatacaaccagaggaacaggctatcaaaaaggagcattgagagaataaaaaggggaagctgcaatttaaaacacgattgttcacatttaaaaattagaataaatggccaggcgcagtggctcatgcctgtaatcccagcacttycagaggccgaggtgggcggatcacttgaggtgaggagttggagaccagcctggccaacatggtgagaccccatctctactaaaaatacaaagattagctgggcatgattgcccacgtctataatcccagctactctggaggctgaggcacgagaatggcttgaacccgggaggccgagattgcagtgagcctagattgtgccactgcacttcagcctgggcaacacagtgagactccgtctcaaaataaatacataataaaaatcattagaaaaatggtgggaaaggaatattt

SEQ ID NO: 517019 - DNA, 524 bp, Homo sapiens
ctcatattaggtgaggctagaatccagggtgactctcttctctaggcaaggcctaatttttagctttttatatttatttatttatttatttatttatttatttatttatttatttatttatttttgagatggagtctcgctctgtcccccaggatggagtgcagtggtgcaatctctgcaatctctgcgatctccgctcactgcaagctccgcctcccgggttcacgccattctcctgtctcagcctccggagtagctgggactacaggcgcccaccaccacgcccggctaattttttgtatttttartagagatggggtttcaccgtgttagccaggatggtctccatctccggacctcgtgatcggcccgactcggcctcccaaagtgctgggattacaggcgtgagccaccgcgcccggctaatttttagcatttttgaaataaacttaagaaaaagaacaagctttcagaaaacatgaagaaacttaaagatgagccaaagggttatttgattgcctttt

SEQ ID NO: 517020 - DNA, 467 bp, Homo sapiens
acaacatggatgcatctcgcagacatggcgtgagaccgaagcagctcatgggagagcgcgattctatttctgtgaagtttctgcagaacgagggcttgctgaggtcacaacccaaattcctacagcatgtggaagggagcaagaaaaggcaaagctactctaaagtgatagarcagtttatctatctatcagtaacaagtagctgtgtttgggagccagaacaggattgctggttactgagagggagcaagagagagccttttggagtgctggaatgttctgggtcttcttgatctgggggagtgaaggcttcacggagcctacttgtacaaacgtgcattgggctggtcactgaaagtgtatatacttcactgtatgtatgtcgtatcctcaaaacacgagggaaaaaaagtgagtcaacacaacttttggacaaagattttattgtgggagttttgcaaccatta

SEQ ID NO: 517021 - DNA, 467 bp, Homo sapiens
acaacatggatgcatctcgcagacatggcgtgagaccgaagcagctcatgggagagcgcgattctatttctgtgaagtttctgcagaacgagggcttgctgaggtcacaacccaaattcctacagcatgtggaagggagcaagaaaaggcaaagctactctaaagtgatagaacagtttatctatctatcrgtaacaagtagctgtgtttgggagccagaacaggattgctggttactgagagggagcaagagagagccttttggagtgctggaatgttctgggtcttcttgatctgggggagtgaaggcttcacggagcctacttgtacaaacgtgcattgggctggtcactgaaagtgtatatacttcactgtatgtatgtcgtatcctcaaaacacgagggaaaaaaagtgagtcaacacaacttttggacaaagattttattgtgggagttttgcaaccatta

SEQ ID NO: 517022 - DNA, 573 bp, Homo sapiens
gtggtgaccatgactaccatctcttccatagcaggtgagcaaaagtgacctgcaccactgccaggcctgacccaaaagcctccccagargttccttctatgttcttcctggggtgatgacaatcaacacaacattggaaaccacgtgttcaagatggcagagccaccatcagcctggttcctgaatgaccacgtggagcaacatggaatatccaagtgagcaagaaatagagtcttatcttcttgcttcattatatttcggatattcttgaaaaggggttcagcctaccccaaatacaagagacatgaaagaaaaggataaagatgaaaaataagtgaatggtgtcaagtgaaataaacaatgtaacactgagaacaagctagatattcagtatttttctgtgatataaaggacgtatgagatgtggatgctgcccaggtattgctaaagggttactgggaagctagaataaccacatgaaggaattaggggaagatacaagattaaaagtgttgaattacatggtacagacttgagctgctacagcctggtgtcaaggaaagaacactggac

SEQ ID NO: 517023 - DNA, 573 bp, Homo sapiens
gtggtgaccatgactaccatctcttccatagcaggtgagcaaaagtgacctgcaccactgccaggcctgacccaaaagcctccccagaggttccttctatgttcttcctggggtgatgacaatcaacacaacattggaaaccacgtgttcaagatggcagagccaccatcagcctggttcctgaatgaccacgtggagcaacatggaatatccaagtgagcaagaaatagagtcttatcttcttgcttcattatatttcggatattcttgaaaaggggttcagcctaccccaaatacaagagacatgaaagaaaaggataaagatgaaaaataagtgaatggtgtcaagtgaaataaacaatgtaacactgagaacaagctagatattcagtatttttctgtgatataaaggacgtatgagatgtggatgctgcccaggtattgctwaagggttactgggaagctagaataaccacatgaaggaattaggggaagatacaagattaaaagtgttgaattacatggtacagacttgagctgctacagcctggtgtcaaggaaagaacactggac

SEQ ID NO: 517024 - DNA, 607 bp, Homo sapiens
tcttttgagattggacttgtctggatgactgtagtcctgagaatttgagggtatgcttaagatcttatgagttcaggggtgatgtgtttcttgcaggacttcaaaaagtcaggtcacttctgttgagtcgtgctcagtcattttgagcttctacaactaaattgcaaagggagcagtgttcacacatggtgaaaccatcgattcactctttatccaaagttctctttatttgtgatttctcaccagcacgctgatggtcactaatctcctgctgtcaagatctagtttcacaagttccccaagcgaatcaatttcaggtattgatcatttggcaactgctaattgctgtagctaagaatttaattcaatggygaaaaaaaggtctatttgttctatccttgctatatatatgtttttgtaagaagatgcttgtttttgctttattagctatccattctttaatgtaaaatcagtaggcaaaaccttgtaaaaatggtatgatttgttggcattaaagctgagattgccttcaggctgcattaatttatgtatctttaaacataagcaaacttttacttaattcttctgtttcattttaatttatcag

SEQ ID NO: 517025 - DNA, 480 bp, Homo sapiens
gctcaggaggttgaggcaggagaatcacttgaaactgggaggcaaakgtttccgtaagctgagatcatgccactgcactccagcctgggcaacagagtgagattgtctcaaaaaaaaaaaaagattgtaagtgtgtatactaaaatgcttacctttaaatggcaggattacagttttttcctttgctttttgggtttatgtttcccaagtattttataattaaaattataaggaaatgttatttcaaaagtaaaatataaaaaggtcaagtgtttggggagctaaaaatgtaaggaggaagagaaataaaaacatagttaaaaaatctgagtttttaagtgcatcatagataaaaccattaagattcttaaaaaataagttctcagattaatttatacagtcattatatacccttgatttccttattttcttacactttatcttctttcaggccatctttactagagaggggacaaagga

SEQ ID NO: 517026 - DNA, 480 bp, Homo sapiens
gctcaggaggttgaggcaggagaatcacttgaaactgggaggcaaaggtttccgtragctgagatcatgccactgcactccagcctgggcaacagagtgagattgtctcaaaaaaaaaaaaagattgtaagtgtgtatactaaaatgcttacctttaaatggcaggattacagttttttcctttgctttttgggtttatgtttcccaagtattttataattaaaattataaggaaatgttatttcaaaagtaaaatataaaaaggtcaagtgtttggggagctaaaaatgtaaggaggaagagaaataaaaacatagttaaaaaatctgagtttttaagtgcatcatagataaaaccattaagattcttaaaaaataagttctcagattaatttatacagtcattatatacccttgatttccttattttcttacactttatcttctttcaggccatctttactagagaggggacaaagga

SEQ ID NO: 517027 - DNA, 551 bp, Homo sapiens
atacacatggtatcataaagttcaacccaggaagaagaggtgatcacctgagggaaagataaaggatgacagcttagaacagaagtttggaaatgcctaaatggaatgagcaggaggagaggacaagtcattcactcattcatttattcaacaaacatcttsaattaagcaacctctcccttctacattatgcaagaatttgtttggtggaggagaagggattcctagtggaagtttcctgactggctttcaccaccctctccccctagcacagctctcctctctattccatcactggggcttgattctgatatatctcatgcctttggtttctccatgcatctgaatggccatttccagattagctgcctgctgtgcttgcctctgcatctctgtatctccatccatgcctagctccctgctcttgttcctcactcaacacctgtgttgaccctgaaatgtacacaaggctgtaggcaactgttagcacatgtgtaatgtatacaaatcagctagttacatctgtcagaggaggtgttcctccgcaccca

SEQ ID NO: 517028 - DNA, 551 bp, Homo sapiens
atacacatggtatcataaagttcaacccaggaagaagaggtgatcacctgagggaaagataaaggatgacagcttagaacagaagtttggaaatgcctaaatggaatgagcaggaggagaggacaagtcattcactcattcatttattcaacaaacatcttcaattaagcaacctctcccttctacattatgcaagaatttgtttggtggaggagaagggattcctagtggaagtttcctgactggctttcaccaccctctccccctagcacagctctcctctctattccatcactggggcttgattctgatatatctcatgcctttggtttctccatgcatctgaatggccatttccagattagctgcctgctgtgcttgcctctgcatctctgtatctccatccatgcctagctccctgctcttgttcctcactcaacacctgtgttgaccctgaaatgtacacaaggytgtaggcaactgttagcacatgtgtaatgtatacaaatcagctagttacatctgtcagaggaggtgttcctccgcaccca

SEQ ID NO: 517029 - DNA, 623 bp, Homo sapiens
ctgctggaggccaaggaccaattgcaggtattgaagaaaggggcatgaacaaggagatagcgagtactcaaggcttaccttgcagtttggccacgtactcatcatatcatcttttgctcagggcaggccccctccataactgcagagtgaatgggctcattttcatctccctctgagttttctttccccgtcccctcatggtgcccccttcccaccatcatgatctcatgaagcttgttgctccatgatcaggcactcaatctaggttcatggcttcaaagattcttatgggttcttacaagccacctggtccaacctccttattttcagcatgtgatcaaaataaggcatcagggccagcgtcatgggtgtgtgacctgtgcagaagcacagggtcctacatttagaagtccccacatttggtgttgatgctctactgttgctgtcttttaacaaaaccttcaccaaagtggaagaagagtaggcatggcaaaaaaaaaaaaaaaaaaagtctttagtttttgaacaatggactccacattttcattttataytgtaccctacaaattatgtttctggtcctatctaagtcatactgatatgtttgtgacttaatgaaccac

SEQ ID NO: 517030 - DNA, 531 bp, Homo sapiens
ctacaagacaagatgatggatccccccaactaccccctagacccagggattatagaccacagggaaaagaatgacccagaagggatttatagggcaattgaagtatgataatgataacgtcaagattattttacctaagggaaggatttacagtacctgctcttacacaaggaacagtagacaaactggaagctttaaaggccttcccggaacaagaattagtcagaagccaacatggtggacagattagcttccaagatggagttgctttggcctccacagtggacaacacggaagagaatattgaaaaatagggaagttagggacaatgtgaaaggtttacgatgagaagtagccctaagggagcaaaacagaggagcccataatgggaagcccaactgaaatctcacctgagagacccagctttagccctactggaatggaattgctaatggctgatctttctgaagagaacttttatttttagttgcccaacacttacrgggattgatctattttaaaaatcaaata

SEQ ID NO: 517031 - DNA, 501 bp, Homo sapiens
aggccttggaaaaccaagttttgatcgaggcgcaggatcacaggcttccaatcacggagccatggattttcaaatcttgccctcaattgagttacatatggaagtgcaaggactgctttatggtgtttaggtttttaaagttgtctctgagctgccaaaagcaattcacacgggaaagtagtaaaacatcaaaaagtaaaatagcttcatttttaaattaattttattacttaaaaaagtttactgcatactcttctaatgtccttcaacatattcatttgttatggagagacataaggttagatccaacgtgtatatacaacatgtttgcaatcattgaaatttctacagtgttgttaacaattttggttgcttgccaccaaatcaacawtagtgattcaaatatcccttcccctctcctcatattttgaatagccaggattggctcaaagggttaactaagcatgagagcaaatgtgcattttcatttggattttgtgt

SEQ ID NO: 517032 - DNA, 673 bp, Homo sapiens
gatgtttgtatagaggctgctatcaaattccgataaacttttcctgacccctttcactttccagagtccctgggaatcccagcaaccaactgccattgtctccacactcagacttgtgctcaattataagctctctccacatctaagatgttatgtttccacacagctactttaaacaatcaaagaaattaaaagatctttgggtcgctttgtaataataatagtaataaaaaagtttctataactcaagcatttgtccttggtatgttctaaattatttcttcagaacttttttaaaggcaggcataatggaaggcttagagattctattcagctgctttaaaatcaaaaccaaagaacagcggtggcagcacaagtctgaaaaggcattaagtcatcgaaatmgccattcagtgaaccagctttggaacagatgtcgctcccatcaccttcatccaaagaaccaaggaggggacattgactatattatgaagataataaagccaacagccttaagtcagtaatgccttcatacaaaactcttcaggcagactcactaaatggtcctgaagaccccatcatagtctttgcttgatgtaacaacatcttattttctcagcatttcagggggtgaaaggatgatggctagcattgagccctaaatcaggatact

SEQ ID NO: 517033 - DNA, 673 bp, Homo sapiens
gatgtttgtatagaggctgctatcaaattccgataaacttttcctgacccctttcactttccagagtccctgggaatcccagcaaccaactgccattgtctccacactcagacttgtgctcaattataagctctctccacatctaagatgttatgtttccacacagctactttaaacaatcaaagaaattaaaagatctttgggtcgctttgtaataataatagtaataaaaaagtttctataactcaagcatttgtccttggtatgttctaaattatttcttcagaacttttttaaaggcaggcataatggaaggcttagagattctattcagctgctttaaaatcaaaaccaaagaacagcggtggcagcacaagtctgaaaaggcattaagtcatcgaaatcgccattcagtgaaccagctttggaacagatgtcgctcccatcaccttcatccaaagaaccaaggaggggacattgactatattatgaagataataaagccaacagccttaagtcagtaatgccttcatacaaaactcttcaggcagactcactaaatggtcctgaagaccccatcatagtctttgcttgatgtaacaacatcttattttctcagcatttcagggggtgaaagsatgatggctagcattgagccctaaatcaggatact

SEQ ID NO: 517034 - DNA, 551 bp, Homo sapiens
tagacatagaactatgttatttataccctacaaaacaccatgaaaaatctcattttcctaagtgtaaagtgtggaagctaggatgaaagagagtgtttcacttgacttataagctttaaaaatattaaaaataagtcacccaaaactaaagatttgtgaatgtgtacacaatttttaaaaattctttcaggggatacaaaagcaaaatatttgaagaacatggaattttgccctactgtgaatatcagatcttttcgaggagcaaatcgtttttcaagagtaaaagatatttcaaaggctatgactgaatacctaagaggagtagagaagaaccgcccaacaaaggaaaagggatgtggtggagagatgaaggtaaagagaatgcagatgaagctgcctatttcatcattttgcctatggatggaagtagcagctatgaggatgctcaytgcagacatcctgtaacaggaagtgaaactgacccaggggccccctgctgttttatgaaatccttctcagcctttgtcccaaggctccactcttcacaggca

SEQ ID NO: 517035 - DNA, 628 bp, Homo sapiens
taactctcaatgacaactgctactgggaaaacactgctctctctgtgatgtcttcattccttcctggcagcatgcattcctagggttttggagaccaagttggatactgtgtggcccagttcccatgattgggagctttcacatagccttttwaaaaaaaaaaaaaaaaaaaaaaaaaagtttatattctgttcatttgcctgataataaaaactcagctaagcagaggggcccaggggcccagtgtcattcactccaagcctgcacctagaaggctaaatctgtcacctcattccctggaacactcatacattgtcagtgggaatgtaaattggtacagccactatggaaaactatatggaagttcctcaaaaaactaaaaatagaattaccatatggtctagtaatcccactgctgggtatatatccaaaagaaaggaaattagcacagtgaagcagtatctgcacccccatatttattatagcactattctcaggagccacgataaggaagccaccacattttaagcagattttttaaatgtagtatatacacacagtggaatattattcagccataaaaaataatgaaatcctgttatttgcaacaatctggctgaaactgaag

SEQ ID NO: 517036 - DNA, 635 bp, Homo sapiens
acacacaagaagatgctgtaaagctgaagatgggggagctagtgaataaaaggtgttgcactggcaatgggcagagaggtgcctcacaagcaggcagggagaagcaacagagtggaatggccaggagcttcgactctggagccaatcacctaactcctctgtgcttcaattttcttatctgtaaaacagagtcaataatcatcacagcattgttatatggattgcatgagttgctgtttgtaaagtgctcagaacactggcacatagtaactacttaaagcttcgtaagacaaaaaaactgagctgacaaagtccaccgtcacaactcagttctactcctctgccarcacggagtagaacaccatggccttttaagagcaagtggcttctagagaacaacctccgatatatgcacttcccattgcccacaattattaagagatgaaaactaccaagacatctaaaaattaactaagggaaatactaccgccagaaactcagaggaatttgccctaagtacaaagccaaggaacagaatgggacctactgacctacttagtcttcactgcagaaaacagagtcctcacttcttggattgtctaaggcatcctgggtcaaatgtagctagagaacca

SEQ ID NO: 517037 - DNA, 606 bp, Homo sapiens
tggccaacacagcccttgacctacagattccccagagcacccttttagttctgattttcctggaacttgagaggatttgtattgcaatcatgtattctgtttactgcagacatgcacatcaacagatacaagtggtgygtgagccccactgaaacctgacacttaatatcacaccctcgccagtgctaagaaattcaggggctcctgctatgtgtgtgtattgtgttgtatgttaggaagcatggtggtgggaagggcagaggatggcaccagatgggattaagggcctgtggtgcctcttgctccaccagagcctcctgcacatgactttctgccagcagcacctcacccagaccattctgcagacgttccctgtacttagatctcaggccctggcatacccacatgactagaaaaattaaattaatattttatgacatatggggctttcagtgaacttggatggaagcacatacatacaccattcacatggaatggtaatacatagcctatggtatcctaacacattgtaggaggaaaagtcccaccattttataaaccattagaagcataacttaggagattgcatcctctcctacaatgaga

SEQ ID NO: 517038 - DNA, 606 bp, Homo sapiens
tggccaacacagcccttgacctacagattccccagagcacccttttagttctgattttcctggaacttgagaggatttgtattgcaatcatgtattctgtttactgcagacatgcacatcaacagatacaagtggtgtgtgagccccactgaaacctgacacttaatatcacaccctcgccagtgctaagaaattcaggggctcctgctatgtgtgtgtattgtgttgtatgttaggaagcatggtggtgggaagggcagaggatggcaccagatgggattaagggcctgtggtgcctcttgctccaccagagcctcctgcacatgactttctgccagcagcacctcacccagrccattctgcagacgttccctgtacttagatctcaggccctggcatacccacatgactagaaaaattaaattaatattttatgacatatggggctttcagtgaacttggatggaagcacatacatacaccattcacatggaatggtaatacatagcctatggtatcctaacacattgtaggaggaaaagtcccaccattttataaaccattagaagcataacttaggagattgcatcctctcctacaatgaga

SEQ ID NO: 517039 - DNA, 574 bp, Homo sapiens
ctttgtctccaatttgcataatgtaggcctattttctaatagttaacttgccgcttattactaaggatgttmatttccacatcttttccagccatatttagtttggaagtgtaatcccattgtgtatctctaatatatttttcaacataatacatctgctagatttcaaattacatttcagtgagtagttcttgtcttgtattcaacccccgtttaatgtttgcactcaaatgaaacaacttggtaagcaaagtgccttcagcagttctgtcaagatttagtaacttaatctggattcctgttaaaccactcttcataactaaacacttgggtagactctggctgagatctcattgctggaagctaaatatatactgattaggagagaagcaaccctggggcatgttactgaacaaatgcatcatcatttctatgcagacatttgtacttgaaaaaacaatcacaatttaataagtaacagacgtaagaagaagataaatgatagaagttattggagagcaaaggacttgctaaagatggtgcaagatctcaaattaatgaaagaaaagattaa

SEQ ID NO: 517040 - DNA, 574 bp, Homo sapiens
ctttgtctccaatttgcataatgtaggcctattttctaatagttaacttgccgcttattactaaggatgttaatttccacatcttttccagccatatttagtttggaagtgtaatcccattgtgtatctctaatatatttttcaacataatacatctgctagatttcaaattacatttcagtgagtagttcttgtcttgtattcaacccccrtttaatgtttgcactcaaatgaaacaacttggtaagcaaagtgccttcagcagttctgtcaagatttagtaacttaatctggattcctgttaaaccactcttcataactaaacacttgggtagactctggctgagatctcattgctggaagctaaatatatactgattaggagagaagcaaccctggggcatgttactgaacaaatgcatcatcatttctatgcagacatttgtacttgaaaaaacaatcacaatttaataagtaacagacgtaagaagaagataaatgatagaagttattggagagcaaaggacttgctaaagatggtgcaagatctcaaattaatgaaagaaaagattaa

SEQ ID NO: 517041 - DNA, 574 bp, Homo sapiens
ctttgtctccaatttgcataatgtaggcctattttctaatagttaacttgccgcttattactaaggatgttaatttccacatcttttccagccatatttagtttggaagtgtaatcccattgtgtatctctaatatatttttcaacataatacatctgctagatttcaaattacatttcagtgagtagttcttgtcttgtattcaacccccgtttaatgtttgcactcaaatgaaacaacttggtaagcaaagtgccttcagcagttctgtcaagatttagtaacttaatctggattcctgttaaaccactcttcataactaaacacttgggtagactctggctgagatctcattgctggaagctaaatatatactgattaggagagaagcaaccctggggcatgttactgaacaaatgcatcatcatttctatgcagacatttgtacttgaaaaaacratcacaatttaataagtaacagacgtaagaagaagataaatgatagaagttattggagagcaaaggacttgctaaagatggtgcaagatctcaaattaatgaaagaaaagattaa

SEQ ID NO: 517042 - DNA, 536 bp, Homo sapiens
tccttaccccaccccaaccacagagggctcggagcactcacacctgtgaagtcaggacttgccgccaccctcctctgttgcccctgtcctcccattccatgcctgaggagtcgggcaggcggcccgcccaggccacgctttccgtgtcctctggcccgcgaggctttgcatggacagaaccaacggcgagccgcgccctggggactccaggctgccgggatccagtcccgcctccagcgcaggctccaccctggggagctcccgagaggcctgcgcgctcctgcyactctccaagcctgcaaggaagaaccgaaagacctttattacattccctggatgtttgcatgggacagtgaaatcctgccctggaaaatgggagctgacagtagcctcaggagtccagcaaggaatgaaatttcagtccctgctatgagagtccaggcggagatgaaggctgatggcgccttggatgtcctctagaggtgaccaaggacgaaggcagatacatcaatgggcttggcagtcatcattcattt

SEQ ID NO: 517043 - DNA, 493 bp, Homo sapiens
agattaggccaggagtgagattcgctctacaggsatggaacccagggaaggctgcatgaccggagcacggtcaggtaggtctctgctaaagtacaccctatccccacaggacatctggacctgagaggtcgggtgagaggctaggcactcctcaacagggacagcaatagcccagatggagaggacggccgtggcggtggagaaaacgggtggattcaagagatactagtacaaataattcattaatgcatcatttatttcgaaataaaaaaatctgctgattgtaagaccaacctgtgtgtttgagaaaatctctatcaccaactattctctttgtaagcctaaattttgtatctctttaaactaaatcaggaggataagcctttatttatcaccccagtggggaatgaaagcagttcccacttgccctcttcttttgctgcttcttctctttcttttaggccgaagaactattctcactaagtggactggg

SEQ ID NO: 517044 - DNA, 493 bp, Homo sapiens
agattaggccaggagtgagattcgctctacaggcatggaacccagggaaggctgcatgaccggagcacggtcaggtaggtctctgctaaagtacaccctatccccacaggacatctggaccygagaggtcgggtgagaggctaggcactcctcaacagggacagcaatagcccagatggagaggacggccgtggcggtggagaaaacgggtggattcaagagatactagtacaaataattcattaatgcatcatttatttcgaaataaaaaaatctgctgattgtaagaccaacctgtgtgtttgagaaaatctctatcaccaactattctctttgtaagcctaaattttgtatctctttaaactaaatcaggaggataagcctttatttatcaccccagtggggaatgaaagcagttcccacttgccctcttcttttgctgcttcttctctttcttttaggccgaagaactattctcactaagtggactggg

SEQ ID NO: 517045 - DNA, 493 bp, Homo sapiens
agattaggccaggagtgagattcgctctacaggcatggaacccagggaaggctgcatgaccggagcacggtcaggtaggtctctgctaaagtacaccctatccccacaggacatctggacctgagaggtcgggtgagaggctaggcactcctcaacagggacagcaatagcccagatggagaggacggccgtggcggtggagaaaacgggtggattcaagagatactagtacaaataattcattaatgcatcatttatttcraaataaaaaaatctgctgattgtaagaccaacctgtgtgtttgagaaaatctctatcaccaactattctctttgtaagcctaaattttgtatctctttaaactaaatcaggaggataagcctttatttatcaccccagtggggaatgaaagcagttcccacttgccctcttcttttgctgcttcttctctttcttttaggccgaagaactattctcactaagtggactggg

SEQ ID NO: 517046 - DNA, 240 bp, Homo sapiens
cccctgtgtggtgcgtgaataatacgtgggaaatggaagatgtggtgccggcctctgwggatacttcagcgtggtgttcgaattgtactctgcggtctgcagtgagtactgtgtaattggccaaaaacaacctaatctcaaagaaaaacaagaaacaaggaatgattggagcttcacactgctcaaagaccagcactgacctcagccccaacattaaagcagggtgaggctgaaaactga

SEQ ID NO: 517047 - DNA, 589 bp, Homo sapiens
tgtttaatgtgacaaactttcgccaagccctactgtgtggcaatgaagagaccwgatcaagcccatgctctggtgatcctgggagctcaaagtctagtgggaggaacaggcctttaaatagcgcggttcagtgtggtaagctgttgcaaggagcagcgagaaaagaccacgtgtggagtgctgcttccaacttccttgcaaattagcacagcgttttaccgagtaccaccgggagagctgtcatcaaggacaacttatcactttgttttgaccagggaaaattgctggtaaggcatgaaatgtgatcccactcccgccccgcaggcagccttcatcttttgggttttgcgtgctgcctccaaaataagtaacattcggactctctctgtgatttcaagtatttccaactgcttagcactaagtaccgcacaaaaaagagtgaatatgaagtatctcagttaagatcttgacggagcagcaggagacgactcccactgcaccactgcactacacatactgctccctaacttcagatctatagcccaagtccatttccattaagaccactggggagtcaagacaagttcaa

SEQ ID NO: 517048 - DNA, 655 bp, Homo sapiens
aaggggaggcaacatgaatgtcagtaaaggattgatacagggcaagcttgaggaccgcacccaagagcatggactcaagttgcctgaatctacgctcagattagccacagttccgagtggacttttaaaggaaaaggggaacagagagtgggctgatgcaaagttgttggtcaggaatcttactggcttacaggaacagtactaagtagtgattggctacacattgttagtcgacaggatatgggttataacgtccagcacagcattattaggttaattcatagcaacctgtagcaaaagcaggccgctttgagagacgggtgcacagctcaagggaaggagaagtggggactggttgctgyctccttttaatgtctctctggggctggtaatgaaaaagacttgcattcctcacataaaacttttcttttctcacctatttaattgtcatttcttctttctgccacttcttcccctctaggtgtgcttttcttcttactggagctatcctttagttgttcttttttatgagcaagcacatttagtgtgtctgaaaatgcttttcatattgccctcaactttgaatgaaagtcagcgtggtacagcattgcaagcctgttcttaacccactgaagacactccattgtcttccacc

SEQ ID NO: 517049 - DNA, 634 bp, Homo sapiens
gaagagggaaatttggatacagacatacataaacagcaccatgtgaacatgagggcagagaactggatgatccatctagaagccacaggatgccaaaggttgccaggaaaccaccagaagctaagcagaggcctgggacagattctcctcacagmtctcggagggaaccagccctgccaacatcttgattttggacttccagcctccagaactgtgagacaataaaagtctgtggttttaagccacccagattgtggtcacttgttatagcagctccaggaaactcacacagccctagactgatgtggcctgaacaccctggagtcctggaggagtgagcaatcttccttggagactcaggattcaggaagaatgtggaggagggaagaggaagcagccacctttgagatgccccacatgtgtatgagacacagaagcctcagccttcttctggaaggaggagctgagtcagggtttgaagattttggagggtttctagaaatagaaatagaagagagtgatttagtgtgtgatggagggcaccccacaaagacaggcagaggtgtgcaggtttgtccaggacaaagaagcagtacgggtagggagggtccacccaggagtgcaaggtgacttc

SEQ ID NO: 517050 - DNA, 421 bp, Homo sapiens
tgatacactggactttggggactcagaggaaagggtaggaggtggcaagggataaaagtctacacattaggtacagggtatactgctggcgtgatgggtgcaccaaaatctcagaaatcaccactaaagaactwattcatgtaaccaaacaccacctgttccctcaaaaccaatttaaataaaatttttttaaaaaactttaaacgttgattgctagagtataaaaatagaattgattttgttgactttcttttttaacttttaagttcaggggaacatgtgcaggatgtgcagttttgttacataggtaaacatgtgtcaagggagtttgttttacagattatttcatcacccaggtattaagcctagtatccactagttactttttctgatcctctcccttctcccaccttccaccctc

SEQ ID NO: 517051 - DNA, 421 bp, Homo sapiens
tgatacactggactttggggactcagaggaaagggtaggaggtggcaagggataaaagtctacacattaggtacagggtatactgctggcgtgatgggtgcaccaaaatctcagaaatcaccactaaagaacttattcatgtaaccaaacaccacctgttccctcaaaaccaatttaaataaaatttttttaaaaaactttaaacgttgattgctagagtataaaaatagaattgattttgttgactttcttttttaacttttaagttcaggggaacatgtgcaggatgtgcagttttgttacataggtaaacatgtgtcaagggagtytgttttacagattatttcatcacccaggtattaagcctagtatccactagttactttttctgatcctctcccttctcccaccttccaccctc

SEQ ID NO: 517052 - DNA, 401 bp, Homo sapiens
atcagcctcggtgccctcagtgtcctcttggagaatcattagcctatttaggactacaggtaatcaactgaatcayaaagacataaaatttggaggcagacattagtttaagtaatcctagtgaaactactttttgtataattttgtttaatttatctaacttttccatgcctcagctttctcatttgtaaaataagtttggtggtatacacttcacataattgtgaagtttaaattagagaatttacacataacctatacacagtaagtctcaacaaacaatgatggctgaatctgtagttgtagaaatagtactgattggggtcattgttggtttcactatgtaaataagaacaattatgaagcatagaaaaatgattcaaaggggcagatttgactgt

SEQ ID NO: 517053 - DNA, 401 bp, Homo sapiens
atcagcctcggtgccctcagtgtcctcttggagaatcattagcctatttaggactacaggtaatcaactgaatcataaagacataaaatttggaggcagacattagtttaagtaatcctagtgaaactactttttgtataattttgtttaatttatctaacttttccatgcctcagctttctcatttgtaaaataagtttggtggtatacacttcacataattgtgaagtttaaattagagaatttacacataacctatacacagtaagtctcaacaaacaatgatggctgaatctgtagttgtagaaatagtactgattgkggtcattgttggtttcactatgtaaataagaacaattatgaagcatagaaaaatgattcaaaggggcagatttgactgt

SEQ ID NO: 517054 - DNA, 464 bp, Homo sapiens
tcttagagtgtgtctcactggtcataggaggataaaaaaggaggaacaagaaggcattattgtgtaatagaaaagcatgagacttggagttagttgagaaaggaaagagaaatggacaggtgcccccacactatgccaagcatcttcccatcatttatcttatttaaaagcatgtgagtcttataggcaggggttgctaccattgaggctaagaggtctccactgawttgctctgggccacagtaggtatcaggatccaaatccaccttaatcagcttctagagtcagggcttgttccacctgccacagtgcgtctcaggggctgagttctgtttagcaagcctatgagcatttctataaagtaggaataagtaccaacatcagattactcttgttaaaatagtatatcacgatatatgtgttgtgctttgtaaactctaaaatgccaaacaatggagatgatg

SEQ ID NO: 517055 - DNA, 542 bp, Homo sapiens
actctgtttagcagcaatacaactaactacttctttatctccttcccctttttgatctccagatcatttcttagggttagaagtattatgatatattggcactctgtgctctatctcaattttgttaaaaacttattgtttggagtgtatccatttcctagtttcattgagcatggaatttgctctctcatattattttgctgctctggtggttttaaagagagatcattttcaagagaagttttttttaatgtcttttttctttagttctgctatttcttttattcatctcaatctgtaatcttatctcttatctatcgctttgcaaagtctatgtttcccttaattttctcaagtgcaaagcattttctgcctaaaaaaatattccagagtcaaacttcttaatctggtttcagtgtgctacatttatattctcattttgaaatattcttcttgcatagtttctccatcttctcttcttytctattttatttcaataacacaggctcatgtaggtttgatctcccttctccccagtgata

SEQ ID NO: 517056 - DNA, 600 bp, Homo sapiens
tgtagttggtagttaaagccacaggactgaaagagatcaccaaagaattaaaaattacagcattccagtattcagaaactgtggatataagatcccaacagataaaattcataggcagaattggagtctatgtgcataactatgtcaactagtgtcaagtcaaagaaataaaagacaaggtcagcacagtggctcattcctgtaatgccagcactttgagaggctgagtgaggagaattccttgagcccaggagtttgagaccagcctgggcaacatagtgcaacctcatctctaccaaaacttaagaaattagccaggcatggtggtatggtgtacacctctaatcctagctacttgaggggctgaggtgggaggattaaaaaaaatagtatgacagcatatcytatgtcaggagacttggaataaatcttaaaaagcaactgtttttcttgagaattgaccatataggaacttttggattttgatagttgtattagtttattctgcacactgctataaagaaatacctgagactgggtaatgtataaagaaaagagttttaattggttcatggttctatgggctgtgcaggaagcata

SEQ ID NO: 517057 - DNA, 570 bp, Homo sapiens
gtgggttttgcttctgaagaggcctcagaaaacttataatcattgtagaaagtgaagggaagctcaggaaacataatcatggcagaaggtgaaggggaacaggcatgtcttacctggctggagcaggagcaagggagagagaaaggggaggtgctatacacttttaaatgaccagatccctggagaactcactcactattgtgaggatagtaccaaggggaaaaatccatccccatgatacaatcaactcccactaggccccatctccaatgttggggattacaatttgacacgagttttgggtgggactcaggtccaatccataccaatagtcttattctgagagtacctgaaaatctcctgagacccattatcaatctcaggactgcaaaaaatcaaagttctgtattcactcatgaaaatcagycatcaaatactgttttataagaagtagtcatttaatttgaccaagcttaaagagttctcagggaggaatcttaagcagaatgtcaccattgcatctcttcatctgaagaaaaagattggtttaagaatgtagtacagacacta

SEQ ID NO: 517058 - DNA, 530 bp, Homo sapiens
atattgtaaagccttagaaaaatctcttaatctcttggggcctcactttcctcatctttgaaactagggtaatgactgtatgtacagtactgaggtcataggggtgcaaggctcaaatgacataatgttcctgaaaaccttttaaatgtgctataatgcaaaagttattttcattaacaccattagcatcaaagtgtaaattattgtgaatttcacaagtctatttgaattwtacacttattccatttgcaccagaaaccatcttcagttcaccattttaaaaagtcaacctagtcttaaatgagtactatacaaaggatcttgattcacaaacataacggctgctgttcttcatctgaaagtcatagtcataccctaaagttaagatcagtatgtgatccacagtgtcaagtcctctgtagcctaaatattggaggcttttcagaatatgttgtatttactctttcagaccacattatttttatattatttgttaataaggtaattataattacaaaacagtagaagtt

SEQ ID NO: 517059 - DNA, 479 bp, Homo sapiens
ttgctttcgctatgctgagattacagacattctcttgtattgccctctaaaacagcaataagcaaactgcagctcacatttgtaaatacagcgtatggaaacacatccacgtccattcttttgtataatatctatgccaccttgcactggaagaacagagttgatagctgtgaccatatggtccacaaagccaaaaacttttacatctgatcagttaggaataagtgtgctgatctggttctaaaagattattagatagtcgatctttttctcygagatctagtgtggcaattgttatgtatcaagttttcatacatgtgtaggtctctctatgggctctcttctcttctattggtctgtgtgtccatctctgtgtcatttcaacactgagttaacacagctttataggaaatcttggcatcaggtaaaccaaattctcacactgtaatcttcttcaagagtattttccctttacttgg

SEQ ID NO: 517060 - DNA, 468 bp, Homo sapiens
atattctcctagtggattcaaacttgcattaatatataatgatactcttgatctcaaatgtttctgtcttaaggtcttaaggtctatgttcttatactattacattagaacaatatgaaattgtttttttaggttaataagtggcaaatttatagagttcaatccaatagccttgtcagttttctcttttttctctgtgtgctttcgtattaggtatgtctctaataaacagcatgtagcttgatcttttaaaagcatccatacaacaacctatgccagttcatagtgtttcytgatgtatttggatttcttattgctttattttgtattttctctttgtctcaatttttgtgatttttttcttgttaaattaaaaaaaaaaactttagagaaaatacatttaacacagtttgagtagaagatgattcatgcatgacgcagcactcagaaccagaaggggttcagaga

SEQ ID NO: 517061 - DNA, 632 bp, Homo sapiens
  misc_feature (1)...(632): n = A,T,C or G
ctgataatgggattcaccctccagaggcagagcacttaattaacttctgggacaagaggaggggaagggaaaatgaggctcttaaggggacaggccaaaggctctcaccccatgatcagccaggattcagccaaggacataaaatctcaggttcaataaatattaactgacaacctagtctgtgcacagagctgtgctagacactagagatacagaagtgaacaaaacagacaacacccttgccctcctggagctgacattcttgtgcmggagagggacagatgctacctgggcacctnaatacgtgaagattattaagaatagctgctgttgtgcaggaaggcttagcctttgccagaaaacgttagatacagatgcgggcagggcggaaaacagggagggtccctgctttcagccagcagctaaacggtcaagttctatgtaccggctgagaatagggcctgggatgnaaagccagagaagcctctctcagaagccagggaagtggctgctcacccgcttaatccctccatggctccccattccctcccaatacaatccacaccggagactacaaggccccacccacatcccaaatatcctgtcagatgcacttcccatcagccctgtct

SEQ ID NO: 517062 - DNA, 484 bp, Homo sapiens
ctcaccagacacctaatctgctgccatcttgatcttggactttccagcctccagaactaagagcattaaatttctctkgtttataagccaaccagcctatggtatttttgctacagcagcccacatggactaagacaccatccctcaccatgggagagaggaggaaagaaggaggtctctgtgtttcagtatgaaccagttctaaaggcagccacagccttctggttcccgaaaacaaaagtggattgggggttgtctgtcccttgccctcccttgacaaacacttctccctctatctttctgggtgaccagctcctattctctttgcctcagtttcccctctatatctgggctgaaacacagattgcaaacttgttaacagatttcgtgtgtcccttttaatgcttttaatctgaatgtgccgtcatttttaaaaataagaaaatttcacctttaagcaaaatctggtttaagcaaaatcagc

SEQ ID NO: 517063 - DNA, 422 bp, Homo sapiens
ctggctgggtgtggtggctcatgcctgtaatcccagcactttgggaggctgcgttgggcggatcacctgaggtcaggaattcaagaccagcctggctaacatggcaaaaccccatctctacttaaaatataaaaattagccaggtgtggtggtgcatgcctgtagttccagctactcgggaagctgaggcaggagaatcacttgatcctgggaggtggaggttgcagtgagccgagatcgcaccactgcactccagctttttttttttttttttttggaacaccttctttgagccaggccacamcctggacatcaggaatgttctgagagggggagctgagtgggcagtgtcctgagaaaaggaggagagaggggcatagggaaggaattcaaccttgctggcttgggtgggcacagagaga

SEQ ID NO: 517064 - DNA, 559 bp, Homo sapiens
tgctgaagaaagtatttccaagtcttttacaagtgaattcccactaactgggccctcatcctacagaaacatggtttgtgggggaggaggagggagtctgtttatagctccatcactcatgctgtgtcatcagagctggattataaaaagttatgtcttctagatcagagccttgcctaaataggaagtctagaaatcacctaaacaaagagatggctatgcaactccctgaaggggagttagtttatactcctgctatgagaactatcagcaagtcaccgtttttttggaaatggattttaaaaaacattcaatattttaacaataatgaattatgtttagtttcatttacgtggagaaaaatgaagrcaaatcacgtggagaagatgtaatgtgaatagagatataagtactacttgtttaaattcagagaaataataattatgatgctcgcaagtatttactgagcatttattatgggctaaacactaggtaactgccttacatttaatccttataacaccatgtaaactggtagctagtgctgctcagcttaaat

SEQ ID NO: 517065 - DNA, 475 bp, Homo sapiens
cagtcaatttcacagtgatggactcacacaggtggatgatctgaggcacaagctgtgattggtcttaagaaaatgaaaggtagagttgggttcaaaatccacatctcacgatttctggtccttattcatccaaaaagttgaactgcttcatatcagtgtattagacacattttaaatctttctcaagagttgctctgggtgcagcatgataaggaaaaccaggtatttggcttgatagcagatattcaaggtataggtgccaagcttatggtaagcttctcaccgtaggatatctgagatctgttgccacaaagaggactatggtcctaygatgactactatagttcagttttcaacattttgggaataatttgatcataacctttccttctcgttacattataagacaggaatttagagtattcactcaagaggttctcccagtaacaggtgatgtcatccatctgcaaatggt

SEQ ID NO: 517066 - DNA, 436 bp, Homo sapiens
ctggctacttttacgtgtgcattaaacaatgtaaccatggttatattaaagctatgatagtaaatatgttttaattctaatctcttagtttccatttcctattttctgtcatatcaaagaaatgtaatttaaagctttygggtaaatgggaaagaaatattaaaagctcataaccattacattgaggtttgataattaaatcaacagatattataactgacatatcagaactatatagttgtaatagttaggttgttgttaattatgtatagttgctcacttgtgaactatccagattgaataacttggaaaagcaagaatggtccttctatgctctggatcaatattaatctagctatagcaatggaaaagaacaaacatttatacattactttttattaaactaatatcaattaggttttatgtaattattgtg

SEQ ID NO: 517067 - DNA, 557 bp, Homo sapiens
caggtatgcatttacatctacattaactattgcatcatggacttcatgaagccaagcccccaaattaatctccacctccttctctggcattcaggatataaactcaccagaaacattccaaatgcagaagtggttctcatctttttttgcagcttaagatctgccttggtatttgaagagatataaactagatcaatttctttcacaggatcaactaaacaggttgtacttttttattattaatatcaatacttagattttagatatataaaatatagaatgaaaattatrtattacaaagctcttaaaaataaaatatacaaagaccaaagtcttgattgatactttagttaattaatgatgtgaagcatttaaaaccttttaaaataatttgttgttaaaaataatattttacatttatgtagtattttgttgcttattgctttaatgtaaaattacagtaccattgctatcttaaaagtgctgaatgctggacgtgttctccattttaccaatgagaaaataaagcaagcagggtagaaggaggtagaatagag

SEQ ID NO: 517068 - DNA, 557 bp, Homo sapiens
caggtatgcatttacatctacattaactattgcatcatggacttcatgaagccaagcccccaaattaatctccacctccttctctggcattcaggatataaactcaccagaaacattccaaatgcagaagtggttctcatctttttttgcagcttaagatctgccttggtatttgaagagatataaactagatcaatttctttcacaggatcaactaaacaggttgtacttttttattattaatatcaatacttagattttagatatataaaatatagaatgaaaattatgtattacaaagctcttaaaaataaaatatacaaagaccaaagtcttgattgatactttagttaattaatgatgtgaagcatttaaaaccttttaaaataatttgttgttaaaaataatattttacatttatgtagtattttgttgcttattgctttaatgtaaaattacagtaccattgctatcttaaaagtgctgaatgctggacgtgttctccattttaccaatgagaaaataaagcaagsagggtagaaggaggtagaatagag

SEQ ID NO: 517069 - DNA, 300 bp, Homo sapiens
ctaatttcatgattatctatttatatttatttgttgttattgttgcttgaacactagttttcgagcagttttagagatgataccacttttacactgtttttctctstaattttagttccttatggttcctggtataaacatgtaaaatcttggtgggaaaagggaaagagtccacgtgtactatttcttttctacgaagacctgaaagaggtgaggaactgggaacacataagcaacttggtaatttctaagatgttagcatttgaaaatactctggatacaaaaatattcctttaaata

SEQ ID NO: 517070 - DNA, 619 bp, Homo sapiens
ttttggtggtgtccacccacactgaaggtcggtcttcctcttccagtccactgagtcaaatgtcagtctcctctggcaacaccctcacagacatacccagaaacaatactttaccaaccacttaggcatccttcaatccaaccatgttgacaactgatattaaccatacatggctataacaaagcatggagaattaagatttggtttttttagcttgcatagcaggaaatcaggtagtacacataccatcacactaagatcacacataatagagcaaatcaacatctccaaaagacattctgagagctatttaaaactagaagtttgaggatttgcayagtataaatcctagtcaaacatggaaatcttccaattacttctgctgataagtaaaacagtaagtaatttaaataatcttcaaatcacttatgtttgatgaattatagcaaattcttgtgatacataaagtaacacaaatttagcgttaccagtatgcataagctgtggttaaaattgcatttattgataaagggggtaagtaacacataagagagttttactttagagaatagtaaattttgtaattagatcacatttataagagagtagatattgtaga

SEQ ID NO: 517071 - DNA, 594 bp, Homo sapiens
acattttatatcatgatagttgagataactctgttctttttaggaagtgccagcaatggaaaattagtcagaatagcattttgacatctgtcttatttcattttctgctgctataacagaatatcacagattaggtaatttataaaccaaagaagtttgtttggctcatggttctggaagctgggaaatccaagagcatggtgctggtatctgytgagggtcatcccatgactgaagagcagaaggtggaagggcaaaagaaagggaaacagacagccaaagtcccatgataactaacctattcccataataatggccttaattcattcatagggtggagccccgacccaatcacctcctaaaggtcccacctctcaacactgtcacagtggcaattaaatttcaacatgagttttggcagggacacttaaaccacagcacttcatccctgttgccccaaaattcatcttattcttatgtgcaaaatacattcattccatcttgatagccctcaaagtcttaactcattctggcatcaactcaaaagtctcatctaaatcagacactcaacctacaatttatcttgaggctaat

SEQ ID NO: 517072 - DNA, 601 bp, Homo sapiens
gtgagtaggtgaatagtgagaggaaggaaagaacgaaattgacactgtgttttatgcttcaaagctcttcccaaagagtaagaagaaaagtcaatggacctgccaaattcttcaggcaagggcagaagaagagtgccctaatgaataaattttaaaaggttagaatgggaataataaataaaaattatgttttgcgtataccacaaatctttgttaaataatccaggtctgtctgtctaactctgtttattgagctgttcctcttcaggaccataattattaatttctcttggaattagtacttttcagaacatatttagggaaattttaccttatcatataactaaaggattgtattasagaatcttggcaaagctttggtggggaactagtttataaggtaagtcctttaggatttcaggtaaaagaaaattcaactcaaacaggcttaaataacaaaagaagtgtacaggttcagttacttggaaggctcaggtgtaggctggttaatctagaagctcagtcatgccaacaaggactccatttttatgttttgttttgtttcattttgcttagttttgactttgtcttttctttttac

SEQ ID NO: 517073 - DNA, 537 bp, Homo sapiens
attccaaacagcctggttggttggtcacatgcccaccttatagtgaagtctatcaaggctttgccaggaggctaagagtgggttcaacttttacaaaaacacawgagctgcatgagaaagaccagatagatgactgcctaggcataagagtcctgaattattttgagaaaaatgaaagcatgagaatggatgctgggtcaactgtcaagtttccaccaccgttgattatttaaatttctgccattgactgcatgcaggggagataccaaaaactatttatctgtctgcatgtttatgcaatcaaccaatctgaaaggacctggctttcagtggagaagcctggctcccaagggtctcttgtttgcaaggtgttaactccttagttgctatattgaagtgtccaaaagctactagggaaggtgacagaagaccatgatagagtggggccctcagaggacacagggcagtggcaatttacaactgaagcagaaatatatcaatatattttaacaacctttatacttgtacgcatgtgtg

SEQ ID NO: 517074 - DNA, 537 bp, Homo sapiens
attccaaacagcctggttggttggtcacatgcccaccttatagtgaagtctatcaaggctttgccaggaggctaagagtgggttcaacttttacaaaaacacaagagctgcatgagaaagaccagatagatgactgcctaggcataagagtcctgaattattttgagaaaaatgaaagcatgagaatggatgctgggtcaactgtcaagtttccaccaccgttgattatttaaatttctgccattgactgcatgcaggggagataccaaaaactatttatctgtctgcatgtttatgcaatcaaccaatctgaaaggacctggctttcagtgragaagcctggctcccaagggtctcttgtttgcaaggtgttaactccttagttgctatattgaagtgtccaaaagctactagggaaggtgacagaagaccatgatagagtggggccctcagaggacacagggcagtggcaatttacaactgaagcagaaatatatcaatatattttaacaacctttatacttgtacgcatgtgtg

SEQ ID NO: 517075 - DNA, 413 bp, Homo sapiens
gataattagggaaacttgactgaagaagcaaatattaagttttcatctgaaaaataagtgttacctgggtaaaaggagtgggatgcgggagcgtaaaggtcagaaaaagctatttggaaaaagggggaaaaaaaccatgagaaagcctgtggtaggaaacagcactgttgcagatactgtggctgcataacaaatgaccccaaaacatagcggcacaaaacaacaattcattttatttctaycagttccataggttgattgggctcagctagttggttctttattagagtctcacaaggatgtagtaagataatagctgtggctgaagtcctctgaaggcttgttaaggctggacatccaggatggctcccacacatggctggaaatgatgttggctgtcagttgggagctta

SEQ ID NO: 517076 - DNA, 413 bp, Homo sapiens
gataattagggaaacttgactgaagaagcaaatattaagttttcatctgaaaaataagtgttacctgggtaaaaggagtgggatgcgggagcgtaaaggtcagaaaaagctatttggaaaaagggggaaaaaaaccatgagaaagcctgtggtaggaaacagcactgttgcagatactgtggctgcataacaaatgaccccaaaacatagcggcacaaaacaacaattcattttatttctatcagttccataggttgattgggctcagctagttggttctttattagagtctcacaaggatgtagtaagataatagctgtggctgaagtcmtctgaaggcttgttaaggctggacatccaggatggctcccacacatggctggaaatgatgttggctgtcagttgggagctta

SEQ ID NO: 517077 - DNA, 640 bp, Homo sapiens
gcattgttactgcatttctcatcagatgaaagtaggcagaatcatttaaatgtagtccaatttagagcccagtatgaagggtggtggggatgaaggtaccatggtttttgagagaggaaaggcccaaatgtgcattaacaatcatgaagaaagggactggttcaagcaggagcctttatccargagttcaaggacagatgggaattggattttgtctggtggacttgattggcaagggtcgaagaaggctgcttagctgagaaaacagcacatggcctaattatatccacaacacagggatttttcagtcctctctttaaaaatgaactcttccttgcatctatgaagcaatgtgaatcctatcattaacacttccttctttgttgctgacaaaaattaactcctaaacccaccaacagagcttgaaatgtcacagttccctttagagtgacacagacctcttcctcctcctggcaaaatcttctgcatgaatgaaggtggagagagccttagtgaggtgactatctgatgtctcagtgctactcccaaagtcatagtttttcaggcaagggcacaagcagtggacaatggcccggcggatgtagctgtcgaagatatagtaaatgaaagggttgacaca

SEQ ID NO: 517078 - DNA, 636 bp, Homo sapiens
ccatggtttttgagagaggaaaggcccaaatgtgcattaacaatcatgaagaaagggactggttcaagcaggagcctttatccaggagttcaaggacagatgggaattggattttgtctggtggacttgattggcaagggtcgaagaaggctgcttagctgagaaaacagcayatggcctaattatatccacaacacagggatttttcagtcctctctttaaaaatgaactcttccttgcatctatgaagcaatgtgaatcctatcattaacacttccttctttgttgctgacaaaaattaactcctaaacccaccaacagagcttgaaatgtcacagttccctttagagtgacacagacctcttcctcctcctggcaaaatcttctgcatgaatgaaggtggagagagccttagtgaggtgactatctgatgtctcagtgctactcccaaagtcatagtttttcaggcaagggcacaagcagtggacaatggcccggcggatgtagctgtcgaagatatagtaaatgaaagggttgacacagctgttggcaaatgccaagggtccactcacctccataccaagctgaagaatagctgagggtaaatagtgttcttgccgcaacccagagacaatg

SEQ ID NO: 517079 - DNA, 636 bp, Homo sapiens
ccatggtttttgagagaggaaaggcccaaatgtgcattaacaatcatgaagaaagggactggttcaagcaggagcctttatccaggagttcaaggacagatgggaattggattttgtctggtggacttgattggcaagggtcgaagaaggctgcttagctgagaaaacagcacatggcctaattatatccacaacacagggatttttcagtcctctctttaaaaatgaactcttccttgcatctatgaagcaatgtgaatcctatcattaacacttcyttctttgttgctgacaaaaattaactcctaaacccaccaacagagcttgaaatgtcacagttccctttagagtgacacagacctcttcctcctcctggcaaaatcttctgcatgaatgaaggtggagagagccttagtgaggtgactatctgatgtctcagtgctactcccaaagtcatagtttttcaggcaagggcacaagcagtggacaatggcccggcggatgtagctgtcgaagatatagtaaatgaaagggttgacacagctgttggcaaatgccaagggtccactcacctccataccaagctgaagaatagctgagggtaaatagtgttcttgccgcaacccagagacaatg

SEQ ID NO: 517080 - DNA, 652 bp, Homo sapiens
ctgcatcgccagcccctgaattctctgtaatcataaggttcactgggcttccatctcttgctgataataagggtgaggctggtacacattctcaagcaaggttaacagaagaaattacatttaaacataggtcttgattcaaattatatgccatcgctaaggactttctgaccccagaaggaaagggaaagatttattaaacaatttagaatatttctcaggggacactctctaagattccttcacttatcacaacttatctacctactggttggacctggagatgcctccctttggtttgaaaaagccaaatggaccaccatctctgaagaccttcaaggatattggactatcactgattttcatcagagaatgaggcaaataagagaaaaattactaggagccatctctcaagtctatcccaccaaaattgattgcttacatatccaaaattgtaagcaactaaaggatgaaamttgctatcgtcatcaactatagataacatgggaagaacacttaaagctggaactgacttacttgacagttactgctctgcccaccagctttgtaaatggtctcagactggagatccatgatgcattaaagaaaaattatattaaccggcaaaattaaaacataactgagttccaca

SEQ ID NO: 517081 - DNA, 721 bp, Homo sapiens
ctgtttcacagtctgagacagttaatccataaatgcattaattatattagatacgtaggtaagaaataaaaagtctactaagtgggaaaattactgagctattctagtttattgcaaaaaaatagtgtcagtgattaactgtctctaaagcataatacagacaaattagctcttgtgtttgagtcaatgaattatagataaataccattggctgtgaattttcacaagtatacggatctttttaacatatttagaggagtttgagatttataatttagatttagaggagtttgagacttagagagtttgagatttgaaaatacatttgtaaaacataaaaatacaaaatgatgtatcgttttctatcgattagattatttggccattaccagagacctaaagaactcttccagatgttagttggcaatgcagactaccacatcatgtacctctgcatttttgtgatctgaaaaatctggactactagaaacaaattttgttaatgcaatgagttctagtattctgatatcaattatatattttcccaactctcataataattttcagacatttttagtaacagaactttagaggttaccactatttattatataatatttagggatatgaaaccagtcttagtaatatttcccyttttcacggaactgaacatggtttcatataatactcaagttgttcaatagatgttcctagaattgaa

SEQ ID NO: 517082 - DNA, 673 bp, Homo sapiens
attttcccaactctcataataattttcagacatttttagtaacagaactttagaggttaccactatttattatataatatttagggatatgaaaccagtcttagtaatatttccccttttcacggaactgaacatggtttcatataatactcaagttgttcaatagatgttcctagaattgaatcatctacttcagagtgtcagttgaggaaatagatgcatcccaccaaagacttctttatattcccaaagtacacaatcccctttattatatttcatgaagatagtgaacaccaatccactccccaaatactgagaatcatccccccagagagaatctctgtaatattactcagatctattggaggagatagaaagktgaatgccactgatgtggtccaaccatatcacttacaaaaacgaggccatttagactaagaatattaggtaacttaggttatattttggaactgatattaaactaaaaattgtgtcatagtcagatgcatattaaaatgtgttaaattgtgtgaaaagtaacatctgagagtacagagaatattgggattcttatttctaggcaaaattgagtaatagtggctagatttattctctcatcaaaccaactaaaaacatagacaaaatacatgaaacatctgttaacaaacatcag

SEQ ID NO: 517083 - DNA, 508 bp, Homo sapiens
ttatttttctaatgggcttttatcaccactcaacatgtatttgtatgtttattgcttgtctctcttactagaatataaactcaatgagggcaagcattttgtctgtccggatcattactgtcgtggtgtctgacacacggtagacaggagtgcaaggagcacaggctcgtctgagtgggcatggagagttgaggtcaaataatccgtgctgtgtcagcatgtgctcagtaagcagacactgacttggagrttcgagtgaaggagttaattaggaagtgatcttattatcaacaccagtggaggaaggggaaggaagacatgctggtagaggaagaagctgagctgtgacaaagtcctaaccaagaggtcaacttatttcacagggcctctggagctggcacagcccatcagagtttccttgagttgggcaaagggtgagcctttataccctcacattggtcgttggctataggttaaccctaaagagaaagtgaccttgaatgagaca

SEQ ID NO: 517084 - DNA, 606 bp, Homo sapiens
ggttgcaaaattcctgtggatttaataattgatctttatgagccagcctgagacagctccagcacaccaccaccctactctacccctatcattctctaatctcttaccctggtttatttttctaatgggcttttatcaccactcaacatgtatttgtatgtttattgcttgtctctcttactagaatataaactcaatgagggcaagcattttgtctgtccggatcattactgtcgtggtgtctgacacacggtagacaggagtgcaaggagcacaggctcgtctgagtgggcatggagagttgaggtcaaataatccgtgctgtgtcagcatgtgctcagtaagcagacactgacttggagattcgagtgaaggagttaattaggaagtgatcttattatcaacaccagtggaggaaggggaaggaagacatgctggtagaggaagaagctgagctgtgacaaagtcctaaccaagaggtcaacttatttcacagggcctctggagctggcacwgcccatcagagtttccttgagttgggcaaagggtgagcctttataccctcacattggtcgttggctataggttaaccctaaagagaaagtg

SEQ ID NO: 517085 - DNA, 652 bp, Homo sapiens
tcacagtctacatatcatatgagcaagaaataaatgatagttgaaagcaaatggtgcttcggaattattayagcagctaaactgtgtaatgcagcaatgatgaattaaacactgtccttaccagccagggctcagagttcagcagagatctccaattcctaagatttgtctcttcagacattttcaattttccctcttccaatcttctagattcagcatccacattgccaactccttttcactgcctgtcattctctcaattattgtcatagcctttatttcgtttccctgctctcaacctgctttcttaactcaatttttcctgataagtcattgccacagtatatgttcgttatgaatccaagtatgttgcaagtaatccaaatctcaactcaaattgatttaaacaatggagatatttatctggttcatgtaactgagagtgttgaggcagaaatgactttaggcaaggcatggtccaataattcaaacaataccaaggacttgttttctctccatcatttctttttgacttttttttttaaataaaaaaaaccacagctttattgagatatatatcacataccgtaaaattcacctgttgaaaatatacaatttaagggttttaagtatattcagagtcaagcaatca

SEQ ID NO: 517086 - DNA, 652 bp, Homo sapiens
tcacagtctacatatcatatgagcaagaaataaatgatagttgaaagcaaatggtgcttcggaattattacagcagctaaactgtgtaatgcagcaatgatgaattaaacactgtccttaccagccagggctcagagttcagcagagatctccaattcctaagatttgtctcttcagacattttcaattttccctcttccaatcttctagattcagcatccacattgccaactccttttcactgcctgtcattctctcaattattgtcatagcctttatttcgtttccctgctctcaacctgctttcttaactcaatttttcctgataagtcattgccacagtatatgttcgttatgaatccaagtatgttgcaagtaatccaaatctcaactcaaattgatttaaacaatggagatatttatctggttcatgtaactgagagtgttgaggcagaaatgactttaggcaaggcatggtccaataattcaaacaataccaaggacttgttttctctccatcatttctttttgacttttttttttaaataaaaaaaaccacagctttattgagatatatatcacatacygtaaaattcacctgttgaaaatatacaatttaagggttttaagtatattcagagtcaagcaatca

SEQ ID NO: 517087 - DNA, 635 bp, Homo sapiens
taaatcagtcagggtcttggcaggacacagatgggactgagtactcaaagagggaattaaagagactttattaaagacattatgttaaaagatatgggcaggatcaagcttacctataatagatgataaaacacttattaatatcagcaagaagctcttaccaccagtaggcctaaatggcaaggagatctgaagggaagtggaaggcagaaaaacacccasacttcttcttcttctcatcctttagtatcctcatgccttccactggccaaatccacctagaaggccaagggcaccccaacctagctaatacagcctctagaagtcagcctcctaggggcacagagaagaatgcagcagggtggagagctctcccttaaaagagtcatttattgtccaggtaccagtcagagtaggtcagattgaaagttatacccttatttttttaatatccaaataaaagtatatgggggaaatgttaataatgttgatatagaatcaaaaaaattaataatgttgatagagaaaatccaaatattccttcttcacctgcaactgagaaaatcctaatgtctgccaccaaaggagaaagcctacaaggtggcatgtaataataacttagataccggtcagtg

SEQ ID NO: 517088 - DNA, 675 bp, Homo sapiens
cttttggttacctgttaagaagttcttgaacattacacctcccagtcaattatagtcataaatgcccaacctggagaggtagaacaaggcattccatagctcagagaataccagttgtttaagaacctgagcctgaaagagggtaatacattttccttgattgccaccatccccaagcctgggaatattatgtggctatgctacagaggaagaaaataatattgttgtttgttaattatgttttatagtattttttgataagcctgtaatgacctttccccaaggttgctttttctctggaatctgcatatgcagaacagggtaatcttctaaastagaacacaaagttttagcagtgtgaggtgaagtatccttttctaccttccctttgttacactgacttgggtgaattctccctaccacccctggaccctgcactgaacttgtcccttccacctccttgagaaagagtgtggggcaagggaccaggacaaatgccaggggctgctctggattgatataattttatttcaaaactcaagatgtgggctcattcctaattcaactgcacgtgtaattatttactcagtgtattgctttccatacattgaagacagtcacacttatttgtgatgtttgagattattatagaagagcattgctctagtgtcaagt

SEQ ID NO: 517089 - DNA, 551 bp, Homo sapiens
ggaaacaaaagattgttggaattttttcaagattttttttactttagtctgtatygtgacagtttttgtatgtctgtactttttcacacttttattagctattggaagaatcctgtaactcacgtaagtaagaaaagtttgtcactgtatggcatcattgtcaattatttttaggtcaagagcaagaggcaagtaatttcagcagggaagggttgcagccaagttgtagtctttactgaaaaagaccttctaaggctggaggcaagatggctgaatagatgcagccaggaggaatacctgacactgagggactgagacattgggaaaaccagtgactctgaacagatctttaaaggaaaggcattgagagtggatggaaggagaacacagcttggaatcctgcactgggctactgtgcactgggactcattcctggcccccagtgcctcctgaataaggggtgagttgagcatgtgagaactgacccactctcaccataaacctctgaaatcctggcagcaggagatgccacgaatatgtaagtaggcagg

SEQ ID NO: 517090 - DNA, 694 bp, Homo sapiens
ggaactgcagaaatcccccaccttctgcattgatcttgctgggagctgcacaatgtagctattcctatttggccatcttgccaaaaatccctatttttttatttctctgaaatattttatgaaagatgtaattaggggaggaaacaaaagattgttggaattttttcaagattttttttactttagtctgtattgtgacagtttttgtatgtctgtactttttcacacttttattagmtattggaagaatcctgtaactcacgtaagtaagaaaagtttgtcactgtatggcatcattgtcaattatttttaggtcaagagcaagaggcaagtaatttcagcagggaagggttgcagccaagttgtagtctttactgaaaaagaccttctaaggctggaggcaagatggctgaatagatgcagccaggaggaatacctgacactgagggactgagacattgggaaaaccagtgactctgaacagatctttaaaggaaaggcattgagagtggatggaaggagaacacagcttggaatcctgcactgggctactgtgcactgggactcattcctggcccccagtgcctcctgaataaggggtgagttgagcatgtgagaactgacccactctcaccataaacctctgaaatcctggcagcaggagatgccacgaatatgtaagtaggcaggaaca

SEQ ID NO: 517091 - DNA, 694 bp, Homo sapiens
ggaactgcagaaatcccccaccttctgcattgatcttgctgggagctgcacaatgtagctattcctatttggccatcttgccaaaaatccctatttttttatttctctgaaatattttatgaaagatgtaattaggggaggaaacaaaagattgttggaattttttcaagattttttttactttagtctgtattgtgacagtttttgtatgtctgtactttttcacacttttattagctattggaagaatcctgtaactcacgtaagtaagaaaagtttgtcactgtatggcatcattgtcaattatttttaggtcaagagcaagaggcaagtaatttcagcagggaagggttgcagccaagttgtagtctttactgaaaaagaccttctaaggctggaggcaagatggctgaatagatgcagccaggaggaatacctgacactgagggactgagacattgggaaaaccrgtgactctgaacagatctttaaaggaaaggcattgagagtggatggaaggagaacacagcttggaatcctgcactgggctactgtgcactgggactcattcctggcccccagtgcctcctgaataaggggtgagttgagcatgtgagaactgacccactctcaccataaacctctgaaatcctggcagcaggagatgccacgaatatgtaagtaggcaggaaca

SEQ ID NO: 517092 - DNA, 682 bp, Homo sapiens
ctggcacatatgaaagtgatggggaaaaagcccaggctgcataatgccaggtgacctttcaatccgtcttctgctgctgatgataactattacttttgttctttaatcccttacgggtggggcgatgaattttattccttaatctcccaattggtttcttgggtgaatcctgtcaaatgtcttgtctgtcaggaacacattagattgtatgaacattcttatcgtgaccaagtaaaagatctcaaaactggggatctcagcctttttgtatccctaatcagacaactttgtcaatgttttaaagcaaagatcaggcaaatagaaaatgggcctttcttttctttctttctttcttttttttttttttttttgagacagaatttcactcttgttgcccaggctggagtgcaatggtgcaatctcgattcactgcaacctcygcctccttggttcaagcgattctcctacctcagcctcccaagtagctgggatcacaggcatgcgccaccatgactggctaattttgtatttttagtagagacgggatttctccatgttggtcaggctggtttcaaactcctgacctcaggtgatctgcccaacttggcctcccaaagtgttgggattacagggatgagccacgcacctcgccgaaaacgggcctttcaatcaattgatgctc

SEQ ID NO: 517093 - DNA, 512 bp, Homo sapiens
ttgaacccctctacctcacatgtctgcctctgcccaggcatcccagcctggttgtgcagcaagggaagtggaatcaactacatcgacatgagaagactagaacctggggagtccagggagcattactcacgcatcactaagagtgagcagaccacagtggtatagcctgtacccagatctcctgctgctttccaggggcctgaatttcaagggaaattactggcaaactgcttgctaagatttaggttcagagagaagaagctctggattgaaatacacacattttttttgtgcggggaggtgaatgtagcagtcactcttgctaccctttgcctttcccctttgctgtacttctgctgactccccawggccatatctgttcctcactgctctatgtcaaactggagaaggcagccctgcctgcacacatggcctttcacagcacctggaatgagcatcctctcagaaagccctcaatcagtgaggacaggagaggtgtatataccccagct

SEQ ID NO: 517094 - DNA, 640 bp, Homo sapiens
gggcaatcccagcagagaggtttctgttccaggatgtagcactgtggggggccagtgtgtagcttgcatgcagtaatataaaccccaacatccgcagcctccaccgggctgattttcagtgtgaaatcaatgcccgacccactgccactgaacctgtctgggaccccagaaaaccggttggaaaccgtgtagattagacactgtggaggctggcctagcttctgcagctatcaatgtaaataggtgtttccattactatgcaggaggctccgactagacctgcaggagatggaggccggctctccgggggtgatggacagggacagtggagtctgkgtcaacagaatgtccccactagatcctggaatgatgacagaaaagggcaaagttatgtacaaatattatgcgttatgctcataattttccatttattatttcagcctgtataatttctttgcaatttcaagaatatccaatttcaaaaagaactcaacagatgcaaggcacaaagtggtctcccataccatcatcctctttctaagacttgcgtttcttcagggcacatatccttccttctaaaatcttcctccctctcagagatcagtacatcatatgcctcatgctgcagaacaagacctgc

SEQ ID NO: 517095 - DNA, 644 bp, Homo sapiens
ctgccaaggctgtttgtagaatctgcctccccagaggtcttcagaaagagaaaaggatgccaatctccatgacggtttcagtgcagtcctgctgattagaaggaacaggctagatttttctgtaaaggtttccttcagtcttgagtgctcttagatggatgagtttgctttttggtgcaggagggagagatgaaaactgacactctatgaacttcctggcatatcactgcacacatcctgtgtatttatatttatgtatttacttattttgagatggagtctttctctgtcacccaggctggagtgcagtggtgcgaactcagctcactgcaacctctgcctcccaggttcaagcrattctcctgcctcagcctcctgaggagctggaattataggagcctgccaccacatccagctaatttttgtatttttagtagaaacagggtttcgccatattggccaggctggtcgtgaactcctgacctcaagtgatctgcctgcctcagcctcccaaactgctgggattacaggtgtgagccactgctcctggcccatcccggatagagagtaaaacatactgttttcatgcttttaatgttttcaaagtacttagctgtgctgtgtgagggaggtagggcctttct

SEQ ID NO: 517096 - DNA, 571 bp, Homo sapiens
tgctgggactggctgagagtcagcaactgttattgaagcatacccctaagttaggttttcagtttgcttacctactaaattaggttgtgggttgtaggtaaaaactcaagtatgtgagtatggaggctttcttaggccagattttagtttgatgaaacaatataataacaacctaaatactgaatagtgatctaacaaaatgtataatttggaaggatggaaagggcatgcatatttgttcaaatggtagtgaaagaaagctagtcttttttttttttttttttggagacggagtctcactctgtctcccaggcttgcgatcttggctcactgcaatctccgcttcccaggttcaagtgattctcctgcctcagcctcccaagtagctgggattacaggcacctgccaccaggcccagttaatttttgtatttttagtagagacggggtttcgccatgttggccaggctggtctcaaactcctgacctcaggtgatccacccacctcgacctctcaaagtgctgggattacaggcatgaggcamcgtgcctggcctgaaatttagtcttta

SEQ ID NO: 517097 - DNA, 556 bp, Homo sapiens
ctgccgccttcgcctgagaaagtgaaagaaagcaatctacctatggtaagcaaattctgcttgggaagaaaaggggaagatccctgggatcttaccctttggaacataaataaatgtctccaggagaaggtaagataagcgttactgggtttacgatcttgggaatgcctccaacactctgggttttatatcccttaagtcatcttttaacttccaaggcttgtcttttaacccaggttctacttttctatgctcagaaagccctgaccatgcagaaacatgaaaatatttaccttttttttttttttttgagacagtcttgctctgtcacccaggctgaagtacagtggtgccatctcggctcactgcaagctctgcctcccgagttcaagcgattctcgtacctcagcctctgagtagctgggtttacagatgtgtgccaacacgcccggctaatttctgtatttttagtagagaygggggtttcaccacgttggccaggctggtctcgaactcctgacctcaagtaaaccaccatgtccagccaatatttact

SEQ ID NO: 517098 - DNA, 630 bp, Homo sapiens
tatgtagtgggtgtgtggtctgcarccaaagatgaccaaagagactgaaagtcatctgaccaataaggactaagtaaaaaagattaagtatctccaagagcatgttcattagcttctcgactctttacaaagggttacagtcccacatagcagcggtagcaagatcccataaaacatgatgagctatcatatttcctatgaagacagaggcatatgggcagcacaggggagacaaatcaaattcaagagattcagaaagacaggtgaaggctaatttaaatgaaagtttgaaatcaaggcttaatgacaggataatccctctaggagctacagaattttgcttcatatccttgtgcatataggttgatagtaataatatctgaagaaacaattacagattgcctgatctttgaataatcaaatttgtaacagtgttgtgatatttctgtcaacttcatgtaagatctcaaaataatttcttcatgtttaaaggctcatgctggctaccactatggactgcctgaaccccgcaaaaccctcctctccaagtactgcgctcagctagctcaattgagctgctaattcatctgagccaaagacccaaaaggacctccccaacgcagggtcctg

SEQ ID NO: 517099 - DNA, 630 bp, Homo sapiens
tatgtagtgggtgtgtggtctgcagccaaagatgaccaaagagactgaaagtcatctgaccaataaggactaagtaaaaaagattaagtatctccaagagcatgttcattagcttctcgactctttacaaagggttacagtcccacatagcagcggtagcaagatcccataaaacatgatgagctatcatatttcctatgaagacagaggcatatgggcagcacaggggagacaaatcaaattcaagagattcagaaagacaggtgaaggctaatttaaatgaaagtttgaaatcaaggcttaatgacaggataatccctctaggagctacagaattttgcttcatatccttgtgcatataggttgatagtrataatatctgaagaaacaattacagattgcctgatctttgaataatcaaatttgtaacagtgttgtgatatttctgtcaacttcatgtaagatctcaaaataatttcttcatgtttaaaggctcatgctggctaccactatggactgcctgaaccccgcaaaaccctcctctccaagtactgcgctcagctagctcaattgagctgctaattcatctgagccaaagacccaaaaggacctccccaacgcagggtcctg

SEQ ID NO: 517100 - DNA, 656 bp, Homo sapiens
attctggcagctgtttttcttctccgggcttaggagtaattcagccagctatgacagaaaactgctgctgataaatgcagccctgggctagtgacctttaccaggaatcatctatcaccatgacatgagccagcacatgtggaaaagtctgcatatgaaagtgttggggagaatggaacagaacggagagaagagagacaccaatcaggaacacagtgagggcaggatgtttgctccatggatttggagggttactgatttcctggaccaggtgactcgggagaaaataaaaaagaggtcaaaaggacaacatactatcctcccactgcttgctctatcactggccagtcccagttactagcatactttttagctttttgytacacacatactatgtgaatcatgtgctactcaggcaaaaggaggattttttttttttttttttagttagaagctaaattgttgagaaaaagctcacccctttgaattaaggggtggatttaggctttgcagggttcgatgcttatacagtttgtgtgtgtgtatgtgtgtatagctatgtcacaaaacattttaaatacaaaattaggtataaaatgaatatttacctctaatgagaaaaattatataaatgataactttagaattgcagaaaa

SEQ ID NO: 517101 - DNA, 524 bp, Homo sapiens
gtaagatatgtattcacacaattttgcctcagtgccctgcagatatttttatttatttcctgtttatttcctggtatctattactgataacaacagtctgccttttgtctgatactgactttttaaaataatctgtctcttcwgcctgataacttttagaactttcccatgatacatgaatgttgtaatttcattactgtgtgtctagggtgaaatttcaaattcttccattcttcaacttctctttcttagccctcaactctttttctatctctgctgtattctggatgacttcctctgataatctttctgttttacttattcacttcttaatcctgtgtagtctgctgattaaagtgtccttaaagtttcctccatacccataccaatattttttgtttctgaaactagctatttttccccaagtttttccgtcctcttccattatctccatttttatggattctatccttttttaaactttcaatattttcaacatacttatattaaagtactttttcagc

SEQ ID NO: 517102 - DNA, 671 bp, Homo sapiens
ttcatcagttggaggttgactgtggcataactggggaaagaagacatcattttcaagtgcaacattaactttgtgtaataaaagagaaattacttcactaaggataattactccgactaatattctagcctcaacacccattgtatggcttccagtttatgcactcatggacacaggcctgagctctaaaggactgtacttgtcytgccgccactttaaaaagttctaattgtcaactctcctaactttatctgggcattcaaacattgattcttaaaatgacaaattactggcacaaataaaaaagattaaatatgaagacaaatttgggttttttcctttccaaaatatagtctatttttgcctctttaatcttattactagctgggtagggactttcagttcacagcccattcccctgaggggaagtaagagaggagaattcctttggtggtaggagggggcgttagaaagtcgaagggaaaaaagaggatggaaagtatcctatgagttaattcataactgatttttgtaatgggagctgttggggttcctccctgcatcctttcccgagccagtgcccccatccacggatgatgtgagtactggctgcttgtgactcactgacccctgccccctcctctgaagaaatgacataggctgacctgcag

SEQ ID NO: 517103 - DNA, 524 bp, Homo sapiens
aataagtgcagtacaacccactgtcatcaccaractttctttttccacttctttcctcaaaaacaccaaccctgaactcggtcaaaaccctgaacaccatcccctattttagatcaggaaacttcaatagcctattggaggcagagtccttggagccaaatgcaagccccactctctgtggctttgtgagcttagtcaacttacttagcccctctgtgcctcagttccctaattccattactaatgtgctgggtgggggtgggtctatttccaggaagtttgaggataattgctatgtagaaactctgaacatatgagaatggttgctaagattttacacagctaattccttggcatgtcctaaatgcctaggaaaagtaactttacactttctcattatcagtttccccatctctataatggggttaataataataatcgtaacacttcctaattggttgctgtagaaattaaataggttaataaatgcaaaacatttagtgcctaccaagtaatgaactccg

SEQ ID NO: 517104 - DNA, 481 bp, Homo sapiens
tgtgtgactctgagcctctcagacatgtgttttcttcatctgcaaataggcactgtgcaccaccgaggccccttccaggttgaatgttccctagggaagttccattgcctgtcacttttagtaacagccctagggaagaggctggagaggagctttgagcttctcygccccttctcctgaaagtcccagatctagggtaaaaatctatctcaagctctagccgacccaggctttccaggtaaatcaggtatgtggagggctggcagaggggtaagtgtgcagggaagaataaatattgagtatatttgccatttaatttttaatgcatttagaatgtattcagagtacatggagcaatccttgaaagaatgctgacgtgacgtgatttgcatttattctttgttttgttttgggtttgtaacatctttattaagacataattcacataccaaagatttcacccatttaaaatgtacaattc

SEQ ID NO: 517105 - DNA, 706 bp, Homo sapiens
ctgtccaagctgtaaactcatttcccaggacagaaaggtagactactctcttcttcaacaagtaggatgcgtttaccagatccagagatttgtgcaagtcgttctgtccacccaggaagggcatagacggtgaaaataaatgaaattgccaatcttttcaaatcctctgraattgcaactcctctgggaaattagaaatctcttcccagtcattcttcttgtattatataaatctacggatgctcttgcaggaaggacttccctgggaaacattggtgaaatattacctttgctgtagctttctggctttgtcaaaataggtaccttggagttttttttccagtttttatcgtcacaagattttttaaatgaactaaatgttggacaattgagataatcccttttttggaatttctttcattttggaatccacagatactggcacgttatcattactcatcagcataaggcaactcacagttgtgtgtgttgggcttcttactctttttccactcaacactgtgctttctggatctatccatgatgcatacatagtgtgtggctgctgactgcaggatactgcttccaagcgtgcatgtatgtgtgttctcttttgtttacattctgcctcctgttagcctttaaagcagacatcctaacgtatacttgttgaacatgttcatttaaaatgtatatcatggttttc

SEQ ID NO: 517106 - DNA, 590 bp, Homo sapiens
tattaaaactcgaatttattttctatatacttgcctgtcaagtggattaaccacaatttgttcggtgatacctttattttctatgtttagattatttctaattctttgccatcattagtaatattctgagatgagtctctgtgcttaatattttttgtttttggattattttcttaaggaaagatactaaaaaatatttgctccctattaacacaacttttactccagttcttctctaaacttcaagacccagtctgaccttccaaagccatgatcttctagagaaaccccattgcacttgggtaatacttaggtgaagatttcttcaactagcatgctctgtgctgtttcccagcttgcggggctggtcaaggccttggggatcttcacctaggatgtatctatgctttcaaatccatgccttcattccattttgcattcagtaaatggacccagattccaactcttgtctacattttgycttgattttagctcatgtacaaggtttaggtttttgaaccaagccttcagcctgacctcctctggtgtccttatagtgttcttattgcagttgcatctccatattgaca

SEQ ID NO: 517107 - DNA, 451 bp, Homo sapiens
ggtaataaaagcactgaaaagaagtttggagcttattgaattattttttractattcaaatgagaatttaatttctgaaaatatactaggcctgggtctatgcatgagtcaaatatttaagtttcaaaataattttcatgttagacattttaaaaaattaatagaatttatttctttttaagacaattattttttattttactttttaattttaacatacaatacacacacctcagcttcacatctttgttcgtggaacccaggacggttgatcataaatttgtttcagagatgatctagactgaagctctaaaaagccgtgcaaagcccaggcacctattagaataagtcaacctggcccttttatcctgaaaattacctagtatgtggcttatcccaactgccaccaaaaaaattctgattacttaggatacttcgtatatcatgaagt

SEQ ID NO: 517108 - DNA, 563 bp, Homo sapiens
ctcttgctctgtcttcagactatttctttggccccataaatactggatgatatagtacttgctgggtgcagaatcattctcctccaaatatttgttcacaaatagaaagaaagaagggaaaacagactggttccttggcaaatattaagagcaaatgccttcacattgacaatattcatccagatgagaatggccattaacctcactgtccagagattcagacgatcggaggaaaaaaacccatgggaacttaggaagatgaatacgtgaaattctattaawtaaaattgaccttagtagttttctttcatctaaacagctgctccccagtgagaattcccattgttctattgggtaatagatactgaaagagactcattcttgcttaatcctataataagcaagctacttcttgagatatagagggtttacccaagtgaaccaagttaactctttcaaaatgacaactgccacttctgagtgtgccccccaaagttctttcacctcataacaggtgatcctctgaggtgtttatgcacataaatatttgattaaactgttgc

SEQ ID NO: 517109 - DNA, 563 bp, Homo sapiens
ctcttgctctgtcttcagactatttctttggccccataaatactggatgatatagtacttgctgggtgcagaatcattctcctccaaatatttgttcacaaatagaaagaaagaagggaaaacagactggttccttggcaaatattaagagcaaatgccttcacattgacaatattcatccagatgagaatggccattaacctcactgtccagagattcagacgatcggaggaaaaaaacccatgggaacttaggaagatgaatacgtgaaattctattaaataaaattgaccttagtagttttctttcatctaaacagctgctccccagtgagaattcccattgttctattgggtaatagatactgaaagagactcattcttgcttaatcctataayaagcaagctacttcttgagatatagagggtttacccaagtgaaccaagttaactctttcaaaatgacaactgccacttctgagtgtgccccccaaagttctttcacctcataacaggtgatcctctgaggtgtttatgcacataaatatttgattaaactgttgc

SEQ ID NO: 517110 - DNA, 563 bp, Homo sapiens
ctcttgctctgtcttcagactatttctttggccccataaatactggatgatatagtacttgctgggtgcagaatcattctcctccaaatatttgttcacaaatagaaagaaagaagggaaaacagactggttccttggcaaatattaagagcaaatgccttcacattgacaatattcatccagatgagaatggccattaacctcactgtccagagattcagacgatcggaggaaaaaaacccatgggaacttaggaagatgaatacgtgaaattctattaaataaaattgaccttagtagttttctttcatctaaacagctgctccccagtgagaattcccattgttctattgggtaatagatactgaaagagactcattcttgcttaatcctataataagcaagctacttcttgagatatagagggtttacccaagtgaaccaagttaactctttcaaaatgacaactgccacttctgagtgtgccccccaaagttctttcacctcataacaggtgatcctctgaggtgtttatgyacataaatatttgattaaactgttgc

SEQ ID NO: 517111 - DNA, 504 bp, Homo sapiens
tacttggtttaaagcttgaagtaaaaagtctcaggctgtgtgaggcttccaggacatgtgtgtctattgccctgacacagtgaagaattacaattatgcttgaagttttgctctgacatctgttaaatctacacataacacttactgcacatcctactctcttggacattggtggacccagttatatgttaagaatttccaaagattttgaaagaacatattctaatctgagcttcttccaggaacttagatatttcctcaaacatgactccaaagaaaatttaattcaactccattacacagactttactcatcttgttacagatatgaaatggtcaataatacaggtccgattaaaatgacagtgacatgtctgtccaattttcttcttggactgggttgtaataataactgatgaaaattcccaatatgctcattgacaacatrttttcctgtgccatatgtatctcagtgacgttaattgatgatggtggtatgaatttg

SEQ ID NO: 517112 - DNA, 594 bp, Homo sapiens
agctgggacacactgtgtgtgaggaatgtgcagggttcagcctggaagagaccatgtgagctgacaatgtcgccatgtttccttaatggatgtgaggctgtctgctgggacttaggggaggggaatggccccacattttttccaagagaaatacggcatttcagaacaccatttgaagacttagaagaggayaaaggagatagaagcgtccctaaggagtttgcaggtggaggagagcagcaggtgtagagttgggggcttgggaccaccaggactttgccaagaccagttcctcccatgttttctgccccgggaagattaaaacctatgcagatgtcaatgtctccatctccggggcgtatttctgcttccaacactcaccttcagaagcagataatcaaagaaacagagtgagtaggaaagtgagcttagagcggaagagaagcgctcccggctgcacctgcttcaggaagtctctgactggtgctgctcacggaacgcgcacaattctgtttctcagcgtgggacccctccagaaggaccccccacaaaaggagtggcagcctttccaaggcatgttccataaaaccccaa

SEQ ID NO: 517113 - DNA, 618 bp, Homo sapiens
gaaggcagagaaacaagtttacactggaattcatgtacagttaatgatctctgtactgctcactaggtgatgttttcacatactttcaagtctaggggaaaaacatgctaatgaacattatcataagttaccaaaaggtgaaagttcttttctagaactagatgtttaaaggccactgccaaactgccccgttgatttctccatgtggcttattaatgacagaaaaccaaatgaccaactattaaatttttatcaactcactaagtcatatggtacaagcccattagcctcatacttttctttccctcrttccttttttgtttcttgtggtgtgtatggtggcgaatctcactgtgttcgggatagaactctgggtggccatcagtgaagtatgaggaagaaatggtagcaatgagggtctcacacacaagattggaggtggaggcccccagcgcccaaggagggcagacatcaagcccctataactggctgtctctgtggcagccaggccagggagtccaccgcagcagccaggagaggcagggaagtggctggggagccatctccctcaagtcaagtgcactgtcccagaaaactgcagacagtggaaggacagag

SEQ ID NO: 517114 - DNA, 538 bp, Homo sapiens
acttgggacaaccaaaagtgccaaggatttggggctgtttctgggacctggttaggtaggggctaaggtgtagacttgagaccagcagtggcagaaggkaggggcttccagcaactggagttcacagtagacacagggatgccccaactaacagaggggcaggtggctgtcaccaatggtgatcactgtggagccactgcagcaacgagctgcagccgctcagaggctgtgcagtgagaatggcaatgtaccagaagagctccatccagaagaaggaaagagtgaaaagccacctttccattctatttgtgaacctgtggtttaaaactgctggtttaaaacaccatctgctacaaacctggacaggttggaactcaggggagtggccataaatgcatcttagtcttcaaaagctgtagattgttttgtaaatccgtgttgtttttcttcctggatgcagtgatttcacctaaagaaagttgttcctgggagaaaaggaagcagtgaactgactgcaccaggtgaacgtgtacagtga

SEQ ID NO: 517115 - DNA, 538 bp, Homo sapiens
acttgggacaaccaaaagtgccaaggatttggggctgtttctgggacctggttaggtaggggctaaggtgtagacttgagaccagcagtggcagaaggtaggggcttccagcaactggagttcacagtagacacagggatgccccaactaacagaggggcaggtggctgtcaccaatggtgatcactgtggagccactgcagcaacgagctgcagccgctcagaggctgtgcagtgagaatggcaatgtaccagaagagctccatccagaagaaggaaagagtgaaaagccacctttccattctatttgtgaacctgtggtttaaaactgctggtttaaaacaccatctgctacaaacctggacaggttggaactcaggggagtggccataaatgcatcttagtcttcaaaagctgtagattgttttgtaaatccgtgttgtttttcttcctggatgcagtgatttcacctaaagaaagttkttcctgggagaaaaggaagcagtgaactgactgcaccaggtgaacgtgtacagtga

SEQ ID NO: 517116 - DNA, 600 bp, Homo sapiens
ctcagaggtgctgcagctcaggaatgcagggattcgggggatgtttggactcagggatactttaacttaggkatgctttaacttagagatgctggggctcagggatgcttggattctgggatactgggatttagggatgctgggactcagggatgcttgaacggaattctggggctcaggaatgcttggactcatggattctggggctcgcaggtgctgaaactcagagggactacggctgaaggatgctgagtttcaggaatacttggattcagtaatggcagggttcaggggtgttagaactcagggatgcttgcactcaggattgcttggattcagggatgctggggatcaagaatgcttgaactcagggatgctggggctcaggggtgctggggctcaggggtgctggggctcagggatgttagggctcagggatgctagggctcagggatgctggggctcaggggtgcttggactcagaaatgctagggctcagggatgctagattaatgtatcctggtgctgaaggatgctcggactcagggatgccgggtctaaaggatgctggggctcagtgtgactcatagtgcttgagac

SEQ ID NO: 517117 - DNA, 600 bp, Homo sapiens
ctcagaggtgctgcagctcaggaatgcagggattcgggggatgtttggactcagggatactttaacttagggatgctttaacttagagatgctggggctcagggatgcttggattctgggatactgggatttagggatgctgggactcagggatgcttgaacggaattctggggctcaggaatgcttggactcatggattctggggctcgcaggtgctgaaactcagagggactacggctgaaggatgctgagtttcaggaatacttggattcagtaatggcagggttcaggggtgttagaactcagggatgcttgcactcaggattgcttggattcagggatgctggggatcaagaatgcttgaactcagggatgctggggctcaggggtgctggggctcaggggtgctggggctcagggatgytagggctcagggatgctagggctcagggatgctggggctcaggggtgcttggactcagaaatgctagggctcagggatgctagattaatgtatcctggtgctgaaggatgctcggactcagggatgccgggtctaaaggatgctggggctcagtgtgactcatagtgcttgagac

SEQ ID NO: 517118 - DNA, 563 bp, Homo sapiens
gcactgctgtctgcctggtgtggacttggcggaccttgtacaggtgggtaaactttgcagacttgggaccccagactgtcggggcaggagccacagtttctctctctcatttccctggcagagctgacggtcagcttcaatgtctttggacccagataaaacatctgtcaactgagccctcgagaaggtgggctcaaattcagaactatcatgaatggtagaattggcatttttgtccccggatctgtaagtagaatrtgattttggactgaggctgaacagcttggcttgaagattttcttcctctgtatgctgtgatggagtctacgaactgacacaaagaaagactcatgactcaattttttaactaggaaaaaattagagaaatttcacagaaaaacaaataaaagtgtcccttaacaccaacgccagtcttcaggttgtaacttaagcccactccttgcgcttgttattctaagcatatctttcaatacgtactccatgattaaccgtggaattccttgagctgtttcttctttgaactaagcacaatgtcaatccaa

SEQ ID NO: 517119 - DNA, 599 bp, Homo sapiens
aacaggaatggctgaagaatgctttatctcctcagagkcataaggcagatgggtagtctccagtggtccctactaaatttgcttcctgagaaggaaaaattgggatacaagttattataagagctccatctcactcaaaagaaagaggtaatttaactctcccctcacacatgcacacaaaacaaccacaaacacatccacagaaactgagaaaatatcagaagcttctaaccagaaattatgattgaaagcacctcataaagaggcacatgatatagcaatataaaagaagttgaaattttaaaaatgatggacagaaatggcaggaaaaaagtaaggtgttaataagctttgtttttaagtatataaaatgagtgtcgtgaaatcctgtgcatttacaagtaaatttagtcagaaagttttaactatttaaagattagcaacatgttttcatataagattttgtttcttgcagagtaaaacaagtatcaggagaatgcactgagaaaagagaaagtcctccactggaacctagaggacgggacaacatcattaaataccggattattcacagggctgtttcaaacaccccttaacaa

SEQ ID NO: 517120 - DNA, 604 bp, Homo sapiens
agtcccaaacaggacagttttctgtttgagtgacaccccagaccacttttgctgtaatgacagcagaagacatcaaggcagactattcagaattttccatcctcaccaaagcaccccctcttgtttttagagagacaggatcctgccatgttgtgcaggctataagcacaccacactgtgcccagcctccaaggcctttatagcaacaaaagtaatcagatgccccagcgtccctttcacaggaaaattggctttggttgtttggtagctagtcattccctcctcctgaaactggataagttcccatattcccctygcagggcgtgtgacaggtgtatggctcccgtcttcggtgcccgcagctcaaacccctaggggaagcatgcagacgggcaggtcgtggggagcctgggctcgacctcagggcagcatctagggttgagtgtttacagctccctaagccccagtgggttgttcacagtctgactttcagcttagccatctgcaagtgtcttgtgttaatcagctcagttagaccctctggcttatcgcaaggacagaggctttctgtatccctggttctttccttagtgtactggaaaaa

SEQ ID NO: 517121 - DNA, 559 bp, Homo sapiens
tgaatgaatacttacttcccatctctttctattctctgtaacagtttgaaagggggaagagttctctgttcttcaaagatttgaaataatttacccattacatgattggggcctgctgtttcttggaggagtccattcagtgggtgatgcatctggggattcaggggttccccaccccatcacttgctggtagggaatattgcaggggcagttttctcccctattaatccatatttgtgtaagccttaaaatagttcaggggaaatagtatttaaggcaggtgactraaacataaaccctcttaaaaattagttttagcctcttaaaaataatattttgttttattttatgtgagtatgagtgaacataaagaaagaatgctaaagcagtccctttgcaccacagcccagattggtctctgcagatggaatgtggaaccctgtcctggctgctgacggactcactgacttgcacaagactcaatgcatcaggtctccttcatcatcccaactcacttgggagctactcttggtcatcttttgacagtgagtattaatgt

SEQ ID NO: 517122 - DNA, 559 bp, Homo sapiens
tgaatgaatacttacttcccatctctttctattctctgtaacagtttgaaagggggaagagttctctgttcttcaaagatttgaaataatttacccattacatgattggggcctgctgtttcttggaggagtccattcagtgggtgatgcatctggggattcaggggttccccaccccatcacttgctggtagggaatattgcaggggcagttttctcccctattaatccatatttgtgtaagccttaaaatagttcaggggaaatagtatttaaggcaggtgactaaaacataaaccctcttaaaaattagttttagcctcttaaaaataatattttgttttattttatgtgagtatgagtgaacataaagaaagaatgctaaagcagtccctttgcaccacagcccagattggtctctgcagatggaatgtggaaccctgtcctggctgctgacggactcactgacttgcacargactcaatgcatcaggtctccttcatcatcccaactcacttgggagctactcttggtcatcttttgacagtgagtattaatgt

SEQ ID NO: 517123 - DNA, 575 bp, Homo sapiens
tgtcccatctgactccatttggcatttgtctgctgctctatctagcatcctcctgcacctaaccacagtcactggcacccactgggcagtgcaccccactcaaggtttggggtccagatccacagtgctccttcttcaggcctagagtgacttccctccttccctccccaactgtgatacctttctttggccttttaaaaaatctaaagtacctggtcgataatctttatgttaactttattctgttaaaaaaaaaaaaaaaaaagcygatgtgttttctatctcctggttggactctggctgatgcaataggtttttctatttctcaataccatcaaaatattcttaagttggatatagatactacattatgaaaaccatgaaacaatgtgaaaataatgtacttataacaagttattcaagtgaattaaactaaaatgttataatatacttagctgtaattacataaatgttaaatatccacataggtcaagaattgaatagaacctgaacagatgaaagcagtaattgttcattggtcgaattaaaggagatttcactgtttgcttttggat

SEQ ID NO: 517124 - DNA, 550 bp, Homo sapiens
ggcaggagccagatgatggcagggacttaaaacaaccccttcctcccctctggcatctccaccaagtacagcccacatagagctgcaaaagcaccagctttcgcaggacacctttggaacagtgtccttttcctttatgatatttggtgactggaggtcaacctcgtgtggcaccagttcccagaccaaatctkccccagagatcaggaacaacctaaccgtgatctacactgcaccaatcccaggtgacctaacaagcaattcccggtggattagcgatggcagatgggaagtaggggagatgacgactctgcccactggtgcaaataaggggagggtctgagattaatgtacagtcgcaggacacataaccatgaggatgtgctgagaaatgcatcattaggcaatttcgacattatgcaaacgtcgcagagtgcacttacacacatctagaggggacagcccgctatacatgtgaggctgttcggtgtagcctcgtggtcctaggctgcacacctgtgaaggctgttactgtactgaatgctgtagg

SEQ ID NO: 517125 - DNA, 609 bp, Homo sapiens
ataacattatggttgtgtaccttaaatacatacartaaattttatttaaaataaaatggctatacagatggctcaaaatatgttcatgttcattatcttgtggttattaaagcaaaactaaattaaaataatgtaataattagcttataatcaaagctgccttaataatacctacatgaacccagagaagttcacagacccctaatttgagaaacacttctctaactaataaaaattgtttgcagttgccctaaacatgcttcatgcaactctttgtgtctctgatcctactgtttcctcctcctggctctaatcacctgcaaaactcccaaatccctatccctattgctactatttcctcctctgggctccaaccacctgcaaaactcccaaatacctatttccatttctggaggggtgtttcacaagccaaagggtatgttgggcatcagagaggccaaacaactcaggatggcttatagaaaacttgtgcctacaggaagctgtgtgttgtgcaatggcaaaccaatccaataagtctgtttcctgggtggaataaatgctagatgatcaagaaggagataggtctcagcactgggctgtgtccct

SEQ ID NO: 517126 - DNA, 609 bp, Homo sapiens
ataacattatggttgtgtaccttaaatacatacaataaattttatttaaaataaaatggctatayagatggctcaaaatatgttcatgttcattatcttgtggttattaaagcaaaactaaattaaaataatgtaataattagcttataatcaaagctgccttaataatacctacatgaacccagagaagttcacagacccctaatttgagaaacacttctctaactaataaaaattgtttgcagttgccctaaacatgcttcatgcaactctttgtgtctctgatcctactgtttcctcctcctggctctaatcacctgcaaaactcccaaatccctatccctattgctactatttcctcctctgggctccaaccacctgcaaaactcccaaatacctatttccatttctggaggggtgtttcacaagccaaagggtatgttgggcatcagagaggccaaacaactcaggatggcttatagaaaacttgtgcctacaggaagctgtgtgttgtgcaatggcaaaccaatccaataagtctgtttcctgggtggaataaatgctagatgatcaagaaggagataggtctcagcactgggctgtgtccct

SEQ ID NO: 517127 - DNA, 609 bp, Homo sapiens
ataacattatggttgtgtaccttaaatacatacaataaattttatttaaaataaaatggctatacagatggctcaaaatatgttcatgttcattatcttgtggttattaaagcaaaactaaattaaaataatgtaataattagcttataatcaaagctgccttaataatacctacatgaacccagagaagttcacagacccctaatttgagaaacacttctctaactaataaaaattgtttgcagttgccctaaacatgcttcatgcaactctttgtgtctctgatcctactgtttcctcctcctggctctaatcacctgcaaaactcccaaatccctatccctattgctactatttcctcctctgggctccaaccacctgcraaactcccaaatacctatttccatttctggaggggtgtttcacaagccaaagggtatgttgggcatcagagaggccaaacaactcaggatggcttatagaaaacttgtgcctacaggaagctgtgtgttgtgcaatggcaaaccaatccaataagtctgtttcctgggtggaataaatgctagatgatcaagaaggagataggtctcagcactgggctgtgtccct

SEQ ID NO: 517128 - DNA, 609 bp, Homo sapiens
ataacattatggttgtgtaccttaaatacatacaataaattttatttaaaataaaatggctatacagatggctcaaaatatgttcatgttcattatcttgtggttattaaagcaaaactaaattaaaataatgtaataattagcttataatcaaagctgccttaataatacctacatgaacccagagaagttcacagacccctaatttgagaaacacttctctaactaataaaaattgtttgcagttgccctaaacatgcttcatgcaactctttgtgtctctgatcctactgtttcctcctcctggctctaatcacctgcaaaactcccaaatccctatccctattgctactatttcctcctctgggctccaaccacctgcaaaactcccaaatacctatttccatttctggaggggygtttcacaagccaaagggtatgttgggcatcagagaggccaaacaactcaggatggcttatagaaaacttgtgcctacaggaagctgtgtgttgtgcaatggcaaaccaatccaataagtctgtttcctgggtggaataaatgctagatgatcaagaaggagataggtctcagcactgggctgtgtccct

SEQ ID NO: 517129 - DNA, 449 bp, Homo sapiens
aatctctcatccatggcgatcactgatgtgcatctttctcttccttaaagcgttcaattcacaccaaatattctccctgttggccctgcctaatttctttctggaaatttttttcagaatattttcatgcccagtttctcctttttctcccagtctccacatcatttaaagacattggtaagtcaaaagacaatggttactgagaacaggaaaacctgggaaaatggaatggggctttcacaggaactcatggtgtaaccttgggcattcattgggcaaacatttttgtggagtcctaataaggggaaaggattcaggctgcagggagcaggggaaaccaaaaagaaaaagcagataagctctaagtctgcctttctttgtggtccagaacacrtagccctcctgcccaaataactcacaatcttcctgtgctcgacttatcgcaagac

SEQ ID NO: 517130 - DNA, 568 bp, Homo sapiens
agtttccattgttgagaggtaggcaggacaccattgtcaggggagaaggctcaaccacttttatttgtaaagggtaagactgcaggaaaacagtgtttgatactctatgagaaggcaccgctctgcagtgagtccccagaattttacagccacctactttatatgcaaataagatgtattaggcttgccttccattacctagggcagtcatcctttgtctgggaataagaattaccacttatgaagcttttaaaaaaatactaatgcctaaattccaccccaaagggactggatcagaatctccaggggtaagcctcaagaatttgtattttgaaaactctgatatgcagccaaggatgagaaccaccagtctagcatgcccactgagaaatgaagagggggctgctggytttatggaagactttataaccacagatggccctggcacaaaaacagtcttcactcagggctttggagaaggccttctgtaggctacctctcactagacccgaaactctaagattttcttgaaacattcttgtgaatagatttcttgtaaattggacag

SEQ ID NO: 517131 - DNA, 575 bp, Homo sapiens
agtttgaggggattcgtttaccagaaaaggtagaagccacaataatatgtacaaaatgaagaaaaagaatcagttgtattaaccatggttacatttttgctaaacaggattctagcttcaattcaatcagctgaaactaccaaattgagatatttgatccactaattgtatcaagtaagaaaatggcattgactatttttaatttcttcattccattaagctattgttaaagacaggatttataggtgrgcatagagggcttccctttcctcccccagaaatgggaatgaactgtggccagctcctaaatccaatctaacacatgttaaagtccagcttaatgttgagctccttttcccctttattaagtggaggcctcataataatgccaagaagcagaaggacactctgcagaatccactcccaccctggccaggggaagcctctcttcacacttcctgccttttagaagctcatctactcaggaaccctgccctggagaagggtgctctgcactcaagttcctgctcaccaacttcatgactttgggtatcatacttatcccttggtggggg

SEQ ID NO: 517132 - DNA, 575 bp, Homo sapiens
agtttgaggggattcgtttaccagaaaaggtagaagccacaataatatgtacaaaatgaagaaaaagaatcagttgtattaaccatggttacatttttgctaaacaggattctagcttcaattcaatcagctgaaactaccaaattgagatatttgatccactaattgtatcaagtaagaaaatggcattgactatttttaatttcttcattccattaagctattgttaaagacaggatttataggtgagcataragggcttccctttcctcccccagaaatgggaatgaactgtggccagctcctaaatccaatctaacacatgttaaagtccagcttaatgttgagctccttttcccctttattaagtggaggcctcataataatgccaagaagcagaaggacactctgcagaatccactcccaccctggccaggggaagcctctcttcacacttcctgccttttagaagctcatctactcaggaaccctgccctggagaagggtgctctgcactcaagttcctgctcaccaacttcatgactttgggtatcatacttatcccttggtggggg

SEQ ID NO: 517133 - DNA, 575 bp, Homo sapiens
agtttgaggggattcgtttaccagaaaaggtagaagccacaataatatgtacaaaatgaagaaaaagaatcagttgtattaaccatggttacatttttgctaaacaggattctagcttcaattcaatcagctgaaactaccaaattgagatatttgatccactaattgtatcaagtaagaaaatggcattgactatttttaatttcttcattccattaagctattgttaaagacaggatttataggtgagcatagagggcttccctttcctcccccagaaatgggaatgaactgtggccagctcctaaatccaatctaacacatgttaaagtccagcttaatgttgagctccttttcccctttattaagtggaggcctcataataatgccaagaagcagaaggacactctgcagaatccactcccaccctggccaggggaagcctctcttcacacttcctgccttttagaagytcatctactcaggaaccctgccctggagaagggtgctctgcactcaagttcctgctcaccaacttcatgactttgggtatcatacttatcccttggtggggg

SEQ ID NO: 517134 - DNA, 424 bp, Homo sapiens
acttcaggagaatgtgtagtcaatcactttragaagcaaagaacactttattggtatgaataaccccctcatttacctatttttaaaatccagacatttttgacccatttgatttattttcaagcaacacaccctcgaatttggaaatacagattgtatatttccacaagagtgtaaaattataaattacagaaattgaagaaaggagattcctccccccaccccaggactgtgactaagcccatgaaatttacttaataaccataaataaaacaatagattatcttttcatcctcaatgtatcatttctaaggtgtcattacctttaatctatcacaaaaagtataggatcaacacaacattgttattactgctgaagcactggatctgcaattttatacaattctgcctgaattgtagtcag

SEQ ID NO: 517135 - DNA, 424 bp, Homo sapiens
acttcaggagaatgtgtagtcaatcactttaagaagcaaagaacactttattggtatgaataaccccctcakttacctatttttaaaatccagacatttttgacccatttgatttattttcaagcaacacaccctcgaatttggaaatacagattgtatatttccacaagagtgtaaaattataaattacagaaattgaagaaaggagattcctccccccaccccaggactgtgactaagcccatgaaatttacttaataaccataaataaaacaatagattatcttttcatcctcaatgtatcatttctaaggtgtcattacctttaatctatcacaaaaagtataggatcaacacaacattgttattactgctgaagcactggatctgcaattttatacaattctgcctgaattgtagtcag

SEQ ID NO: 517136 - DNA, 589 bp, Homo sapiens
gatagatcaagctgggaaagggttagaacaaatgtccagcagatagatttcaagatacagcaagtctaggaattttttaaagggggaattggactaagaggcatgactacctcgcaaagtgaagctacagatatgtcccacccaggataagagtgtaaagaaccattagtacaagtgccaagtgctgttccaatctggggcagggcaggtgatcagcttacggcctaatgagaggcatttaatggggatccaggagtacagatggttgtcagaggcaggtttgtgataactcaactgtgatgagaacttgagttcagaggcagaaatccacgcagaaaataaaatgctggagaaaaaccttctaatatcactgaggaagaagcccataaggcaaggactcagtcacaaagaactggactgtcaggctcagaatgagaccagatgtaaaarccgaccaaaccaaattagtggacacatatccttaaactccctaaaaccatcttcctagagtcaggaatggaactgaaatctggggatggactgagctagaaaggtggatggggtggaggaagggggttcaataaatgca

SEQ ID NO: 517137 - DNA, 531 bp, Homo sapiens
gtcttagttccaggggtgtcatatttggcactgcctggaggccaccttgagtccaccaacttgtcagctcaggttcctaggaaccagcctttatacctatcctactcccctgtcagggaggcatgagtatcggcaaggaaggtggcacacttgatggcactgagacaccttaatggataaatgcacagtgcctattgggctccctgaggctgggccaccagccacaggttggcattcccccatgtcacctatgtaacctctaaagcagacagtgstattgttttagactttaagtatcatccttgaataggtataacatggaaggaaaagcaaaataccatgattgcctaggagaggaagcatccatgtatgcttagatcagtcagagaaggcttcctggccaagtgacctcatagaattttcctgggtttactgagaaaaggaagttcccagaaaatgaaagagtaacattacggtgtcagcagttccagagttggtagcagaaaaccaggtgttgtttttttgtttgtt

SEQ ID NO: 517138 - DNA, 531 bp, Homo sapiens
gtcttagttccaggggtgtcatatttggcactgcctggaggccaccttgagtccaccaacttgtcagctcaggttcctaggaaccagcctttatacctatcctactcccctgtcagggaggcatgagtatcggcaaggaaggtggcacacttgatggcactgagacaccttaatggataaatgcacagtgcctattgggctccctgaggctgggccaccagccacaggttggcattcccccatgtcacctatgtaacctctaaagcagacagtgctattgttttagactttaagtatcatccttgaataggtataacatggaaggaaaagcaaaataccatgattgcctaggagaggaagcatccatgtatgcttagatcagtcagagaaggcttcctggccaagtgacctcatagaattttcctgggtttactgagaaaaggaagttcccagaaaatgaaagagtamcattacggtgtcagcagttccagagttggtagcagaaaaccaggtgttgtttttttgtttgtt

SEQ ID NO: 517139 - DNA, 634 bp, Homo sapiens
  misc_feature (1)...(634): n = A,T,C or G
taataatggagttctgctggtgaaggtatcatattatttgccaatgaatgttcttgccagaaaaccttactgataattaagcatgcaactggaagcagggtgtgtgtgggaggtggggatgaggggcaggtgtatgtttatgtgtttgtgtgtaattactactttattcagtgtcagcagtgggaaagattgagttacttagagcagtgcttctcaaatggactatgtacaccagtcatctggggatcttgataaaatgcacattctgaattggcaggtctggaaggggacctgacattctggattccaacagtctcctacatcgtgctgatccttctggtcctcaggtccttctttgagcagcaygggcttagagcagtgatcagcaagtggctagatggcaaatatttgcagctctgcaggcaacagctccagaaatgccctgtgagctgccttctcatgtaaacccagcagtgggcctttgtctgtgactcgatttcctccttagggagacctagnctgcgaggcctgcaactgagaaacaccaaaaatggtagtgaaagagcattgtatttttcaactaaaccaatttcctttaggatagaggtcaaaaaagctgtgctttgaaattagt

SEQ ID NO: 517140 - DNA, 628 bp, Homo sapiens
tagtacctaccttaacagtagagaagtttggatgggtacctatgtaccgtgcttgggtactttgtacctggtatayagtaagtactacattcaataaatattaattattattactattattaatgggtcctcagttaccttactgagtctgagaagtactcagggtttttatactttttttccttaatagcataagtagagaaaggtcactgctcacaagccctgtgggaatgtcatgtgtgcttctcccgctcttcctgcttttccttcttccgtcaagtatctgggtgtaacaggttcccttatcagtggctttcctgggccccccggcacagtgtttgctgaacatacctgtttggatacacttttgtgacacaggtcatagtttttgtttatttctttttctttttttttcagaagaaactttgtgaaacacatctaatcacatttcaggtttgtattttgttttatccaaagagtccttacctgttggctttgggactagcacctaagccatcatctttaactaaaagatgggacaggctaatgctgggctgccagtgccctgaacactggaagaagttccagcttctgctgaggaggtggaggccatcactcctccagagac

SEQ ID NO: 517141 - DNA, 628 bp, Homo sapiens
tagtacctaccttaacagtagagaagtttggatgggtacctatgtaccgtgcttgggtactttgtacctggtatacagtaagtactacattcaataaatattaattattattactattattaatgggtcctcagttaccttactgagtctgagaagtactcagggtttttatactttttttccttaatagcataagtagagaaaggtcactgctcacaagccctgtgggaatgtcatgtgtgcttctcccgctcttcctgcttttccttcttccgtcaagtatctgggtgtaacaggttcccttatcagtggctttcctgggccccccggcacagtgtttgctgaacatacctgtttggatacacttttgtgacacaggtcatagtttttgtttatttctttttctttttttttcagaagaaactttgtgaaacacatctaatcacatttcaggtttgtattttgttttatccaaagagtccttacctgttggctttgggactagcacctaagccatcatctttaactaaaagatgggacaggctaatgctgggctgcyagtgccctgaacactggaagaagttccagcttctgctgaggaggtggaggccatcactcctccagagac

SEQ ID NO: 517142 - DNA, 628 bp, Homo sapiens
gcgtttctggaagaaatgttctctcagaaacttatcactgggagcagaaatggtgaaaagtttgtggggtaagtggcagagggttcttcatgggagttttatgaaagtcactgtgacataggatttttagaagccctaggaaaagaaagttggggagttttccagtgaaatttggattgagaaagaaaagaaacccacattgtgctaaacaagatggtggatccagttcagagaaattgagtaacagacgaaattcccagaatcatgagaaaaactagtcaaagacttcccctggggagcacccggatcaaaaagctgactccggggcctctctmtacaggttgctgaggaggggcctgctgcagtaggaggctggaaggggtggtttggaactgagtcaagaaaagaccccaaacccacaggacagaggaagttgaaagaggggtttggcttagtggaagggaagggaggttggtcaagagaggcctgctgacaggaaagcggctgacaactaagaagcatctggaaagggccatttgatgctttaagctcatgccaagctaattgagtaatgtgagcttatgttcttgtaaattacttcaactgtatatagttcttccctctgaga

SEQ ID NO: 517143 - DNA, 496 bp, Homo sapiens
tgaggtgacagtggggactggaactcgggtttcgtggcccccactgaccttctatccctcctgatgcatctctcctggcagcccgagctccccgagttccaggttctgctcctctggttgatggcaaatgttagtttccaaaaagcgcaccgagtccacccatgacaagtgctcaaaacagccttccttttctatggtatgtctcctggaaagtctttcgtggttaataattctgtttgtggtcatttttctgagcaggttaagggcttcttaaatcttcatagttcatattcacaagcccctcggaggacagcttacctcccgccaggccccasctggtgatgagcggcccgcacacggcagagcagtgggaggccgggagcagaggcggcccggagcagacagcacgagctgggggtgggggctacaccacctggaaatctgtcccactgtcacacccacgctagtttacagaacctgggcatgtggctcgaaa

SEQ ID NO: 517144 - DNA, 702 bp, Homo sapiens
taagagttgagcttgaatttatgaggccctaaagcccaaatgatactcactagggttcaccctaaggaagcggagaacacgtccccagagcgaggatgttacctctggttcagtcctgattctattttggaaagctcatctataaatagcttctctcctgctttccacctttccacagggaatccaccctctctccttttatggcggcggagggtcattgggtagaaaccttcccagggatactagctctgaagattgtgggtgagtgccctgccctggcctgaggtgggggtggtggggatatgtttctgcctcttccagccattctgcggtctccgggacccaaccatttgtcccaaatccaccctaattagggaagaaaaaggaactactctttcaaagatctgtagatgcgcagttggctgcctttcttattcctctctgcccactaattccaaaggcatctgacagggatgcactctggtgaagatgacaggaagtttcctgccgtggaagcaactgcctgtctaaaaaaagctctttttaaaaatgctcaactcsgaactaagagcttgcagagaatgtgttatggctgctgttatttatttataccaccgacttccagaaaggattttaagtggctcacaataaaaacacagctagatctggggagagatagtacaaatgaagagcacggtcagc

SEQ ID NO: 517145 - DNA, 479 bp, Homo sapiens
tggcagcagcaacagcggcaaccaaactgtgtcaccaaaagaagcagtagcagacaaccactctcattcggcacttactatgtgccaagcacggtgctaaatgcattaccccatgagtccaatccacaaaacaatcctgcaacatttctrtgataatctccacgcaatgggttagttcatttcacgtgaagcaaaattttgccatgtgcccaagttgagatagctagaggcgagggctgcatttgacctcagctcaggctaacttcaaagccctttgttctttcccctgtgctgttctattgtgtaatggaaatttctcatttttctaaggtgagaatgtactgagtgtcccctctccaggagacaggcagtggggagaaatatattagtaaagctgaaggaattttaatacttccttttcagtctgagtgttaatgggctttgagtcccacagtggcactgacatcaccgggctgctg

SEQ ID NO: 517146 - DNA, 479 bp, Homo sapiens
tggcagcagcaacagcggcaaccaaactgtgtcaccaaaagaagcagtagcagacaaccactctcattcggcacttactatgtgccaagcacggtgctaaatgcattaccccatgagtccaatccacaaaacaatcctgcaacatttctgtgataatctccacgcaatgggttagttcatttcacgtgaagcaaaattttgccatgtgcccaagttgagatagctagaggcgagggctgcatttgacctcagctcaggctaacttcaaagccctttgttctttcccctgtgctgttctattgtgtaatggaaatttctcatttttctaaggtgagaatgtactgagtgtcccctctccaggagacaggcagtggggagaaatatattagtaaagctgaaggaattttaatacttccttttcagtctgagtgttaatgggcyttgagtcccacagtggcactgacatcaccgggctgctg

SEQ ID NO: 517147 - DNA, 368 bp, Homo sapiens
tgtccatctttgcttctccctcttaactgggcttctgtcatgcacaactacccaagacacctgctcagctcagcctttttcactgcaaaagccctagaagatctaatgtcttctgggggagggaactgggaagaggaagcagcttatggaaacactgctgtctaaacaggattaaaagcatcaattctcatgtcacrcctgggctgttagtcaataccaatgtttctctcatccaggtagaaaacacagcctccaagaagttgagtaacttgttctgggcccctagcagataaacgaatgactgcgatttgaatacacacctagaattgttttgcctctgacaacttttcagaaagtaaagccaggga

SEQ ID NO: 517148 - DNA, 537 bp, Homo sapiens
agcaggggggtgttaatattccagcacagtggcaaagaggaagtcctcaggcaamgaaaggcagatattgcccaatatgcactaagtggtaagggacatgggtaggtcacccagtgtgttggctacagagactcttgtaaataaccagtttctcaatatggttctactgcattcagaataagcaggacttttcaaaattgttgttctgctacattcaatacatgtgtctgtaatgatgttgtctgttgtgaatttttaaaatccttgagggaacaatccatattatttacttgctgtcttaaatagcacacatctcaattagatttgtggggttttttttaagtgtcatccttcaaacacaaagcacaaatactgacctctttcaaaaagaccacggtacatatatcttggtactagtaagagattcattaatcaactcaaagtgttttgtggccaatctaaggctgtgaaaaagagagaagctgcatgactcacatagaaaaagaggacctcaactgagctgaccaatccctccac

SEQ ID NO: 517149 - DNA, 537 bp, Homo sapiens
agcaggggggtgttaatattccagcacagtggcaaagaggaagtcctcaggcaacgaaaggcagatattgcccaatatgcactaagtggtaagggacatgggtaggtcacccagtgtgttggctacagagactcttgtaaataaccartttctcaatatggttctactgcattcagaataagcaggacttttcaaaattgttgttctgctacattcaatacatgtgtctgtaatgatgttgtctgttgtgaatttttaaaatccttgagggaacaatccatattatttacttgctgtcttaaatagcacacatctcaattagatttgtggggttttttttaagtgtcatccttcaaacacaaagcacaaatactgacctctttcaaaaagaccacggtacatatatcttggtactagtaagagattcattaatcaactcaaagtgttttgtggccaatctaaggctgtgaaaaagagagaagctgcatgactcacatagaaaaagaggacctcaactgagctgaccaatccctccac

SEQ ID NO: 517150 - DNA, 537 bp, Homo sapiens
agcaggggggtgttaatattccagcacagtggcaaagaggaagtcctcaggcaacgaaaggcagatattgcccaatatgcactaagtggtaagggacatgggtaggtcacccagtgtgttggctacagagactcttgtaaataaccagtttctcaatatggttctactgcattcagaataagcaggacttttcaaaattgttgttctgctacattcaatacatgtgtctgtaatgatgttgtctgttgtgaatttttaaaatccttgagggaacaatccatattatttacttgctgtcttaaatagcacacatctcaattagatttgtgggkttttttttaagtgtcatccttcaaacacaaagcacaaatactgacctctttcaaaaagaccacggtacatatatcttggtactagtaagagattcattaatcaactcaaagtgttttgtggccaatctaaggctgtgaaaaagagagaagctgcatgactcacatagaaaaagaggacctcaactgagctgaccaatccctccac

SEQ ID NO: 517151 - DNA, 591 bp, Homo sapiens
ctgtccacccatattgaaggtgggtcttcctctcccrgtccactgactcaaatgttaatctcctctggcaacaccctcacagacacacccagaaacaatactttaccagctatccaggcatcctccaatccaatcaagttgacacctaatattaaccatcacaggggcttactctcaaatagttcaagtgaatacaaaatagtaataatatgtagtgtatatgcatttacagagaaccagaatgataaatcaaatgcaaaaatgacaagagttgtgaatctgaatgaggggcataccagagttctttacgacctttctgcagtttaaaattatttttaaaaaccaaaattaaaacagcctaccaaattgatatgaatagaaatgttaacttccagttaattccaaacttacagttctgttcttgaccagattgtattgaaagacactttaagaggcagaatagggttggtgtgtgaccttgacatttcataggtgtgagttttaagcagaatcctaatgaaaacttaatttcttttaatcatgggctgatctcttcatacctagatttattttcaggcaaaaccgtaatgg

SEQ ID NO: 517152 - DNA, 664 bp, Homo sapiens
caggtgtgagccaccacgcccagcctatatttgtattttttaaaaaaatccatacaaagttgacatgaaagtttttttaaatgggtaagtctagctaggtttataatgggaaagcccttcttgggtcttaaagtaattattttgcaaagataaaaagtggtgcaaagttgtattcatatgccttgattgcatatgaatatgaatgaagtttcttaaaaactttattttttaagaaaacaaaatgtaaaatcaatgaaaggaatcaacttgctcattggattgttcttacccttgaggaagaaaattactccagagacaagttcttttccatcttgggatgaatgctgaattaatcagcagggattctgccaggtccttatatgtgttgacggaggttctctgagttatatcacaggaatgttgrtggcttcaacaccagttcttttgatagttgaggaaactatctcaaagccaattctggatgatttcctttttgggtaaatttgtctaacaaattgctcatttgatttaattgtcatgacggaaattaggaagaaaatactccttgttgaattagtacatgttcaaaataaattactgcaaatggaactgttactctttacctaattgggtatccaatagtctgtctacattaaacctccag

SEQ ID NO: 517153 - DNA, 603 bp, Homo sapiens
ttgattgattgattggagacagggtctctctctgacacccaggctggattgcagtggtgcaattatgactcatttcaccctcaacttcccaggttcaggcaattcttctacctcagcctcctgagtatcttgggctacaggtgtgcactatcatgccaggctaccgttttgtttttgtttttgttttttgttttgttttgtttcattttgtttttgtagatacagggtctgtctatgttgcccaggcttttctctaactcctggtctcaagcgatcctcctgctttggccttccaaagtgctgggattacaggtgtgagccaccatgcctggccttatgtgattaattattgagaactttgatctacattttgattatacacaatgctcaggaagccaagtaaggcccccctcamaaaacgacttacctctaatgcctagaaatattaattctctacaagcccctattttaaaagcctttcatgaaaagagcttcctatacatattttctatttcatgaagagtttatgaggaatcatgaaaagtataaaagcctgtaaaataaaagtgcaacataaatcatcagcaacatgaccacagacac

SEQ ID NO: 517154 - DNA, 603 bp, Homo sapiens
ttgattgattgattggagacagggtctctctctgacacccaggctggattgcagtggtgcaattatgactcatttcaccctcaacttcccaggttcaggcaattcttctacctcagcctcctgagtatcttgggctacaggtgtgcactatcatgccaggctaccgttttgtttttgtttttgttttttgttttgttttgtttcattttgtttttgtagatacagggtctgtctatgttgcccaggcttttctctaactcctggtctcaagcgatcctcctgctttggccttccaaagtgctgggattacaggtgtgagccaccatgcctggccttatgtgattaattattgagaactttgatctacattttgattatacacaatgctcaggaagccaagtaaggcccccctcaaaaaacgacttacctctawtgcctagaaatattaattctctacaagcccctattttaaaagcctttcatgaaaagagcttcctatacatattttctatttcatgaagagtttatgaggaatcatgaaaagtataaaagcctgtaaaataaaagtgcaacataaatcatcagcaacatgaccacagacac

SEQ ID NO: 517155 - DNA, 635 bp, Homo sapiens
attcttcctctatcactttctagacctgagggtaaaagaatgggatggagtttttctaaaaactagagcagcagagaagcagcactaagaaaattgaagaataggccattctcagacagaagaggcaagagaagccttggtaacattggagcaaggttgagaagggcagtgtgcctacagaggaacccatgaacagttcccattgtttactgattttaccttgctagactagaaaatgcatttgtcaataggaatgttatcatctccaagggggcaaatattggttctcagtggatgaacaaaatcttagatattataatggcttgtggccttcccaatggccacagtaaataagcaaatatacagtgtatctgtggagtttaaatttcatgagtggagtaaaggttggggtggagtacaattaggaaaaaaaaatgtctaaaggtctcctttgggggaagggtgataaggaaaraaaaaaggttgaggaacagtgttccagagcaattatatttagtttcagcttcaaattattcactcctgcttgtaattcccttttgttctctatcctttcatttaaaaacatataagttatgtgtttgagggggtgtggggaattaggcctcctgcacctt

SEQ ID NO: 517156 - DNA, 573 bp, Homo sapiens
atgtcagctctacttgctctgccaatgctttagcacaaagcggggaatttcaagcacrgctaacatatgccacaggactgcagagttctagcactcgggtgttgaggaagcaagttcccttttggttttactcttctattaggaactaaatctaaattttcataaaagtttgttttctttttttaacagaagacctaataatttctctaagtattcactcttttttttggccatttttaatctgttttttacaaacttacataagccagtgataaataacaacttgcaaagcagcgatcgttactatagattttacccctgagttgaaaaatcaaatatttttatgcaacagaacaatggctaataacttaattatagatcatcatgttcaactggggtagttatcaatttaactctgtattattcaacaacacagatgtggcaaattttgcacataattccaaaatagaggtgtgaaatatcattttcccatgtgactatttggtttaacctagatatttactaagtataatattacagctgccagggagacatagaaattaaaaacaagat

SEQ ID NO: 517157 - DNA, 433 bp, Homo sapiens
cacaactgaatatttcatcattaaataatatgagccatctctctgtgcatgtgyatctctctctccatcattctcaccctgcttttattgatattgcctgatggcaacatggcagccagcagctacagatttacattgctcctcctctcaatttataatcccagaggaagagaaaccattttccccagtagttctggctacaatctaggggactctggttggcccagttttgatcatgagactacagttgaaccaatcactgaaaccagaaaagtggagtccatcaattgacaaggactgtgtcacatgtctacctctgagattattctagggtcagctcctctagaatcacaaggctaagtgctttgcagttcagattttcaagagattctgattggcccagcttcggtcagatgtctaccctcagttcaat

SEQ ID NO: 517158 - DNA, 394 bp, Homo sapiens
ctgtgcatgtgcatctctctctccatcattctcaccctgcttttattgatattgcctgatggcaacatggcagccagcagctacagatttacattgctcctcctctcaatttataatcccagaggaagagaaaccattttccccagtagttctggctacaatctaggggactctggttggcccagttttgatcatgagactacagttgaaccaatcactgaaaccagaaaagtggagtccatcaattgacaaggactgtgtcacatgtctacctctgagattattctagggtcagctcctctagaatcacaaggctaagtgctttgcagttcarattttcaagagattctgattggcccagcttcggtcagatgtctaccctcagttcaatcag

SEQ ID NO: 517159 - DNA, 598 bp, Homo sapiens
ctcctgcagttgattccctcatgaccccgtccacttacctgccttctctgtccattttgcaacaggcaatatcacttttcctagctttcttaacaccaggccttctggattctcctctttgccctttgattagtcctcttctacctctatcctttattttaaaattttttttgagatggagtcttgctctgttgcccaggctggagttcaatgatgcaatctcaactcactgcagcctccatctcccaggttcaagtgttcctcctgcctcagcctcctgagtagctgtggctacaggygcatggctacaccatgcctggctaattttatgtagtttcagtagagatggggttttgccatgttggccaggctggtctcaaactcctgacctcagatgatccgcctgcctcagcttcccaaagtgctgggattacaggcatgagccactgcgcctggccaacctctatccgttaaatgatggagtggcctagagatttgaaactggatctattccaatcgcaaaggctgattccgtaaacatgttggtatgccccagtcctttccaagctgtttccttgtgaggcgtgaaggtaggctc

SEQ ID NO: 517160 - DNA, 598 bp, Homo sapiens
ctcctgcagttgattccctcatgaccccgtccacttacctgccttctctgtccattttgcaacaggcaatatcacttttcctagctttcttaacaccaggccttctggattctcctctttgccctttgattagtcctcttctacctctatcctttattttaaaattttttttgagatggagtcttgctctgttgcccaggctggagttcaatgatgcaatctcaactcactgcagcctccatctcccaggttcaagtgttcctcctgcctcagcctcctgagtagctgtggctacaggcgcatggctacaccatgcctggctaattttatgtagtttcagtagagatggggttttgccatgttggccaggctggtctcaaactcctgacctcagatgatccgcctgcctcagcttcccaaagtgctgggattacaggcatgagccactgcgcctggccaacctctatccgttaaatgatggagtggcctagagatttgaaactggatctattccaatsgcaaaggctgattccgtaaacatgttggtatgccccagtcctttccaagctgtttccttgtgaggcgtgaaggtaggctc

SEQ ID NO: 517161 - DNA, 646 bp, Homo sapiens
tctgtcataatattttcatccctttttaccatatttcctttcctttaaaatagcatggtgttagctacaaataatagaaatgcaggattggttcaaaagttcgacaaaaaacttttttgtctctcctatgaaatcaacagcattggccacatcctatcactgattcttcatgtgattattgaatgacagacaaaagcaagagaaaaataaagattcatcgttcatttcatatgcaaaagagaaaaaaagttaatttgcttcttgttgctttctcgttaaagagtaaatgttttcttatcaagagaaactgtcttgttttcaggtaagctctaaatcagttattgtggaaaaaaatggaaatatgattgcctcaggcgtttgtccctaccccagatacctagagctgtggtcaatttttcactttgggttgctgcagaaaaagaagggatgcctggaattcctgttgaggatataattgcaatggcattttcaccttctttccttttattcacaacacacattatcttggttacctaccatgttcgagatcttctcaggwcacccaaattagtagagttagttttttttaatttaataacagtattttgacaggtgacttaagccctctttgctattatttgtgttg

SEQ ID NO: 517162 - DNA, 693 bp, Homo sapiens
cccaaaaggtcctgtaatagtgctatattagatgcttattactgtgtaacaatttgcccccaaacttgatgacttaaaagaaaaacatttattatctcacaatttttataagtcaggcatccagatgtggcttagaggggtcctctggctcagggtcactcacagaactgtatcaagcttccakgtggggctacagttttctcaaacttcactatggttagatctacttccaaggcctctcatgtgtttattggctgacctcacatcctcactgcatgttgactggagacataatttccttaccttgttgtcctctccatagggctccaccaatatggcaaccgaattcctacagaacaagtggaggaatgagggagagagccagcaagttggacatcacagttttttggtaacctaatctccgatataccatgctatagcttttactatattgtatttattagaaatgattcactaaatccagccaataatcagaggaggaaattacactgggtctaaatactggaagggaaagtttttggaagcattttaataaagatggcctaccaaagtgccatgtgcagtgataaaaattaatgtaatattatggaaaccccaaaaggtcacagttacaaaggacttctcaagagtgatgtgtcaggtcaatacaccaagtgaataaccataaccagc

SEQ ID NO: 517163 - DNA, 519 bp, Homo sapiens
cctgacttgtactgcctggccctgaaaagatgagcaaatccaaatgcacaaaagttatattatcacagttgaaaaatgttatgattaggttctgtatgctaagaaaaccccccttatgttctcatactatctttatatttcaaatatacatgggttaaacatttcaaytggctagagaaacaggttagaatacagttaaaattcttagttttacataatgtaagtaaatgaaaatctaatctaaaagtgagtaatgactacattagtagtcttgaccatctaccaaaattgagtattcttcctccgaagataagagaattaggaaaatgaatcacaattactaatctgttggtacatgaaaataaatgtagtctgtactatttcttttagtgcctgtatggagtggaatgaatgttgctggtgtctctctgaagactctgcacccagatttagggactgataaagataaggaacagtggaaagaggttcacaagcaggtggttgagaggtaataaatct

SEQ ID NO: 517164 - DNA, 474 bp, Homo sapiens
cagctggtgatgagaggcacaggcccaccgggcatgtaagagcatctataggctccactgggggtttacctctggaggcttaaaatgccacccgtagcacccattgtccaaactcaatgatgctccctgctgtaaaggtatgaagcagagccttcccagtcacctcctgcttcactrttgcctcgatgtagtttggactacacacaagttacttgattctcatagtactccttttgataaaatggcatcatgaaagaccgcatggcatcctttcccgtggaccaaaagatgacctggtaagggataaggtaaattgtatgtttctgggtccttctaaaggcctctgatcttcttcatgtcactgaatgtaagttccacatggttataggacataaggatgctcttgcttttgctgaccatcactctgccaccctctgagcgattcttgttgaatgctttagtctctcctgtata

SEQ ID NO: 517165 - DNA, 613 bp, Homo sapiens
tggctacctgggaagtgggacctgagggctgaaggattgtgatgaactctggcctgcttcctcaggttgttcagattctttctcttgctgaatgacatcattggaaaggaaaaactctgctgtttgactgatttgtatatttacactcttatcttcactcagttcctctacttgcctttttacttttaatatgaagttgaatttgtaattcattttctttcctaaggaaaaaggacatttaagactataagtttaccttaggctatagctttgactgaagccaagtttattgtatttgtaactttatgtatgcatataccttagcaaataacttttaagytgtgctgaagtatgttaatttatgcttacatttcatttaatcagagaatttaactaaggtaggttttttaaaataaatgtttgatacttgaattattgactttttaaaggtgtagcatttgtgtttattaatttcatttagttagatgaagtccttttaccttattttttgacttgttgattcaacaagttacaattgaccactattaattgttcctatcaatttatcatatttttaaacaaataatttgtggctgttatttagcaagtaggt

SEQ ID NO: 517166 - DNA, 319 bp, Homo sapiens
ggtggctccacttcggctcctacayacagaggtgaaagacaccctgttaactgttcccagctcttccaccggtttttacaacccggttttcagttacattgttttgtttttgcctctctctgggagaagggtggagtccctggttgggaacgttggcctctgaggctctggggacatgtagtcctaatggaagagtcacaccaagtggttagtttgctggtgacccagttgctaggtgagggtgaggctccgctaagtggatttatgtcatgtagtgactgtctcattaatgatttactgatgtcatgttccgggcaga

SEQ ID NO: 517167 - DNA, 489 bp, Homo sapiens
ctggtggctccacttcggctcctacatacagaggtgaaagacaccctgttaactgttcccagctcttccaccggtttttacaacccggttttcagttacattgttttgtttttgcctctctctgggagaagggtggagtccctggttgggaacgttggcctctgaggctctggggacatgtagtcctaatggaagagtcacaccaagtggttagtttgctggtgacccagttsctaggtgagggtgaggctccgctaagtggatttatgtcatgtagtgactgtctcattaatgatttactgatgtcatgttccgggcagatgtttcctctgaggacttccaggacacgggtgggaagggtgcggtgttggcagccagcctcgggaggctgtcgggccaggaacagccccactcagcgctaggccgggcccgagcagtgagccctgctgggagctgtccaggagccgctgttgttttcttgtcagcccc

SEQ ID NO: 517168 - DNA, 319 bp, Homo sapiens
ggtggctccacttcggctcctacatacagaggtgaaagacaccctgttaactgttcccagctcttccaccggtttttacaacccggttttcagttacattgttttgtttttgcctctctctgggagaagggtggagtccctggttgggaacgttggcctctgaggctctggggacatgtagtcctaatggaagagtcacaccaagtggttagtttgctggtgacccagttgctaggtgagggtgaggctccgctaagtggatttatgtcatrtagtgactgtctcattaatgatttactgatgtcatgttccgggcaga

SEQ ID NO: 517169 - DNA, 489 bp, Homo sapiens
ctggtggctccacttcggctcctacatacagaggtgaaagacaccctgttaactgttcccagctcttccaccggtttttacaacccggttttcagttacattgttttgtttttgcctctctctgggagaagggtggagtccctggttgggaacgttggcctctgaggctctggggacatgtagtcctaatggaagagtcacaccaagtggttagtttgctggtgacccagttgctaggtgagggtgaggctccgctaagtggatttatgtcatgtagtgactgtctcattaatgatttactgatgtcatgttccrggcagatgtttcctctgaggacttccaggacacgggtgggaagggtgcggtgttggcagccagcctcgggaggctgtcgggccaggaacagccccactcagcgctaggccgggcccgagcagtgagccctgctgggagctgtccaggagccgctgttgttttcttgtcagcccc

SEQ ID NO: 517170 - DNA, 560 bp, Homo sapiens
aggaagctaaggctcagagtgagtcatggacacaggatttgaacccaggcagtcttttctgtagggtctgtgcttttatttatttttaytttcattaatttttttttgagatggagtctcattctgtcacccgggctgggtgcagtggtgtgatctcagctcactgcaacctcacctctcaggttcaagcacttctcctccctcagcctcccaagtagctgggattataggcgagtgctaccacgccaggctaatttttgtatttttagtagagtcggggtttcactgtgttggccaggctggtcttgaactcctgacctcaggtggttcacccgcctcagcctcccaaagtgctgggattacaggcatgagccactgcacctggcctcaggcataatgtgatatcatttataaatattagagaatgtagttctaaaaagtgaaggcttaagaaaaacctaataccaccatcatacttaaaaaaaaattgacagttaaatccataatatcatcaaatattctatgttcaggtaaacatgtctcagttttttaaagtattt

SEQ ID NO: 517171 - DNA, 560 bp, Homo sapiens
aggaagctaaggctcagagtgagtcatggacacaggatttgaacccaggcagtcttttctgtagggtctgtgcttttatttatttttactttyattaatttttttttgagatggagtctcattctgtcacccgggctgggtgcagtggtgtgatctcagctcactgcaacctcacctctcaggttcaagcacttctcctccctcagcctcccaagtagctgggattataggcgagtgctaccacgccaggctaatttttgtatttttagtagagtcggggtttcactgtgttggccaggctggtcttgaactcctgacctcaggtggttcacccgcctcagcctcccaaagtgctgggattacaggcatgagccactgcacctggcctcaggcataatgtgatatcatttataaatattagagaatgtagttctaaaaagtgaaggcttaagaaaaacctaataccaccatcatacttaaaaaaaaattgacagttaaatccataatatcatcaaatattctatgttcaggtaaacatgtctcagttttttaaagtattt

SEQ ID NO: 517172 - DNA, 608 bp, Homo sapiens
ctgaagccacacctctacacagctgtctgttgtcttacagtggcataagctaaaacagatttttttttgacatgtattatagcacctgctggctttatttccctcccttataccataatattgcttgttgatttgtatcaacggatttgcatcttctgcccgccacacacacacacacacacacacacasacacatccaccccactccccccactagtgactaggtacacttgaattcgaagtgaatagcacacacaagagatatgtccagcacgtgattctcacaggcctgatttcacagcggtgctggaggcaaacctcgcagcctctagcctgtgcagaccgcatcatgacaaattgtataaatatgtgcaaattgtccagatgatgtcatgtgtgccccagcctgctctccaagtgggcagaacgcttcagggaaggtcagggcaggccttgctctgaattcaattgaggtaattgcattcaatttgcttaaatgtatcacagagaaaagccctgtctgttgatctcaatcgtattaagaagtttattttccgccggggccggactccacagcgtcacggagaggaagccttctctcggttatg

SEQ ID NO: 517173 - DNA, 608 bp, Homo sapiens
ctgaagccacacctctacacagctgtctgttgtcttacagtggcataagctaaaacagatttttttttgacatgtattatagcacctgctggctttatttccctcccttataccataatattgcttgttgatttgtatcaacggatttgcatcttctgcccgccacacacacacacacacacacacacacacacatccaccccactccccccactagtgactaggtacacttgaattcgaagtraatagcacacacaagagatatgtccagcacgtgattctcacaggcctgatttcacagcggtgctggaggcaaacctcgcagcctctagcctgtgcagaccgcatcatgacaaattgtataaatatgtgcaaattgtccagatgatgtcatgtgtgccccagcctgctctccaagtgggcagaacgcttcagggaaggtcagggcaggccttgctctgaattcaattgaggtaattgcattcaatttgcttaaatgtatcacagagaaaagccctgtctgttgatctcaatcgtattaagaagtttattttccgccggggccggactccacagcgtcacggagaggaagccttctctcggttatg

SEQ ID NO: 517174 - DNA, 608 bp, Homo sapiens
ctgaagccacacctctacacagctgtctgttgtcttacagtggcataagctaaaacagatttttttttgacatgtattatagcacctgctggctttatttccctcccttataccataatattgcttgttgatttgtatcaacggatttgcatcttctgcccgccacacacacacacacacacacacacacacacatccaccccactccccccactagtgactaggtacacttgaattcgaagtgaatagcacacacaagagatatgtccagcacgtgattytcacaggcctgatttcacagcggtgctggaggcaaacctcgcagcctctagcctgtgcagaccgcatcatgacaaattgtataaatatgtgcaaattgtccagatgatgtcatgtgtgccccagcctgctctccaagtgggcagaacgcttcagggaaggtcagggcaggccttgctctgaattcaattgaggtaattgcattcaatttgcttaaatgtatcacagagaaaagccctgtctgttgatctcaatcgtattaagaagtttattttccgccggggccggactccacagcgtcacggagaggaagccttctctcggttatg

SEQ ID NO: 517175 - DNA, 576 bp, Homo sapiens
acagctgtctgttgtcttacagtggcataagctaaaacagatttttttttgacatgtattatagcacctgctggctttatttccctcccttataccataatattgcttgttgatttgtatcaacggatttgcatcttctgcccgccacacacacacacacacacacacacacacacatccaccccactccccccactagtgactaggtacacttgaattcgaagtgaatagcacacacaagagatatgtccagcacgtgattctcacaggcctgatttcacagcggtgctggaggcaaacctcgcagcctctagcctgtgcagaccgcatcatgacaaattgtataaatatgtgyaaattgtccagatgatgtcatgtgtgccccagcctgctctccaagtgggcagaacgcttcagggaaggtcagggcaggccttgctctgaattcaattgaggtaattgcattcaatttgcttaaatgtatcacagagaaaagccctgtctgttgatctcaatcgtattaagaagtttattttccgccggggccggactccacagcgtcacggagaggaagcc

SEQ ID NO: 517176 - DNA, 402 bp, Homo sapiens
tctcctgttttggggactggtgtgaaaacgtcattcgatgacaggccgacccaggtggcccctgccttaacatcaaatgccatcaaacgctccgaacacgcttctggctccaggcaggggccgtttttctccccccagaaagstcagctagagtcacccttaaaataatgcacttgtatattttttattgtgtggacaagaaattgggaacaggttcaggctgctcagaaaaacgtgttaagtttatttttgaacagaggtttattaaaaaaaaaaaaagccaaggaaagtcatgcatggttttgagcttctgcctcgcagcacctggtagatgttggtgttgcaaagtggacacagcaatttgatcccttccctgggtcaccagggaaacctgtgtcccac

SEQ ID NO: 517177 - DNA, 402 bp, Homo sapiens
tctcctgttttggggactggtgtgaaaacgtcattcgatgacaggccgacccaggtggcccctgccttaacatcaaatgccatcaaacgctccgaacacgcttctggctccaggcaggggccgtttttctccccccagaaagctcagctagagtcacccttaaaataatgcacttgtatattttttattgtgtggacaagaaattgggaacaggttcaggctgctcagaaaaacgtgttaagtttatttttgaacagaggtttattaaaaaaaaaaaaagccaaggaaagtcatgcatggttttgagcttctgcctcgcagyacctggtagatgttggtgttgcaaagtggacacagcaatttgatcccttccctgggtcaccagggaaacctgtgtcccac

SEQ ID NO: 517178 - DNA, 261 bp, Homo sapiens
gctcagctagagtcacccttaaaataatgcacttgtatattttttattgtgtggacaagaaattgggaacaggttcaggctgctcagaaaaacgtgttaagtttatttttgaacagaggtttattaaaaaaaaaaaaagccaaggaaagtcatgcatggttttgagcttctgcctcgcagcacctggtagatgytggtgttgcaaagtggacacagcaatttgatcccttccctgggtcaccagggaaacctgtgtcccac

SEQ ID NO: 517179 - DNA, 591 bp, Homo sapiens
gctggtcgtacgatcatcacagaatcttgctcagagggaggtaggagtgccagagccagaggaggtgatgttaggacaaaagcaaatgtcagagtcacagagaaattagaagatgctgcactactggctttgaaggtcaaggaagggtccaggagccaaggaatactctagaaacattcccctagaagcaggaaatggcaaggaaactgattctcccccagaacttgcatcaagagggaagttttgctgacaccttggttttaggccagtgagacccagggtgggcttcaaaactaccacactgtaagacaatacatttgtgttgctttaagccaatatgaatgtgatcattggtgatggcggccagaggacactcacagaaggagtaacgtactggaggtctgcarcaggaatgaatttggcatgactgggaggacgccaagggggcagcaaagaagaacaagcaaaggctaaacgtgacgactccttgttttagaagaacccccttcagaagaagaatcagtaaagcaaaggctgaactcaactttgtcttcttttcttccccagacataatttacgttattttattgg

SEQ ID NO: 517180 - DNA, 499 bp, Homo sapiens
tgaatctaaaagagaaccagtaaaattgagataacaagtttattgcaaaataaatgacctgaaagccacaggcattgggtgcggtaggagaagggcaggtagtggtgactgaggtgactctgtgtttgggtttttgaaaagattgtagatttgaaggataakgagttcagagaagtagaaaggcaaataggggctgttataaataaggacagtggcatgagccaacggggttatctctcatatttaaagaacatggctacatctggtttccctataagttgattccttactgttattctgagttgaatgcatatcttttgtctcagtgaagcctgaatggcttttgatgtctctgatctggaaaggttatttgtgtatctcagaataagtcattttgctaaaaaaggctactcctgagggagagcagtggaaaaaagagttggaaaagtggattgtagctagttgaaaaaaggatttgaatgtcaagctttaggaatta

SEQ ID NO: 517181 - DNA, 499 bp, Homo sapiens
tgaatctaaaagagaaccagtaaaattgagataacaagtttattgcaaaataaatgacctgaaagccacaggcattgggtgcggtaggagaagggcaggtagtggtgactgaggtgactctgtgtttgggtttttgaaaagattgtagatttgaaggataaggagttcagagaagtagaaaggcaaataggggctgttataaataaggacagtggcatgagccaacgggsttatctctcatatttaaagaacatggctacatctggtttccctataagttgattccttactgttattctgagttgaatgcatatcttttgtctcagtgaagcctgaatggcttttgatgtctctgatctggaaaggttatttgtgtatctcagaataagtcattttgctaaaaaaggctactcctgagggagagcagtggaaaaaagagttggaaaagtggattgtagctagttgaaaaaaggatttgaatgtcaagctttaggaatta

SEQ ID NO: 517182 - DNA, 499 bp, Homo sapiens
tgaatctaaaagagaaccagtaaaattgagataacaagtttattgcaaaataaatgacctgaaagccacaggcattgggtgcggtaggagaagggcaggtagtggtgactgaggtgactctgtgtttgggtttttgaaaagattgtagatttgaaggataaggagttcagagaagtagaaaggcaaataggggctgttataaataaggacagtggcatgagccaacggggttatctctcatatttaaagaacatggctasatctggtttccctataagttgattccttactgttattctgagttgaatgcatatcttttgtctcagtgaagcctgaatggcttttgatgtctctgatctggaaaggttatttgtgtatctcagaataagtcattttgctaaaaaaggctactcctgagggagagcagtggaaaaaagagttggaaaagtggattgtagctagttgaaaaaaggatttgaatgtcaagctttaggaatta

SEQ ID NO: 517183 - DNA, 499 bp, Homo sapiens
tgaatctaaaagagaaccagtaaaattgagataacaagtttattgcaaaataaatgacctgaaagccacaggcattgggtgcggtaggagaagggcaggtagtggtgactgaggtgactctgtgtttgggtttttgaaaagattgtagatttgaaggataaggagttcagagaagtagaaaggcaaataggggctgttataaataaggacagtggcatgagccaacggggttatctctcatatttaaagaacatggctacatctggtttccctataagttgattccttactgttattctgagttgaatgcatatcttttgtctcagtgaagcctgaatggcttttgatgtctctgatctggaaaggttrtttgtgtatctcagaataagtcattttgctaaaaaaggctactcctgagggagagcagtggaaaaaagagttggaaaagtggattgtagctagttgaaaaaaggatttgaatgtcaagctttaggaatta

SEQ ID NO: 517184 - DNA, 651 bp, Homo sapiens
gccagctgacaaaatgctacttaccaggtaaaaaccactrccaaaaatcagaatcacagaagagctatcagtaaaattattaatgccacaaattaacatgatgttaacagctgatttatgcatcaaaagagtatttatataatcacagcaaataactcaaatcttttacatcactagtaaactcaaaaaatatagcaaaaagcaataacattaaatttcattattgatctactagctttaactatttaatactagtacacttagttttgattactttgaagcaaaaacaataatcttttcttcttttaatgactttttcagttataggaaagatgatattaaaagaagatatacaaccatagcttagctacaggtataaaattgttttaaagatatgtaattgtgctattgaattaaactgaaaacataaatatcaactcatgattttgaaaaaaaaatcttttttatgtttggttttggtaaaaggagagacaaataagtcagaagaacagaaaatacagaaataggcaaactttcccatattcaattaatttttgagcaaggggccaaggtaattcaagagagcaataaataatcttttagaatgatgctggaactgccaaataattcatatggaaaacaaagaaacat

SEQ ID NO: 517185 - DNA, 651 bp, Homo sapiens
gccagctgacaaaatgctacttaccaggtaaaaaccactaccaaaaatcagaatcacagaagrgctatcagtaaaattattaatgccacaaattaacatgatgttaacagctgatttatgcatcaaaagagtatttatataatcacagcaaataactcaaatcttttacatcactagtaaactcaaaaaatatagcaaaaagcaataacattaaatttcattattgatctactagctttaactatttaatactagtacacttagttttgattactttgaagcaaaaacaataatcttttcttcttttaatgactttttcagttataggaaagatgatattaaaagaagatatacaaccatagcttagctacaggtataaaattgttttaaagatatgtaattgtgctattgaattaaactgaaaacataaatatcaactcatgattttgaaaaaaaaatcttttttatgtttggttttggtaaaaggagagacaaataagtcagaagaacagaaaatacagaaataggcaaactttcccatattcaattaatttttgagcaaggggccaaggtaattcaagagagcaataaataatcttttagaatgatgctggaactgccaaataattcatatggaaaacaaagaaacat

SEQ ID NO: 517186 - DNA, 651 bp, Homo sapiens
gccagctgacaaaatgctacttaccaggtaaaaaccactaccaaaaatcagaatcacagaagagctatcagtaaaattattaatgccacaaattaacatgatgttaacagctgatttatgcatcaaaagagtatttatataatcacagcaaataactcaaatcttttacatcactagtaaactcaaaaaatatagcaaaaagcaataacattaaatttcattattgatctactagctttaactatttaatactagtacacttagttttgattactttgaagcaaaaacaataatcttttcttcttttaatgactttttcagttayaggaaagatgatattaaaagaagatatacaaccatagcttagctacaggtataaaattgttttaaagatatgtaattgtgctattgaattaaactgaaaacataaatatcaactcatgattttgaaaaaaaaatcttttttatgtttggttttggtaaaaggagagacaaataagtcagaagaacagaaaatacagaaataggcaaactttcccatattcaattaatttttgagcaaggggccaaggtaattcaagagagcaataaataatcttttagaatgatgctggaactgccaaataattcatatggaaaacaaagaaacat

SEQ ID NO: 517187 - DNA, 640 bp, Homo sapiens
cagctgatttatgcatcaaaagagtatttatataatcacagcaaataactcaaatcttttacatcactagtaaactcaaaaaatatagcaaaaagcaataacattaaatttcattattgatctactagctttaactatttaatactagtacacttagttttgattactttgaagcaaaaacaataatcttttcttcttttaatgactttttcagttataggaaagatgayattaaaagaagatatacaaccatagcttagctacaggtataaaattgttttaaagatatgtaattgtgctattgaattaaactgaaaacataaatatcaactcatgattttgaaaaaaaaatcttttttatgtttggttttggtaaaaggagagacaaataagtcagaagaacagaaaatacagaaataggcaaactttcccatattcaattaatttttgagcaaggggccaaggtaattcaagagagcaataaataatcttttagaatgatgctggaactgccaaataattcatatggaaaacaaagaaacatgaatcttatctcgtattctcttatcatatgtgtaatttaaccataaatggattttttaaacctacaagtaacactgcggcaagcaaagatttttta

SEQ ID NO: 517188 - DNA, 640 bp, Homo sapiens
cagctgatttatgcatcaaaagagtatttatataatcacagcaaataactcaaatcttttacatcactagtaaactcaaaaaatatagcaaaaagcaataacattaaatttcattattgatctactagctttaactatttaatactagtacacttagttttgattactttgaagcaaaaacaataatcttttcttcttttaatgactttttcagttataggaaagatgatattaaaagaaratatacaaccatagcttagctacaggtataaaattgttttaaagatatgtaattgtgctattgaattaaactgaaaacataaatatcaactcatgattttgaaaaaaaaatcttttttatgtttggttttggtaaaaggagagacaaataagtcagaagaacagaaaatacagaaataggcaaactttcccatattcaattaatttttgagcaaggggccaaggtaattcaagagagcaataaataatcttttagaatgatgctggaactgccaaataattcatatggaaaacaaagaaacatgaatcttatctcgtattctcttatcatatgtgtaatttaaccataaatggattttttaaacctacaagtaacactgcggcaagcaaagatttttta

SEQ ID NO: 517189 - DNA, 640 bp, Homo sapiens
cagctgatttatgcatcaaaagagtatttatataatcacagcaaataactcaaatcttttacatcactagtaaactcaaaaaatatagcaaaaagcaataacattaaatttcattattgatctactagctttaactatttaatactagtacacttagttttgattactttgaagcaaaaacaataatcttttcttcttttaatgactttttcagttataggaaagatgatattaaaagaagatatacaacyatagcttagctacaggtataaaattgttttaaagatatgtaattgtgctattgaattaaactgaaaacataaatatcaactcatgattttgaaaaaaaaatcttttttatgtttggttttggtaaaaggagagacaaataagtcagaagaacagaaaatacagaaataggcaaactttcccatattcaattaatttttgagcaaggggccaaggtaattcaagagagcaataaataatcttttagaatgatgctggaactgccaaataattcatatggaaaacaaagaaacatgaatcttatctcgtattctcttatcatatgtgtaatttaaccataaatggattttttaaacctacaagtaacactgcggcaagcaaagatttttta

SEQ ID NO: 517190 - DNA, 557 bp, Homo sapiens
acagctgatttatgcatcaaaagagtatttatataatcacagcaaataactcaaatcttttacatcactagtaaactcaaaaaatatagcaaaaagcaataacattaaatttcattattgatctactagctttaactatttaatactagtacacttagttttgattactttgaagcaaaaacaataatcttttcttcttttaatgactttttcagttataggaaagatgatattaaaagaagatatacaaccatagcttagctacaggtataaaattgttttaaagatatgtaattgtgctattgaattaaactgaaaacataamtatcaactcatgattttgaaaaaaaaatcttttttatgtttggttttggtaaaaggagagacaaataagtcagaagaacagaaaatacagaaataggcaaactttcccatattcaattaatttttgagcaaggggccaaggtaattcaagagagcaataaataatcttttagaatgatgctggaactgccaaataattcatatggaaaacaaagaaacatgaatcttatctc

SEQ ID NO: 517191 - DNA, 651 bp, Homo sapiens
gccagctgacaaaatgctacttaccaggtaaaaaccactaccaaaaatcagaatcacagaagagctatcagtaaaattattaatgccacaaattaacatgatgttaacagctgatttatgcatcaaaagagtatttatataatcacagcaaataactcaaatcttttacatcactagtaaactcaaaaaatatagcaaaaagcaataacattaaatttcattattgatctactagctttaactatttaatactagtacacttagttttgattactttgaagcaaaaacaataatcttttcttcttttaatgactttttcagttataggaaagatgatattaaaagaagatatacaaccatagcttagctacaggtataaaattgttttaaagatatgtaattgtgctattgaattaaactgaaaacataaatatcaactcatgattttgaaaaaaaaatcttttttatgtttggttttggtaaaaggagagayaaataagtcagaagaacagaaaatacagaaataggcaaactttcccatattcaattaatttttgagcaaggggccaaggtaattcaagagagcaataaataatcttttagaatgatgctggaactgccaaataattcatatggaaaacaaagaaacat

SEQ ID NO: 517192 - DNA, 560 bp, Homo sapiens
tgcctcctggttcaagctgttctccctgcctcagcctcccaagtagctgggattacagttgtccaccaccatgcccagctaatttctgtatttttagtagagacggggtttcaccatattggtcaggctggtctcttaactcctgacctcaaatgatccactgcacccagctcattgtaacttattaatgtggytactaggaagttttaaggtgcatatgtggttctcattatatttctattaacaccgctttagaatattattttgaataacatcaaaatttcagtattagccaaatgattatcaaccaatattgttcagtctgggcttagttctatttgactaaatcaactaaatacccactggtttgttaataatttctagagtgattatgaaacaaaataaagctctgaactagaagttgtagaagaagacaaggaggcactgccaaaatcataaaatacaatcctctttctttaaaaagcttacaatcgaagcctggaaagacagttgaaacacaacaggttatgttcaaggtcaaaacataatacaactgaatt

SEQ ID NO: 517193 - DNA, 560 bp, Homo sapiens
tgcctcctggttcaagctgttctccctgcctcagcctcccaagtagctgggattacagttgtccaccaccatgcccagctaatttctgtatttttagtagagacggggtttcaccatattggtcaggctggtctcttaactcctgacctcaaatgatccactgcacccagctcattgtaacttattaatgtggctactaggaagttttaaggtgcatatgtggttctcattatatttctattarcaccgctttagaatattattttgaataacatcaaaatttcagtattagccaaatgattatcaaccaatattgttcagtctgggcttagttctatttgactaaatcaactaaatacccactggtttgttaataatttctagagtgattatgaaacaaaataaagctctgaactagaagttgtagaagaagacaaggaggcactgccaaaatcataaaatacaatcctctttctttaaaaagcttacaatcgaagcctggaaagacagttgaaacacaacaggttatgttcaaggtcaaaacataatacaactgaatt

SEQ ID NO: 517194 - DNA, 554 bp, Homo sapiens
attacaattgtgttagaacttcaacttctttatgtcggtgttgccacactgagaaccttcaaatcctcacccagtcacatgctctgattaccagcttttgaatttctgcatgtstatgtgcgtgtgtgcttttgtttgtgagtttgggtgtgtgtgatacctctgattctggaaaatgaataaagtcattaatcattttttggtgactctttggtagatacagggttttaaagcaatgattctgagctgttttagccttagaatcttttctactactacaattcattgcctacaggtaaccaacaacctgaattaatgttggtttgtttgttttgtattatacataagttcagggatacatgtgaagaacatgcaggttttttacataggcatacatgtgccatggtggtttactgtacccatcaacccatcagctacattaggtatttctactaatactatccctcccctaggaccccaaacccctgacaggccccggtgtgtgatgttcgcctccctgtgtccatgtgttctcattgttcaactcccactta

SEQ ID NO: 517195 - DNA, 513 bp, Homo sapiens
cattacaattgtgttagaacttcaacttctttatgtcggtgttgccacactgagaaccttcaaatcctcacccagtcacatgctctgattaccagcttttgaatttctgcatgtctatgtgcgtgtgtgcttttgtttgtgagtttgggtgtgtgtgatacctctgattctggaaaatgaataaagtcattaatcattttttggtgactctttggtagatacagggttttaaagcaatgattctgagctgttttagccttagaatcttttctactactacaattcattgcctacaggtaaccaacaacctgaattaatgttggttygtttgttttgtattatacataagttcagggatacatgtgaagaacatgcaggttttttacataggcatacatgtgccatggtggtttactgtacccatcaacccatcagctacattaggtatttctactaatactatccctcccctaggaccccaaacccctgacaggccccggtgtgtgatgttcg

SEQ ID NO: 517196 - DNA, 513 bp, Homo sapiens
cattacaattgtgttagaacttcaacttctttatgtcggtgttgccacactgagaaccttcaaatcctcacccagtcacatgctctgattaccagcttttgaatttctgcatgtctatgtgcgtgtgtgcttttgtttgtgagtttgggtgtgtgtgatacctctgattctggaaaatgaataaagtcattaatcattttttggtgactctttggtagatacagggttttaaagcaatgattctgagctgttttagccttagaatcttttctactactacaattcattgcctacaggtaaccaacaacctgaattaatgttggtttgtttgttttgtattatacataagttcagggatacatgtgaagaacatgcaggttttttacataggcatacatgtgccatggtggtttactgtacccatcaacccatcagctacattaggtatttctactaatactatccctcccctaggaccccaamcccctgacaggccccggtgtgtgatgttcg

SEQ ID NO: 517197 - DNA, 559 bp, Homo sapiens
gctgacattacaattgtgttagaacttcaacttctttatgtcggtgttgccacactgagaaccttcaaatcctcacccagtcacatgctctgattaccagcttttgaatttctgcatgtctatgtgcgtgtgtgcttttgtttgtgagtttgggtgtgtgtgatacctctgattctggaaaatgaataaagtcattaatcattttttggtgactctttggtagatacagggttttaaagcaatgattctgagctgttttagccttagaatcttttctactactacaattcattgcctacaggtaaccaacaacctgaattaatgttggtttgtttgttttgtattatacataagttcagggatacatgtgaagaacatgcaggttttttacataggcatacatgtgccatggtggtttactgtacccatcaacccatcagctacattaggtatttctactaatactatccctcccctaggaccccaaacccctgacaggccccggtgtgtgatgttcscctccctgtgtccatgtgttctcattgttcaactcccactt

SEQ ID NO: 517198 - DNA, 640 bp, Homo sapiens
actgtctgctggagaggaaaataggtaagataggctgctgagcctatgataataactcataatatgaggtgaaagcatagagacaaaatgagagatgatagatactcaaacggatgtgagtgaagaacagctgtgaacgtgtctatgggagataggaggccatggggctgcttttgtgaagaaggaatttgtacacgttagtcaagtgtcttgacacatttaacattttaataaagcaaaaccttatcttcagatgtgtcagaataggattgtacagatgtcacattacagtggtggtgaaaataatgaagaaacgaatgtagaggtcaaagaatcaagtccaccaatatggatattagatttatgaacgaaaaagagtgtatgtcaaattgggcaggtgtaaacaaagaaagcagctagctaggtaatttggaggtttctgatgaggagatttgtgggaagtcacttaatggaaagcagaggttagaaggatgarggtgacccacaggatctcatttcttctccctagaagttttgcatatcaatgatacatgcttcgttcacatcagtttttcttttttggaaagctgtgtttgctggtgtagttattttgaaaaagaacctgagagacccctgtggt

SEQ ID NO: 517199 - DNA, 544 bp, Homo sapiens
tcttctgaaatgcctgttaataattttcttcttttttattgcccttaatatgtacgtcgtttgcaggatttattccactgcattacctatttacatatctttttcctccattagactatgagatatttgtattctcagatgtctggcacagtccttggcwtcttacatattggataaagaatgaaaaaaatagctactgcacaagttgtaaaaatcactcagagaagaataagacagacaaaggataaaaaatagccatctctatctttgccaaagtaattctcaattttgaccagagattataaatgactcagatagagtcaatgctgtatttttccaccacatgttgacatataaaccagttctttgcactcttgttttagcaaatgataagcattcctgctcagatggtgtatctagaataacagagtctataactgagtaggaggggtgttttgactaggtttacaggtgaacaaggtggaaatctatcactatccaaaacaagctttggatttatggttttgaccaagtgtaaacagaa

SEQ ID NO: 517200 - DNA, 544 bp, Homo sapiens
tcttctgaaatgcctgttaataattttcttcttttttattgcccttaatatgtacgtcgtttgcaggatttattccactgcattacctatttacatatctttttcctccattagactatgagatatttgtattctcagatgtctggcacagtccttggcatcttacatattggataaagaatgaaaaaaatagctactgcacaagttgtaaaaatcactcagagaagaataagacagacaaaggataaaaaatagccatctctatctttgccaaagtaattctcaattttgaccagagattataaatgactcagatagagtcaatgctgtatttttccaccacatgttgacatataaaccagttctttgcactcttgttttagcaartgataagcattcctgctcagatggtgtatctagaataacagagtctataactgagtaggaggggtgttttgactaggtttacaggtgaacaaggtggaaatctatcactatccaaaacaagctttggatttatggttttgaccaagtgtaaacagaa

SEQ ID NO: 517201 - DNA, 570 bp, Homo sapiens
caagcttggcccagtaaggattaaccctgagttacgtgtgggaaagttaatacctaaaaagttctggcctttgtcaaaaaggaagaagagagggcaaccaagaatgtcagatccacctactctttggagtcttagaaaaaaaagwgccaggaatggtggctcaggcctgtaatcccagcattttgggaggccaaggcgggaggattgcttgagtccagaagttttagatcagcctgggcaacacagcaagacctcatctctacaaaaaaataaaaaaattagccatgtgtggtggtgtgaacctgtggtcccagctacttgggaggctgaggtgggaggattgcttgagcccagaaggttgaggctgcaatgaaccgtggtcgtgccactgcactgcagcctgggcgagagagcaagactctgtttcaaaaaaaaaaaaaagattaagcaaaaattaaacttgtttaattaagtatgtgtgtgaatcagtaaatgtttatgttatatgcaaataaagaactgggaataataagtgtagaaggaattgcattttgggagttgggggagaaa

SEQ ID NO: 517202 - DNA, 570 bp, Homo sapiens
caagcttggcccagtaaggattaaccctgagttacgtgtgggaaagttaatacctaaaaagttctggcctttgtcaaaaaggaagaagagagggcaaccaagaatgtcagatccacctactctttggagtcttagaaaaaaaagtgccaggaatggtggctcaggcctgtaatcccagcattttgggaggccaaggcgggaggattgcttgagtccagaagttttagatcagcctgggcaacacagcaagacctcatctctacaaaaaaataaaaaaattagccatgtgtggtggtgtgaacctgtggtcccagctacttgggaggctgaggtgggaggattgcttgagcccagaaggttgaggctgcaatgaaccgtggtcgtgccactgcactgcagcctgggygagagagcaagactctgtttcaaaaaaaaaaaaaagattaagcaaaaattaaacttgtttaattaagtatgtgtgtgaatcagtaaatgtttatgttatatgcaaataaagaactgggaataataagtgtagaaggaattgcattttgggagttgggggagaaa

SEQ ID NO: 517203 - DNA, 633 bp, Homo sapiens
ccttaggcttttcatgttaagcttttctcgctatatctgatttaaagtattttctcttttaaatgtaaatatttaaaatgtagctgatcctctccctctcctaattgaggtgactgggctagttcaagagactgtggcctgcagctcaccgttttgtctctggagtcagagtgccagccttggtacttactctgtgactggacactttataatatcaaagataygagatcatacctatctaatatctattcaataagacaatacatattaaaagatcagcacaaagccttgtacacagcagttgctcaatatgtgcttcctcctttttcctactattgaatcccaccagccaagaccagaactatatctgcagttggacaaagttgggtttatcccttgttgcagtgagggcttagcagtttgagtcaaacgggagctggaaaccacagtcggttaaaatggggtgataaatagaagcattaactatggcaaacagcaactccaagatgtaaggaaatccgtgcagtttcctagtggccccctagggctgagggagcccatccagggacaacctcggtgggtgtctgaccgtaatggaggcaaagctgcccctgtctcctctgacagtctcca

SEQ ID NO: 517204 - DNA, 633 bp, Homo sapiens
ccttaggcttttcatgttaagcttttctcgctatatctgatttaaagtattttctcttttaaatgtaaatatttaaaatgtagctgatcctctccctctcctaattgaggtgactgggctagttcaagagactgtggcctgcagctcaccgttttgtctctggagtcagagtgccagccttggtacttactctgtgactggacactttataatatcaaagatacgagatcatacctatctaatatctattcaataagacaatacatattaaaagatcagcacaaagccttgtacacagcagttgctcaatatgtgcttcctcctttttcctactattgaatcccaccagccaagaccagaactatatctgcagttggacaaagttgggtttatcccttgytgcagtgagggcttagcagtttgagtcaaacgggagctggaaaccacagtcggttaaaatggggtgataaatagaagcattaactatggcaaacagcaactccaagatgtaaggaaatccgtgcagtttcctagtggccccctagggctgagggagcccatccagggacaacctcggtgggtgtctgaccgtaatggaggcaaagctgcccctgtctcctctgacagtctcca

SEQ ID NO: 517205 - DNA, 492 bp, Homo sapiens
ctctttgtggacactcattgcccagacccccactatggtcgatcagtattaattgcattaacagatttaattataaaattatttcaactgcctgtttttttctgtcttccattctgtgttataatagtttgccaggttagctccaaacacttaatgtctgttacttactcaatataatcccacccagyacatcacctttactgggaaagaagcttgttaatctctgtttaccagtctgctcccagttattcaaggactctctgaacctaaaatgtataatatgacctaggtcagaatggcgttcccataagtgagcaccaacagtacgcagcggctgacacgtgtgaatccatctcttgttcccttgaactgtgaatcaacatggatgtagccatagtcatatctatcaccttttgtgagaaaaattttactttgaaaacaaagtaatagactgtacagttaaaggacagcagaatccagcaaaggtctgtc

SEQ ID NO: 517206 - DNA, 515 bp, Homo sapiens
cttttgtgctacaacagcagaggtgagtaactgcaacagagactctatggctctcaaagcctaaaatactcattgttttgctctttacaggaaaagtctgctgacccctcaagtagcaggtgaatatatttagagaattaaagacaaatgccaaaggaaaaaaaaatcttgaaaattggatggttgtttatcctaataagccatatagaactatttgacactttaaacaagatgattttattactttgataaaaataaaagctaagtaaaaaagaagtgttaatatgtattatcagaggcagcagacatttttttccaggacgataacaaagtataaaaacaaagcacctcccttctttgatgtgttccttttttcgatgtttggacaatttctttgcttacaatctaatttcctgttttgarcctatcaagtttcctctcttttggcttttttatttttagttttggttaaaaaccaaggcaggaagcaagaagtcaagcataaggttttaaat

SEQ ID NO: 517207 - DNA, 447 bp, Homo sapiens
aaaataaaccttgctctgcctcctggttcmtcagcagtaactcacccccccctcacccccccacgccccaattactgggcaatataagagataggaatttgcaaaggatagtgggtaagaggctaggtcggggtggggggagggaagagtttgtccatgggagagaaaattaggaagctgtaacttgactttcgtaaagcgctctgttcttctgtcttttccaaatgaaggacaacaggaagagcctgcttcatctggattttctaatagacacaggttctgcaaaaaggatcatgatgcacagaatgacacacttcaaatcagattataggtgtcagaaaccaaaaaattaagtcaccatagccagcccttactctaataattgtttaaatacatgatctttctaaatgctcacatcagcatattgtatgtctccatttatataac

SEQ ID NO: 517208 - DNA, 447 bp, Homo sapiens
aaaataaaccttgctctgcctcctggttcatcagcagtaactcacccccccctcacccccccacgccccaattactgggcaatataagagataggaatttgcaaaggatagtgggtaagaggctaggtcggggtggggggagggaagagtttgtccatgggagagaaaattaggaagctgtaacttgactttcrtaaagcgctctgttcttctgtcttttccaaatgaaggacaacaggaagagcctgcttcatctggattttctaatagacacaggttctgcaaaaaggatcatgatgcacagaatgacacacttcaaatcagattataggtgtcagaaaccaaaaaattaagtcaccatagccagcccttactctaataattgtttaaatacatgatctttctaaatgctcacatcagcatattgtatgtctccatttatataac

SEQ ID NO: 517209 - DNA, 570 bp, Homo sapiens
aatagtggattttatcgtatgtaaatttaagaaacattctgtagccataataaagattaaactaatcaagtttaaggacatttwaaaagtccccctgacccattgctctttcatctaagaaggtacaatagggaatgtgattaagagcttactcactgtggagacaccacagacataaggcttagaatttaacagagaagtgtcccgaaagtccaatgtacagcatatactctgcatggcgcagggccaagagctggctagaaatacataaaaacccattcctttttcactctccacagtggtgagtagagatttctgtgcaagaggttagaagtagctggtaacaaagctctaaagtggagagactggcaagacgcagatgagaagggttggatcttggacaaagtagcagagggaaatgcctgctgattctgagaagatcaaacaaaaagaatgtgactgaaagcagtggttcccaaacctcgtttcacatcgaaatcacctgattctcgctagatccagggctgtcagggaatctgacggtgaaggagcttcctgggtgattgtttt

SEQ ID NO: 517210 - DNA, 570 bp, Homo sapiens
aatagtggattttatcgtatgtaaatttaagaaacattctgtagccataataaagattaaactaatcaagtttaaggacatttaaaaagtccccctgacccattgctctttcatctaagaaggtacaatagggaatgtgattaagagcttactcactgtggagacaccacagacataaggcttagaatttaacagagaagtgtcccgaaagtccaatgtacagcatatactctgcatggcgcagggccaagagctggctagaaatacataaaaacccattcctttttcactctccacagtggtgagtagagatttctgtgcaagaggttagaagtagctggtaacaaagctctaaagtggagagactggcaagacrcagatgagaagggttggatcttggacaaagtagcagagggaaatgcctgctgattctgagaagatcaaacaaaaagaatgtgactgaaagcagtggttcccaaacctcgtttcacatcgaaatcacctgattctcgctagatccagggctgtcagggaatctgacggtgaaggagcttcctgggtgattgtttt

SEQ ID NO: 517211 - DNA, 570 bp, Homo sapiens
aatagtggattttatcgtatgtaaatttaagaaacattctgtagccataataaagattaaactaatcaagtttaaggacatttaaaaagtccccctgacccattgctctttcatctaagaaggtacaatagggaatgtgattaagagcttactcactgtggagacaccacagacataaggcttagaatttaacagagaagtgtcccgaaagtccaatgtacagcatatactctgcatggcgcagggccaagagctggctagaaatacataaaaacccattcctttttcactctccacagtggtgagtagagatttctgtgcaagaggttagaagtagctggtaacaaagctctaaagtggagagactggcaagacgcagatgagaagggttggatcttggacaaagtagcagagggaaatgcctgctgattctgagaagatcaaacaaaaagaatgtgactgaaagcagtggttcccaaacctcgtttcacatcgwaatcacctgattctcgctagatccagggctgtcagggaatctgacggtgaaggagcttcctgggtgattgtttt

SEQ ID NO: 517212 - DNA, 430 bp, Homo sapiens
tgcagctttaaggcccatttcctgcaggttcaaattacactaagggttttttacactcataagccttttgtggactagatctgtgctttcttttccaatacaattccctcaaaacccaaggtggcttctgatcaatttgcttctggtaagtttcatgtgctggtaaatgcaccctaagctcttccctagacatcaatcttagacttactcaatcatttgcctccaggcgcccatgcctctctctctcaaggtaatggcagctactttggggccagtggacacaaaaggcttgggtgggaagtaaagacccttaatttaaatgttacccrtgaggctaagtcagtttgctaaacagaaatcttactgccccattgttggtcaaagcggtttgcagtgttatttcttactctctagtgtaaggctctaaata

SEQ ID NO: 517213 - DNA, 641 bp, Homo sapiens
tgcagctttaaggcccatttcctgcaggttcaaattacactaagggttttttacactcataagccttttgtggactagatctgtgctttcttttccaatacaattccctcaaaacccaaggtggcttctgatcaatttgcttctggtaagtttcatgtgctggtaaatgcaccctaagctcttccctagacatcaatcttagacttactcaatcatttgcctccaggcgcccatgcctctctctctcaaggtaatggcagctactttggggccagtggacacaaaaggcttgggtgggaagtaaagacccttaatttaaatgttacccgtgaggctaagtcagtttgctaaacagaaatcttactgccccattgttggtcaaagcggtttgcagtgttatttcttactctctagtgtaaggctctaaatatctagacttttttctattcttttcattgattattgggaactggtcaattctttcctgaactcatctgctccatgacatgaggagcaaaaagcaactgacacacaygaccattctgtctcttttgaagaactttccttaaagctacttaggcatttagtctgccttccaggttatgtgaggtgacagttttacaaaatattttattgcatac

SEQ ID NO: 517214 - DNA, 626 bp, Homo sapiens
cattttgtcagataatagaaacctgttccacctacttctcctctagaagacagtttgacaagtctccttatcaacatgtaaataataaaaagggtatccagcaaaagagaatattagcagtttggggtggtgataaggacacagcacgtaacgagatttccccttgaggacaatgtcagtgtaaacagagaccccacggattacaaactgttgaattcagaggttattattaagacataaatttaaaagggtctttattgataggctaccttactatattagggctctctagcaggacagaactaataggatagatgcatatataaaggggagtgtattaaggaatattgactcacacgatcacaagctgagatcccacagtagaccgtctacaagctgaggaccaaggaagccagtcagattcctaaaacctcaaaagtagggaagccaacagtacagccttcagtctgtggtcgaaggtccaagagtaccaaagctgacgaatttggagtccaatgtttgagggcaggaagcatcccagcatgggagaaagatgaaggccagaagatgcagccagtccagtccttccacrttcccctacctgcttttatcctagctgcactggc

SEQ ID NO: 517215 - DNA, 505 bp, Homo sapiens
gacccttctgaggtctgcctgccagccaactccgtcccatctgggaagttggcccagtaacgggccaggtaggaaagggatgatggatgatccccagtctaggagaactgaggacattgtgaagaggactcaggattcccagttgccatgcagaggttatagcaaatataacttatgtgagctggcatctggctcagcctgacatagtggatagggctcagaagcagcttctccaagcagtgtggataccctaagtcagttggcagcccctgagcacttcctgacccaytgggcttagagctgggctggggaccaggaaccagcaacccagaaaggcttctctcaaaaactacgaaaattgccctggatctttaagttgggtaaacatgcccatgccccgctgcccagtggtggtgctagcgatggggaaccatcagtatagtgacccagtgccacctccctcacttcttcccaactggctcctatgccagttctgcctccaatt

SEQ ID NO: 517216 - DNA, 604 bp, Homo sapiens
tggcaattagtggagcctaatagctgggtgtgataccaaatgaggcagacagtttctttttttttttttttttctttttctttttttggagacagagtctctgtcgcccaggctggagtgcagtggcacaatctcggctcatgaggcagacagttttacagagatcagagaaggagataaagagagccctgtaaaaactaccttatctcagggcgattgtggatgtggccttcactctgggcctcaatcattttggttttcctctatgaataaaggaggtcaataattaaagtgagtactgcagggactaaggacaattctaaattactgcatttggggaattatgctcaaattagataacgtttggcaaagcaccttacaaactgtaaagtatgccgtgtatattgagtagcattattacttaacagggcaaccaatagaaggtagaaattgagaacataaattctagtgtggggcatgtggttcaacacccttcctaacattgaagkttacctaacttccctaagattcagtaatcttatctgtgaaatagatcatgtatcttccagggaaagtatttgtaaagtcctaagacattgcctgg

SEQ ID NO: 517217 - DNA, 590 bp, Homo sapiens
tgcatggggctggggagggagaactgcagggagtatgggaggggaagctgaggtgggcctgctcaagagaaggtgctgaaccatcccctgtcctgagaggtgccaggcctgcaggcagtggctcagaagctggggaggagagaggcatccagggttctactcagggagtcccagcatcgccaccctcctttgaaatctccctggttgaacccagttaacatacgctctccatcaaaacaaaacgaaacaaaacaaactagcaaaataggctgtccccartgcaagtgcaggtgccagaacatttctctcattctcaccccttcctgccagagggtaggtggctggagtgagggtgctggccctactcacacttcctgtgtcatggtgaccctctgagagcagcccagtcagtggggaaggaggaaggggctgggatgctcacagccggcagcccacacctggggagactcttcagcagagcaccttgcggccttactcctgcacgtctcctgcagtttgtaaggtgcattcagaactcactgtgtgcccagccctgagctcccagctaattgccccacccagggcctctg

SEQ ID NO: 517218 - DNA, 590 bp, Homo sapiens
tgcatggggctggggagggagaactgcagggagtatgggaggggaagctgaggtgggcctgctcaagagaaggtgctgaaccatcccctgtcctgagaggtgccaggcctgcaggcagtggctcagaagctggggaggagagaggcatccagggttctactcagggagtcccagcatcgccaccctcctttgaaatctccctggttgaacccagttaacatacgctctccatcaaaacaaaacgaaacaaaacaaactagcaaaataggctgtccccaatgcaagtgcaggtgccagaacatttctctcattcycaccccttcctgccagagggtaggtggctggagtgagggtgctggccctactcacacttcctgtgtcatggtgaccctctgagagcagcccagtcagtggggaaggaggaaggggctgggatgctcacagccggcagcccacacctggggagactcttcagcagagcaccttgcggccttactcctgcacgtctcctgcagtttgtaaggtgcattcagaactcactgtgtgcccagccctgagctcccagctaattgccccacccagggcctctg

SEQ ID NO: 517219 - DNA, 590 bp, Homo sapiens
tgcatggggctggggagggagaactgcagggagtatgggaggggaagctgaggtgggcctgctcaagagaaggtgctgaaccatcccctgtcctgagaggtgccaggcctgcaggcagtggctcagaagctggggaggagagaggcatccagggttctactcagggagtcccagcatcgccaccctcctttgaaatctccctggttgaacccagttaacatacgctctccatcaaaacaaaacgaaacaaaacaaactagcaaaataggctgtccccaatgcaagtgcaggtgccagaacatttctctcattctcaccccttcctgccagagggtaggtggctggagtgagggtgctggccctactcacacttcctgtgtcayggtgaccctctgagagcagcccagtcagtggggaaggaggaaggggctgggatgctcacagccggcagcccacacctggggagactcttcagcagagcaccttgcggccttactcctgcacgtctcctgcagtttgtaaggtgcattcagaactcactgtgtgcccagccctgagctcccagctaattgccccacccagggcctctg

SEQ ID NO: 517220 - DNA, 221 bp, Homo sapiens
tccacaacccctcactaacaacagcctgatttcctttcagaatttgcctctttcccattgtgtgtgttcttggtagaggaggattctaggctcctgcctcccattacaaaagccaaaaggccaaatccagctccccaygtctcctggtcctccccagggagcaggcacgtgccccaacctcttttctgagagtttgcatctggagggagggatgcagggtg

SEQ ID NO: 517221 - DNA, 221 bp, Homo sapiens
tccacaacccctcactaacaacagcctgatttcctttcagaatttgcctctttcccattgtgtgtgttcttggtagaggaggattctaggctcctgcctcccattacaaaagccaaaaggccaaatccagctccccacgtctcctggtcctccccagggagcaggcacgtgccccaacctcttttctgagagtttscatctggagggagggatgcagggtg

SEQ ID NO: 517222 - DNA, 596 bp, Homo sapiens
ctgttatttctaccagtttattgctgctgtgatggtagttactgtaggctagcaataaatatcgcttgaacactgagtgagtatcaagactcactccagctcccactcacttgaggggctgcgatagcagatgtgccaggccccgggcaggcagaaaactcctggctgttcactctgccccctggtcctcacaggaggtcaactcagccccagaggtgaggcgagcaagccccaacaccatgatccctctgcgtccaacctgccccttccaggcctgcctagctcctggagtcaccccagaaactccccccagcacacatactgtcatctcttcaccgtgaactgtatttaaaatgtaaataaaaaaaggcttttaggagatttaactgtttcccttggtatttaaattattcaattataactaaagctattaaaatacagttaattaaaattgttagattgttttcctttgcrctgatcgcagcattgccaacttctccctctagctgtttaattcctattaaaaatgataatgcctcgctttattcataaatgcagcaaccttcccgcacattcttcaagtgatctcctcaaca

SEQ ID NO: 517223 - DNA, 596 bp, Homo sapiens
ctgttatttctaccagtttattgctgctgtgatggtagttactgtaggctagcaataaatatcgcttgaacactgagtgagtatcaagactcactccagctcccactcacttgaggggctgcgatagcagatgtgccaggccccgggcaggcagaaaactcctggctgttcactctgccccctggtcctcacaggaggtcaactcagccccagaggtgaggcgagcaagccccaacaccatgatccctctgcgtccaacctgccccttccaggcctgcctagctcctggagtcaccccagaaactccccccagcacacatactgtcatctcttcaccgtgaactgtatttaaaatgtaaataaaaaaaggcttttaggagatttaactgtttcccttggtatttaaattattcaattataactaaagctattaaaatacagttaattaaaattgttagattgttttcctttgcactgatcgcagcattgccracttctccctctagctgtttaattcctattaaaaatgataatgcctcgctttattcataaatgcagcaaccttcccgcacattcttcaagtgatctcctcaaca

SEQ ID NO: 517224 - DNA, 456 bp, Homo sapiens
tctcactccagattctgtaataggtgtgctcatcacgaatcccagcaaagtccttgcaaaagagcacagatgtgcaatgcaggcatttgcgattcactgagatgaggtgtttgttygttctgggcccacatcagagacctgggttttgcagccattgtgttctggggtccatgagctgaagaagggattctgtgagtgatagtctggtttgcttgagcaaagatctgagaatctgccaggtaaggtttcagacagattcctgaaactatttttaagaagaagctactctagtagtaaatgctaagtgagtgtgtctccagtgggcaggtcctgggattggcctccaaatgtgacaaggagacttcaagaggctatcaggggacatggtgttacagttaacataagcagtacagtgttagaggatcttgaaaggcccgggcctcctcacttctatgg

SEQ ID NO: 517225 - DNA, 456 bp, Homo sapiens
tctcactccagattctgtaataggtgtgctcatcacgaatcccagcaaagtccttgcaaaagagcacagatgtgcaatgcaggcatttgcgattcactgagatgaggtgtttgttcgttctgggcccacatcagagacctgggttttgcagccattgtgttctggggtccatgagctgaagaagggattctgtgagtgatagtctggtttgcttgagcaaagatctgagaatctgccaggtaaggtttcagacagattcctgaaactatttttaagaagaagctactctagtagtaaatgctaartgagtgtgtctccagtgggcaggtcctgggattggcctccaaatgtgacaaggagacttcaagaggctatcaggggacatggtgttacagttaacataagcagtacagtgttagaggatcttgaaaggcccgggcctcctcacttctatgg

SEQ ID NO: 517226 - DNA, 631 bp, Homo sapiens
gacctcccagggctctcctgatgccaccagcagctccactgcaatcttcccagtgtgcaaggcagaccttctctctggatcacctgatctcagatttgccgcccctcagactcttgcctatccattcctatcctgctaacatgatccacattgcccgtgagtgatccctcacttgtctgctgctgttctgaaaaagcctcactttgtcccaggagccgygtaactctcatctaggaagctctggactctcccaggtctctgacactgccacgactgtacccatgtgctcaccccaaacatttcttgtccatcagctctgctcctactttggttcatctgggacaaagccaaagagagatggaatgatctaatcacataacctaatcgctgttgaatgaaaatggcaagatattggggaagaggtgcagggtcaagatgtacagaacatatggcccccaagcatatagaacacatgcccttgaatttcaaagtcttatgctcacctctcaagtaaaccaggaaacacagactacacagataatcagaactcaaaagaaaatgtatgtgaataatggaaacagacaaaatatggattctagaagctctgtcaataatctctggctggattccc

SEQ ID NO: 517227 - DNA, 624 bp, Homo sapiens
ctgcataagtctttgtaaagcattcataacatgacagatattacagatatttgtcattttacttccagtaagtgacagtcaaaattagctttttgtagtattggaagatagtgcgggtatagtgagtccagtcaaatttgtctctcatttctttaatgtacaagtgatttccagtcttgttaaggaccaaggactcgaaggatgtggggagtggatctggggttttactggaaattaaacgggcaggacaatggtatttcatagcatggtaggtttcagcaacgaaagagtccctggggccacatccttaaatcacactcctgatgctcagtccctacytcaccatcattaaacacagagccctcctcctctaagtgaagaccttcagagttggaggttcagtccttctgaagcaatctgttctgtttttagaaagcaccatttgaaacctgtttattatattgagcctaaagctcccactgtgtaatttctacccactgctcctgattctccactattgtggctttaagtcctaaaccttgtttttcttttctaaaacaacaaaaataatgatacttatggatcatatacgttgtgctaggcattgtggtaagcactttttat

SEQ ID NO: 517228 - DNA, 572 bp, Homo sapiens
gtgaagccgggcatggtggcttacacctgtaatcccagaactttgggaggccaaggtgggaaaatcatttgagcccaggagtttgagaccagcctgggcaacaaagcacaaagtgaggctccaactctacaaaaaaaaaaaaaaaaattagccaggcctggtggtgaacactgtagtcccagctactcatgaggctgaggtgagaggattgcttgagcccaggaggttgaaattgcagggagccgtgatcatgccactgcactccagcctgggtggcagagcaagacctgtcttaaatgaataaataaataagcattcctccccaaatgctccagccatgcttgaggaataagcaatccagggtagatagggcagaaatctatttctgggagtgctaagtcatgaagactggataaggtckcaaacccacaccccagctcaccacttcccttgccccctatagtattctatttccttgaaaagccaaagtgtggttggtactgccaatctgtgcagagcagggagcaggacttctctttggcatcagcaggaacaacagtgatatcacaaat

SEQ ID NO: 517229 - DNA, 615 bp, Homo sapiens
aagcagtttggcaatctgtatcaaaagccaagggatgtccattcctgccatcagggtcttcctcttctgggaattgatgccaagaacataattgacaaagatgtatattcaaagatatttgccatggtattatttgtaacaatgaataaagggcaatgccaaatgtcagtggtctttgggtttctctctgccctggctccctcttcaaatcactctacatgctccaaagttaccaaccrtcagtccatcccctccacagccatgtcttaagctcagacccgtttcttgagctcctgcttggtgatcccaggatgtcctttagacaacccccttagatgtagagagctgaattcaccttccccccacctcctcctctttcaacctctcttatttgaatacagcaaatggcattcccaccacctaacccctcaagccaaacattcagacgacatttttgtctccttcccatccctcaacttcccagcccgttaatcaccatctccaaaatctctctaaaatccgcctgtttctctccaaccccaccaccactgacctggtctaagccaccagcaccctcccctgaatgaccactgaaatgtaaattctacaaaatgg

SEQ ID NO: 517230 - DNA, 615 bp, Homo sapiens
aagcagtttggcaatctgtatcaaaagccaagggatgtccattcctgccatcagggtcttcctcttctgggaattgatgccaagaacataattgacaaagatgtatattcaaagatatttgccatggtattatttgtaacaatgaataaagggcaatgccaaatgtcagtggtctttgggtttctctctgccctggctccctcttcaaatcactctacatgctccaaagttaccaaccatcagtccatcccctccacagccatgtcttaagctcagacccgtttcttgagctcctgcttggtgatcccaggatgtcctttagacaacccccttagatgtagagagctgaattcaccttccccccacctcctcctctttcaacctctcttatttgaatacagcaaatggcattcccaccacctaacccctcaagccaaacattcagacracatttttgtctccttcccatccctcaacttcccagcccgttaatcaccatctccaaaatctctctaaaatccgcctgtttctctccaaccccaccaccactgacctggtctaagccaccagcaccctcccctgaatgaccactgaaatgtaaattctacaaaatgg

SEQ ID NO: 517231 - DNA, 461 bp, Homo sapiens
gattaaaccaagggtagacaactgacaaggaaccagtcagactctctccagaggacttgaaagtgggagagaaattcagaggctgttaagttagagctgtatagttaagagaagacagtatacacagagcaatgaagcagacatgagagacaagacactatgcgatacaacagaagaggamgcatctgatactgaaccatgtctggttccaaatctttgtgaagtccagccgcacttcctacctctgcatatgctgaatcctctgggtcactttctttgtcttttgcttaagtttctgacttataactaagacattcttagctaaaataattcttctaacatgcaattttgaccctgaatctcccttgcttaaaatcataccacagttaatttctgttcctaagataaaatccaaggcttcattagggttgtggaccaagaactaggggattccaggaact

SEQ ID NO: 517232 - DNA, 524 bp, Homo sapiens
gctgaaacttctattaactaaaattggcttaattttaagggtgcacaaataaccatgatacctcaatcaatattaaattttcctttgtgggcttggtacttcagatatttcttggtccaacaccttctagtcattcagttaaattttcaagttaggaaaacaatattgaaataacatttggtgattatgtagcagggaggattctagaaagcaattttttttttttaaaagccagctactaaactgcactaataaagctttccaaatatttgagctccttcagactagtcagttgttaacagggtaaaaaaagaaaaaaaawttttcaaccctatatggcagtgttttccaaactaatgagctccaacacaccgatgggccatgaaatgaatttggtggatttgaattttttttagtgaaatagaagagaataaagaatattaggatgtaactcatgtggtaaggataaatatttgcaaaacttatttttatactgttcaatcagatttggcccaaagctgcct

SEQ ID NO: 517233 - DNA, 655 bp, Homo sapiens
tctattaactaaaattggcttaattttaagggtgcacaaataaccatgatacctcaatcaatattaaattttcctttgtgggcttggtacttcagatatttcttggtccaacaccttctagtcattcagttaaattttcaagttaggaaaacaatattgaaataacatttggtgattatgtagcagggaggattctagaaagcaattttttttttttaaaagccagctactaaactgcactaataaagctttccaaatatttgagctccttcagactagtcagttgttaacagggtaaaaaaagaaaaaaaatttttcaaccctatatggcagtgttttccaaactaatgagctccaacacaccgatgggycatgaaatgaatttggtggatttgaattttttttagtgaaatagaagagaataaagaatattaggatgtaactcatgtggtaaggataaatatttgcaaaacttatttttatactgttcaatcagatttggcccaaagctgcctccatacactattaactgtactctagcttgatgtgtaaacaagttataacctaacttaggagtatacccttataaccacacatctgagtctcagccaatcccaggttaaaagctgctagattatgcccaaataaggcaaac

SEQ ID NO: 517234 - DNA, 665 bp, Homo sapiens
acaagtagatatcgaggaaagatgaaaaatacaatgacgacaaatttttcagggtagagttcagattttatggataactaaagatgaaaactaaggacaaacactcttcctttatggtatttttcttacaaccatataatcattagaccacacataatttataaaacacattacagaaaataagaaagatttcttrccagctccagctaccaaagccaaaggtggggagaaaagagaaataggaatagataaatgaattctctatgagccgcatataaagaaaaggaggttacctttctgccaggggactcacattcaattatggttatggcaaccccagctcacctaggactcctgctcccatgtgggactgaaggcaaaatgaccttaaaattttcagtactcaggaggctgaggcgtgaggatggctagacgccaagagttcaaggctgcagtgcattatgttcaggccagtgaatagctactgcactccagtctgggcaacacagacgaggtccccaatttctaagaaaatacaatacgcacgcctaggctgctggcggtactcacgcctagtaactcccaatcctctttgggcaaggccgaagtgggcggatcatgaagtcaggagttcgagaccagcctggccaacatggtgaaaccct

SEQ ID NO: 517235 - DNA, 585 bp, Homo sapiens
ctgcgtgggagggtgaggcagaagaatcgcttgagccggagagtcagaggttgcagtgagccgagatcacgctagtgcactccagcctgggcgacagagcgagacagtctcaaaaaataaaaagacaagatggcctgaaaagcaccttcaccaaagacttatgtaaatgtaagccaatggtaagtttctagtgactcagcactccctctccaggtacagtgaggtaaagacccttacaaatgaagatttcttttgtagatgtaaatttcttttataaatagccaactaaatgacagaaagctgtattttggacactgattttgttgaatgggtggtctttttatgttcacttttgttagcttaaaaattactgagttcarctgggaaagcccattaagaaaaagggcaaaaaaagcataatatatgtgtggactcagcatggatagctctgataaagaagcaagcctgaagggttacccctaggttaaagacctcttctaaaaaagaagggtttgaaagaacagcccaaataaaatgtacaccttcaaccaaagagtggtataggtccagattattagtaggact

SEQ ID NO: 517236 - DNA, 594 bp, Homo sapiens
tgacatttagggcccacaagataatccaggacaatctcatctcagaatctttaatgacatctgccaaaatttcccataaaagataacattcgcagcttccaaaggttaggacccagtatcttcarggtagcatttttgaacctgccactcaagggaagaaaatgcttcaaggattcaattgatcagcaatgtcaggtgtttctgaaagattaaatgtgaatttaaaaagtccaatcagtagcctcagagagtggaagccagattgagaggtgttaggagttaataaggtgttttgtagctagacgttgcaagatttcttgattgctttttctctgtgagatggaattattggagattgaaattttgaaaagaatggagaaaattttgtgttggagagaatggaaagtaattttaacaaagagggcattattgtatactcattgtatactgttgataccatgcatgaaatgatagctgaatcgtctgtcctcttgtgttactttgtccatttgcacttggatatagctatggagaaagcagcttgctgggttcatctggggttggtattttgcaagacaggaatctaaggagttt

SEQ ID NO: 517237 - DNA, 594 bp, Homo sapiens
tgacatttagggcccacaagataatccaggacaatctcatctcagaatctttaatgacatctgccaaaatttcccataaaagataacattcgcagcttccaaaggttaggacccagtatcttcaaggtagcatttttgaacctgccactcaagggaagaaaatgcttcaaggattcaattgatcagcaatgtcaggtgtttctgaaagattaaatgtgaattwaaaaagtccaatcagtagcctcagagagtggaagccagattgagaggtgttaggagttaataaggtgttttgtagctagacgttgcaagatttcttgattgctttttctctgtgagatggaattattggagattgaaattttgaaaagaatggagaaaattttgtgttggagagaatggaaagtaattttaacaaagagggcattattgtatactcattgtatactgttgataccatgcatgaaatgatagctgaatcgtctgtcctcttgtgttactttgtccatttgcacttggatatagctatggagaaagcagcttgctgggttcatctggggttggtattttgcaagacaggaatctaaggagttt

SEQ ID NO: 517238 - DNA, 544 bp, Homo sapiens
tgttcataactcaatctttgtcattacaaggaaattttgctgtactatctgcaaaacttacatctcaaacatcctaggctcagaccagccactgactcatatttktccagcttattccctcaagttacccaaccctgacaattttttgtgctcatcaagacctcccatccatgatccatgaaccctaccacttttccactgttctgtacttctctcactctccagcttagagttcatggtccatgtgtcaggaactcctcctaagcatgcacaagcatctgttttccccttcctcctgggcacacatccagaccacacttcccagcctcccttgcagctaggtggagtcatgtgacagagttccagccaatgggacatgagtagataggatgtgtgcacaggagggggattcagaatggcagtgatgataaccacagtgaccttggaagcctgggaccctaacttgcacccacctagaacattttccctggggtattaaggaaaaggaaatctatttaatctgagccattgcattttgttacat

SEQ ID NO: 517239 - DNA, 623 bp, Homo sapiens
ccatttatggtacaaatacagtagaagtgaaaaatataggaacagttatggccaataatgttatttttagaaggaaaatagaaatgaaagaaattgctgaaatataatgcccatgaatagagtttgtctgcttttttgacaaagtggagtttttcctgttgcttaggacagtgacaccacgtaggttccaaagaagctgttgaatacagtggctgcccatcagccaaaagataataaataataagctaagatgaatagaaataagtcacctttgaagatctttacataaaaaaggagtttgaaatgtcacattagaaggaacaggtatcagaattgagtctgaycttcaggagctcatttgagatactaaacaattagttcaaccaccgtgtgttgaggccccgctactgctggggctggtctggggccataaagcagggctgccctgcttgagtgaggtggaggggaacaaggaaacaggtgtgatctttgccattgctgaaagaaaaataaaatctcaggaccccaaactcactatgctgaaaggaaaagttaagcttggaaactgagtctcacacacacacaactgcctttccttttgttcctaaatagatatctcccca

SEQ ID NO: 517240 - DNA, 563 bp, Homo sapiens
tgggatatcttgagaataaatgtctgagaaacctgtcccaaatcagaatggatattttaggctggcatatagccccctattcctttaaagttcatgcatatacttcacttccctgatggaaaaggctataaatctggaaggatcacagatatctcatttaatttgctgaagacacttaggactcagaatggtgcagattgctgtgtctggggcttgcatagctgamgggttgcggaactgggactgcaattcagatctttcagcctgccatcaggtgagggcttttctaagcatcactgccccaaaggatggaatgaatgccttccatggctgtggatcatctgggcaggggtaattattgcctctcttctcaggatggaggattgacagacaatcatccaaacactcattctctggccactgtgtgaccaatggcaagcatctgtgaagcactgaaaggctggggaaagagggtaagggagttagggctctaagtagcgtcggcgacaccagagctgtgccagagccttctggtgtcctttatcttcatattctctttccag

SEQ ID NO: 517241 - DNA, 594 bp, Homo sapiens
cccatcatccaggccacgaacattttcattgcgaccttgtcagtcaccttctatctgctattattatatccactcctgcccctctaaatcattctccacacagcaaaccagagcttcaaaatacataaagcaaaaactgttagaactgaaaggagaaatagacatatctgcaattatagttggaggcatcaatagcctctttaaacaattgatggaacaactagacagaaaatcagcaaggatatagaagaacctagcaacaccatcaaataacaggaatgaattgacacwtacagaacactccaaccaataacagaagaatacacaggccaggcgcggtggctcactcctgtaatcccaactctttgggaggacgaggcaggtgggtcacctgaggtaatgagttcaagactagcctggccaacgtggcaaaaccctgtctctactaaaaatacaaaaattagtcaggcatggtggtgcatgcctgtaatcccagctacttgggaggttgaggcatgagaattgcttggacccaggaggcagatgttgtagtgaggtgagattgtgccactgcactccagccttggtgacaga

SEQ ID NO: 517242 - DNA, 594 bp, Homo sapiens
cccatcatccaggccacgaacattttcattgcgaccttgtcagtcaccttctatctgctattattatatccactcctgcccctctaaatcattctccacacagcaaaccagagcttcaaaatacataaagcaaaaactgttagaactgaaaggagaaatagacatatctgcaattatagttggaggcatcaatagcctctttaaacaattgatggaacaactagacagaaaatcagcaaggatatagaagaacctagcaacaccatcaaataacaggaatgaattgacacatacagaacactccaaccaataacagaagaatacacaggccaggcgcrgtggctcactcctgtaatcccaactctttgggaggacgaggcaggtgggtcacctgaggtaatgagttcaagactagcctggccaacgtggcaaaaccctgtctctactaaaaatacaaaaattagtcaggcatggtggtgcatgcctgtaatcccagctacttgggaggttgaggcatgagaattgcttggacccaggaggcagatgttgtagtgaggtgagattgtgccactgcactccagccttggtgacaga

SEQ ID NO: 517243 - DNA, 594 bp, Homo sapiens
cccatcatccaggccacgaacattttcattgcgaccttgtcagtcaccttctatctgctattattatatccactcctgcccctctaaatcattctccacacagcaaaccagagcttcaaaatacataaagcaaaaactgttagaactgaaaggagaaatagacatatctgcaattatagttggaggcatcaatagcctctttaaacaattgatggaacaactagacagaaaatcagcaaggatatagaagaacctagcaacaccatcaaataacaggaatgaattgacacatacagaacactccaaccaataacagaagaatacacaggccaggcgcggtsgctcactcctgtaatcccaactctttgggaggacgaggcaggtgggtcacctgaggtaatgagttcaagactagcctggccaacgtggcaaaaccctgtctctactaaaaatacaaaaattagtcaggcatggtggtgcatgcctgtaatcccagctacttgggaggttgaggcatgagaattgcttggacccaggaggcagatgttgtagtgaggtgagattgtgccactgcactccagccttggtgacaga

SEQ ID NO: 517244 - DNA, 691 bp, Homo sapiens
cagctgctctggtgggtggggtgctggcctaccagggtgcagcagggacaccaggaagctcagcacctcactcagcacctgctcttcaggctgaagctggcagcgggaccacctccacttgcctaggactgcagagcacaacctggcaccctcctgaagatgacgcacatgatcatgacccacaggacccagcggctccacccccaggggtgagcctgaaagaagcaaaaacacacagccacacacacacacacagccacacacacagccacacacrcacacacagccacacacacacagccacacacacagccacacacacacacagccacacagagactgcaggaaagctcacagcagctttgtgcacagcagccaaaaggcagagacagctcacatgtccacagactgacagatggacaaacaccatatgttcacccacatggggagcatcattcagcatagaaaggaatggggcacaggcacgcgccaacacgggggcatcgtgaaagcactgtgctcggcgaaggaagccacacacgaccgcctgccagaacacatgctacacacaacggtgtgtcacacacaaccacacatcacacggaacacgttacatgcaatggtgtatcacacacaaccacgtcacacggaccacatggaatgcatgttacaatcataaatcacacaaacc

SEQ ID NO: 517245 - DNA, 542 bp, Homo sapiens
atgtgttggacaaggaagggacaggcgggtggggctggtgactaaaagctttttagagtatcttgtaagattgtctcttggaatagttagaaacttccctctgccagaggatttagtatctgcccccacactatgaaacattttgctctccacccattcatcttctaaaaatcgttggccttaacacaatctctattgttaagatatggagacatagattgctgtaaatacctccccaaaacacagtgagattatggcagagaggaaattgagacctctttttccctaagatactacytcctctacaagacttggtttgctcttgctttccacactttgttgtttctcaaacttccttgtgtgctcagatatccagaggacatgggaaaatataattaactgggaagactgaagtttggctataattatcaatttgggcaatccattgtggcaagagccatgcagggtatacaaggtcttatacaaaacagtcttttaaacctatattaagttccaccgtttccacagactttcctcagttc

SEQ ID NO: 517246 - DNA, 659 bp, Homo sapiens
aattatttatcacaatatatggcactttaaaatttatcatcttatctttttctctgttttatactgcaacctttttaagtgtaactacattctcttataagtatgtcctcagagttctaacatgaatcagatgaacattaattaaattatgaattaaattagactaggtggttttagacaatttgagacaccatagcagtgatagactttgagtcccattaggattttaatatgcccctttagtcaaaaattgcttctggagctagactgactaaattgaatcctggcttcttcatctacaaggtgtatgaccctggaccacttacttaagctctcatattcctcacactaaattaatgataatgttgcctatttaccgcatacagttggtaagtttaattgagcctrtcgtgtagaacatgatgaggggcacactggagatgctgaaaaagtagattattttgtttcgttgaacaatttacatatacatatttaaaatcattttaagattgccctattatctctagttcctcaggtgtgaattcctcgccttagtggcctatggattatattccttgatgatagactgctttttgtgttttgtaacttttgccttaagcacatcttctgtgaaagttgtctttcttggagactaagca

SEQ ID NO: 517247 - DNA, 659 bp, Homo sapiens
aattatttatcacaatatatggcactttaaaatttatcatcttatctttttctctgttttatactgcaacctttttaagtgtaactacattctcttataagtatgtcctcagagttctaacatgaatcagatgaacattaattaaattatgaattaaattagactaggtggttttagacaatttgagacaccatagcagtgatagactttgagtcccattaggattttaatatgcccctttagtcaaaaattgcttctggagctagactgactaaattgaatcctggcttcttcatctacaaggtgtatgaccctggaccacttacttaagctctcatattcctcacactaaattaatgataatgttgcctatttaccgcatacagttggtaagtttaattgagcctatcrtgtagaacatgatgaggggcacactggagatgctgaaaaagtagattattttgtttcgttgaacaatttacatatacatatttaaaatcattttaagattgccctattatctctagttcctcaggtgtgaattcctcgccttagtggcctatggattatattccttgatgatagactgctttttgtgttttgtaacttttgccttaagcacatcttctgtgaaagttgtctttcttggagactaagca

SEQ ID NO: 517248 - DNA, 659 bp, Homo sapiens
aattatttatcacaatatatggcactttaaaatttatcatcttatctttttctctgttttatactgcaacctttttaagtgtaactacattctcttataagtatgtcctcagagttctaacatgaatcagatgaacattaattaaattatgaattaaattagactaggtggttttagacaatttgagacaccatagcagtgatagactttgagtcccattaggattttaatatgcccctttagtcaaaaattgcttctggagctagactgactaaattgaatcctggcttcttcatctacaaggtgtatgaccctggaccacttacttaagctctcatattcctcacactaaattaatgataatgttgcctatttaccgcatacagttggtaagtttaattgagcctatcgtgtagaacatgatgaggggcacactggagatgctgaaaaagtagattattttgtttcgttgaacaatttacatatacatatttaaaatcattttaagattgccctattatctctagttcctcaggtgtgaattcctcrccttagtggcctatggattatattccttgatgatagactgctttttgtgttttgtaacttttgccttaagcacatcttctgtgaaagttgtctttcttggagactaagca

SEQ ID NO: 517249 - DNA, 600 bp, Homo sapiens
ctgccatttcagaaagatggtttattttgtaaacagatggtgtaaacttacagtatcaataccgtacagaactgtaaatatttctcttcytcttgattttctttttttcttttttcttttttttttggagctggagtctcactgtcgcctaggctggagtgcagtggcacgatattggctcactgcaacctctgcctcctgggttcaagcaattctcctgcctcagcctctggagtagctgggattacaggcatgtgccaccacgcccagctaatttttgtatttttagtagagacggggtttcaccatgttggccaggctggtctcaaactgctgacctagtgatccacccccccttggcctcccaaagtgctgggattacaggcgtgagccactgcacctggcccctcttggtccctcttggctgggcagggcggtagcctgtttccgctcgggcattctgggaagtgtagtgcagaagccgttgcaaccttgtgtacttccgctgcaggagggcgaagcagccgtcatctatcccctctgggaggtgagtcagcgcggaacctctgcatctacggcgagctttcctggcctgggcgt

SEQ ID NO: 517250 - DNA, 600 bp, Homo sapiens
cctgccatttcagaaagatggtttattttgtaaacagatggtgtaaacttacagtatcaataccgtacagaactgtaaatatttctcttcttcttgattttctttttttcttttttcttttttttttggagctggagtctcactgtcgcctaggctggagtgcagtggcacgatattggctcactgcaacctctgcctccygggttcaagcaattctcctgcctcagcctctggagtagctgggattacaggcatgtgccaccacgcccagctaatttttgtatttttagtagagacggggtttcaccatgttggccaggctggtctcaaactgctgacctagtgatccacccccccttggcctcccaaagtgctgggattacaggcgtgagccactgcacctggcccctcttggtccctcttggctgggcagggcggtagcctgtttccgctcgggcattctgggaagtgtagtgcagaagccgttgcaaccttgtgtacttccgctgcaggagggcgaagcagccgtcatctatcccctctgggaggtgagtcagcgcggaacctctgcatctacggcgagctttcctggcctgggcg

SEQ ID NO: 517251 - DNA, 513 bp, Homo sapiens
cctcatacataatgcatgtgagctcgctttaagcataagtgaaggagtggaaaaatcctggagatagaaatcaaggggtatacatgtggatgtaaaaaatcaacaaagattcttttaagaaaaggtgtgtatgggtagggaacaatagcatgacagcagtgcggcctctaacagtctggaaccagttaggamaaagagcaggattgagcgccattccattcatagacaccgtggtgatattttgagtacattaggttaaaaggctttcttcagcaaaatctatctctagagatagatttgatttttataatcaaatctactagagatagatttgatttttataatcaaatctactagagatagatttgatttttataatcaaatctactagagatagatttgatttttataatcaaatctactagagatagatttgatttttatacttaatgttctagactgtatcttttcaggatgctaggtactttatgaagatccatgctgtctcaattt

SEQ ID NO: 517252 - DNA, 663 bp, Homo sapiens
tgcagtaaggctgtaaatgtttcccctgcggaatcctgggaactgtaggtccaatcgttctaggtagttgtaggcacttccggctcgaggaaggcagtgctgtggaattctgggaagcgtagtccaggtcctcctgatactcgcaggcacttccgcccaggaagacgacgtagcagccatcttttccctggctttggtgattcaggtcagcttctcaggaacctttcaaacttccccgaaatgcacttgtggtcagcagctagcggtcttttgtttggggaaaaaaaggagtagcggctaagagcggaggtttgaggggccaggatgctgttttgcgtttccctgggcggagcttgttagaattgggggcgtactggcttcgggcggctggggtgatgcttcgtcgggtttgaaggtctctcgggctgttcgctccctcattgtgactcccccacctaatgagccagccctaccacttcatacagtatcacattgagcgagttagttaatccccgtgccttcgtttgctgttctgaaggaaaataaaagcaaaaacttcctaatagaatgttttgagagaaaacgaggtaatacaaaamgtgtaaaactgcctggcacgtgaattaccaatactactgtaattttcctagaaactcccgttct

SEQ ID NO: 517253 - DNA, 506 bp, Homo sapiens
aaaatgggagattcagagaggttaagtaatttgcccaaggtcacatggcttgataaatgagaaaaactagattcaaaactaggtttgtatgactctacagtctgtgcacaaagtcccrttgattttatctcggaaatgtttgtctcctgatcccttatttccatacctgttgctagtgccatagtttaagatctctaatcatctttcgcaagcaatactaccaacctcctaaatttatttctttccaggatcttcccttccagtccaccttatctcatcttcataaaacatactgttgggttttttgtttctctgttttgagactctgggtgactctgtcacccaagcttgagtgcaatggtgtgatcacgactcactgcagcctcgaccaccttgactgaagagatttcaccttcggcccctaagtaggtgggactacactacaagtgtgtgccactgcactggctaaaatctttattttctgtagagaaagggtctccctatgc

SEQ ID NO: 517254 - DNA, 506 bp, Homo sapiens
aaaatgggagattcagagaggttaagtaatttgcccaaggtcacatggcttgataaatgagaaaaactagattcaaaactaggtttgtatgactctacagtctgtgcacaaagtcccgttgattttatctcrgaaatgtttgtctcctgatcccttatttccatacctgttgctagtgccatagtttaagatctctaatcatctttcgcaagcaatactaccaacctcctaaatttatttctttccaggatcttcccttccagtccaccttatctcatcttcataaaacatactgttgggttttttgtttctctgttttgagactctgggtgactctgtcacccaagcttgagtgcaatggtgtgatcacgactcactgcagcctcgaccaccttgactgaagagatttcaccttcggcccctaagtaggtgggactacactacaagtgtgtgccactgcactggctaaaatctttattttctgtagagaaagggtctccctatgc

SEQ ID NO: 517255 - DNA, 591 bp, Homo sapiens
gcatagtgagactccatctgtgtgtaaataaataaatgaataaataaagtttaaaaaatttttaaaaaggcctaagtacaccattggaaattctaatctaaaagatggatcctatacattagaaagatccctaaattttaaaaaagattaaatgggatgaaggggtggttctggatctttgtaaacagtggccctatttgtatttataggaagattaaattaaaagaatgacacgtaatagtatcatggctattcttagaaattctcttgacaaaattaaagagcaacagtctgatctaaaacaaatttaaaatgatttgtactctcaaattgccagttttggatcctttgtaggatttgcaacaataactactctatcttgtctagttaaaattctayactttcaccaccgtggcctgggtttgattcccagtcagggaactagtcccttttgttttgatatttctgtgacttttgacttttgggggtacccgtttgttattgatccttttactttccatggacaacttctgatttcttgtcttcttctgtctgtagggacacacaggacttttaggtctttgtgtgtag

SEQ ID NO: 517256 - DNA, 626 bp, Homo sapiens
cccttgacaagagctgtatagygcctactcttaaatgagttgaggccagagcagcggctcatgcctgtaatcccagcactttgggaggcttaagtgagaggattccttgaagccaggagttcgcgaccagcctgggcaacatagtaagattccatctctaaaaaaaaaagtgtaaaaaaactagctaggtgtcatggtgtgcacctgcagtcccagctactctgtaggctgattcaggggggatcacttgagcccaggaagtcgaggctgtagtgagttataatcgtgccactgtgctccagcctgggtgacagaacgagagcttgtctctaaaaaacacaaaacaaaacaaaatatggttgagattcaagaatacccagatattagagaaaaaaaaattactaaatgtaagacagcaatcaaaataaaaagcaaacaagaaatagaggcaatgtagggaacaaaagacaacaaaaaagaaaaacgagtgagtatcctcatagatgagtgaagatatttcacttatgaaacaagaacaggataatataaaaaacaacttgcagaatgagaaaaagctttttgatttagaaatataacaaatatgtttagtagagaaaaagatacat

SEQ ID NO: 517257 - DNA, 590 bp, Homo sapiens
agcattctatagctaaatatattgagggctgggcagggccaggcattctgatgcttacgctaggggaagatctttgaacacctgacttccctgggagaccaagagcgccacacagtgacttgaaagggccaggactgccctgtaacatggatgcccacaatgcagggtctctatcctgcatcccckgccctgctaaggggaaaagtcgttcagagcgggccacactggaaaaagagcaggccaggtcccaacataggaatttatctcacatcaaacctcccagaaggttaattataaaaaggattttaattctttgaggaacttttcttatatgaattatgttttttaaaagtagacaaattaaactctacttgagcaaagaactgttttcaaagagggcacccccataaccagaataggtccagagcaattctcaggctgccacctggtgggataacatttatggacaggaaaaggaaagtgatgtacagaaaagcaaatgaggtagagaaatagctggattccatacagcctggcgtttgccttctttgaacagggtttcaaaggctgaccacctgtgacggcctgaa

SEQ ID NO: 517258 - DNA, 590 bp, Homo sapiens
agcattctatagctaaatatattgagggctgggcagggccaggcattctgatgcttacgctaggggaagatctttgaacacctgacttccctgggagaccaagagcgccacacagtgacttgaaagggccaggactgccctgtaacatggatgcccacaatgcagggtctctatcctgcatcccctgccctgctaaggggaaaagtcgttcagagcgggccacactggaaaaagagcaggccaggtcccaacataggaatttatctcacatcaaacctcccagaaggttaattataaaaaggattttaaytctttgaggaacttttcttatatgaattatgttttttaaaagtagacaaattaaactctacttgagcaaagaactgttttcaaagagggcacccccataaccagaataggtccagagcaattctcaggctgccacctggtgggataacatttatggacaggaaaaggaaagtgatgtacagaaaagcaaatgaggtagagaaatagctggattccatacagcctggcgtttgccttctttgaacagggtttcaaaggctgaccacctgtgacggcctgaa

SEQ ID NO: 517259 - DNA, 590 bp, Homo sapiens
agcattctatagctaaatatattgagggctgggcagggccaggcattctgatgcttacgctaggggaagatctttgaacacctgacttccctgggagaccaagagcgccacacagtgacttgaaagggccaggactgccctgtaacatggatgcccacaatgcagggtctctatcctgcatcccctgccctgctaaggggaaaagtcgttcagagcgggccacactggaaaaagagcaggccaggtcccaacataggaatttatctcacatcaaacctcccagaaggttaattataaaaaggattttaattctttgaggaacttttcttatatgaattatgttttttaaaagtagacaaattaaactctacytgagcaaagaactgttttcaaagagggcacccccataaccagaataggtccagagcaattctcaggctgccacctggtgggataacatttatggacaggaaaaggaaagtgatgtacagaaaagcaaatgaggtagagaaatagctggattccatacagcctggcgtttgccttctttgaacagggtttcaaaggctgaccacctgtgacggcctgaa

SEQ ID NO: 517260 - DNA, 513 bp, Homo sapiens
tctttgaacacctgacttccctgggagaccaagagcgccacacagtgacttgaaagggccaggactgccctgtaacatggatgcccacaatgcagggtctctatcctgcatcccctgccctgctaaggggaaaagtcgttcagagcgggccacactggaaaaagagcaggccaggtcccaacataggaatttatctcacatcaaacctcccagaaggttaattataaaaaggattttaattctttgaggaacttttcttatatgaattatgttttttaaaagtagacaaattaaactctacttgagcaaagaactgttttcaaagagggcacccccataaccagaataggtccagagcaattctcaggctgccacctggtgggrtaacatttatggacaggaaaaggaaagtgatgtacagaaaagcaaatgaggtagagaaatagctggattccatacagcctggcgtttgccttctttgaacagggtttcaaaggctgaccacctgtgacg

SEQ ID NO: 517261 - DNA, 527 bp, Homo sapiens
gtttttttaaacctgtgtacttttcatccatattcagtcttagtccataccgtacaggggtagtaccatctaacttaatcactagtaaagagaaaagatcttttatcagtaaaatgcaggtttcattgaaagccttaaatgctgtgtacagatatatctgacctgtaaatataatagcaaatatttcagcctagaatttttattttatgggtaaacactaaaacagatggtacttagggataatattaagtgaaatcagtatttttttggtgttcatctgacataraagtgtgagtggctttgcagggttttaaagagagttgctggcatatttgaaaccaaaaaaacatgccccaatctacatctttcaaacctcaagtcatgcctaaaattaggttgctcgattataatatgctgactaccagtctttatttgtaaacaaataactatgcttacaaattcaggctatttaaataaagtaaatttaatggaatcaagtaatttttcagaactttgtgacctacctg

SEQ ID NO: 517262 - DNA, 489 bp, Homo sapiens
cctggtccccgagtgggtctgcatggtgcagaaaagcaagagakaagcataaattcaatgtagcagagcgaactggcttccttcctatggtaggatcctgggtacagcatggaaactgaatatgacaagtgggaaagactcgatgagcaagcacagggaggccagcagagagcaaagctcaggtcccaggccctgggcatggattcagccaccggttttggtctaaaagcaagacggagacatccaaaccaaagccaggtggcccgtaaaggggcgatgggcaccagacaggaaggaggtcaagagcctccctgacgctgagcctggtgctcccaggcctccctaggtactaggctgactgtcctgaagcctagtctgatccccgcattgactgcctaaaccccatcacaagctgctcactgtcctcctggttagccccaaacttcccaataggtccccaagaccccttgtacagaagcccccgctaaa

SEQ ID NO: 517263 - DNA, 489 bp, Homo sapiens
cctggtccccgagtgggtctgcatggtgcagaaaagcaagagagaagcataaattcaatgtagcagagcgaactggcttccttcctatggtaggatcctgggtacagcatggaaactgaawatgacaagtgggaaagactcgatgagcaagcacagggaggccagcagagagcaaagctcaggtcccaggccctgggcatggattcagccaccggttttggtctaaaagcaagacggagacatccaaaccaaagccaggtggcccgtaaaggggcgatgggcaccagacaggaaggaggtcaagagcctccctgacgctgagcctggtgctcccaggcctccctaggtactaggctgactgtcctgaagcctagtctgatccccgcattgactgcctaaaccccatcacaagctgctcactgtcctcctggttagccccaaacttcccaataggtccccaagaccccttgtacagaagcccccgctaaa

SEQ ID NO: 517264 - DNA, 489 bp, Homo sapiens
cctggtccccgagtgggtctgcatggtgcagaaaagcaagagagaagcataaattcaatgtagcagagcgaactggcttccttcctatggtaggatcctgggtacagcatggaaactgaatatgacaagtgggaaagactcgatgagcaagcacagggaggccagcagagagcaaagctcaggtcccaggccctgggcatggattcagccaccggttttggtctaaaagcaagacggagacatccaaaccaaagccaggtggcccgtaaaggggcgatgggcaccagacaggaaggaggtcaagagcctccctgacgctgagcctggtgctcccaggcctccctaggtacyaggctgactgtcctgaagcctagtctgatccccgcattgactgcctaaaccccatcacaagctgctcactgtcctcctggttagccccaaacttcccaataggtccccaagaccccttgtacagaagcccccgctaaa

SEQ ID NO: 517265 - DNA, 489 bp, Homo sapiens
cctggtccccgagtgggtctgcatggtgcagaaaagcaagagagaagcataaattcaatgtagcagagcgaactggcttccttcctatggtaggatcctgggtacagcatggaaactgaatatgacaagtgggaaagactcgatgagcaagcacagggaggccagcagagagcaaagctcaggtcccaggccctgggcatggattcagccaccggttttggtctaaaagcaagacggagacatccaaaccaaagccaggtggcccgtaaaggggcgatgggcaccagacaggaaggaggtcaagagcctccctgacgctgagcctggtgctcccaggcctccctaggtactaggctgactgtcctgaagcctagtctgayccccgcattgactgcctaaaccccatcacaagctgctcactgtcctcctggttagccccaaacttcccaataggtccccaagaccccttgtacagaagcccccgctaaa

SEQ ID NO: 517266 - DNA, 599 bp, Homo sapiens
atgtgatggctttaatatatgtgtccaaactgcttcttttctagggaagcacttactctaagaagtaaatgttatatagtgcaaaaatatattaaagggtcagttggtgatgcagtttcaaaaatgcactgaggaaaacttggcacttccatagggttgagttggttggaatatatctcagtctctgagattttgaacccaatgttttgaactttttgagatttcgagtagtccatgtgacataacttaacattgtttcttggccaaatcaggcatagtgaaaaataaaatccagctaacatacttttaaatatcttgattctatactctttcaatgaccaaggggaggccccccactactttacacaaaaaagaaaactctatgaatgagaatctcttcacacaaagccactaaagttgtgtctaaatggaggaaaattgtgacaggtggtaaaagcactcagtggctgttgtaggcagaataatrtcccctctgtctcccgccaaagctatccacatcctaactcctgggtcctgtgaatgtgccaccttgtaagcaaaggggaattgaggtttcctgtgaaattaaggctgttaat

SEQ ID NO: 517267 - DNA, 574 bp, Homo sapiens
ggagtgaaagagaagaaaatctcttttggatcagctgtttttattcctacacacacacacacactctctctatatgatagattataatagatgtatctttcaaaaatagaactgaaatatagacctaaaagataatatacttcaattgttagagaggatatttttcctgtggaagggaacaatattcctatgtgtttaatacgtaaatatatctgtgccattacttgttacaccctgagacttcactcactactcatatctctggcactggtctttgaggttgcaatttttctctagaaaccattgcatatattaagagtgaaacattcaaggtcttcttaaaggctcaaaaactatacttgttgaaaatattgaatagtatttcatttatgtcctaagatatcactgctctggggataggccacacactctgaggtactgagtttgaaaagtgttttaattctgagcagtctttgtatgtaacacagagcaccttttccatgayaacttcttggcagtaagagaggtataaaaaccagcacttttttttttctattctggaacacaaaagcca

SEQ ID NO: 517268 - DNA, 544 bp, Homo sapiens
gacaattacggtgaaagccccttccaatactttctgaggactggagaaaaacacaacccttaaagtatatctggaatcatagacagcatgatggattcccagggctctgtcaccagagggcctgaaatgtcttctttgcttaccgaacgtcagtactgtgctgggccagttgggaggcactatttccatgtgagcactgggtcaaatgctacatggaygcatatacatcatgaggccattgtccgttgcttccttttataagagggccagagtttgtaaatgccatttttacagaggtgggaactgtgacaccaaaaatttctcataagtagctcaccagatgtccattgcttgaaaaatgatcactggctttcaaaatttgattcccatttgaaagaaaagagttaaagtttgagatgtttaaaaaataaggtttctctaagttgcctataaatggaaccatttcagataatggaaaagagaatactgaccaagtcttgactcttactcctactttctcaattagtgtctatgtgaccttggg

SEQ ID NO: 517269 - DNA, 539 bp, Homo sapiens
actaacgagggtaaagtgcccgagctgcacattccatggcaggcgccgcaaacttaacaacaggatttacgaggtgtgtgcttgccagaatgtctctaatgttcaggttcactcatcccaagccttaaattggctctcttggtgctattttaatctgtacagacccaatcacacacagcgtacaaatggtggttcaaagaaatgcacataataatgtggcagaggatgtaatttctgtcagagaacaccattgtaactatgattgaaaagacatgaatcctgctaaagatatgaaaccttttttaaggccaccgaattttaaagggaaggaatttccmaaaggttaaattttaaaccctcgggacccccaaccggataggggcacctacaaataatgcatgcagtagtaatccattttacatactaataggcgaaggttgtaagggtcacagtagaccacacaaaatgagttagacctgtgggggcgtgggagggtccctgacccatggaatcagcatgttctgttacttttgtgcatc

SEQ ID NO: 517270 - DNA, 622 bp, Homo sapiens
actatgtattaagccaagaatattttcagaattaaagacattattataatgtgatcagcaattatcaattacatccttagaagagatgtaatgacaaatttcacagggctgtttcttagagtatcacttcacagaagatgatggcttaactcccattgtagattacttaatgttgtcagttattcagagaacttggctgaaagatagatctaacatcccctctgaaaatcagaatgcttaagaaaaaaaagcatgcctgaagaggtcacccctgcacctggaaaggagtaaagagtactttgcagacaagaatgacattatccttaggaaatatatttaaatttctcttcaataaatagacaaacgggtactttccctgaagtcccactccataagcatagcctyaaattttttattctgcaaaatatccagggtacacatttccaggaacactgatcagggtccaaggattcagcatattgggatagtgaatggtctctgaagacctatagataattcagtatctactcaaggaggtgatctttaattaactgcactactgtgactgagaataagacttagcacaatacattaccaccaacagtcatggatctggtcaaag

SEQ ID NO: 517271 - DNA, 622 bp, Homo sapiens
actatgtattaagccaagaatattttcagaattaaagacattattataatgtgatcagcaattatcaattacatccttagaagagatgtaatgacaaatttcacagggctgtttcttagagtatcacttcacagaagatgatggcttaactcccattgtagattacttaatgttgtcagttattcagagaacttggctgaaagatagatctaacatcccctctgaaaatcagaatgcttaagaaaaaaaagcatgcctgaagaggtcacccctgcacctggaaaggagtaaagagtactttgcagacaagaatgacattatccttaggaaatatatttaaatttctcttcaataaatagacaaacgggtactttccctgaagtcccactccataagcatagccttaaattttttattctgcaaaatatccagggtacacatttccaggaacactgatcagggtccaaggattcagcatattgggatagtgaatggtctctgaagacctatagataattcagtatctactcaaggaggtgatctttaattaactgcactactgtgactgagaataagacttagyacaatacattaccaccaacagtcatggatctggtcaaag

SEQ ID NO: 517272 - DNA, 618 bp, Homo sapiens
gcattcattttggaatccactcttgtatcttcttttccattctctatctggttttgcttctccttaatcgtttcttttctcctaaccagtctactatatttgcttctccactctcctcctcattccctctcttttctattgtttctcccttttaaatcatccccctttttaaaaattaaaaagtagatagctcaagtgttctatgtttttcctagtaaaatcatgaaagtcacatctcacatctacaaattccatggctgattttatttttgtgcatctgtgtgcttacggaactgggatagcttctccaaagccgtatctttccaaatgtggtctgagatctactgaatcagaatctctaatgtggatcccagaaatctgtgacctcaacaagttctacatcatcactattatgaagaaaaatctcaggccgatagcttccttccttcttccctccctccctcttatcaggtccttccctccctccctccctcccttccttccttccagacaaggtctcacactgtcacccmggctggagtgcagtggcatgatcatggctcactgcaatctcaatatcccaggctcaagaaatcctcccacctcagcctcccaagc

SEQ ID NO: 517273 - DNA, 626 bp, Homo sapiens
ctgttctataagcaaagagatagacttcaatgatgtgttggtaatttttaaaagctggcatttccccctacattatttaaaacttcaaatacaacaaaacaggcctggcacagtggctcacggctgtaatcctaacactttgggaggctgaggtaggtggatcacctgaggtcaggagtttgagaccagtctggccaacatggtgaaaccccgtctctactaaaaacacaaaaattagccgggcatggtggcaggcacctgtaatcccagctacctgggaggctgaggcaggagaatcactagaacccaggaggtggaggctgcagtgagccgagatcacgccattgcattccagcctgggcaacggagtgagactctgtttcaaaaaaaaaaaaatatacaacaaaacagctaaagagcaggcttgtaaatatgagtgcgtactgtctataggacaagaaattttaactctaacattttattttgtagatgcattcataatctatattcctaatgacctcttttttatttttaaaaatttatttttcccagaaggatgtcaaacaygacctaacaacctttttctaaaatttcttaaatccattcaccaaaggtcccactactag

SEQ ID NO: 517274 - DNA, 560 bp, Homo sapiens
gctgctccttggtgaggcccggggcaggaggcggatgaccgcctgcagggagcgcacggccgttcccacagcggcggggcgtggacacggcgcacctgaggcacagtgtaccgcgctgggaggccagggctccgcctccgaccctgtcccccgcccctccccctccgctcaaggccgtcctctcgatgttgatcattttttcatatgtttgttggccatttgtgtatcttttgagaactgtctattcatgtccttagcccactttttgatgagattatttgtttttttcttactsatttaagttcattgtcgattctggatgttagtcctttgtcagacgtatagattgtgaagattttctcccactccatgggttgtcaaagacaccattctaatatctttgatgattagtgatgttgagcactttttcatatacctattggccgcttgtgtgtcttattttgagaaatgtttattcagatgccttacccattttcaatcaggttgttttcttactattgatttgtttggattctttatatattttaagtattaacccc

SEQ ID NO: 517275 - DNA, 606 bp, Homo sapiens
ctgaaattataaatctaagaaacagttacatcaagattctgctgtgtcatttaattctgaaactcccagtattctacccttcttcatcactgcatattaccccactcttccatcccaaattggctatcctttcagcccaccaacttagcggcagcactagggattcattataaggtaaatctggtttacataaagacctgaaggaggcctgtatttgaagctcacacttggtattggtatctctcatttttactgagccagtgtggaataccactgtatgtactcatataagcccttgacttttactgctcatcaggattggaatattactctagcagtcttcacacataggcaagttacagtccttttaaaaagyatctcatttccctataatggaacctaatagccaactttttcatagaaattgctagaagagtttgatcaactataaatgataaagtgtttataagcatagtcagtgtgacacagaaaccaatcttaaaattgaatttaatgttttatcatatcagattaaatattttctccatgtcttatttttactgcaacaagttagaaagtgggaacactttgattaatgtcttaaaa

SEQ ID NO: 517276 - DNA, 575 bp, Homo sapiens
aaaaacatctccaaatatgcctgggctttatttcctaagtgaattaaaagaacattgctaattaagggtaaagatggagattttctagtgattctttgaaaggatcaccaggttcagattgtgtcatggtgctcatgacttgatcacctagttactgcagagacagagagtattaggaggctttcaaggaaggtgggccgattctcyagccaacgtgaaatgttggtagacaagaagctaaacttccccccaagagacagtatgtcagtcaggaaactatttcctgtccgttgaaatatctttttatagctgggaaaaactttgggaaaaccaagtggtgagccatggaaaagggtttctttgtttatttactttggcttttcgaaatgttcttggacttgagtggacgtctgactctggggaaaacagacataaggacaattaaagatgtcccaaattgactctgctgggaggaacattgctcgttgctgccctccagagaagttcagagagggaacaatgaaaagcagaaggctgatgaagaaaggtcaggctgtatgccaacaaaggtcagc

SEQ ID NO: 517277 - DNA, 629 bp, Homo sapiens
accctgcactatgtttttaaataatttttggttttatgcattacaatacaggtcaattgacaaaactaggtttttgtctggtggtctgcactattttaaattgctaatttaaaatgctttccttttgwtttatttatttatttatttatttattagatggattctcactctgtcccccaggttggagtgcagtggctcaaactcagctcactgcaacctccagctcctgggttcaagcagtactcctgtctcagcctcctgagtagctgggattataggcgcacattaccatgcctggtgtattagtcagggttctctagagtgacagaactaataggatatatatgatatgtaataggatatcctatcttatatatatatcctattacatatcatatatatatatataaaggggagtttattaagtattaactcaaatgatcacaaggtcccacaataggctgtctgcaagctgaggtgcaaggagagccagtccgagtcccaaaactgaagaacttggagtctgatgtttgagggcaggaagcatccagcacaggagaaagatgtaggctgggaggctaggccaagctagtcttttcacatttttctgcctgctttatattctagcc

SEQ ID NO: 517278 - DNA, 606 bp, Homo sapiens
aaaggcataagaatgacacaatagactttgaggactcaggagggaaggcaggaaggggctgagggataaaagactactaatcagtttcggtgtatactgcttgggtggtaggtgcaccaaaatctcacaaatcgaccctaaagaacttactcgtgtaaccaaatagcacctgttccccaaaaacctatggaaataaaaaaataaaaaaaaaattaatctgctttatagttggtttttagtatacaataacttttcttaagaatcaaactgttgcatatttttctaatgaaacatgtttttctaacacatgcatggcgagatgcatatagtatacaaacacattgtaacagcataaatctgtaagagatagcaaagtaggatgggttacaatttctcaggcagcagatcatctcatgggctaggactagcggtatggtggctgtgttcaagccatgattgaatgcacctcctctgccatgggagatgctgacaatgcagggcacamcccttgtgaaggtctagggtagactagaggaaaagcaggtgcttccaccattccctgacccatggactgagcatgcagagaactggcatggtctgcttagc

SEQ ID NO: 517279 - DNA, 496 bp, Homo sapiens
cctctgtgcattgaatggggtgtgtcaggccagagtgggctggggcttgagtgtggttgsgggggagtcctgaggcgaggatagtaaagatgggacatgaccctgagggctcaagctcaggacaggctcaaacatccctttcttcctgagatggggttgtctgactccctgggggaatgtgattctgtttgcagttaaaccaatttgaattaatctagcaagtgtcaattctttccctcggaactgtgtagaatgctattccaaaattagactaactagtgaaaccttctcacaggcttcttttttacagactgagataatgtttcgctcaaagatgctgctggatgaggcagaccattttaatcacagtgaagcttcccccccaggctttcgctgcctctcccaccttgtggggacctgcctgggagaagtttcacacgcgcccccgctccacctcccaccctgcagaactgctgctggctggacgctggctgca

SEQ ID NO: 517280 - DNA, 583 bp, Homo sapiens
ttattcccttttggaacactgtgttcccttggcttccagggctccattttcccgcttttctttttccttccctagttgctccttctcagcctcttttgctgactcctcctcctctttctcactttcaaatgctggaatgcccacaggctcagtctttagactcttgttttcttttctacacttattttctcctagatgatctcatacagttttatggttgaaaagatctatatatatgctgaaaattctcagatttacttccccaacctaggacactctgaaattctaaatgcataaatcaactgttctttctacatatygacttgatttctaatgggaacccccagctttattaagaaataattgacaaataaagctatatacatatatatatatagtgtacaacataatattttgatatatatgtacattgtgatatgattaaatcaatctaattaactcaaatggggatcttgattattaaatatccaacgccaaactcttcattatactgctcaaatctcttccccctacagtggctcatgtattagtacacggcatcgctattcaccatgttagttct

SEQ ID NO: 517281 - DNA, 477 bp, Homo sapiens
gtttccaggagtattctcttcacctgttgctccttgttttttcagttttacacacacatggacatgttgggctgggaaagctgggtctyggcctacctatgaagttgatttgatgcagtatgtgtgattttagaacagaaaagtgagctcagcatagtcactgttggctgcacagctttgacttggaccccaagtttacttgtctgtgaaacgggagatttacagatgtcagtaatgactaaatagcacaggatttttaatgatgccttaaatattgtgtactactttaagcaaatgcagatggtgattctgcaaaccacaacagtaataggtgtcatttatggacacttcctaagtgacaggggataaagtctgcagacatgctcacagttaaccttcacactggcagtagtgatgcagggcaggcaagccctgaaattggggcttagcctgggagggttcttggcttcacccagg

SEQ ID NO: 517282 - DNA, 477 bp, Homo sapiens
gtttccaggagtattctcttcacctgttgctccttgttttttcagttttacacacacatggacatgttgggctgggaaagctgggtctcggcctacctatgaagttgatttgatrcagtatgtgtgattttagaacagaaaagtgagctcagcatagtcactgttggctgcacagctttgacttggaccccaagtttacttgtctgtgaaacgggagatttacagatgtcagtaatgactaaatagcacaggatttttaatgatgccttaaatattgtgtactactttaagcaaatgcagatggtgattctgcaaaccacaacagtaataggtgtcatttatggacacttcctaagtgacaggggataaagtctgcagacatgctcacagttaaccttcacactggcagtagtgatgcagggcaggcaagccctgaaattggggcttagcctgggagggttcttggcttcacccagg

SEQ ID NO: 517283 - DNA, 477 bp, Homo sapiens
gtttccaggagtattctcttcacctgttgctccttgttttttcagttttacacacacatggacatgttgggctgggaaagctgggtctcggcctacctatgaagttgatttgatgcagtatgtgtgattttagaacagaaaagtgagctcagcatagtcaytgttggctgcacagctttgacttggaccccaagtttacttgtctgtgaaacgggagatttacagatgtcagtaatgactaaatagcacaggatttttaatgatgccttaaatattgtgtactactttaagcaaatgcagatggtgattctgcaaaccacaacagtaataggtgtcatttatggacacttcctaagtgacaggggataaagtctgcagacatgctcacagttaaccttcacactggcagtagtgatgcagggcaggcaagccctgaaattggggcttagcctgggagggttcttggcttcacccagg

SEQ ID NO: 517284 - DNA, 477 bp, Homo sapiens
gtttccaggagtattctcttcacctgttgctccttgttttttcagttttacacacacatggacatgttgggctgggaaagctgggtctcggcctacctatgaagttgatttgatgcagtatgtgtgattttagaacagaaaagtgagctcagcatagtcactgttggctgcacagctttgacttggaccccaagtttacttgtctgtgaaaygggagatttacagatgtcagtaatgactaaatagcacaggatttttaatgatgccttaaatattgtgtactactttaagcaaatgcagatggtgattctgcaaaccacaacagtaataggtgtcatttatggacacttcctaagtgacaggggataaagtctgcagacatgctcacagttaaccttcacactggcagtagtgatgcagggcaggcaagccctgaaattggggcttagcctgggagggttcttggcttcacccagg

SEQ ID NO: 517285 - DNA, 673 bp, Homo sapiens
ttgctccttgttttttcagttttacacacacatggacatgttgggctgggaaagctgggtctcggcctacctatgaagttgatttgatgcagtatgtgtgattttagaacagaaaagtgagctcagcatagtcactgttggctgcacagctttgacttggaccccaagtttacttgtctgtgaaacgggagatttacagatgtcagtaatgactaaatagcacaggatttttaatgatgccttaaatattgtgtactactttaagcaaatgcagatggtgattctgcaaaccacaacagtaataggtgtcatttatggacacttcctaagtgacaggggataaagtctgcagacatgctcacagttaaccttcacactggcagtagtgatgcagggcaggcaagccctgaaattggggcttagcctgggagggttcttggcttcacccaggaaataagtcaagggtgagctggtggtgtgagacagcagctcttattgaagcggygtgcacagcagcagcagaggcactgatccttgcagagcagggctgcccccacaggcagtgcgtccagagcagcagctcagaggcagtgctgcagtcgtatttatatccacttttaattatatgcaaattaaggggcagattatgcagaaatttatttaaaaagggctg

SEQ ID NO: 517286 - DNA, 643 bp, Homo sapiens
aatttctggttggacaatgaataattccagacttaaacaggatctgcccagagatttctcttctcacaggcctgatccatctgaccactttctcagaacacaatgatgcggcatctaatgcaccattatcttcgtgacagctcagtactccatgtcaaaccaccaaatctaacatgtgtctttctcatttaacccctgattgtgtcctgtggactccatacgtggtgcttctggacacacaagggaaaggcatgcttccatagttatctatttcagttaggtctttccaaatattggttacattttctgttcttcaagcgataaaacaataatataataaatagtagcagattcgtagaagcaggctttctgagccagcagtaaggagggcgtagtggcawgcttagatgagcctttgtgtggctgttgaccagtggaagttgtcagtcgtgtgtaataaattgcacctcttctcagtaacccccatgctcagttcccatcccaacaaatctagtgggacataaatgtcttcatttattacttaatttttcaaaataatagaaacaaaatatttaaaaatatttgtaataaatacaataacataagcacatagtttaaagatttaaaaatatattgtggaata

SEQ ID NO: 517287 - DNA, 643 bp, Homo sapiens
aatttctggttggacaatgaataattccagacttaaacaggatctgcccagagatttctcttctcacaggcctgatccatctgaccactttctcagaacacaatgatgcggcatctaatgcaccattatcttcgtgacagctcagtactccatgtcaaaccaccaaatctaacatgtgtctttctcatttaacccctgattgtgtcctgtggactccatacgtggtgcttctggacacacaagggaaaggcatgcttccatagttatctatttcagttaggtctttccaaatattggttacattttctgttcttcaagcgataaaacaataatataataaatagtagcagattcgtagaagcaggctttctgagccagcagtaaggagggcgtagtggcaagcttagatgagcctttgtgtggctgttgaccagtggaagttgtcagtcgtgtgtaataaattgcacctcttctcagtaacccccatgctcagttcccatcccaacaaatctagygggacataaatgtcttcatttattacttaatttttcaaaataatagaaacaaaatatttaaaaatatttgtaataaatacaataacataagcacatagtttaaagatttaaaaatatattgtggaata

SEQ ID NO: 517288 - DNA, 547 bp, Homo sapiens
cacagacagatcaacatgcagaaacagatgcacacaatgatgccaaactcaggttccaaccacgtatcaagaaagatgagaaattctgaaatagtatcctgaatctgctatgcatgggtttttcaaaagaaataatacttttttttcacaattattgaaatcttttatttgctttaagactttagaagctttgagaggtgaggaagaaagattcttggaggtrtattatctttgaaaaatcaattgtgctgttacctctattccctccaaagggagagaaagtgcccatcttcttatcccaaaccccccaaaggaagaggatccaacagggcgggctatttgtaggcattaagatgcaacccctatgactgggggagatggtggcctgagtatgattttccagggcagtgaaagggagatgtgcctataaaagcttagctctggggagcaaccctgggctttcagattttcccaagaccagagacacaggtatgttttatctctaagcaaggcaagtgatacaatctacaaagacattggcacaaaa

SEQ ID NO: 517289 - DNA, 547 bp, Homo sapiens
cacagacagatcaacatgcagaaacagatgcacacaatgatgccaaactcaggttccaaccacgtatcaagaaagatgagaaattctgaaatagtatcctgaatctgctatgcatgggtttttcaaaagaaataatacttttttttcacaattattgaaatcttttatttgctttaagactttagaagctttgagaggtgaggaagaaagattcttggaggtgtattatctttgaaaaatcaattgtgctgttacctctattccctccaaagggagagaaagtgcccatcttcttatcccaaaccccccaaaggaagaggatccracagggcgggctatttgtaggcattaagatgcaacccctatgactgggggagatggtggcctgagtatgattttccagggcagtgaaagggagatgtgcctataaaagcttagctctggggagcaaccctgggctttcagattttcccaagaccagagacacaggtatgttttatctctaagcaaggcaagtgatacaatctacaaagacattggcacaaaa

SEQ ID NO: 517290 - DNA, 547 bp, Homo sapiens
cacagacagatcaacatgcagaaacagatgcacacaatgatgccaaactcaggttccaaccacgtatcaagaaagatgagaaattctgaaatagtatcctgaatctgctatgcatgggtttttcaaaagaaataatacttttttttcacaattattgaaatcttttatttgctttaagactttagaagctttgagaggtgaggaagaaagattcttggaggtgtattatctttgaaaaatcaattgtgctgttacctctattccctccaaagggagagaaagtgcccatcttcttatcccaaaccccccaaaggaagaggatccaacagggcgggctatttgtaggcattaagatgcaacccctatgactgggggagatggtggcctgagtatgattttccagggcagtgaaagggagatgtgcctataaaagcttagctctggggagcarccctgggctttcagattttcccaagaccagagacacaggtatgttttatctctaagcaaggcaagtgatacaatctacaaagacattggcacaaaa

SEQ ID NO: 517291 - DNA, 498 bp, Homo sapiens
aacaaaataacggcattcacagcaacctaggtgaaattggagaccattattctatgtgaagtaactcaggaatgcaaaaccaaacatcgtatttctcactcgtaagtgggagctaatctataaggatgcaaaggcataagaatgacacaatggactttggggacttgagggaaagggtggaagggggatgaagtataaaagactgcaaattgggtacagtgtgtactgcttgggtgatgggtgcaccaaaatctcacaaatcaccactgaagaacttactcatttcaccgaataccacccattccctgaaaatctatgggaataaagaggaaattaaaaaaagaattctacctgtttttcattcaactagaagaaattgaggtttataacagtaaatgagaagctgaaaagttaatgttaaatgcagttaaccagacyccctattttcataatatttcacagcttgaatatatttgctctttgaaatgttctctgctt

SEQ ID NO: 517292 - DNA, 570 bp, Homo sapiens
catgcttcattcctttttgtggctaaataatattcctttttatggatatgccacttttctgtacccactcacccattgacggatatttgtgctttttccttttttaaaaaattgtgaatcatgctgctatgcacatgcaagttcacttcttcttgaacatctgtttttatttttggggtgtgtacctaggagtaaaattgatgggtcatatgataattctgtgtttaacatccaatatatgttaatgaggttgttaagtttggaaaatttcctacttcatggacacttttgttcttcaaggtattgtcagaaaaatattccagattttactcttaagacaacccatggaagtcattgatagggaagatggtgatatgaagtgggatgtgctaattagaatccatttggcaggggtgggggtgagagatccytgactttcaggggctgcagcagcagcagatgtacttggatgagcgtcctgtgctctacggtggcagtaggaactaccataccagtgctaatgatggcaataggagtgtctgccttgcaacagcttggatgtaatttggg

SEQ ID NO: 517293 - DNA, 548 bp, Homo sapiens
gttctgcatgaattactctttctccattgcaatcccctcgccttgataaataggctctgtctaggcagagagcaaggtgaacccattgggaggtcacacgagcagctctctttatcttcagttgctctctttatcctggtattgctaagacattggcagtccggggtctatgggcccctttttggagaagatttgcctaaaggtgagaccaacacagattaaagcagagataaaaggcagagacaaagatgtcacagcctgakagcattatttgagccaaccttggaacacacggggattctcagtagcatgaatcagcccatctcaatgaccgttacttgcaataaaaaaaaatcctgacaaattttgtatttgtattgttggtttttggatctgtgtccttttaaactgagagtttcttctgaacgcaacatttagcatggaaacactaggcaatataagcttggctaaacttgctgaatgaacaaatcatacatttgtgatgcactctttgtttttcatgaaatcagccttgctctttttggata

SEQ ID NO: 517294 - DNA, 550 bp, Homo sapiens
ctggttctgcatgaattactctttctccattgcaatcccctcgccttgataaataggctctgtctaggcagagagcaaggtgaacccattgggaggtcacacgagcagctctctttatcttcagttgctctctttatcctggtattgctaagacattggcagtccggggtctatgggcccctttttggagaagatttgcctaaaggtgagaccaacacagattaaagcagagataaaaggcagagacaaagatgtcacagcctgatagcattatttgagccaaccttggaacacacggggattctcagtagcatgaatcagcccatctcaatgaccgttacttgmaataaaaaaaaatcctgacaaattttgtatttgtattgttggtttttggatctgtgtccttttaaactgagagtttcttctgaacgcaacatttagcatggaaacactaggcaatataagcttggctaaacttgctgaatgaacaaatcatacatttgtgatgcactctttgtttttcatgaaatcagccttgctctttttggat

SEQ ID NO: 517295 - DNA, 626 bp, Homo sapiens
ggggattctcagtagcatgaatcagcccatctcaatgaccgttacttgcaataaaaaaaaatcctgacaaattttgtatttgtattgttggtttttggatctgtgtccttttaaactgagagtttcttctgaacgcaacatttagcatggaaacactaggcaatataagcttggctaaacttgctgaatgaacaaatcatacatttgtgatgcactctttgtttttcatgaaatcagccttgctctttttggataattagggtcctgtgaatgtaagtgaatggatctctaagtcagatctagccttttttttttgtttttggaataaccctcctggaaagcaggagtgacatctcactcccttctgacctagatttcatgagtcacatggaggaaagcttcagtcgcaggagaagacttgggattctccacctgggaagtgctccctaggcaatgaagaaatrcatagggcaattttgcccaaaaatttatcttacatataaatggcaagtagcttgattctgtgcatttgtctttataagatgtcccttgatcaatgatcaatatccactgtcgtgagcaacgtagagtttttgaaacaactgggtacatacttgggactgaat

SEQ ID NO: 517296 - DNA, 510 bp, Homo sapiens
aacctctagaaatgctgtcacatgaggaaaaacaatctctaatgtttaatccattatkattaatttcaccgttacttgtagatgaactcaattctgcttgatagaaaataaatatcataatggtcttcctatttcctatttttccatggattataccttgtgtgtacatctgcctcttctactatatttaaagctatctagggatatattcaaatcttattcacctttatggtcttcagagtgcaaagcagagaaaattgctatagtatacttgcagaggtggccttaagaataccacgagttatcccaaaatgtaatgaaaacaaaactaaacaaaacaacttcaaaaggactcactgtgcctagttctgagcatcattaaatcacaaaatacaatctctgccctcaagaagttcatggtcttctgaggagaaaatgaatttttctaatacaattaattttctgtaaaacatggccatttacaaataagttgtatcatttcaatgtttt

SEQ ID NO: 517297 - DNA, 414 bp, Homo sapiens
gatataaagaaaaaggcacaaatcataggtgtagaactcaacaatttttttacagttaacatgcttgtataaccaccatcaaaattaagwcttactatactactggcccccaagaaagaccccttttcaaccctgtaagtcaccaccacacccagaattaactaactgctatactgactttcagtgatcatttggatgtgtttttttttctttgtaggaaatgcttgttccaaaatttcccagcatttctgttgaatctcctctttttaaaaaatatatttatagtgtttctacagcttgccttttcctactggtatttttgttccaacagttatattgaggtattatcgacaaacaaaaactgatattttttatgtgtgcagtgtgatattttgatattcatgtgcgttgtga

SEQ ID NO: 517298 - DNA, 636 bp, Homo sapiens
gatttgtttctcctaaggccaaccatgagcagaatctctccataaaagctgtggattggaagtagtgacaggtcagaattacgacgacagtcacagagtacagaggaataccaattagcagaagaacaaattaatttaaaatgaatcatttcaaagattttaaattttgtagcaattagctaaaatttttcaagagatggatttttaagtttgtgggacactaaacaaataaacaaggtttttctctaagtcatcatcacccttacaatccctcaaacttgtttatacaaatgagttgattcagatattcattcattcattcatacgttgtactccttggttgaagaacactgggaacactcatgaaagatgttatttttgaatgattgccagttctaatgctgaaaagccaacggaatttgtagctctccttctaataagagtgtataggcagatgctgaaataagtctttgaaacaatgagaccaaaaccagtctattttgcgtgctacatctccactgacaaaataaawctatgctgtgatttcaggtcagacattctggctttataaaataacaatagatttgaaatgcttatcaagattttattgcatcagtgttcttaaaattatccata

SEQ ID NO: 517299 - DNA, 658 bp, Homo sapiens
tagcacatattcaactactcactgtgtcagtatgttgttcctttttaaaactatcttgctcatgtttgtatttatttatttgactcttttcataagaatgtacactccatgagaacaaagaccaaatatgtgtagtgtatgaatgcctgggataatgtttgctaaatayattgcaattaacgtacttagcacactgcttgccatattttaaatgctcagcaaatggcatatattattatattaaaattatttatagaagagtttcttaagttaaaaacatatattcaaataaatgttttatatgaaaactatagtagtgctaaggcttctgaaattaatatttattagtagtaggtaaggctttcttgttcttttgtttaaggtcctatgctataattttaacaggggaacaaattttgctgtttttagaaaaaagacgtcatttgtttaataaagtaaaaatttaaaatgaaaatgctaatcaaaaatattattggcagaagtactttcagagtagcagagtaaggtaagggcctcccaaaatttgctactccattaaagcaagaccactgctaaatgcatcaaaataaactttttcagaatcctgaaaattaaccaggcttataagtgttcctggagtgtttatgcaaggactaca

SEQ ID NO: 517300 - DNA, 658 bp, Homo sapiens
tagcacatattcaactactcactgtgtcagtatgttgttcctttttaaaactatcttgctcatgtttgtatttatttatttgactcttttcataagaatgtacactccatgagaacaaagaccaaatatgtgtagtgtatgaatgcctgggataatgtttgctaaatacattgcaattaacgtacttagcacactgcttgccatattttaaatgctcagcaaatggcatatattattatattaaaattatttatagaagagtttcttaagttaaaaacatatattcaaataaatgttttatatgaaaactatagtagtgctaaggcttctgaaattaatatttattagtagtaggtaaggctttcttgttcttttgtttaaggycctatgctataattttaacaggggaacaaattttgctgtttttagaaaaaagacgtcatttgtttaataaagtaaaaatttaaaatgaaaatgctaatcaaaaatattattggcagaagtactttcagagtagcagagtaaggtaagggcctcccaaaatttgctactccattaaagcaagaccactgctaaatgcatcaaaataaactttttcagaatcctgaaaattaaccaggcttataagtgttcctggagtgtttatgcaaggactaca

SEQ ID NO: 517301 - DNA, 658 bp, Homo sapiens
tagcacatattcaactactcactgtgtcagtatgttgttcctttttaaaactatcttgctcatgtttgtatttatttatttgactcttttcataagaatgtacactccatgagaacaaagaccaaatatgtgtagtgtatgaatgcctgggataatgtttgctaaatacattgcaattaacgtacttagcacactgcttgccatattttaaatgctcagcaaatggcatatattattatattaaaattatttatagaagagtttcttaagttaaaaacatatattcaaataaatgttttatatgaaaactatagtagtgctaaggcttctgaaattaatatttattagtagtaggtaaggctttcttgttcttttgtttaaggtcctatgctataattttaacaggggaacaaattttgctgtttttagaaaaaagacstcatttgtttaataaagtaaaaatttaaaatgaaaatgctaatcaaaaatattattggcagaagtactttcagagtagcagagtaaggtaagggcctcccaaaatttgctactccattaaagcaagaccactgctaaatgcatcaaaataaactttttcagaatcctgaaaattaaccaggcttataagtgttcctggagtgtttatgcaaggactaca

SEQ ID NO: 517302 - DNA, 576 bp, Homo sapiens
tcctttattgttaatataaaaattataggagaaagagactaatgatagatacatatatgtatgtctatttgatctttcctcctgattagcactgtttttaaatactgttttctttgaggcatgaatacagagaatctgctaaaatgacatagtgactctgaagctgggccctacattttgaaatgagtagaaatatttgaaatatttttgatgcrgtgggaaattattggaatacagataaacacagttaccaggcaaattattcaggttgctgatatgggttgaattatgttcccccacaaaagatgttgtagctcttaccaccagtacctcagaatgtgactttagttggagacagggtctttatacagatattcaagttaaaataatgtcattagtgtgggccctaatctaatatacttggtgttctcataaagagataaattttgacaaagagaaatatatgcatgaaaggaagatgacatgaagacacaatgggagaagacaggcctcttcaagccaaagccaaggagagaggtctggagatttttccctcacagtccgcagaaggaacca

SEQ ID NO: 517303 - DNA, 576 bp, Homo sapiens
tcctttattgttaatataaaaattataggagaaagagactaatgatagatacatatatgtatgtctatttgatctttcctcctgattagcactgtttttaaatactgttttctttgaggcatgaatacagagaatctgctaaaatgacatagtgactctgaagctgggccctacattttgaaatgagtagaaatatttgaaatatttttgatgcagtgggaaattattggaatacagataaacacagttaccaggcaaattattcaggttgctgatatgggttgaattatgttcccccacaaaagaygttgtagctcttaccaccagtacctcagaatgtgactttagttggagacagggtctttatacagatattcaagttaaaataatgtcattagtgtgggccctaatctaatatacttggtgttctcataaagagataaattttgacaaagagaaatatatgcatgaaaggaagatgacatgaagacacaatgggagaagacaggcctcttcaagccaaagccaaggagagaggtctggagatttttccctcacagtccgcagaaggaacca

SEQ ID NO: 517304 - DNA, 576 bp, Homo sapiens
tcctttattgttaatataaaaattataggagaaagagactaatgatagatacatatatgtatgtctatttgatctttcctcctgattagcactgtttttaaatactgttttctttgaggcatgaatacagagaatctgctaaaatgacatagtgactctgaagctgggccctacattttgaaatgagtagaaatatttgaaatatttttgatgcagtgggaaattattggaatacagataaacacagttaccaggcaaattattcaggttgctgatatgggttgaattatgttcccccacaaaagatgttgtagctcttaccaccagtacctcagaatgtgactttagttggagacagggtctttatacagatattcaagttaaaataatgtcattagtgtgggccctaatctaatatacttggtgttctcataaagagataaattttgacaaagagaaatatatgcatgaaaggaagatgacatgaagacacaatgggagaagacaggcctcttcaagccaaagccaaggasagaggtctggagatttttccctcacagtccgcagaaggaacca

SEQ ID NO: 517305 - DNA, 513 bp, Homo sapiens
aaccatattcaatttataggcctgtttgtttcttattcaaataataaatcataaaaagacaagataaattatagtatcaatttggcatctgataattccaaggaattgttattaatatttctaggtagaatartgctattatgactatgtaaaaaattccatataattttcagatttatagtatgtgctttaaaatcagagagaacaaattttatggatgaaggaaaaatggtaatatattgataattatgaaatcggctagaggtgttagtggatatgtgagagtttatgaaaccatgctatttttgtgtatattaacattttaataaaatttctcaaagtagaatgcatgaaataacttagtatgctcatagtcactttagtaataatggaagaatgggataatgagtgaattgaaataattgatatgattttgttagtaactttctaggttgtctgaaatcttttttgacctggaaaagagtgcctttacttttgctcagtgtttattat

SEQ ID NO: 517306 - DNA, 660 bp, Homo sapiens
aggttttggtacgaaaggttaagtggagggggaaagagaaaaaaaaatgcttggcaaagaatactcactgtgtgtgcttttggctatcagctgatgttcactcctgtggagaattctgggaaactagagaagcaatctgtgagccggttagctcaagcctcctcatttgtgtaggctggagtacataggtgtttctttatattttccttagagcctttaaattttgtgttatttagttggtcaaaaaatctttattcttttctgatacccatgcttatagaaaacagatcatatttcagaaaatttctaaattgtgtctactataaatctaaaaaataagaatagaaggtgataaggatatgtaggaaatgaagcagtctaagtgtgactgaaaataaaagagtttgctgaakttgaaacagcaaaggtgacggtggatgggattgagtctaagttattatttcaggcaaaagtaaatttcacaagtgcactcttttggttatattttctcctctgcagtgtagcttgtccaaagacctagaccaatgtctgtagaatttgctaaggaagcagactacctagaaaagtctataattagtcaaaatgcatttatgtgtaaacacagtaggatatatttctgtgatactcaaggactcaaaa

SEQ ID NO: 517307 - DNA, 603 bp, Homo sapiens
tataaaaaatactgaacttcagagataaacttgctttttaaagtgatttgaatcagcaattctgaacctgtgttctctgtgtctagccttgagcaactgcatcaatagattgaaagtaaataaagaaaaccagacttttcactttggagaatgaaggaagaggatcagagaaatcaatagggcaggattagttgtctcacaaaggtgaaggtcattgcctctgtgctgaaagcagctctaagcattgactgtaatctgaaattcattagctactttttctttgagtaattttccaccttaacagtgaatcaccagaggcagtaccctatggatcgaaaaactgggaatccctttaraaagctctagagggaaaaataaggcacctgtttattaatttcctggctttgataattatatcacagttatggaagtttgataacatcagggcatagtagagaagggtctgagtgaactctcaacatttcattgaaaggtaaatttttttaaagttttaaagtatgtattccctagagctggaaaaaatgtgctttcatcttacctgggtctgagtgtgggtaattttcaagaaatatctgaataccc

SEQ ID NO: 517308 - DNA, 485 bp, Homo sapiens
aaagtaaataaagaaaaccagacttttcactttggagaatgaaggaagaggatcagagaaatcaatagggcaggattagttgtctcacaaaggtgaaggtcattgcctctgtgctgaaagcagctctaagcattgactgtaatctgaaattcattagctactttttctttgagtaattttccaccttaacagtgaatcaccagaggcagtaccctatggatcgaaaaactgggaatccctttagaaagctctagagggaaaaataaggcacctgtttattaatttcctggctttgataattatatcacagttatggaagtttgataacatcagggcatagtagagaagggtctgagtgaactctcaacatttcattgaaaggtaaatttttttaaagttttaaagtrtgtattccctagagctggaaaaaatgtgctttcatcttacctgggtctgagtgtgggtaattttcaagaaatatctga

SEQ ID NO: 517309 - DNA, 606 bp, Homo sapiens
atctgaagtagctctttagaggaaatgtaatcttaagccatctgcttattaatccttattaataataatttcagagaaataatatttgtagacaatgttctaacataatgcatggtgaaatattttctcaagtattataaattgtagccttaggttaaatctacaacattcaagaatggttcctttggacaataatttagtccttcatagaatgtatgctattgaaatttaatttggcattattcaattaacctatcttaagggacattacaataaayagctctagaatctcttcattacataaattttggcagtcatgtcaagaaacttgtccaataaattgttactcttgacaatgtagtctgcacataagtttagatctacgaaattttgttactggtccatgactagaaaaggaaagaaattcaagtaaagcattttaccaatgtttgtggaataaagtaattttatgtctgttgattataataataaaaataagactttatatatctttaatatttttactttcatcatcattgtgtcttgcaaaaaaaaaaatcagctacaaagtattggaactaaaaaaataacagtggaaaggtcatt

SEQ ID NO: 517310 - DNA, 606 bp, Homo sapiens
atctgaagtagctctttagaggaaatgtaatcttaagccatctgcttattaatccttattaataataatttcagagaaataatatttgtagacaatgttctaacataatgcatggtgaaatattttctcaagtattataaattgtagccttaggttaaatctacaacattcaagaatggttcctttggacaataatttagtccttcatagaatgtatgctattgaaatttaatttggcattattcaattaacctatcttaagggacattacaataaatagctctagaatctcttcattacataaattttggcagtcatgtcaagaaacttgtccaataaattgttactcttsacaatgtagtctgcacataagtttagatctacgaaattttgttactggtccatgactagaaaaggaaagaaattcaagtaaagcattttaccaatgtttgtggaataaagtaattttatgtctgttgattataataataaaaataagactttatatatctttaatatttttactttcatcatcattgtgtcttgcaaaaaaaaaaatcagctacaaagtattggaactaaaaaaataacagtggaaaggtcatt

SEQ ID NO: 517311 - DNA, 606 bp, Homo sapiens
atctgaagtagctctttagaggaaatgtaatcttaagccatctgcttattaatccttattaataataatttcagagaaataatatttgtagacaatgttctaacataatgcatggtgaaatattttctcaagtattataaattgtagccttaggttaaatctacaacattcaagaatggttcctttggacaataatttagtccttcatagaatgtatgctattgaaatttaatttggcattattcaattaacctatcttaagggacattacaataaatagctctagaatctcttcattacataaattttggcagtcatgtcaagaaacttgtccaataaattgttactcttgacaatgtagtctgcacataagtttagatctacgaaattttgttactggtccatgactagaaaaggaaagaaattcaagtaaagcrttttaccaatgtttgtggaataaagtaattttatgtctgttgattataataataaaaataagactttatatatctttaatatttttactttcatcatcattgtgtcttgcaaaaaaaaaaatcagctacaaagtattggaactaaaaaaataacagtggaaaggtcatt

SEQ ID NO: 517312 - DNA, 625 bp, Homo sapiens
gactaaactttatttatattatgcatagttttatttctattgaatttcattacaaataaaatagcctttttaaaatccatcttataatctcactttgtggcagaaattgaatccctttaagaaaagattttccatcttatttttggaccataacatcactggggtcatcaaagatttcaaagaccctacaggtcatctatcccatatttyctcacttattagtccccaaaattttaccggaattttaaattttttaattgcaagtaaattattcacacttagtagaatggaaaatacaaacattttcatggtataggtaaaaatgcatttaaatcacctgaagaaaaattgcagttgcctctacactctaaaaaccacttcctgcatggaaaagagagctcataaccacaaaagaaattctacccagaaggaaactctttctgtcatcgaacttaaccacatcccctcttgttctttactcagtggaaattaaaaataatctttctcaaatgagctaagaaaagcaacacctcctttcttacacagccacctcttattaagtacatcctaagttaaagacttttcttacatattgctgaatttgacttaaaatttggaggtcctc

SEQ ID NO: 517313 - DNA, 625 bp, Homo sapiens
gactaaactttatttatattatgcatagttttatttctattgaatttcattacaaataaaatagcctttttaaaatccatcttataatctcactttgtggcagaaattgaatccctttaagaaaagattttccatcttatttttggaccataacatcactggggtcatcaaagatttcaaagaccctacaggtcatctatcccatatttcctcacttattagtccccaaaattttaccggaattttaaattttttaattgcaagtaaattattyacacttagtagaatggaaaatacaaacattttcatggtataggtaaaaatgcatttaaatcacctgaagaaaaattgcagttgcctctacactctaaaaaccacttcctgcatggaaaagagagctcataaccacaaaagaaattctacccagaaggaaactctttctgtcatcgaacttaaccacatcccctcttgttctttactcagtggaaattaaaaataatctttctcaaatgagctaagaaaagcaacacctcctttcttacacagccacctcttattaagtacatcctaagttaaagacttttcttacatattgctgaatttgacttaaaatttggaggtcctc

SEQ ID NO: 517314 - DNA, 494 bp, Homo sapiens
cttaaatatctatttttgtattttagaaaatatgtgctagtattattacctacttgtttgttttgagttgcatgaaatatagaaccatgttaacatagaattgagatatttatataaaatgtaaaaccttacacagttgtcctaaatgaaagagaagaaatacaacagataaagtagtgttattttcctcaactttggtccttctcaactctytataatagtttccctttctatgagtggtaagaattcatgagattgtaacatagaacaaatcttccaaagaggatgacactgctttttaaataataaagactagattaattattaaaaggaaatataaagaaatttacaagggagacatttcatgaaaaatagctacctgttctttgaaagaaagaaaaggtgtagcatattctttatcgactacttcctcctctgggggaaaagaaaggtgagtgctttgacaatatttatgtgagcaggatgaaataatg

SEQ ID NO: 517315 - DNA, 476 bp, Homo sapiens
aagaatacatgacatcaaaaatcctctttgtctctattacctctacacaaattctagttctttctttctaatcaatgtcagtaccctgagattattaacacagcctctctcaatcccttgaacaacatatctctttagataattatgaaagaatatgttaagaataagaaaatttgcatggaactatgcctggctgacaaaaaccagtgggaatgaaacgaacatatgcttagaagtcagagagacctgagtttgaatcttgactctgctatttctagttggataaatctctgagcctctagctcttcatcttgaaatacttaacactgatgtgttatatattaagttggtctatagaagcactaacacattatagccttccatttttgaataatggtcctcyagataaaatacaaagggaaaccagatgtgcctttataatctgtcattatatattgattattgatttggggagt

SEQ ID NO: 517316 - DNA, 472 bp, Homo sapiens
ctgggaggagccctcttgtgacaaacaataacaacaacarcaacaaccttcaaacattgaattcagaaactatccctttaaaggtgatcaaatttgattgggtaagtctgtgacacagtttatacccagggcattgttgaaaacatgaatcaactaccaaaattactgtcatcccagagtggctatgagcacacccaagcctgaagagcaacatgaaaggctttggactgcatgggaagaatagatgccactatagtaatacagtcagttagttaaatttaaaaaaaagaaacaaaagaacaataacaagccccataagggtgaccagtgttgagttgctatattatataaaatgtccagattcagcaaaaaaaaaaaaaatatgagacatgcaaagaaacaggaaaacgtgacctacacactgggaaaaaatcaggcaaaagaaactgcctgttgagaggaaccagatgtt

SEQ ID NO: 517317 - DNA, 472 bp, Homo sapiens
ctgggaggagccctcttgtgacaaacaataacaacaacaacaacaaccttcaaacattgaattcagaaactatccctttaaaggtgatcaaatttgattgggtaagtctgtgacacagtttatacccagggcattgttgaaaacatgaatcaactaccaaaattactgtcatcccagagtggctatgascacacccaagcctgaagagcaacatgaaaggctttggactgcatgggaagaatagatgccactatagtaatacagtcagttagttaaatttaaaaaaaagaaacaaaagaacaataacaagccccataagggtgaccagtgttgagttgctatattatataaaatgtccagattcagcaaaaaaaaaaaaaatatgagacatgcaaagaaacaggaaaacgtgacctacacactgggaaaaaatcaggcaaaagaaactgcctgttgagaggaaccagatgtt

SEQ ID NO: 517318 - DNA, 472 bp, Homo sapiens
ctgggaggagccctcttgtgacaaacaataacaacaacaacaacaaccttcaaacattgaattcagaaactatccctttaaaggtgatcaaatttgattgggtaagtctgtgacacagtttatacccagggcattgttgaaaacatgaatcaactaccaaaattactgtcatcccagagtggctatgagcacacccaagcctgaagagcaacatgaaaggctttggactgcatgggaagaatagatgccactatagtaatacagtcagtyagttaaatttaaaaaaaagaaacaaaagaacaataacaagccccataagggtgaccagtgttgagttgctatattatataaaatgtccagattcagcaaaaaaaaaaaaaatatgagacatgcaaagaaacaggaaaacgtgacctacacactgggaaaaaatcaggcaaaagaaactgcctgttgagaggaaccagatgtt

SEQ ID NO: 517319 - DNA, 472 bp, Homo sapiens
ctgggaggagccctcttgtgacaaacaataacaacaacaacaacaaccttcaaacattgaattcagaaactatccctttaaaggtgatcaaatttgattgggtaagtctgtgacacagtttatacccagggcattgttgaaaacatgaatcaactaccaaaattactgtcatcccagagtggctatgagcacacccaagcctgaagagcaacatgaaaggctttggactgcatgggaagaatagatgccactatagtaatacagtcagttagttaaatttaaaaaaaagaaacaaaagaacaataacaagccccataagggtgaccagtgytgagttgctatattatataaaatgtccagattcagcaaaaaaaaaaaaaatatgagacatgcaaagaaacaggaaaacgtgacctacacactgggaaaaaatcaggcaaaagaaactgcctgttgagaggaaccagatgtt

SEQ ID NO: 517320 - DNA, 547 bp, Homo sapiens
tttcgaagttccttctcatcttgttttcccttcgtgccaaaccataaaagcagagcggagggctgggcgcggtggctcacgcctgtaatcccagcactttgggaggccgaggagggtggatcatgaggtcaggatttcgagaccagcctggccaatatggtgaaaccccgtctctactaaaaatacaaaaattagccaggtgtggtggcgtttgcctatagtcccagctactcaggaggctgaggcagaagaatcgcttgaacccgggaaraggaggttgcagtgagccgagatcgcgccactgcattccagcctggacaacagagcaagactctgtctcaaaaaaaaaaaaaaaaaaaaaagtagagcatagggtagaacatctagtgggtactggtacttattgattaattcttcaatttgggaaactaggtaaaaaaaaaaaaaaaaacaaccctgcatattctcagaggaatgttataacagttcttgataaagctagaacaaaatagcttatatttgatatgtcagttaagaattgggttca

SEQ ID NO: 517321 - DNA, 454 bp, Homo sapiens
agatccatccatagtatactaatttgcattctccatcatttttgtctaattcttacccagagctttttcattgagtttcagccaccaggggaacaatccacctacagacttggccatatgggatgcagtgcatattctccagtgtcctgggcctgatcctaattgtcaccatccgagccaaaatgtgtcactccaaacatgggcaggggtgctcttgggcattcataagatgcttaatggggctttcagcacagtgttgctgacagtgtgtgttttaattagacttctaagtgcacatttatttttcccactagaccagtcctacatgtaggtgaaagagacagccacgtgattgtaggtgtcagacagttgttgtcgagcacggccaccttaaartaagtgaagtgtaagtattttaaattataaggcaaacaaactgttccccacctgacct

SEQ ID NO: 517322 - DNA, 630 bp, Homo sapiens
agatatgtgtgtatacatacgtgtgtgtgtgcatgtgtgtaaatgcatgaaatcaggatcagaaagataagcactaaattgttgaatgcttagctgtaaacaggagtgttttggaaggtggagtgaaataaaagagtctcttattttattctagatatttgttagttatgaaacttttacagaaagaatttttatgtattaattgtataataaaagattaattaatcaagtatataaagtgcacgttaagaactctgaatttcaccttatgcttcaaggtaaaatttgtatgcccaaattacaggaaaaattagccctatccttcactgagctcaccmcacctcatcaggaaaaatgtatttgatcctcagaagaatgtttgccaaagtaaggtgtatacaaggaaggaaaatcataattgttaggggtttcaaatctatttcataagttgaaagaaacagaactgattaacacagtgaagaataaatcagagtggttaagactttgcaaatattttaaacaacattaagcaaaggagtcaaaaggtttaactaaaggatataaccagcatcagtggaagtataaggaggcggatttttctgtcactatcagaaattctaaccattacag

SEQ ID NO: 517323 - DNA, 474 bp, Homo sapiens
ttgtttgggcagagtatcaacgtgtggcacacacaagctaaacaacccagtagagactgcattcttyaagaggagctgcttacctggcaatgcccgctgggagcttccctaactggaggtcccctcgctgggagcatcctgccagtgcagacagacgtataacctgggatgtctgttttttcttttttctcttgacctagtcagaagattgaacatgttgtaactgtagaaagcccgtcatccttgtgtatgcacttgctgaaagatccactgaagagcaaccttcatgaacattaccaggggacttgtgctcctataaaacgcactgttttcctcactgcgaggtgggtctctcaccgcgatggactatctgtgatcacagagcacttcttccctgggccttccctgtcacactgatggtgtgagtatgtagggcaggggtgggagtgaacatgttaatctcttttgaataaa

SEQ ID NO: 517324 - DNA, 492 bp, Homo sapiens
aactatataacaaaagggtaaaccctaatttaaattacagatgttagctaatagtaatgtactaacgttggtttgttggttgtaacaaaggtaccacaccaatgcaaggtgttaatttttaaaaatagccagaaaccaaaaaaaccaacctccaaacaaaatagaaagtactcttcctaaactcttctgctgcattttcctgtgggttttgaacccaaaaggaggctttgaggcagcccctgtcccaccacattgctcgctgccccgacaggagagtttctgaccctgattctgttgcccgacacatggctgttcttttgtacatacatgagtacttgctagccaaatatttggtgagcatgctctttattcatccatatgccatgaatataagtgaayggagcaatttattcaacaactattgttaagtaactggtaggaagcaggcattgctaggtgtcattgaacaaaatggccaataaccactgtcgt

SEQ ID NO: 517325 - DNA, 475 bp, Homo sapiens
ttgtgtcaattttactgggccatggggtgcccagaaatttggtcaaatattattctgagcatttgtgtgggggagtttttgaataagtttaatatttaayttggtagactttgagttaagtagattgccctcgttaatgtaggtgggcctcattcaatcagttgaagggctgaagggaatgaaatcactagtttcttcaaagcaagagagaactctaaagcagactaccttcagactggaattgtaccactggctttcctgagtctcctctgccagctcaccttgcagattttggacttactagccttcatatgacatgagccaattccttactataaatctctttgcatgtgtgtgacccaacctctttcccctccaacacacaccctattagttgtgtcttactggagaactgtgactatcatactctgtttatatacgatggagaggtaacttttactgtcactttataata

SEQ ID NO: 517326 - DNA, 599 bp, Homo sapiens
atacaatgatttgtttcattaagtctataaccagaaacttatgcttgacgtgaaaccttttaggaagtgtttgtctgaagctgtctacatagcttattgcaatgattaatttttgtgtcaattttactgggccatggggtgcccagaaatttggtcaaatattattctgagcatttgtgtgggggagtttttgaataagtttaatatttaacttggtagactttgagttaagtagattgccctcrttaatgtaggtgggcctcattcaatcagttgaagggctgaagggaatgaaatcactagtttcttcaaagcaagagagaactctaaagcagactaccttcagactggaattgtaccactggctttcctgagtctcctctgccagctcaccttgcagattttggacttactagccttcatatgacatgagccaattccttactataaatctctttgcatgtgtgtgacccaacctctttcccctccaacacacaccctattagttgtgtcttactggagaactgtgactatcatactctgtttatatacgatggagaggtaacttttactgtcactttataataagtgattaatgc

SEQ ID NO: 517327 - DNA, 475 bp, Homo sapiens
ttgtgtcaattttactgggccatggggtgcccagaaatttggtcaaatattattctgagcatttgtgtgggggagtttttgaataagtttaatatttaacttggtagactttgagttaagtagattgccctcgttaatgtaggtgggcctcattcaatcagttgaagggctgaagggaatgaaatcactagtttcttcaaagcaagagagaactctaaagcagactaccttcagactggaaytgtaccactggctttcctgagtctcctctgccagctcaccttgcagattttggacttactagccttcatatgacatgagccaattccttactataaatctctttgcatgtgtgtgacccaacctctttcccctccaacacacaccctattagttgtgtcttactggagaactgtgactatcatactctgtttatatacgatggagaggtaacttttactgtcactttataata

SEQ ID NO: 517328 - DNA, 475 bp, Homo sapiens
ttgtgtcaattttactgggccatggggtgcccagaaatttggtcaaatattattctgagcatttgtgtgggggagtttttgaataagtttaatatttaacttggtagactttgagttaagtagattgccctcgttaatgtaggtgggcctcattcaatcagttgaagggctgaagggaatgaaatcactagtttcttcaaagcaagagagaactctaaagcagactaccttcagactggaattgtaccactggctttcctgagtctcctctgccagctcaccttgcagattttggacttactagccytcatatgacatgagccaattccttactataaatctctttgcatgtgtgtgacccaacctctttcccctccaacacacaccctattagttgtgtcttactggagaactgtgactatcatactctgtttatatacgatggagaggtaacttttactgtcactttataata

SEQ ID NO: 517329 - DNA, 599 bp, Homo sapiens
atacaatgatttgtttcattaagtctataaccagaaacttatgcttgacgtgaaaccttttaggaagtgtttgtctgaagctgtctacatagcttattgcaatgattaatttttgtgtcaattttactgggccatggggtgcccagaaatttggtcaaatattattctgagcatttgtgtgggggagtttttgaataagtttaatatttaacttggtagactttgagttaagtagattgccctcgttaatgtaggtgggcctcattcaatcagttgaagggctgaagggaatgaaatcactagtttcttcaaagcaagagagaactctaaagcagactaccttcagactggaattgtaccactggctttcctgagtctcctctgccagctcaccttgcagattttggacttactagccttcatatgacatgagccaattccttactataaatctctttgcatgtgtgtgacccaacctctttcccctccaacacacaccctattagttgtgtcttactggagaactgtgactatcatactctgtttatatacgatggagrggtaacttttactgtcactttataataagtgattaatgc

SEQ ID NO: 517330 - DNA, 475 bp, Homo sapiens
ttgtgtcaattttactgggccatggggtgcccagaaatttggtcaaatattattctgagcatttgtgtgggggagtttttgaataagtttaatatttaacttggtagactttgagttaagtagattgccctcgttaatgtaggtgggcctcattcaatcagttgaagggctgaagggaatgaaatcactagtttcttcaaagcaagagagaactctaaagcagactaccttcagactggaattgtaccactggctttcctgagtctcctctgccagctcaccttgcagattttggacttactagccttcatatgacatgagccaattccttactataaatctctttgcatgtgtgtgacccaacctctttcccctccaacacacaccctattagttgtgtcttactggagaactgtgactatcatactctgtttatatacgatggagaggtaayttttactgtcactttataata

SEQ ID NO: 517331 - DNA, 399 bp, Homo sapiens
tttcaggccctaaagatttgagtcatcctagctgaggttccaaatgttgggatcagctacgtgttatctttmctgagctctgcccaaattgtagattcataagcaaaatcaatgattgctgttatattaatccattaaggttttatttctcaggggagaagtgttactcagcaatggctaaccggaacatcttccattattattgattatatgagtttgaaattatgaaaattgttggagagtttccttatcaaatctttcctatgtagtaatatagttggagccatcacaaagctgaattttgaagcaggtaaaacttgtcttttatgccctctattttaaatctctctctctctctctttctctctgtatgtatgcatatatatacatacatatatg

SEQ ID NO: 517332 - DNA, 501 bp, Homo sapiens
acagctgaatttgagcaattamattccaaagcagattacattccattatgctggtaggcctcatccaattagttgaaggccttaatagaaaactgccttcaaactcaaactgaagcatcaactcttacctgggtcttcagcctgctagcctatccttcagattttggaattgctagctcccacaattttgtaacctaattccttaaaatctctctctctctttctctctccagaattatcaataggctatatgtgcctatatatatacatatacatacacatatgtatatatacatctgtgtatatataaacacgtgtatatacatacacatacacatctgtatatatatgtgtgtgtgtatatatatgtttctgtttctctggatgatattaatacaccagtcaaaatgttagctgcattataaatataaatggttctaaatgcctcttctaggcaaaattattatcactcaatgattgtactttcttcaatttttgtat

SEQ ID NO: 517333 - DNA, 502 bp, Homo sapiens
aacagctgaatttgagcaattacattccaaagcagattacattccattatgytggtaggcctcatccaattagttgaaggccttaatagaaaactgccttcaaactcaaactgaagcatcaactcttacctgggtcttcagcctgctagcctatccttcagattttggaattgctagctcccacaattttgtaacctaattccttaaaatctctctctctctttctctctccagaattatcaataggctatatgtgcctatatatatacatatacatacacatatgtatatatacatctgtgtatatataaacacgtgtatatacatacacatacacatctgtatatatatgtgtgtgtgtatatatatgtttctgtttctctggatgatattaatacaccagtcaaaatgttagctgcattataaatataaatggttctaaatgcctcttctaggcaaaattattatcactcaatgattgtactttcttcaatttttgtat

SEQ ID NO: 517334 - DNA, 502 bp, Homo sapiens
aacagctgaatttgagcaattacattccaaagcagattacattccattatgctggtaggcctcatccaattagttgaaggccttaatagaaaactrccttcaaactcaaactgaagcatcaactcttacctgggtcttcagcctgctagcctatccttcagattttggaattgctagctcccacaattttgtaacctaattccttaaaatctctctctctctttctctctccagaattatcaataggctatatgtgcctatatatatacatatacatacacatatgtatatatacatctgtgtatatataaacacgtgtatatacatacacatacacatctgtatatatatgtgtgtgtgtatatatatgtttctgtttctctggatgatattaatacaccagtcaaaatgttagctgcattataaatataaatggttctaaatgcctcttctaggcaaaattattatcactcaatgattgtactttcttcaatttttgtat

SEQ ID NO: 517335 - DNA, 641 bp, Homo sapiens
aacagctgaatttgagcaattacattccaaagcagattacattccattatgctggtaggcctcatccaattagttgaaggccttaatagaaaactgccttcaaactcaaactgmagcatcaactcttacctgggtcttcagcctgctagcctatccttcagattttggaattgctagctcccacaattttgtaacctaattccttaaaatctctctctctctttctctctccagaattatcaataggctatatgtgcctatatatatacatatacatacacatatgtatatatacatctgtgtatatataaacacgtgtatatacatacacatacacatctgtatatatatgtgtgtgtgtatatatatgtttctgtttctctggatgatattaatacaccagtcaaaatgttagctgcattataaatataaatggttctaaatgcctcttctaggcaaaattattatcactcaatgattgtactttcttcaatttttgtataagcacactgaattcttatatattttgggagaatgatgctatattttctttatattcattagcaggttagtgtgaattaatttgtcctatcactttgattcaagtgttggccaggagaattggttaaattactactaag

SEQ ID NO: 517336 - DNA, 528 bp, Homo sapiens
gttgaaggccttaatagaaaactgccttcaaactcaaactgaagcatcaactcttacctgggtcttcagcctgctagcctatccttcagattttggaattgctagctcccacaattttgtaacctaattccttaaaatctctctctctctttctctctccagaattatcaataggctatatgtgcctatatatatacatatacatacacatatgtatatatacatctgtgtatatataaacacgtgtatatacatacacatacacatctgtatatatatgtgtgtgtgyatatatatgtttctgtttctctggatgatattaatacaccagtcaaaatgttagctgcattataaatataaatggttctaaatgcctcttctaggcaaaattattatcactcaatgattgtactttcttcaatttttgtataagcacactgaattcttatatattttgggagaatgatgctatattttctttatattcattagcaggttagtgtgaattaatttgtcctatcactttga

SEQ ID NO: 517337 - DNA, 505 bp, Homo sapiens
ccagtcagagacaatcacaggactgcaatcaggaagcctagtttgtgtcctgagtcagcaccttctccccgacttctcaatgactactccaaattttaactattcttaagccttcaccctaatccacacctcagtctttactgaaaacctacyttctaccacatcaagaaaatctgaaatcatcaagcaggaactccttcaaactctaacacctgcctcttaaaaatgagtctgtctccataatcagtcttatcttttcagtctcataggaagagttatcactttttgttcaacaccaacttgtaaatgagatgtctttcttagtcctcctttaaaatgtctgctcccctaacctggaattttatgttttcactttctcaaggcttaatcctcatcagctataacagggtctaatctctgtcattttgaaagttacccttcttttattttatatccctcttaagctttcttaagcaggtttcgctgtagaccctttgagatctgg

SEQ ID NO: 517338 - DNA, 628 bp, Homo sapiens
gaccctatgaggcatggcagctcaagatggcagcacagagagggaagcaagacagccagtcagaccagctcagagtcaggagggactcccaattgcaggaaaaaggtaaacaagagatctccagcatcaacatccacacatcttcagtcctagctacaataaagccccttagtcctcataagccctaagcctagatagggagctgcctggagtcaacaagactacattattccagagggagaactcacactgggtcctacccctgggaccctggtgctgcagcacagtaccagtttgaacgcagagccaacaggagactatatcctgccctgggacccaatagccccggcatctccacatccctggggtcctaccaacattctcatacattcactcagaggkctacagcgtcacagaacttcctggacctattgatgtgccacaccaccagctcttaagctcacacagcaccctacaccctggggaatgggcagtccagcacattagggaggctgcccccaggacatagggaacaaaagtgtatacttcacagagcctgagagcagcatgcctggggccaccaccactgacagtgattccaccccccacaagcagtggagtcatcaca

SEQ ID NO: 517339 - DNA, 488 bp, Homo sapiens
tcttcagtcctagctacaataaagccccttagtcctcataagccctaagcctagatagggagctgcctggagtcaacaagactacattattccagagggagaactcacactgggtcctacccctgggaccctggtgctgcagcacagtaccagtttgaacgcagagccaacaggagactatatcctgccctgggacccaatagccccggcatctccacatccctggggtcctaccaacattctcatacattcactcagagggctacagcgtcacagaacttcctggacctattgatgtgccacaccacyagctcttaagctcacacagcaccctacaccctggggaatgggcagtccagcacattagggaggctgcccccaggacatagggaacaaaagtgtatacttcacagagcctgagagcagcatgcctggggccaccaccactgacagtgattccaccccccacaagcagtggagtcatcaca

SEQ ID NO: 517340 - DNA, 653 bp, Homo sapiens
tcacgtccccactgcaatggaaaaccatactctacaaccttggaaaaggggtgaaagaccttccagatttatgtagcaaacacaaccaccccaccttagacttgaacatctacccctcacagaaagtaacagtaatgtgtattccggaatctttttagtccaatatatttcaattgcttttcatttgtgttactgcgaaagtagggttgggtggagacttacaaactcttaatagagactattaaatagagactattaaaaacgcaagagatacgataaggtagtggaattattcttgatttggagtcagaccaacttgagtttgaatcctagtacttcatttattaacgattagtttacattaagcaagttacataacctctccaagcttcakttttctcaactgtaaaacagtgctaatattctcttcattggattatggtgacgcttaaatcagataataggaataaattgcctagtgtagggcttggcccacggtaccccattaaatgtgtgccattccctccagcactccatactttccctagactctcactttgtgttttacaggagagggagagggtggatgcaaaaggaagtgaacagacatctttctccagcagacttcacatcacttagagcaactcatggag

SEQ ID NO: 517341 - DNA, 614 bp, Homo sapiens
ttgacatgtgaaattaaccagtacaaatctatctcatggatcagactgattcttgaatgctgtttctccactgccccttttcctagctgtttggctccaggcaagatttttaacatctttaagtctcagcttcctcatttgtgaaaaagaaataattatagaaccctcacaggtttgattagcacagtgtctggcacagacgccatagatattactaatgaagttgcttaatgttttcattgccatgggtagtgtgcatcattgtccatttgatttattttgattacatcacagtgattttgattaaaggggtttgtctagaaaggcagatacccacaataaggaattaatcttaaagacctgcctggcattagcactgtaacrtaatatctgtattaatttcctcagactgtcaaaaacaaagtatcgcaaactgagtgacttaaagtctttttttttttttgtagttatagaggttagaaatttgaagaaaccgccccctgattcaattatctcctgccaggtccattctacaacacatgggaattatgggagctataattcaagatgagatttgggtggggacacagccaaaccaaatcattctgcccctg

SEQ ID NO: 517342 - DNA, 614 bp, Homo sapiens
ttgacatgtgaaattaaccagtacaaatctatctcatggatcagactgattcttgaatgctgtttctccactgccccttttcctagctgtttggctccaggcaagatttttaacatctttaagtctcagcttcctcatttgtgaaaaagaaataattatagaaccctcacaggtttgattagcacagtgtctggcacagacgccatagatattactaatgaagttgcttaatgttttcattgccatgggtagtgtgcatcattgtccatttgatttattttgattacatcacagtgattttgattaaaggggtttgtctagaaaggcagatacccacaataaggaattaatcttaaagacctgcctggcattagcactgtaacgtaatatctgtattaatttcctcagactktcaaaaacaaagtatcgcaaactgagtgacttaaagtctttttttttttttgtagttatagaggttagaaatttgaagaaaccgccccctgattcaattatctcctgccaggtccattctacaacacatgggaattatgggagctataattcaagatgagatttgggtggggacacagccaaaccaaatcattctgcccctg

SEQ ID NO: 517343 - DNA, 672 bp, Homo sapiens
acatggtagtaacataagaaggtacccttgttttaggtgaaaaggagttatacactgcagtatttaaaggtgatgggtcaacacatacctctctaaagaaaaagtaaaacagaaatagggaaaatgcagtaaaatttaacaattgaagaacctgtgtgaagggcatgcaaaagttctytgtacttacaactttttctgtaggtttgaaagtatttcaaaataaaaaagtgtgtatacagaaaatattttttaaattataaaaaaacaaataaatgtatatgggaataaattatggattaccatctggaaatattgatgacatggcatcccatggaaggccacaggcatacccagggagacacaggaaggcaaggatttttaaagacaaaatgtggagggttacataagttattttgaactcattatccttggctacaagaatcaatgacaagactggtgtcagtccaaggttgaaaaggcagttgctgggcagacgtcctggcagaagtattccttgtgaaagcttgtcatggccttcatacatggtcatggttttgaagagtccttgtagtagtttttatcataggtatgtgtgtgtgtgagagccttccattctagcctcccaactccattttgttagagtttggcataagtgacttcattttcagttga

SEQ ID NO: 517344 - DNA, 579 bp, Homo sapiens
aaaaacaaattcttttcaaatatcttattattaggttttagccagaagaaacagcaaccattcctgaaagtattaaactttttttaaagtcaattcttctcataggttccaataggccagttgtttagaatgtgagctcttaaaaaaaaaaatacttttaggtacaaaattccaaatctccgaaggtatacctacttcaatttcaattcaaaaccagtaagccttctatggcttaacaatggaagaggtgtcctcaagagggtacaaaagagtccctctcaagatccaaaacttctcccacagagagagtaaagtactctcctaagaragaaaagaccttcattactaacgaggcaataaaagttgagaaaattaagataaattctccttaggatgaataatgcaaaagacagaaatcaacaaccaaacaaaaaaccaagaactatttctgggaggctgtgggtcaatagtcaatgagcactcaaaaccaaatttacaaaagtcacaattcaaagaacaaattattacaaatgcttttcttttctaccaatccacatttagaaaaaaaaaataagaagg

SEQ ID NO: 517345 - DNA, 604 bp, Homo sapiens
ctaaaatgatttgcctaggactgctaagtggtggatttggggctggaatgcatcccgtaggactgccatggaccctcttgcatgttccattagaatgtggcagcagaactgcagtgcgcgcacacacacacacacacacatacacacaagctaaagtcacgtaaaaaatggtctgttttgctggggcaacagtattactaagtgtggtgatactatgttttctaatttaaccataatattcctagctctaatttctttccatagggaggttcaaaaaactttaatacaagatgagcaaaatgctttctcttataagatatgaatctagaaggactcaacattcttttttctttttttttctgtttagtttgttgatgttttccgagaacttagaacamtatccagcatatagtaggtgctgaaaaatatttttgaacaagtatagtaaaaaatgtcttagaatataatcttggtttaatcataaggtagtatcactttaaaaaaattctacaaaataacccaattggattcctcccatcatctaaaccagtgagtgagtgtctcagacaatcaggtttggatccacactctatggctttattat

SEQ ID NO: 517346 - DNA, 511 bp, Homo sapiens
tggatttgtatgttttgtgctcagtagcgcctatttgatggcataaacaagagaaagctgggaaaattgcttatgaagcaatgtaaattctttgttatcttgacatcattcccctctttaccatttatatctgagctaatttgtattgtagtgacagactgtacattcagcaacatggatggattttaaaaacatagtgctgagatgaaaaggtaaacagcagggaatttttttgtacaatattacttatgtaaattaaaaacaaacagaacactacatatcttacaaggacacacacatattggaggatctatttcaaacacattattagaggaggtagatgtctattgggagggagaggaattgagatgaagacacagaaaagagaacacaaacagagctagacaagaaaggagaaatctagcaacaattgctgaacayaatgcaccgcgtacgagggagcgtaattaacgcaactgctctgagaacagcagcaaaatatgtctgttta

SEQ ID NO: 517347 - DNA, 511 bp, Homo sapiens
aatgtcttattcaatccactgaaggcctaaatagaacagactcttataaaagagtgaaataatattctctttctttgcctgaccttggtcttctcctaccttcagacttgacatctgactgaaactttaactatcattgttcctggttctcatacctttagactcagactagaattataccatctgctctcctgagtctccagcttagtgactgcagatactgggacttccataatcatgtgaatygatttcttataatttctctcctgcatgtataataagagagagtctgttcctctggtgtacacagacaatacactatgtcataggctatgtgtaaggataaacaatatctgtaaaaaacaggaatattgcttagtctttggaagactcttaataagtagtagtactcctagttattctccttcttcaaatgcatttatccctcgagtcctttaaaacttggatgaacaatttttcttatgaatttcatagaatttttgatttttta

SEQ ID NO: 517348 - DNA, 613 bp, Homo sapiens
taccctctacagagttacctaggtgaggtgaatattgaaacggcctcatttaaacccctacccaaaagcctccagtgtcttatgattatgcttagaatgaaatccacatttccttatgtgattyacgtggccctgtgtaatctgtccttggcctctctcttctccctttctgcctttctcttccgtatttccaatcactttagtgttctagcagattgtccaataaatcaaaggtgttttagtgtcatggacttcccctccacttagaattttcttctccaaaaccttactttttcaccttatttaggtgtctgttcaaatgtcacttcctcaaagagatattatttcaggaggaaagaaaagtatatatacatataaaacagagtctctgcacttagctgggtttatttctctctttgtcacttacagctatctgaaattatattataatctatctatgaatgagcaggctgggtgtgaaagcaatggggagttttgggggttgtgtcttaatcaatggcacatgccttgaggagatagccagtcactgcaccgctccatgtacttgctgtaaattattcagatttattattcttactgcctgcatccctta

SEQ ID NO: 517349 - DNA, 686 bp, Homo sapiens
agaaacttgatgctcagagatatagtttatagagttaataagtgaattagatgggatttgagtataactctatctccattgcccaaataagccatagagaaagattatagggatggtaacaggctgtgtgcatgtattaggtcaattggatggctctattggcaaagactgttggttatatcctccctrccccattcctgtcaccttaaaatcaagatattttttaaagcgtataaggctaagttgattaaattgtttcaaaatttcattggaacaattttctgtactagcttgctttgctcctcctagttcttccaaagaaatgggtgtgttgagttcttgccactcatggaattagaaagggagattagggcaaatcatatgccgctaagtttttcaattatgtccagttctggcctgagcaaatatacttaattgaaagaaacctatgggggaatgtgcttagctgaattgaaagtaactattatcacaactaaatttaatccaaatgaattgaactataaaatatgcatagacatctaacactttaagtctctgaaaaaattatatcattaaacttattcattatcattttctttgagtactcagtttcagattctgttatttaaggctacagaaactatgtgaagaaagcattcaatcaaaagtagttttgtctatataaa

SEQ ID NO: 517350 - DNA, 686 bp, Homo sapiens
agaaacttgatgctcagagatatagtttatagagttaataagtgaattagatgggatttgagtataactctatctccattgcccaaataagccatagagaaagattatagggatggtaacaggctgtgtgcatgtattaggtcaattggatggctctattggcaaagactgttggttatatcctccctgccccattcctgtcaccttaaaatcaagatattttttaaagcgtataaggctaagttgattaaattgtttcaaaatttcattggaacaattttctgtactagcttgctttgctcctcctagttcttccaaagaaatgggtgtgttgagttcttgccactcatggaattasaaagggagattagggcaaatcatatgccgctaagtttttcaattatgtccagttctggcctgagcaaatatacttaattgaaagaaacctatgggggaatgtgcttagctgaattgaaagtaactattatcacaactaaatttaatccaaatgaattgaactataaaatatgcatagacatctaacactttaagtctctgaaaaaattatatcattaaacttattcattatcattttctttgagtactcagtttcagattctgttatttaaggctacagaaactatgtgaagaaagcattcaatcaaaagtagttttgtctatataaa

SEQ ID NO: 517351 - DNA, 686 bp, Homo sapiens
agaaacttgatgctcagagatatagtttatagagttaataagtgaattagatgggatttgagtataactctatctccattgcccaaataagccatagagaaagattatagggatggtaacaggctgtgtgcatgtattaggtcaattggatggctctattggcaaagactgttggttatatcctccctgccccattcctgtcaccttaaaatcaagatattttttaaagcgtataaggctaagttgattaaattgtttcaaaatttcattggaacaattttctgtactagcttgctttgctcctcctagttcttccaaagaaatgggtgtgttgagttcttgccactcatggaattagaaagggagattagggcaaatcatatgccgctaagtttttcaattatgtccagttctggcctgakcaaatatacttaattgaaagaaacctatgggggaatgtgcttagctgaattgaaagtaactattatcacaactaaatttaatccaaatgaattgaactataaaatatgcatagacatctaacactttaagtctctgaaaaaattatatcattaaacttattcattatcattttctttgagtactcagtttcagattctgttatttaaggctacagaaactatgtgaagaaagcattcaatcaaaagtagttttgtctatataaa

SEQ ID NO: 517352 - DNA, 516 bp, Homo sapiens
ctggttgaatgggtttcttttctgcttccatttacttttctaccaaatagatcaattgtgtgactatggcttatgaaagagagatatagaaaagttagaattgtttsacgttttgaaactcatttgtaagtaaagattaaaaagctgttgtgatttagtttagccagagaagaaaagattggggcaaacttaaagtgttctcatgaataggaacttctatgctctattgaaagtaagacaaataaaaatgtgttcaaagaacagttatgggatgggtagacttctttacaggtaaattttgccaagaactttgactttgaaataaggattttgaaataagaactttagacttcaaaataaggatgtagaatcttttaccgtaagctcctttaaaagcaatgaagagtctcagtttgtagcatttagggggacggattctacatgaaggcatggaggtggagcagttggcctacaaaagatcctgcaggttatgattttatgaaatgcttggtatgt

SEQ ID NO: 517353 - DNA, 516 bp, Homo sapiens
ctggttgaatgggtttcttttctgcttccatttacttttctaccaaatagatcaattgtgtgactatggcttatgaaagagagatatagaaaagttagaattgtttgacgttttgaaactcatttgtaagtaaagattaaaaagctgttgtgatttagtttagccagagaagaaaagattggggcaaacttaaagtgttctcatgaataggaacttctaygctctattgaaagtaagacaaataaaaatgtgttcaaagaacagttatgggatgggtagacttctttacaggtaaattttgccaagaactttgactttgaaataaggattttgaaataagaactttagacttcaaaataaggatgtagaatcttttaccgtaagctcctttaaaagcaatgaagagtctcagtttgtagcatttagggggacggattctacatgaaggcatggaggtggagcagttggcctacaaaagatcctgcaggttatgattttatgaaatgcttggtatgt

SEQ ID NO: 517354 - DNA, 516 bp, Homo sapiens
ctggttgaatgggtttcttttctgcttccatttacttttctaccaaatagatcaattgtgtgactatggcttatgaaagagagatatagaaaagttagaattgtttgacgttttgaaactcatttgtaagtaaagattaaaaagctgttgtgatttagtttagccagagaagaaaagattggggcaaacttaaagtgttctcatgaataggaacttctatrctctattgaaagtaagacaaataaaaatgtgttcaaagaacagttatgggatgggtagacttctttacaggtaaattttgccaagaactttgactttgaaataaggattttgaaataagaactttagacttcaaaataaggatgtagaatcttttaccgtaagctcctttaaaagcaatgaagagtctcagtttgtagcatttagggggacggattctacatgaaggcatggaggtggagcagttggcctacaaaagatcctgcaggttatgattttatgaaatgcttggtatgt

SEQ ID NO: 517355 - DNA, 616 bp, Homo sapiens
tgaaggcgaccttgacacagccccaggaggtcctgacgacatgtgcccaaggtggacgggcacggcttcgttctatacattttagggagacatgagaaatcaatcagtacttgtaaaatgtacattgattcgttctgaaaaggcgggaaagcttgaaacggggaaggggcttccaggtcataggtagataaaagacaaatgattgcattcttttgagtttctgattagcctttcactgaatatacaatttacaggaatagtcatttacgccttaatatggctcagtgaaaaaatagggcagaggaagcaatcagatatatattcgtctcacataagaagagggatgactttsagttctatctgtctttgtccacaaggaatttcctttataatacaggaagttatcaaatgtttgttttaaaatttatacaaatggtattatgttatatggacatgtactccaggagaaaattttaagaatgtttacaataatagggttgtaatggaaaaaaagaaaatacctcaaatatctatgtgatgaatatttggtgacagatgaatgggaaatagtagtatatttatatattaaaatacagcatggacaataaatcatcta

SEQ ID NO: 517356 - DNA, 520 bp, Homo sapiens
acgaccctatgtttccttaaagtgatattcctagattttcctctagtacagacatatgggttgcttggaagcttgttccaacagaaactctctaaagcagtgactttcaaacttttatatcggtgtaagaaacacatttcacacacacatatacacaactgactcactaccatgcatagtcctctgtgaaattttctaatccattttatgctaacctagaataasgaatgtttgccgcacttaaattgatgttgtaagtgacatataacctgaaatgtaaaggaaacactgctcttaggcagatacatgttacctgcttagggcctgagggggcaggtaacagcctgaggaagtaacagtgtcatctgcacaggggtctggaaaattcagaacaaaaaggcctgtgggaacaagtgtaccccagaaaacactcaccacagacacacacgtgcgtttctgccatgctgtctccttactcttgtatctgatctaatgacattaccgctcagtggaatcagag

SEQ ID NO: 517357 - DNA, 606 bp, Homo sapiens
gtctcacactctgtgccgaccttgcactgtgaactgcaggtttagataggaaagagacaagacacctagtaataagttactcacaatacctgtacattttggggaaaatagcctgggggccctagagaacaggggagccctgaattcattttactctgaattgttaaagatttggtccaatctcttgactcaatgattagtctgacattatccaaaagacsaaaagcagctttgattgtgcaaaggtgaaaggattttcttccttgccatgtccactcacaaagagcagaaaagcaaggaatgttcttttgtgcctttccagtcaatattattcagtgcccagagatcagttaagcagaataatcaggatcattgtagagagttattttggtagtaagtatgtcttatgacctgcactccttcgtgaaagcaaactaaatattcacattattaaatagacacccatcaagtatctgcgctgggaacatagatctcgcctataattaagaaattaactgaaaaaaaagtattttctgtatgtcaacaattaaatgttggctgtacgaatataattttctactatcactccttttggcttgacaagga

SEQ ID NO: 517358 - DNA, 627 bp, Homo sapiens
actgaccacaccctcctcccggggttattgtggggtggagcaagtcaccgatctgggaggtgctcatttattcttatcataaaatggggatccccygctatgggctgggcactggtatcaggacccaggagcacagttcctgggctcaggcatcgcataacctcatgggaacagcaaccagagaagaatttcatgaggatgagctccatgcactatcctcactccaggcctcttccttttccttcgcttttactttgcatcttaatgctcaaggctaatgccagaaaaaaaggtgaagtacgcaaagggtgtctagagcatctcaaacttctttatctcaactttacctccctctcgtgatgggctctgctcttttctccaccccatccccaattctgtgaagttcagcaaatgctaactgcacagtccttgtgcaggcactctaccaggtgctgagaaatcaaatagcataatttcaatataaaagtgagagtactgaaatcaagggaacatatctaagtcatctgttgctgccaaatgcccagatactgttttccatcaacagaactttcctgggcctccaccatggctttatgccccagcaggacagagctgccctcctggttg

SEQ ID NO: 517359 - DNA, 627 bp, Homo sapiens
actgaccacaccctcctcccggggttattgtggggtggagcaagtcaccgatctgggaggtgctcatttattcttatcataaaatggggatcccccgctatgggctgggcactggtatcaggacccaggagcacagttcctgggctcaggcatcgcataacctcatgggaacagcaaccagagaagaatttcatgaggatgagctccatgcactatcctcactccaggcctcttccttttccttcgcttttactttgcatcttaatgctcaaggctaatgccagaaaaaaaggtgaagtacgcaaagggtgtctagagcatctcaaacttctttatctcaactttacctccctctcgtgatgggctctgctcttttctccaccccatccccaattctgtgaagttcagcaaatgctaactgcacagtccttgtgcaggcactctaccaggtgctgagaaatcaaatarcataatttcaatataaaagtgagagtactgaaatcaagggaacatatctaagtcatctgttgctgccaaatgcccagatactgttttccatcaacagaactttcctgggcctccaccatggctttatgccccagcaggacagagctgccctcctggttg

SEQ ID NO: 517360 - DNA, 611 bp, Homo sapiens
tgtaagtctgggttaccacagcccccttcttgggttcaattaatttgctagagcagcccacagaactcatggaggcatctacatttagcagtttattgtaaaggatatcgcaagagatgcagatgaagagatgcatagggtgaggtatagggaaaggctgtggagcttgcatgctctctccaggttcaccaccttccaggaacctccacrtcttcagctatctggaagccctctgaacccagtccttgagggtttttatggaggcatcattctgtaggcatgactgattaaatcactggccattggtgttctgcttaacattcatcccttcttccctccatggaggttgggggctgggtctgactatcttaattctctaattctgccttggtctttcaggtgcccagctcccatcctgaagctacgtagggactactagccatttgtcaactcattaacatacaagtaccactttaaggaatccaaggattttagtagttgtatgcctggaaacctgttgaagaccaaatatatgcttcagagtatatacatgtgaataccatttgattttttattctaaaatttatcttgagctactagtcaagtttgca

SEQ ID NO: 517361 - DNA, 637 bp, Homo sapiens
gagtatatacatgtgaataccatttgattttttattctaaaatttatcttgagctactagtcaagtttgcaaggatttcaatacacatgaacttattgtagctttgtttgtaataatgaaaatgagaaattccacggtgattaggtttgaaatatacctgtgcacagcatgtgttgagatgagaaaatatctgtgatctattaagtgaatttatttgccaagaaatcttgagcctgctattccctgggttagtttctgaattcttgcattyctttcttaccatgagaagcttgccatgttgagggtgattataatttttaaagtttatattttttactctatctggctcataatacctgacctaaagttctgacagaagctggaagataaactggtgtgtgagaaattaccttagtctgggtgtttccaaggcagaagctgtgtccagtgcacatgttctgtgatcccagagagcaggaaagggcaaggacaaagagggtttggccatgaccaagggtgactggtgctccatccttctggaaactgggagctttgtgaaatgcatcttacttcaggaagtgtgtctccactggcttacatccccacagtcaatgtggcctgggtccttcactctcca

SEQ ID NO: 517362 - DNA, 637 bp, Homo sapiens
gagtatatacatgtgaataccatttgattttttattctaaaatttatcttgagctactagtcaagtttgcaaggatttcaatacacatgaacttattgtagctttgtttgtaataatgaaaatgagaaattccacggtgattaggtttgaaatatacctgtgcacagcatgtgttgagatgagaaaatatctgtgatctattaagtgaatttatttgccaagaaatcttgagcctgctattccctgggttagtttctgaattcttgcattcctttcttaccatgagaagcttgccatgttgagggtgattataatttttaaagtttatattttttactctatctggctcataatacytgacctaaagttctgacagaagctggaagataaactggtgtgtgagaaattaccttagtctgggtgtttccaaggcagaagctgtgtccagtgcacatgttctgtgatcccagagagcaggaaagggcaaggacaaagagggtttggccatgaccaagggtgactggtgctccatccttctggaaactgggagctttgtgaaatgcatcttacttcaggaagtgtgtctccactggcttacatccccacagtcaatgtggcctgggtccttcactctcca

SEQ ID NO: 517363 - DNA, 577 bp, Homo sapiens
aataaaacattgagagattcatctctatattttatttgactttgacaaatcctgtaattatgtcataatatgatgaacgttttgagaaaagtctattctaagtataatgagaacaaagaaaaaaaagattggtcctggctatagaggttagaatatttcacaagaagaaattatgttagagaatattcttgaacgatcaattggactttgccagactgtggtgggcataggggacccagaaggaacattcattctagttatgagaaagggcccagagacatggcgaatcygggggacaaattccacattttccatatacttgatcattaagcacatgaccaagtgtgtcagtgcatgaggatggacaagatagattggagccttcactgtttttttcttctcatttaccaaaaatttcatcattttagaattgtcccagttttctaattttaagtcagggcttctttgtcatgcttaaagtcttaccctctgtgccctctgctctgtgttctatatggtagcctgaaatttggccctgttatatatatttatttatgccagactcctgaaggtgttc

SEQ ID NO: 517364 - DNA, 601 bp, Homo sapiens
atctaaagtaatagctaacaccgtaacaagactgagagaaaaagttccttttttaaatgtgttgcaaagtttgctctcacatcctggtaactggaaactgcaacgctgggtgactgaccagcctttttttttattatttaaaaattcaaacggctataaagggcttctaatgtgcgtcttatttttaaaaggtaaggtaaaaacccttttaacctaatagtaggatatatgtgtacagtttcgtaattctgttaaagtttgcagaattaatcacaattcatgtgttaaatgtttaaataacatctaagtcattaaaaccgcttaagtgcaccaaaaaagggcaataacgtttgctccgctttgtttccttaaagtctccatccaactgaagctaactacttgctgtggacaaaatgatcacattccttctgcctccccctaacatttctggtaagagaaagacctggctctaggaatgtgtgtttaatgcaaccctgagctcacttcatcctttcatgrggcaaatgtggaataaattaccaatgaaaaactttagtaattttaagatttgttttacttgaaggtaggggtgtaccaacag

SEQ ID NO: 517365 - DNA, 721 bp, Homo sapiens
aaccaggagagagaaaataggcattgtcagaaacagaacagtcacaatggctctttacatgactggctgtaataggtcccaagaagtggagcggtcaggtggctgggagagtccaggctccgtccccaggtgcagggtggcggtggcccaggcaggacagccgggaggcggggaggggattccgggagtgtctgagccgccagtctcaggagcgggcatggtgccgacagtgggagcgggcactgggtcctggctctgcagggccacaacacccaggtgaagggatgagcattttgccaggacacggctgtcatccatgcagtcacccccagggtgagagggcrgtttgcatcccaggcaccacaaaccatgctcccaaactcctgggcagcagcctctgcctgagatgccacagcagctaccagagctgcctgatgcctggaagcagggcctcagtcagcctggggtccagagcaactctttcaggccgaagggtcagccccggacacctgtgaggcaggaggcctggccgtgggccctgaaaacttcctgtttgcaccatggcccggagaccggccatgcctgctcctgcgactgggagctccctggggaccagaccacgcccaacagaaggggctggcctgccgggggccacggggccgcacagcgcaccgggtttgcggtcagctcctggcgctgtgacctcactgcggggctgcct

SEQ ID NO: 517366 - DNA, 562 bp, Homo sapiens
ctgctggttttgactctgttttcaatgcttctccttgttataaacttctggagaaaaaggagcttcaagaaaggactcatctctccatctcagtcttccagtgtgcctgttgtctctcctggaggccaggggtgtgcaggctgaccttcctcactgacccccgcagccaagagagctcagcaagcccacggtccttccagrccagtgtgctccacctcccctcacctgggtgcccagctctgcctagggtggactctctaatgctaactgtgcctccagtcacgctggggaccctggcacaagccagtggtggggccatagggaggagctggggtgagagggaggcagagcctgcggggcctctggcatctcagggcagacagtgctgctcacatcggctgcccctgatgccctaggaggcctggcactcagtctcaaaactggggtttcggtggagtgatcccaacagcccacagactgcccccgggagaaacatgtcttccaggccacagggacggaccgcagtcacccagatgctgacagctcaaagcagatctactga

SEQ ID NO: 517367 - DNA, 587 bp, Homo sapiens
ctgggtccctgtgcccgtggatggccctgccacctgcccactcaccaggaccccacgccggccagacccctccttcctcatcttcctcaccaccgagtttttcaattttctgttccaaaaaatgaccagcccctcccccatccccagggccggcctcgctgcaagaggggctgcctgcccctcattcacggtgcccatttctcacaggctcccctccacctggggaaatgcccgcccaccttgcagtgtccccaccgttccctggggtctcggatggagactcatactgtgcccaaggctcagagcatggtggtctgcggaccctcggccccacctagcccctcccctcagggctgcatccagggagcaccagcctcgccttctctattcatcgtccatgtgtcctctgcgactgagtggcaggaaacctccccttcctgcccaggcagggtgggacctctcactggcccctcagcaccgctgctgcgagcctcagcatcactgccctgtccccaagcccccgccatgctggatgtcccaggcactaagtgatgtgarcactgggccaagtggctaccttgctccaa

SEQ ID NO: 517368 - DNA, 560 bp, Homo sapiens
gggcccttgctcactacaggagaccccatcaggacctcagaacagggccctccccacgggcaggtgagagctcacagcaccgggcccaggaacacaagaagggcctggaggagcctcccccacctctgggtatggccaccccaaggcactgccccggtcagcctgggccctgccagcccaagaccctgtggccctgtctgtagcattgccrgggacagggatgggggtggcacaagcctctctcctgtcccctccctgcctgtgcctgggagggtggaaggcgatggcagccaaggctgtgccagctcaggcatcagtccctcccgacacggcctgctggtggccatggagcccacaggccacacggcttagcagctcctggcactttcacagacacattcagccacgtgggcaggacagcaggcaccagtcctggctccttggtgcactgagggtccaggctgaagacaagcacagtgacaggacagcacaactgcccctcagccctgggacattccgaccagggccaccctcaaagccaatgccccacaggtgggacg

SEQ ID NO: 517369 - DNA, 656 bp, Homo sapiens
caccctcaaagccaatgccccacaggtgggacggagagtggcccctcggtgacaccagggtcaggatgcaggacacaacctcccaccatttcccgtccagtaactggtgggccagcaagacacggatcgactcccagctccaccacacgccccctgagcctctcaccctcgtctgcaaaatggggtgcagcaacggtgcacccccgtggaggccaggccaagaaggtaacatgcacgccatactcggagcatggtggaccccagacctctgagcccttccctcctgctcctggtgggtctggctgcctctgggactcggtgtccacatgcggaagaccaaggggctggacttcctgcatctcttggcccctccagtgggtcacagcgggctcagcacaggaggacggcagaaagcccagagcttgaggatgccgcccgcagggctctattgtgggagtcctgtgatcacggggctccagtgtgctgccagcacaggcagacgaacccatcagcccagaccctccagtaagtccagcctgcgggggctgggccacggcttctctggyggggtgctgcccagcatagtgtcccagctcaacccacctccgggtggcctgaggccccacacacctgcagaggcacagcttgggggcaca

SEQ ID NO: 517370 - DNA, 590 bp, Homo sapiens
cagtccaatcactgaggacatgcatatttctgcaggcctcactatggtcatctgtccaaaccccagaatccagagactcaaaacgaaatacagtcatacagtaagatatgtgcaaggtttcagggagcccagcagccagaccttacagctttagctcaatttagacaaatcaagcaagtttaagaaatattccagaagtagcagttttatgaccttaaaacatgtaataggctgggcacggtggcccatgcctgtaatcccagcactttgggaggccaaggtgggcagatcaattgaggtcaggagttcgagaccagcctggccaacatggtgaaatcctgtttctactrcaaatacaacaattagccaagtatggtggcatacacatgtagtttagctattcggaaggctgaggcaggagaatcacttgaacctgggagacggaagttgtggtgagctgagatctcaccactgcactccagcctgggcaatgagagcaaaactccagctcaaaaacaaaaaacaaatttaaaaaaaaaaaaaaagaaaaagaaaagtaatagagacgatgtaaacctgtctgtcagtag

SEQ ID NO: 517371 - DNA, 524 bp, Homo sapiens
gctgtcaggtctgatagtcctctgctaaaacaacacgatttacataaaaaatcttacacatctgccaccggaaataccatgcacagagtccttaaaaaatagagtgcagtatttaaaccacccgcttgttggctggtcactaagtgtcctggtggctggggccggagccagtgctcktgaagggatcgcgtcatagccagcttcccctctgggccctgtgggtctttgcagccaacctccttttcccgtgagacggcccggcctgatttaaagccaagagcgcttgagttgagtttgaggggaagatgtggagcgtgtggttctgtggacagtcagagactgtggcctgggggcagcgtctttcaactctcacctctgcagctcagggacctcgggagacctcaccaaacctgcagggcctccgtgtccctaagtgtgctgtgtaaatgccccatctcatgggggagagacagccacggaggccttcctctgaccatagctgatggactggcggttgctcaggt

SEQ ID NO: 517372 - DNA, 379 bp, Homo sapiens
ggttttggaaccaagacatggtcactgaygttagaggaatggctcgctctccctcctagcatccctaccaggtaagggggggcaattggttgctccaagcaccctggttgctgtaggaaggagaatggagacatcgggctgagcccactggcctccttcagcgctcgggctctcccctgcagacagccttcctcagcagccgcacagctcagggcttctcctccctgggtgccagtaaccccaggtaagcctctggctgcccggcaattccaatacccagagggaggagccaacagggcaggccacgttctcaccaagccatctgcagaggggtcaggtccaccctgagtcctcccttctcagtaacaagctgctactg

SEQ ID NO: 517373 - DNA, 657 bp, Homo sapiens
tgtctctctggcctcggcttgcactggtcctagtcctagacctgacatggtccttgggcctcagcttagaagcctcctccaggaagtcttccaggataatgcagataggttggggcctagatggtctggcgccgctcccagtccctgcaggccacagagctggcaccatctgcctgtgaattgtccatgatgagagccactacgggcgctgggccttggaggtgtccagctctgtgcccagcacagcacagacagtagcagtggggatgggattgtccctgtcccacagacggcagcactgggggctcctggagggttcggtgctgcatcctctcggtggccccagggctggccaaaaggccaggcacagggaggagaggggccacgcaatggctgagtgtagcataggatgacctgagatcctgccccacctgcctgttctgactctgggggtggccaggsccccccagcagcccctggtgatgttcagagtgtcccttcctccccgtctcccagacagacccaggagtccactccaagaagcctttccaaccccagctccccaccgccgcctggatggtacaggccaagtctgcggcagcacaaccctgggccaggtaccctggggcctgggatggagctggagtcacggaattc

SEQ ID NO: 517374 - DNA, 584 bp, Homo sapiens
ctgccctccctttaaaaacttgctattttaggctgggcacggtggctcatacctgtaattccagtacttcgggaggctgaggtgggtggatcacctgagcccaggagatagagaccagaccaccctgggcaacgtggcgaaacctcgtctctactaaaaatacaaaaatgatggccaggtgcagtggctcatgcctgtaaaccttgtgctttgggaggccaaggcgggcagatcacctgaggtcaggacttcgagaccagcctggccaacatagcgaagccccatctctactaaaaatggaaaaattagcctggtgtggtggtgggcacatgtaatcccagctactcaggaggctgagacaggagaatcgcttgaacctgggaggcagaggttgcaatgagctgagatcgcgccattgcactccagcctgggcaacagagtargactccatctcaaaaaaaaaagagctgggaggtggaggttgcggtgacctgaggttgtgccactgccctctagcctgggcgacagagtgagaccctgtctcaaaaaaacaaacacaaaaaaacttgctattttgatcagca

SEQ ID NO: 517375 - DNA, 530 bp, Homo sapiens
tgtctgtaagctcaggattagagagcctggcctttcgtgagagctggggctgtgccggctgagcccttcacagggaggggtggaccacggggacagggagcgactgcctggcactgagtgagccagccagcagacagcatgacggccttctccttgcctgcccccagggcctggtgcaggctctcttctgcccaccctacccagcttgggggccccaccccatcacggccctcatgagcctctcggggcatcctcctggatggcatcgcagcgggcattggcctcccctccatgcccacctccaattctgatcaggagcacccctcacccacagtaggactggaagctctatcgggccagraggtgcacagggggccaggggacttggacttgagtccacctcgtggctgtgtgatggtggacaggtggcgtgccttctctgggcctcagtgtcctttttgctaaagtaggaatggcgctgtcccatgacccggtttggggacactacgtggaaggaagcatccacagca

SEQ ID NO: 517376 - DNA, 534 bp, Homo sapiens
ggccaggggacttggacttgagtccacctcgtggctgtgtgatggtggacaggtggcgtgccttctctgggcctcagtgtcctttttgctaaagtaggaatggcgctgtcccatgacccggtttggggacactacgtggaaggaagcatccacagcacaaggtgccgctcgccctcgtgtgcccggggtggctgccaaggggccggcagcgtcgccacgtgtcggggctggcctgagttccgtgtccctggaatctacagcctgtgttccgtgaaggcagagcatgactgggcagcaggcagcgggggttctaatgccgagatttcccttccccccractcctgcccaccccggcgccttccctcctgcgtacctttctttgggcaatgggcagaggcccggagcgggcgggattcctgtgaggtgacgccagccggagtgtccagccgggtgcagccagcccagtggcccattcacgcggccgccaggcttcattcacccctggccgggaggcagcgcccccgtgactcgcag

SEQ ID NO: 517377 - DNA, 534 bp, Homo sapiens
ggccaggggacttggacttgagtccacctcgtggctgtgtgatggtggacaggtggcgtgccttctctgggcctcagtgtcctttttgctaaagtaggaatggcgctgtcccatgacccggtttggggacactacgtggaaggaagcatccacagcacaaggtgccgctcgccctcgtgtgcccggggtggctgccaaggggccggcagcgtcgccacgtgtcggggctggcctgagttccgtgtccctggaatctacagcctgtgttccgtgaaggcagagcatgactgggcagcaggcagcgggggttctaatgccgagatttcccttccccccaactcctgcccrccccggcgccttccctcctgcgtacctttctttgggcaatgggcagaggcccggagcgggcgggattcctgtgaggtgacgccagccggagtgtccagccgggtgcagccagcccagtggcccattcacgcggccgccaggcttcattcacccctggccgggaggcagcgcccccgtgactcgcag

SEQ ID NO: 517378 - DNA, 345 bp, Homo sapiens
tccccaaggggagagggaaggaacccaggaagtttctgggatggtggcaatagcrtgtcgctccaggggctcacattaccattcgtgtgtgccattcacttcatgacaataaaatcatattgtttacaaggatgccctgctctgcccattggtctgggaggggctgtcttgccctgtacagagagagtgcaggtgcaaaagtgcagagggaccaggggtgagcccagttctgggaccagactgccaggagaccagaagcacggaggccagggccctccctgaaggtatctaatttgactgagtcatgcatggggctgcacctgtgacggccacagaggccctgca

SEQ ID NO: 517379 - DNA, 321 bp, Homo sapiens
aggactgctgtcaggaccaccaggcagagcccagggagcaaacacctgctctccctccctggggtcccygctgtgttcccaggcatgacactcacctcccagagcagcagcctggcctctgctcctctccgggcagaaacgacacagggatgctccccagtcagtgtgctggggtcctaggggcgttggcgacgccggggcaggttccaccatagatcctgctgcctcaatccagagggctttcggaaggcgcccctgctatggcatcgcagagggaggagacccgggatgtggcccagcagggctgtgtatacaccaaga

SEQ ID NO: 517380 - DNA, 321 bp, Homo sapiens
aggactgctgtcaggaccaccaggcagagcccagggagcaaacacctgctctccctccctggggtccccgctgtgttcccaggcatgacactcacctcccagagcagcagcctggcctctgctcctctccgggcagaaacgacacagggatgctccccagtcagtgtgctggggtcctaggggcgttggcgacgccggggcaggttccaccatagatcctgctgcctcaatccagagggctttcrgaaggcgcccctgctatggcatcgcagagggaggagacccgggatgtggcccagcagggctgtgtatacaccaaga

SEQ ID NO: 517381 - DNA, 515 bp, Homo sapiens
gcccaccccctcacgctcaggccgccctctcctcatcaccaacaataaatcgatcctgtttttaaagtgcatctctcggggagtgccagggggcaaagcgctgcaggaactggtaccagagagatggaagctccaggcccagggctgagaccaagccaggtcaaggccgggacaccagagccccaggacgcagcggctctccctgggacacagcacgtgtgccgggtagacacaggtctgggggactcaggagtggatggccactggccagctccccgggcgccaggcccagagggccccagccacacmctcccaggaggcctgggcacctgggagtctctcacccagcggctgaggaagcaccatcggccctgctcacccaccctccggctgggggtctcttgcctggcggctgaggaaccaccatcagccctgcccacccaccctctggctgcgggcattggctgcaacctggccagggaaggcttttgcagaacttggagggttcccggggc

SEQ ID NO: 517382 - DNA, 433 bp, Homo sapiens
gtggaagtagagttgtcagcctcctaaagagtatgatggcatttcatatttyctacccacacaccccacacataggaggtaacctctgctccctcccctaacccaagagaaacattgacagaactttggggtttgcttgaaggtccagggtggcatcactctcctcagctggtgaagtgctgggctgtagaaatgtgtaggaccagtatgtgcatttcaggggagttaagcaagataatttttgagacagccttacctaggttgttaaattaaggaatgtacatggacatctgattcccctgtcacctttttgccaagctgtgagctgttatggtaaaacacctttctttatgccatgataaggaaagaaatctgtgtttctgcattttcagattatgtgttggctcactcagagggcctacctaataaggca

SEQ ID NO: 517383 - DNA, 535 bp, Homo sapiens
ctggggagatggatttgagactcatctcttatactctggctgcaacatccaaatgaaagcttcttccctggaaatactcactgtctcagtgattggctttctatgtggtgagcaacaggacctagactaaaactctggtgtttcagtaacaatttarccttttaaatctcagccactcaaactattatagcctgtgcttggccttctgcctaggatataataatttttttacactcctaatataagagatgagagccttgtatgctaccaaataggctctctggctgtcatacttggttttaaaatgctttaaaactgccttcagcgtttcattttatctttctcaataatatcaatgaagtttagaataagccaatcaatcctactgcatctgtaattatttcctctgtaagtttcaaatgcctgataatgttgtacccaggtaatgcattcccttggccagtgtaatagctcaattcaacaccagaaaaagctctcacaatcagagtgccaggagctatttgtgctccacgag

SEQ ID NO: 517384 - DNA, 650 bp, Homo sapiens
gcataatgtatgcctacttgattatttattcattatctttttccctggctaaatgtgagrcccatgagagcaggaacatttcttttggttcacagcttgttcctattgcctaaaacaattctagactcatagcaatgctcaaaaaattatttgtcaaatgaatgaaagaatagtaagttacccaatgagatgataaaaaatatcaatgaggtagttttcaagttccaaccatatctccccattttttgcccaattttatttttccaaaaattcacaattcccacctccctcacactgaggcataaaatgcagtgaactaactgttccctgtgacttggctctcagcacatcgaattaagccccatgatattttgaagcacatggaccactgaacaaatggattaagttccatttacttagccaaaaaatttaactttgaacattagccatttcctatacagggaatactgatgggaaggagccctgaggaaaagccaaatttagtccagacctctgaaattctcctcagaataaatggcaatgatgagtagaaagtagggatggggggtttgtaaagaacttaatagtgagctgttctgaaaaatgctctccccaagccttttttggattaagtttcgtaaagggaacta

SEQ ID NO: 517385 - DNA, 650 bp, Homo sapiens
gcataatgtatgcctacttgattatttattcattatctttttccctggctaaatgtgagacccatgagagcaggaacatttcttttggttcacagcttgttcctattgcctaaaacaattctagactcatagcaatgctcaaaaaattatttgtcaaatgaatgaaagaatagtaagttacccaatgagatgataaaaaatatcaatgaggtagttttcaagttccaaccatatctccccattttttgcccaattttatttttccaaaaattcacaattcccacctccctcacactgaggcataaaatgcagtgaactaactgttccctgtgacttggctctcagcacatcgaatyaagccccatgatattttgaagcacatggaccactgaacaaatggattaagttccatttacttagccaaaaaatttaactttgaacattagccatttcctatacagggaatactgatgggaaggagccctgaggaaaagccaaatttagtccagacctctgaaattctcctcagaataaatggcaatgatgagtagaaagtagggatggggggtttgtaaagaacttaatagtgagctgttctgaaaaatgctctccccaagccttttttggattaagtttcgtaaagggaacta

SEQ ID NO: 517386 - DNA, 620 bp, Homo sapiens
agacccatgagagcaggaacatttcttttggttcacagcttgttcctattgcctaaaacaattctagactcatagcaatgctcaaaaaattatttgtcaaatgaatgaaagaatagtaagttacccaatgagatgataaaaaatatcaatgaggtagttttcaagttccaaccatatctccccattttttgcccaattttatttttccaaaaattcacaattcccacctccctcacactgaggcataaaatgcagtgaactaactgttccctgtgacttggctctcagcacatcgaattaagccccatgatattttgaagcacatggaccactgaacaaatggattaagttccatttacttagccaaaaaatttaactttgaacattagccatttcctatacagggaatactgatgggaaggagccctgaggaaaagccaaayttagtccagacctctgaaattctcctcagaataaatggcaatgatgagtagaaagtagggatggggggtttgtaaagaacttaatagtgagctgttctgaaaaatgctctccccaagccttttttggattaagtttcgtaaagggaactaaaagtagattgagtttaaaccaaaacc

SEQ ID NO: 517387 - DNA, 599 bp, Homo sapiens
gccatgtaacatagtcacaggtttcaggaattagaacataagcatctttgggaagccattagcttcctgctactgcaggatgccaccctccaaagatgcagattggattgctcttgtcagggatatgcttcaaatactcgctaggtgagtctaatgtctagcttccattaaagactattgatgtaaatattcacagagtttcatgaaatattatccccatgaaatgttcagtaatgctcagattaggttttaaaagtatttaattaaatacattagaggttaaagagagtaagaagttctgtaacagagaaatctgctcaaccctatttaactagtctctcaaactttttggtgtaacacctactaaggacctaagtaatcatttatctatgtaaggcatctkggagctaatgttctagggaggaaaaggtctgagtgtaatgatacttattttgctttgttttattcactcaaatgctttttaaaatagtttttgttttcctattaaactatctgttgaagtgggacatttcaagtgcttaaaattaaaatgcaaggcatttattctgtattgtataactacacataataagaataaa

SEQ ID NO: 517388 - DNA, 599 bp, Homo sapiens
gccatgtaacatagtcacaggtttcaggaattagaacataagcatctttgggaagccattagcttcctgctactgcaggatgccaccctccaaagatgcagattggattgctcttgtcagggatatgcttcaaatactcgctaggtgagtctaatgtctagcttccattaaagactattgatgtaaatattcacagagtttcatgaaatattatccccatgaaatgttcagtaatgctcagattaggttttaaaagtatttaattaaatacattagaggttaaagagagtaagaagttctgtaacagagaaatctgctcaaccctatttaactagtctctcaaactttttggtgtaacacctactaaggacctaagtaatcatttatctatgtaaggcatctgggagctaatgttctagggaggaaaaggtctgagtgtaatgatacttattttgctttgttttattcactcaaatgctttttaaaatagtttttgttttcctattaaactatctgttgaagtgggacatttcaagtgyttaaaattaaaatgcaaggcatttattctgtattgtataactacacataataagaataaa

SEQ ID NO: 517389 - DNA, 657 bp, Homo sapiens
ccctctcatcctcagtgcttcatagtccctagcaaccactaacatgccttctatttctacaattttgtcattttttaatgttacgtaagtgaaatcatactacatgcaaccttttgggactgactttttttcccccttggtataattctctggatatttatccattgtttcatgtgtcaatagtttgctccttttttattaattaatagtatctcatggtatggatgtaccacagtgtattttaccattcaactgttgaaaaacatgtagacatttggaaactagactgtttctcttttgggattatcacaaataaagtagctggaagtatttgtgcacatgtttttgtatgacaataagttttttatttctctgggataaatgccaaggagtgcaatcattatttcatctggtagttgtatgtttagttttttaagaaccagctgactgtttcctagagtggctataccattatacattcccaccaacaatatatgagatccaatttttccacatcctcgccagaattyggtgtgatttactttttaattttagccatttctatgtaatatctcatttactcacacattatttagatgtgtattagttttcaaatgttgaaaaatttgcctatctttttgaactgatttctaatgt

SEQ ID NO: 517390 - DNA, 466 bp, Homo sapiens
gtcatggccatttctactcctccattctctccacagccaacagaataacctattaaaaatataaaagtgaatmtgtttctcccctctaatgaaaaagattttcatggcccttgaagcaaaatccaaaatcattagcatgaactacaaagtcctttggaatttggcactgccagattggatttaactcaggctactgattttctttctcacatttctctcacaaacgggccttttctcaaatactccaggcaacagtgccacctttacttccataattgctgtttcttcagcctgggaagctccataatcacaccttccccccatctttttgccatgctaatgcttattcattcatctatccactctagatcaatttctcaaaaaaaacagactaaattcttttttgtttgtttccttttggaacagagtctcactctgtcacccaggctggagtgcagtggcagga

SEQ ID NO: 517391 - DNA, 466 bp, Homo sapiens
gtcatggccatttctactcctccattctctccacagccaacagaataacctattaaaaatataaaagtgaatatgtttctcccctctaatgaaaaagattttcatggcccttgargcaaaatccaaaatcattagcatgaactacaaagtcctttggaatttggcactgccagattggatttaactcaggctactgattttctttctcacatttctctcacaaacgggccttttctcaaatactccaggcaacagtgccacctttacttccataattgctgtttcttcagcctgggaagctccataatcacaccttccccccatctttttgccatgctaatgcttattcattcatctatccactctagatcaatttctcaaaaaaaacagactaaattcttttttgtttgtttccttttggaacagagtctcactctgtcacccaggctggagtgcagtggcagga

SEQ ID NO: 517392 - DNA, 466 bp, Homo sapiens
gtcatggccatttctactcctccattctctccacagccaacagaataacctattaaaaatataaaagtgaatatgtttctcccctctaatgaaaaagattttcatggcccttgaagcaaaatccaaaatcattagcatgaactacaaagtcctttggaatttggcactgccagattggatttaactcaggctactgattttctttctcacatttctctcacaaackggccttttctcaaatactccaggcaacagtgccacctttacttccataattgctgtttcttcagcctgggaagctccataatcacaccttccccccatctttttgccatgctaatgcttattcattcatctatccactctagatcaatttctcaaaaaaaacagactaaattcttttttgtttgtttccttttggaacagagtctcactctgtcacccaggctggagtgcagtggcagga

SEQ ID NO: 517393 - DNA, 611 bp, Homo sapiens
tgctgggcaccatccatcccaggttgtcattgttcctcttctgtactactgcaagaatttttcatttagtcttcctacttccagttttgcctgttcactattgccaaataatcttaaatcctacctccrattacataattctgctgattaaagagtaaaaatactatcacaaaaacatgcacacatacacaaatgagtgcaggttttttaaaaatggtgaaaactgaataaagtctgcattctagataatagtaatgtcaatgttctggttttgatattgtgctataactatataagttgtcatcattgggggaagttgggtgatgagtacatgagagtctttgtactgtgtacttcctgagtccacaattattttaaaataaaaagaaagttaaaaaaataaataaaacctaaaacctataaatgacattcttcagattttcaaagtaagtttgaaactctgtattgtatttcagcataccctccaaatcagaaccacttaaactcttaagtcttgtgcttactaaaatactttggccttgaccttccaatgcctctctcttcctccatttgacttgttaaacacatggtctctttcaaggtgcacttta

SEQ ID NO: 517394 - DNA, 611 bp, Homo sapiens
tgctgggcaccatccatcccaggttgtcattgttcctcttctgtactactgcaagaatttttcatttagtcttcctacttccagttttgcctgttcactattgccaaataatcttaaatcctacctccgattacataattctgctgattaaagagtaaaaatactatcacaaaaacatgcacacatacacaaatgagtgcaggttttttaaaaatggtgaaaactgaataaagtctgcattctagataatagtaatgtcaatgttctggttttgatattgtgctataactatataagttgtcatcattgggggaagttgggtgatgagtacatgagagtctttgtactgtgtacttcctgaktccacaattattttaaaataaaaagaaagttaaaaaaataaataaaacctaaaacctataaatgacattcttcagattttcaaagtaagtttgaaactctgtattgtatttcagcataccctccaaatcagaaccacttaaactcttaagtcttgtgcttactaaaatactttggccttgaccttccaatgcctctctcttcctccatttgacttgttaaacacatggtctctttcaaggtgcacttta

SEQ ID NO: 517395 - DNA, 637 bp, Homo sapiens
gtaagaatcaaagcccagcactatttcctcctggaacaattatctatgttctttggatttttaggagacaattaagcaasagaagcagaagatgctgtccccaggacccttacagacctccccagataagggaaatgctgaggttgcgggaagcctccagtggagtttctgtcaaatccctttggtatagcaggcaaatccttttgatgtcaactcccacagggacttttctgccctaccctcataaaactgaagaagtttctcctacctgctttctaagggagtgaatgtttctgtttgcccattctgagcaccaggattgtgactctaaataggagattgggtcgttctccacaataatacttctttcaatcattgattcagcagtcacttacagacagccttctctgtcccaggtactaaggataataacggcatagctaacatgtttattatgtgcaaggtctgtgtgaaccaccttatatgcattacccaattaatcctcacaacaatgctgattggttaccatttcccccattttatagatgagatcactgaggcttggtgagtctaagtaatttgctcaaggtagcaggaatcatggcagagaggattctagcctaggcacccatttgga

SEQ ID NO: 517396 - DNA, 678 bp, Homo sapiens
ctgtttgtgccttccgcctttgtcttctgacatttgcctgtgcaaaatgctgactggctgggaacatcatagatgaaccagtgtaatatcccattttactgacattgttccaccatacatcaaccccatttgagctaatttatgttaaaatcacacacaaacacacaagtgttatagcaaaacagactgagcgtgggatgcttctccagcatacatcttaacactaacccccgctaaaaggatgaattctatcagctctgcttccctttccggcctgtctccctatgcctcaatgtcaggttcacacatgtccctgtatgccagacaaatggggtcaatcatggctttgggctccaaggctcctatgatgtccaaggtgctgtgctatactagttagcatgacagtatgtatttgacaaggttattttggttacaagtgagagactcccaactaaaactgtcctaagaaagggagaaaagcttggttaacctaataaagagttcagatgcgatgtggcttcaggcttagctggaatcagggacgaaaatttggtccttgtgccaatctccctctcccacctccccctcccctataatctgcttcccttggtggtggggggtgtcactytttttcccaagccctcacctacagatgatacctggattctccagattcat

SEQ ID NO: 517397 - DNA, 579 bp, Homo sapiens
tggtctgagccagttaagtgtgctcctcagcagccctaaacctgactagatctctcttctgagctgcatgagttctgttgacatttaggctaaccccttgataagaatattgccaagtagtaagctaacatttttgggatccattttccttctcattggatgaacaagtatatgccagtgaggcaagtatggaggacttcactacaaggataaatcccaattggggtggggtggggctgctgcagaccacatcttgtttgttcagataagggcattgagacccagcttcattcttcttggcatcccctctcaaaaccaccacagcaaccagcaaggaggaacacataacaatcatctgcagaggaaaattcctaccacataaactgatgcctcattgcccttcctctttaaaaccatggtcaaatagtagaagcctggactttaaaactatcctgttataagagtgactgacacccagtctctgttaaatggatagcattataacttggctatcatggtactttaaaatatgcaattaaaaaaaatttaacagycacaacaattggtaacacctcgttt

SEQ ID NO: 517398 - DNA, 638 bp, Homo sapiens
gtcagcaccatggatggtataagcaaaacagagaggcattcaaacccrtattgctatgaaggacatgaaaacaggcgctggctgatcatgtagctcctgggtacttctactcacagttctcgcctaccctgactccaacattggagcctcagtcatagcatggttaatgtagacatgaagcaaactggctgtccattactgggagaacagaaaattaaatatggtggacacatactatgaaatactatgcaacagttggaagcaatgaattaggtatgcattcaaaatcatggataaatgttaatatattttgggggtttaaaaaagtgtaagaaatagaaagataactataatttatactataataccatttacttaattttttaaagattcaaaacaatacttaacaaggatagaacatacaaatggacatatcttaaacaaaatagtgtgagtccctgctgagagagggggtcggaaaagaatggaactagtgaccattgatgaaaaggataattagtagaaataaaatgaaatgagaactaataatgatgatgtgccatgaacctagacttatgattaaaacatgtctctgtatcaccatccaaaaaagataaaagaaattataacaaaaccag

SEQ ID NO: 517399 - DNA, 651 bp, Homo sapiens
agaaacaataacattgcaagcaaatgtgttattgttactttgaaggaagttatcttctagtatagtagaagtagtagatattgtagtggggtaaaacgtgttttctgacaatgactccttttaccagtagtgaactggtaaatgtttaacaaccagctctccagaaaaacaaaataaaacaaaacttatttgtaatgtttgtcaatttatgtggtgtaattactcctrccatgaccaatttcaaactatctatgtgacatctcatcactgaacacaggaagaaatgagaagtaacaaaattttatagtattttcaccatacaggtgcaataattgtaaatataaataacctcaagaacaaataatattaagttataattgaaagaatcaggaagtggtgaattttgaatatttattacttttgtatttaatatagtttacttaactatacttaatattattaactttgtataatttattttttaataatccctatgtttaacaaccagtctacaaaaattttaaaaatttaacaactggctcttataagtcattacaggcaagcttcagcacaccattatgcttaactgcccctcagatacacagcactcatagctatatatgtatgattttataggatatcctggccaca

SEQ ID NO: 517400 - DNA, 615 bp, Homo sapiens
gtcacttcagggaaaggcattatgaaggaataataacaggcaaaattaaatgaagacagtgccaaccaatacgtaggtggagctagaaaaccagcccaagagagtttcaatctactaaaaaaggaatgggatgactgggaataattaaaatcaatggcaagatgtcctttcctctcaaattgactgcagcaagagccaggcaagggctaaataattcttgttaaaaggaaagaaataagtaacccgagcgttactcatatgaaaactttcacacacctgtcctcttgctatttattaattttattcttactcaaatctcaaaataatttgatatctcctttttgccactggaaagggatgagcattagtaatttatacctatagatctaagctctgatgaagggctacattttttaaaatagtaaaaacaataatttatgccttgccttttttctgagaagtaggacagcaatattttaaatggaataattgmcatatggtcctgaaacattcacatgtatatatacaacctctcattagacgtaacaaatactggatgatatgtagaaactaatcttgaccaaaaaaccacaacaaaaaaatcctgatttatgg

SEQ ID NO: 517401 - DNA, 605 bp, Homo sapiens
atacaatttgatatactgtttgatttatttataataagcatgtattaattcagtaatatattttggaaaactttaaaaatctatgcacccttcttgcaagtcaaagacagctttgagtcaatcttattttggtagacttacagtggggcataggtggaggtatggttgaagggatcgtatttcatcattttgtaggaacttcttatttgcagtggaygccttactgtccatttgcaagaatgccttgttgtatcagcatttgttgagaatcttagttagctatttcgagacaatccccaatgggatctcagactaaagatattagcctcatactaaaggaacttcatggcattcaaaaattttcttgactgagggacattcttcctttcgctccttataaatacattgactgttaaccagtgcgtcaggggccagaaaggtgctatggacactaatgtagtcagcaagtgtccaggaaggtccaagtgcaagcccagccctgggtgatgccagagcccgggcccacagacatcctgctttgttgccttttgtagctgtgcagtatatatgtatcatgtgggttccagtcaagccggactgttcag

SEQ ID NO: 517402 - DNA, 624 bp, Homo sapiens
ctgaaggcactgctgcgggaagatctgcttctcagctcactcctgtggttgtcggcctcaatttcctcctggctgttggccaaatactttaattcctcaccgccragcctcctcacaagctgcctggtgtgttcacaaggcggcagccggcttcccccaaagtgagtgagccaagagagggagagagacagagacagagataggaaagggagaagacacacaactgacagaagccagtttgtgcatttgttgctgttttcgttattgcttttgcttaacacaacaaagcttatttctcacgtctgccacatatatgttgtgggtggccaatgaggttctgctcatcacggttgcccagagacccaagctgatgtaagttccatctcggcataggcatccagaactgcagagccctggaaaagatgctgaaccacatgccggtttttaaaacattattattttttatgatttgaagtaattatagactcacaggaagttacaaaaatagtactgaatttttgatgttcgacttagaaagcaagttcttccaaatagaaaagtgcttccaagaccctgacctctgaactctgttttaaaattcagttagcttcaccaaaccatata

SEQ ID NO: 517403 - DNA, 614 bp, Homo sapiens
gaatctgaactcaagtcatttgttaagaaagtgctcccaggagaaactgagaagcaagtctgagacgttgaataaggaatggaagaagccaacccaaggtgcagatctcacaggtgagctctatggtgtaaaatgtggctcaggatttgtctcrcttggcagggaagcagggcttcatactcatgtaccagaaggtggttagctaaggcctgccctggggagaatgtaaattcaaggcacttctggctctttgagcaaacaagcaggtccctgaggagtgtcatgggtacagcccactggaagcaaaatgggtataaggaatgaggaacaaaaatagaaaaaggaatctaggtatctgagcagagatttgaccatgtgcactgcagggcctatgagttagaatgctttcagatacatgtaagagaaaacctacttcaaactgttctagtcaagaaaaggagctggctggctccattcagagatagggtaggtttcagacatggtatattctgggctctagcaccctttctctgctgtcctgcagggtctgttctcctccgaatattgtgtctagtgacaatcagcattatatatcttttttcatattttctttc

SEQ ID NO: 517404 - DNA, 641 bp, Homo sapiens
  misc_feature (1)...(641): n = A,T,C or G
tgtttgaacaatatgaaatctgggcaccttaagaacaggataacagtgattttcagggaacaagggagataaccaataggtctggctgcctgtgggccgggcaggacagagccatatttctcttattctagtttacaggttttcagatagggaggaatggtacttaaggggccgtacccaaggaggcacacccaaggatcctaattagcgtgcagatrtgatttagatgatgattcctagacctggtgccataatgggttgagtcttgggagcctgagggaagggaatgagtatgttttatatgtggaggaagtgaattatcttggccagagagaaggctgtagcagattctatcttccaagatggccacaagaaggtctttcatcctggccataagaaggtctttcaagggaggaatgtagccactacattgtgagaggtggcattatgttccctttgaatttgggcgggcatgtgactgcaaaggaagtgatgcaacttcccaggcatggtcatacaagaagacagagcttcaatctggtttcttttgagaagtttgctctcagatcccaggtgctatgtgatgaggaagcagaggccatttatagtgnnnnnnnnnnnnnnnnnnnnnnnnnnnnnnn

SEQ ID NO: 517405 - DNA, 504 bp, Homo sapiens
agggaactgagaaactgaagctctgcttagcatagattagtgatgaatataactgactcacttctccccattacatactctctgatatagattaatctcctactttaagccagtatctcctagaagttgaacacaaggcataggttcattgaagactcaatcacctcttgaattacaaagaagttttacttcattggaagctctactattatttgtaaatgactcaacttaatcaaccatgaattttctcactgaaaaattcccaattgttaaagtgtcttaaagagcttgaagtaccagaccctagaaaagctgtgtatgtttgtgtatatatatatgtgtgtgatttttaaatcttgatttttaaggcaagcacctragataagtcttaggcaatttgaacttaaaaaaaagatatatgacattatcaaattttcttaaatctatggtgcgaattaaaattcttatatacatatctgatactcacagtcttgcactgaggat

SEQ ID NO: 517406 - DNA, 641 bp, Homo sapiens
aaaaaatgtcaaaatgatgccattttgaattgcagttactatcttgagcaagaaatgaaggacttggcttatgaattcaatttggtttttacactgtcatttccacatggctaacccacagaccgaatactgttttctgccagctttctaagcacgctccaaggtgagactccccagaaatggtgcataacaatgtgcacatcacggaagcagtgcatgaagaacaaataaaacatgaaattacacacgaactcgagaatcacataagctggctaagaatgggttactgccaataacggatttcaaataagcctctgatttaatgacaaccgcaagccagcgcctgattgagggcaatcaaatgcttctctttttatctgcttctaactcactttttatatgaaaagaaaaacagtgctattacaacagcagcaatagaaggctacacaaaaatctgaaaacagaaaggccatttccacaagcaattataacacaatgcacatccacacttaaagtatgttccagtgaacaagtaaccaatagcaacttcttactcagcrcatcagtagacactctctggaaagacagtatttgcttttcacttaagcattttaattgtgattgtccacagtgcaattgtg

SEQ ID NO: 517407 - DNA, 641 bp, Homo sapiens
agctgcttcagcccccccactgtcccatctccagacacgtcaaactgcaactggatgacagacattaagctggaactttgcaggcaagccctttcttagcctgacccatggagaatgtgagagatgataaaattattaggattgttttggagtaatttgttgtgtagcaagaggtaactggaatacacctatttccaggaatttggcaatttctcctccctttaggtgcactgtttgatctgtgctaggcaatcctttccagttgtctcaggaacagacataactggctgcatctayttgttggcacaggttatgcaaaacacttgggttgctgcttcacaaaaacatatggacttgtgatcacatttacttcattgatacaaatatttcctctattaacatatcatacatgccttgcagcactatttccattcctttatgtatgtaataacttttttcaatgagaaaccatacagtacttttcttagaagatattttaaatggcactataactcacgatatccacagtgagcataagtcatgcagagaggacgatcgggtcaaggccaatttctagaatatgcaatcacaactacattttgaagactacctcgccatcagtggaaaaagatgccacccat

SEQ ID NO: 517408 - DNA, 641 bp, Homo sapiens
agctgcttcagcccccccactgtcccatctccagacacgtcaaactgcaactggatgacagacattaagctggaactttgcaggcaagccctttcttagcctgacccatggagaatgtgagagatgataaaattattaggattgttttggagtaatttgttgtgtagcaagaggtaactggaatacacctatttccaggaatttggcaatttctcctccctttaggtgcactgtttgatctgtgctaggcaatcctttccagttgtctcaggaacagacataactggctgcatctatttgttggcacaggttatgcaaaacacttgggttgctgcttcacaaaaacatatggacttgtgatcacatttacttcattgatayaaatatttcctctattaacatatcatacatgccttgcagcactatttccattcctttatgtatgtaataacttttttcaatgagaaaccatacagtacttttcttagaagatattttaaatggcactataactcacgatatccacagtgagcataagtcatgcagagaggacgatcgggtcaaggccaatttctagaatatgcaatcacaactacattttgaagactacctcgccatcagtggaaaaagatgccacccat

SEQ ID NO: 517409 - DNA, 595 bp, Homo sapiens
tctttagggcggaactgattgcttagtaaaccaccttcagccttgttttggggaaggctttctaaactgcatcaacttctctctgtgccttggaaatgagaagaagaatatgtccttgagtgggggggcattaattgagctctttttctgatcattaggacctttagccctagggtcacccggggcacggtcacccgtcccctagtgcctcagtgctcatacacacgtggtagaggacaggctgggcctctgccaactccgggacggcctggacatgggattattgagagagatttttaggctcgcatattttgttacatcatttgcctctttctctgcaagttgagcaaaataggagagaggatccagacgattgagattttgctgtttttactttaatgagtattcattgcttcccastttacaaagtacctttacataactggcatgtttgatttttaacaaggccctttggaggtaaccagagcaagtgccattagcctttctgtaggtgaataagaggaggcttggagaggtgcccagagccacacagcctcctaagaggccacactgacatggaatcaggtcatcagcc

SEQ ID NO: 517410 - DNA, 477 bp, Homo sapiens
atgtgatggatgtgatggctgcttccaggcaattatggattgggaagaaatccagcaaacagtgatggacccaagaaatctaggatgtgatggacccaggaagaataggatgtggcagacccaggaagtctaggatgtggatgacaggagttgggaggaggagaaatggttttcctggctggaggtgggggagggtcggggaagactacctgtaaaagacgcaatgtgagatagcttttgaaggaggaggaaaacttgcccttggagagtcaatcttattattgaagggatgtgtaattagaggccacatgatgccatcccatccctgcaacgggcaagacagtttaatgtgtggagtgtctagakaaagcaaggatggttagaccccagggaggaggagctatagcacagaccccctcagaatgctctcccaggctttctgttaaaagcttctgcagcagagtggtcatggtggat

SEQ ID NO: 517411 - DNA, 599 bp, Homo sapiens
attttttttttcctgtattttacagagatggggttttgccatgttgcccacgctggtctcaaactcctgggctcaagccatccacccgcctcagctaggaagctgttttatattaagtatcaactatgtttaaggccatgtattagaccagcagttctcaatagcgaaggaaaaggatgattttgctccccagggcacatctggcaatgtctgcagacatttctgatggacatgactcatggggtagggagtgtcactggcatctagtgggtagagaccagaggcgctgctgaatatcctacaatacacaggggagtcycacaacaaagaatcctctgacccaactgtcaacagtgcccaaaatgagaacccctcatctagacctgtctcttttctgatgtccaaccccaacaaacctcattcaaagacgaggaactgaggttcagagacatgaatgacttgcctaagtttccatagacagccactaccagtggccaactctctactccatctggcttcagggtctgtggtccattccacatactacactgtctctctaggaagacatccccttgtccccaagcaccttggccctggca

SEQ ID NO: 517412 - DNA, 465 bp, Homo sapiens
gcttcagggtctgtggtccattccacatactacactgtctctctaggaagacatccccttgtccccargcaccttggccctggcagattatctacggcaagggttacaagttttgccttaaggcataagcacctccccacttcatgattagaggttttatgactttgcacttgtaatcattgtttctgctcattttgctgtgtgctaaacattttatgaggattaactcattttaccccaaggatatgtcacagagaggttaagatcagacactaagtggcagatttgtgctctcgacccagataagaggtctccagggaccaacctctcggcctctctaccgtggtcctcctcatgctttgaacttcgccttggcaaagttggggcacaacaaccaatcctttagctgggaactgggtgggggcagaaacagagagagcctctacttcagaccatgctgcccag

SEQ ID NO: 517413 - DNA, 645 bp, Homo sapiens
cagcctttgtgcgtgtgttggggyagggagtgggggagaggtggcgggtggtctctgctggtcctgctgcctcagaggccatctctgttgtcagagtttgaagactcctggaagggcctctaggccccagatcccagttttaagagctccagtcttactaaatctcgctgaaccccctctagtcttaccttggccagggtgggtgaggaaaggtgagaggatgtgaaataggtggggcagccaggtgtgggagtggagttggggtgaggtggagaaggatgggattgggagcggtgggaggatggtgcagggggttactaggatggggtttgtgtgaaagggcttgggtggagtggagggaggtggatgacttggaggggtggccagacctttgccctgctcctgagtatgaaggtccctcattttacatctttactggggaggagaggggaaatccccaaaagcctttaatgtggtggtgtcagaggccaccctgcctctctgacgggtagggaggggtctccagcagggctaagggtgaatcatctatctctccagagcccagtatctggggtgggagggtgacttgcagagtctctgctccgggatttccttgtcttatgatggggggagagcttccatttg

SEQ ID NO: 517414 - DNA, 645 bp, Homo sapiens
cagcctttgtgcgtgtgttggggtagggagtgggggagaggtggcgggtggtctctgctggtcctgctgcctcagaggccatctctgttgtcagagtttgaagactcctggaagggcctctaggccccagatcccagttttaagagctccagtcttactaaatctcgctgaaccccctctagtcttaccttggccagggtgggtgaggaaaggtgagaggatgtgaaataggtggggcagccaggtgtgggagtggagttggggtgaggtggagaaggatgggattgggagcggtgggaggatggtgcagggggttactaggatggggtttgtgtgaaagggcttgggtggagtggagggaggtggatgacttggaggggtggccagacctttgccctgctcctgagtatgaaggtccctcattttacatctttactggggaggagaggggaaatccccaaaagcctttaatgtggtggtgtcagaggccaccctgcctctctgacgggtagggaggggtctccrgcagggctaagggtgaatcatctatctctccagagcccagtatctggggtgggagggtgacttgcagagtctctgctccgggatttccttgtcttatgatggggggagagcttccatttg

SEQ ID NO: 517415 - DNA, 670 bp, Homo sapiens
ctcctgacggcctcccagctgctatctcacctttcctctgctttctccacactgaatttttatcatgaaatatttggccatattcacgatgcaggggaactggcacttcattcattgctggcaggagaggaaattcatacaaatggcttggagagcaatttgtcaaaatctgtaaaattgtaaatgcgcaaaccattgatccctagcataattctacttgaaggaatttgtctcattgatataaattgaaaataacctaattgtccatgagtgggaactggttaaaataaacttgggtacatccatcatgcagaataacctgcattcaacaaaaagaatgcgatggcgctttatgtactgatatgggaaagtgattaacgttggttgctggttgtaataaatgtcggtcttctctcttgttctaaagactcctgtagaaaccacctaaccagagagtgaagtaaacacagaaacaaactttggaagcttggaaagttgagagaatccagagggttggtacaagaaggcctagttctagttcctgctcagatgtgaaggtgcttgctcctgagcctatttcctccctccctctcyctctctctctctctctcagtgcagccttaacctcctggactcaagtgatctttccacctcagcctcctgagtagtt

SEQ ID NO: 517416 - DNA, 462 bp, Homo sapiens
gcgctactcacattttgggctggatcattttgtgttgtgggggatgttccgtgcattaccgcattatagaacgttcagcagcatctctggcctcacccactggatactggtggcacccgtctcccctacttgtgaccaccaaaaatgtctccaggcactgccaaatgttcctggaggcaaaatcactcacaaataggaaataatgacctaattagtaacttacattagcaattcattcaacartatgtgttgagcatctactgtttgccagaccatacagcagggatgtagtgatatttaagacaaacaaggtccctgacctcatggagactttttcctttttggacctcagtcttctccgctgtaaatgtgggtatcacaaggctgcggagctcctaaatttgttgggaagatgaagttagacttgcaagtgcctggcccctggcatgagggattagccaa

SEQ ID NO: 517417 - DNA, 462 bp, Homo sapiens
gcgctactcacattttgggctggatcattttgtgttgtgggggatgttccgtgcattaccgcattatagaacgttcagcagcatctctggcctcacccactggatactggtggcacccgtctcccctacttgtgaccaccaaaaatgtctccaggcactgccaaatgttcctggaggcaaaatcactcacaaataggaaataatgacctaattagtaacttacattagcaattcattcaacagtatgtgttgagcatctactgtttgccagaccatacagcagggatgtagtgatatttaagacaaacaaggtccctgacctcatggagactttttcctttttggacctcagtcttctccgctgtaaatgtgggtatcacaaggctgcggasctcctaaatttgttgggaagatgaagttagacttgcaagtgcctggcccctggcatgagggattagccaa

SEQ ID NO: 517418 - DNA, 646 bp, Homo sapiens
tgcagtgggcctgaagtaagttctattccttactgtgtgtctcagtcaaaacaagtcaaaaccctggtctagccagatagtgagctcttcagtcccacccacctctcctcgtcctttttcttttgattaaaatgcaaattagctctctctgcttccttcgtgtgtctggtgcattgcggggaggggcgagatgagctaagaggccgagttcaatgtttaaatcagtaaaagtgagaggaattcaggtgaaagtggaaacaaactcttccaatttgctctggagaaagaataatcatagtaaaagtaccagctcccatttatttacttactgttcacctaccacatgcaatagaccttccatagatcctttcggtaatctgcaggattggctggcgttataaaaccggttcagaagcctaaaaggcttkttcaaggtcttagagctcaaaagccagaaatttctagcgttggctgcacctgacgctcgctcaccagaagcttacacttgtgtcaaagccccacccagactaagtaggtctgagtctcacaggtgtgacctgggcaccgggggaagctctggaggctcggaggctgagaactactgttaattaccataaagagtggacggtgggccctgcatatgacc

SEQ ID NO: 517419 - DNA, 718 bp, Homo sapiens
ttgtgtcaaagccccacccagactaagtaggtctgagtctcacaggtgtgacctgggcaccgggggaagctctggaggctcggaggctgagaactactgttaattaccataaagagtggacggtgggccctgcatatgaccacaggacttcatgatcctcaaatccctggaactggaggtcaaacatcccatggatacagggagaaaaaagcctgtggaggcagagtgtgaggtgctggatatgaaactgcttcttccctgcatctccccaatcttgcatccttcaaaatgatcttacccgccagactagacatccctggcctctcactgacccgccgtataacctcaggcacattaagtaacgtctctgtgcctcagtttcctgatctgtaaaatgggagtaatagcaattggaactattttgtgggctggcagaagtccttactgtttccccagccccagasgagtgcctgcctgcaaacaatcattgaataaacagtaaatgctcaacaagcagcctatgaagatggcgtctgactcacctttctactccgctgcttcccaggtcctgtgaacacgaactctttgcatgcatcatcggctagaaatggaccccccagatctctctagaaaagaccctgcctctcattttcctatcagccgttgggaccaagacaaaagtgctggcagacgctgaggacattcctttcccgtctgc

SEQ ID NO: 517420 - DNA, 718 bp, Homo sapiens
ttgtgtcaaagccccacccagactaagtaggtctgagtctcacaggtgtgacctgggcaccgggggaagctctggaggctcggaggctgagaactactgttaattaccataaagagtggacggtgggccctgcatatgaccacaggacttcatgatcctcaaatccctggaactggaggtcaaacatcccatggatacagggagaaaaaagcctgtggaggcagagtgtgaggtgctggatatgaaactgcttcttccctgcatctccccaatcttgcatccttcaaaatgatcttacccgccagactagacatccctggcctctcactgacccgccgtataacctcaggcacattaagtaacgtctctgtgcctcagtttcctgatctgtaaaatgggagtaatagcaattggaactattttgtgggctggcagaagtccttactgtttccccagccccagacsagtgcctgcctgcaaacaatcattgaataaacagtaaatgctcaacaagcagcctatgaagatggcgtctgactcacctttctactccgctgcttcccaggtcctgtgaacacgaactctttgcatgcatcatcggctagaaatggaccccccagatctctctagaaaagaccctgcctctcattttcctatcagccgttgggaccaagacaaaagtgctggcagacgctgaggacattcctttcccgtctgc

SEQ ID NO: 517421 - DNA, 617 bp, Homo sapiens
gatctgttgatgctacagattgggaacctggaaggatctttttggccaaataaaacataaattgaggggaaccacatgaaattgacaatattcaccagtgagccacggcgcctagaccatttcccatgattttttatgaaactttccaatgcacagcaaagccraaagaattttacggtaaatacctatatacccactactagcctctaccattaacatgattaccacatgtgctttatcacatcctgtttttgatgcatttcaaagttaactgtagacatcagtatccttccccccaaaatatttcaacctgcataaaagtaagcacttggtaatttttaaaacaaaaatagtaatttctttcttttctttttttatgagatggagtcttgctctgtcatccaggctggagtgcagtggtaccatcgtggctcactgcaacctcagcctcccgggttcaagtgattctcctgcctcagcctcccaagtagctgggattacaggtacaagcaaccacgcccagctaatttttgtatttttagtagagacggtgtttcaccatgttggccaggctgatcctcaagtgatctgcccctcccccccccgacctcccaaag

SEQ ID NO: 517422 - DNA, 553 bp, Homo sapiens
tatctgctctcttagctgcgttttctccttcccaggacttaaaattgcaatggattggttgtgaaatgccatgtgtaaagccatgccttcctgctacactgcatgcttcctgaaggaaggggctctgakggtcttcatcatcactgtaactgtctccagtgtccacttacaactcacctcctcagcgaacgcttgttgagtaaataaatggataaagaaatcccatttgtaatgttctcttctttggagaaagagcattcaggctcttttcagacctgtgtaccacctgccccccacacaaaatattgctgagtacctagcaacatgtggcagctacagcaggaaatactggatgctcatgaaactcagcagccactcctgaccccttacctttgtttctggcaattaaaatgagcttattccgtatggaatcatcgggagtatcgaaggagcaaaaggtgcctcgtcctctcaccctgctgatgaactgggggtaccgggcctgtagtgggaggagacaaggctggcgtcaaagcccatcacctgtgtacca

SEQ ID NO: 517423 - DNA, 444 bp, Homo sapiens
tggcagctacagcaggaaatactggatgctcatgaaactcagcagccactcctgrccccttacctttgtttctggcaattaaaatgagcttattccgtatggaatcatcgggagtatcgaaggagcaaaaggtgcctcgtcctctcaccctgctgatgaactgggggtaccgggcctgtagtgggaggagacaaggctggcgtcaaagcccatcacctgtgtaccagctgggcttaatggctgtgcttcgtcaaaggcctcccatggtccagcctcggcctctgcatggactggcaggacctccagggggttaagagctctggggacattcaggcctgggttcaaagcccagctgtgcacatgtgtgttgtgtggaggaaaaaaaccaccaccaccaccaccagcaacaacaaccaagcccagctctgtccctctcactgtata

SEQ ID NO: 517424 - DNA, 610 bp, Homo sapiens
gtacgtaaaattcctgatgagtatgactcactctatattttgaaaaggaaaaaagtaccacaaaaaatgtagaaaaatatattgttggagacttttatatttgccctttggaaggtgtgtggtcttaggcaagtgacttaagctctctaagcttctgtgttcttatccatagagtaggaatcatgcctccacgggtgaggagtagagatgatggtgaatgaggagaaacagttcaagttcacagcactgcggctggcaccaggtccaccttaagggacactccagcaagcaagacactcgccaggctggggagaaaagagttccagacctgagatggtgccaggcagatgctgctgctgccagaacctgggctgactgcacagtaaaactgttgcttccactgctagcaaaaatgaaatgttcagtgccagragctgggagatgaagcttaataaaactgatgtgtcactccaggggttgccatacacattcttctcctgccaagaagcaaccctagttgtgctgaaaaggctcttggaactaccctaaatctggaatattcaaggtgactcttgttattgttcttaggatagttgttctaggtataaaa

SEQ ID NO: 517425 - DNA, 496 bp, Homo sapiens
tagtttaaaggccttgaggtctggtccctatcaccattccaatttctgtgcatagcaccttcctgactctgggtttggccacgaggatctactgtttgtcctgggaaggcttctactcagtctttgcagatgctgttcccaccacccaaaatgcttttcccttgcttctgattccttcakttctactcacacttctgatatcagttcatgactcactttctcagagaagacttccctgaacctctcccaccagatcaaatcttccttttagcacagaatcctacacggctcccctttgtggccccatcacattcatatgttacctctatttgtggaattatttggttcatgtcttgtcacttataagactatacactttaaggtagaagttgtgcatatgattagacttgaattcccatcatgataccatctggcactgtactggaagcccaatacatttttgtcaaattgttagtaagtcttgattggtgcagtc

SEQ ID NO: 517426 - DNA, 534 bp, Homo sapiens
ctggacttcttaagtaggacacaaaaagcattaaccataaaggaagaccaggcttggtggctcatgcctgtaatcccggcacttcaggaggctgagatgggaggatcacttgaggccaagagtttgagactagcctgggcaacatagtaagaccctggccttggtgactatttgcctctaatgaggcaaaggggtccacaggatggggatgagggagaaaaatttacttttttttctgtagattgagttgcagtgttttgagtgttttaccacgtgccatgattgcctattcaaaaagtaaattgttaaaaaaacagagtaagtctatacagacttgaggaataaaggtacaggaagggaaggaggagggcttctaagtccctggccctgggaggtcctccaataaccccatgtttggasacttaggttttggagccaggcagatcctagttcaagtcctgtttcaacttcttgctacctctgtgaccttggtgaagaagcttaaaagaagaagacctttcccaccttactaag

SEQ ID NO: 517427 - DNA, 549 bp, Homo sapiens
gctgtggtgggacttgagaatagacatttctaaagaatgcccaggcgatgctgatgctgcttgcatacctgctctgcctgcctgtgggtgggcytcatgtgggcacagtgggctgtgactgggaggcagggctgcgtaggcttctttgtagttagctgctccaggccaggctggctccctttcctggctggccttggtgtctaaaatgccttcctctagagatgtgtttatatgaaaaaacagataaagtcattgtgaggcttgcaactcctctttatcatttcttcttaccaaccctgtccctccccttacagttttgatctgactcacactgaaaacacactaggcttcccagtgaatagcttagagcgcaaaggctatgcaagaaatagtaggcaattcgtccacattaaaaaaatgatcttcagcacagtatatgacacatggtaaacgttcaactatatttgctgaatgaataaatgtgctatggaagctacatgtgggctaatgataggagacctcaccagctagaaagctttccatttacca

SEQ ID NO: 517428 - DNA, 549 bp, Homo sapiens
gctgtggtgggacttgagaatagacatttctaaagaatgcccaggcgatgctgatgctgcttgcatacctgctctgcctgcctgtgggtgggcctcatgtgggcacagtgggctgtgactgggaggcagggctgcgtaggcttctttgtagttagctgctccaggccaggctggctccctttcctggctggccttggtgtctaaaatgccttcctctagagatgtgtttatatgaaaaaacagataaagtcattgtgaggcttgcaactcctctttatcatttcttcttaccaaccctgtccctccccttacagttttgatctgactcacactgaaaacacactaggcttcccagtgaatagcttagagsgcaaaggctatgcaagaaatagtaggcaattcgtccacattaaaaaaatgatcttcagcacagtatatgacacatggtaaacgttcaactatatttgctgaatgaataaatgtgctatggaagctacatgtgggctaatgataggagacctcaccagctagaaagctttccatttacca

SEQ ID NO: 517429 - DNA, 549 bp, Homo sapiens
gctgtggtgggacttgagaatagacatttctaaagaatgcccaggcgatgctgatgctgcttgcatacctgctctgcctgcctgtgggtgggcctcatgtgggcacagtgggctgtgactgggaggcagggctgcgtaggcttctttgtagttagctgctccaggccaggctggctccctttcctggctggccttggtgtctaaaatgccttcctctagagatgtgtttatatgaaaaaacagataaagtcattgtgaggcttgcaactcctctttatcatttcttcttaccaaccctgtccctccccttacagttttgatctgactcacactgaaaacacactaggcttcccagtgaatagcttagagcscaaaggctatgcaagaaatagtaggcaattcgtccacattaaaaaaatgatcttcagcacagtatatgacacatggtaaacgttcaactatatttgctgaatgaataaatgtgctatggaagctacatgtgggctaatgataggagacctcaccagctagaaagctttccatttacca

SEQ ID NO: 517430 - DNA, 512 bp, Homo sapiens
ggtggtaatagcggggatcacgttacaattttaggaaaatctgatacactgagggaaccacattcctgacagcaagtactgtactttcagtagagtacagtgaggtgttaggatgtctcattttcccggtaaaggttttatgtaaactgaaatgtctttctgtgtatctattcacctaacactgccaagagagaaaagaggattgaaacataaatctcatcttattaccacacctaaattgttccctctgattctgtcttgatgcctgactcttgccttgttcccctggcataataaatttcttaacctagattctcgataaaatcctccataatttacttttatcttagaagttgtcataaaaatwcactgacaacgcacagcccaaggtggtgtggaatgagctacgttgatctgtttgtatagatagagatacacaactgctctcagatggaaacatagtgactttcctctttgttcccataaaagaatatctaccaattccagagagg

SEQ ID NO: 517431 - DNA, 642 bp, Homo sapiens
ctgaggaactgctgtttggcccttacctagctctttccttatgtgtatattatggggctttctggatatatattttgtaattttctagtttcccaatactaattggcaacagtggggaaaaaatctgtagctaaatcattaataaataatgtttcagtggttgaaaagaatctggaaagaagaaagagatccaaaaaactaaaactcaaatgctctggtagccagtcaggaagaacagacttaattgttatactagaagaactttaggtgcctcattattacataacagaagaatgagctatgaggttgggattattaaaaatatcaggaactttaagttatcttgctttttgtcttgacaatatgtgcatgtgcaattaaagtctggtgacactctgcccttgtcctggtttacatactcagtctctaagaagtgtcatggtgatggctgtcatccatccaaaagcttgatgatattttctctggagcccatctgtgaaccattgtatcagatgggagggtcacaactgagcaacatgttaaattagatttgcataaaacattccatcttctccaggttgagcttgcagcctttgcatgttttcrtcttatttgtcttggcttcagcattatttctataga

SEQ ID NO: 517432 - DNA, 602 bp, Homo sapiens
aagtcaaaatacccttcgaggtagccaagacacacacactttgaccttgatgtacttgtcaacatcattcctcttctcctcaccsctggggtctagtagttctcctattgaactataagaatctttctcttgatacctttcacaggagggcaataccctgggccccctcttgtctgtatagccagcagcaccaatccattatacaagggccagatgcagttcaacaaccacaacttcctcttaaaacccattcaatgaccactggagctcagagacttctacattggtgcttctctgaccacattttccctatcacactctttggcaattaaatactggttttcacagatagaattctagtgccattaacatgaatgtcaacttctcagagacgtatcacttgtctgatatttcattactgaggacccaagcacatcagtttcctgatggaataaattccaaggaaaggatttattcagccaatctagcaaataagcctatatatttaatttctaacttagaattcaaagacactcgccttttctatcacttcccgctctctatttttttttttttttagagaacgggtatcacaatcttcc

SEQ ID NO: 517433 - DNA, 602 bp, Homo sapiens
aagtcaaaatacccttcgaggtagccaagacacacacactttgaccttgatgtacttgtcaacatcattcctcttctcctcacccctggggtctagtagttctcctattgaactataagaatctttctcttgatacctttcacaggagggcaataccctgggccccctcttgtctgtatagccagcagcaccaatccattatacaagggccagatgcagttcaacaaccacaacttcctcttaaaacccattcaatgaccactggagctcagagacttctacattggtgcttctctgaccacattttccctatcacactctttggcaattaaatactggttttcacagatagaattctagtgccattaacatgaatgtcaacttctcagagacgtatcacttgtctgatatttcattactgaggacccaagcacatcagtttcctgatggaataaattccaaggaaaggatttattcagccaatctagcaaataagcctatatatttaatttctaacttagaattcaaagacactcgccttttctatcactkcccgctctctatttttttttttttttagagaacgggtatcacaatcttcc

SEQ ID NO: 517434 - DNA, 446 bp, Homo sapiens
tctgctgatgcattttttttttgtttgttttttgagacggagtttcattctgtcacccaggctggagtacagtggtgcgatctcagctcactgcaacctccacctcccgggttcgggcgattctcctgcctcagcctcccgagtagctgggattataggctcatgccaccacgcccagctaatttttgtattttcagtagaaacggggtttcgctatgttggtcaggctggtctcgaactcctggcctcaagcaatccacccacctcggcctctcaaagtgctggggttacgggcgtgagccaccgcgccyggccgatgcatttttgaatagcagctctgatagaaacagtctcatttctatagcgacacagatgtacctggacactgcagagggccttggtctcccgaaaccttagttacccactgaggactaacatttctaaaa

SEQ ID NO: 517435 - DNA, 616 bp, Homo sapiens
agtttccaggtactgccttgcctaacatccctttcaagtagactgccctttctattaaataaatcccttccttacttacaaggaaattctggagctgtctctgtacctgtctgtccatgaacaaatagtggaggcaaaactaataaattccagctagtgtcatggattgtggggtaacgactcactaatgggtgttagctggggagaattttgtgttagaaggggaatctcagcttggatgtgatatgctcagatttcctgtttgggtagggctttggcatttatagggcactgctttcatagctgccattagatgttcttatgacactactggtagatgtcacataggttgacacaagttaaaagatgacacaggcctgaggtgagctaggactgaaatggaagctgcgatgccagagcccacagcttttaagtgttcctatcactatccagctctcctcttccttttttctttcctgttgacaacctgcctggtcacaggtataaartaaatgactcagatgctttagtcacctggactagtcagcttggactgtgcaaggggttaaggagtcagtaattgtaatgaggtcttgaaactgttgagtcacttgtt

SEQ ID NO: 517436 - DNA, 480 bp, Homo sapiens
ctgagtactttacatttctagaaactttcagctaakgaagattctattaccatcctcattttgcagatgaagaaactgaggctgggaacgcttaagtacgcacccaataaatggctaaaaaatgccaagccaagctggccgaaccccatgcttggcgtactgtgtgtgccattcattccaatggtggtgagcaagtccgcaccgggcttaaagtcaaggcgagacagattacttaacaatcactttcaataaagcataacacagactctgacaggggagacacagaacacaggcgccagggggctccagcccagcttggggtgcagggaggggaaagaagctttcccagtgtaggagtatgccaggggaagttgacgggcaagggaggggatggcagggagaaaactccaggcagaaggaacacccagcacgccaggaacaaagtgtgctttacctgaggatctgcaaaggctgaagtgc

SEQ ID NO: 517437 - DNA, 478 bp, Homo sapiens
atttcctgttgctttctagcacctcgcactgtgccctcgccacacatctgctgttaggccagaaactcccttggcacgcggcggcattgccctctacccagagagccggcaggcagtcctcatgcctcccccaagtgcccaggcagagaacggctgtgcatgtcatcagcagctcccccttgctcagaccccttcagcctgcagaccctctgaggccrggttggggtgggatcccctgggagctctgtcagccagccagctagctggccacaccctctcctgggtggggagggatgagccctgacctacagaggggtgaggggttggggcttagtggtgggggtagttgccgggcctgggagagggtagtgcagcagataaaggtgggattttagcaggaggtcccaaaaggcctgggtgccaccttgtcccctttgccccacctcccttcgtggcttcaggctgggagtccaggttc

SEQ ID NO: 517438 - DNA, 454 bp, Homo sapiens
cagctgctgctccagcagctcagtccagcccctcacccctggccacaggctccagcagaaaggagcctccctgctccagcccyggccaaggctgcccgttcagcctggaacctccatctcccttttaccgaccagcaccttgctcctttcctgttcccctcctccatgacccagcttggggacccctttcagcagccttgggacagtggcttctgcttgcctctgcctgcttgcatggattttgccctattcattctttctttgagcatcatttccctccattccacctgctgtaatgttcagacatttgcttgggtcctttgtcaggaattgtgctccagtaccactgtcattatgcaagatgatgtttgcaaaccatattcatttcctatcgccactgtagcaaattagcataaactgagtggttcaaaccaacagaaatgttttataattg

SEQ ID NO: 517439 - DNA, 454 bp, Homo sapiens
cagctgctgctccagcagctcagtccagcccctcacccctggccacaggctccagcagaaaggagcctccctgctccagccccggccaaggctgcccgttcagcctggaacctccatctcccttttaccgaccagcaccttgctcctttcctgttcccctcctccatgacccagcttggggacccctttcagcagccttgggacagtggcttctgcttgcctctgcctgcttgcatggattttgccctattcattctttctttgagcatcatttccctccattccayctgctgtaatgttcagacatttgcttgggtcctttgtcaggaattgtgctccagtaccactgtcattatgcaagatgatgtttgcaaaccatattcatttcctatcgccactgtagcaaattagcataaactgagtggttcaaaccaacagaaatgttttataattg

SEQ ID NO: 517440 - DNA, 454 bp, Homo sapiens
cagctgctgctccagcagctcagtccagcccctcacccctggccacaggctccagcagaaaggagcctccctgctccagccccggccaaggctgcccgttcagcctggaacctccatctcccttttaccgaccagcaccttgctcctttcctgttcccctcctccatgacccagcttggggacccctttcagcagccttgggacagtggcttctgcttgcctctgcctgcttgcatggattttgccctattcattctttctttgagcatcatttccctccattccacctgctgtaatgttcagacatttgcttgggtcctttgtcaggaattgtgytccagtaccactgtcattatgcaagatgatgtttgcaaaccatattcatttcctatcgccactgtagcaaattagcataaactgagtggttcaaaccaacagaaatgttttataattg

SEQ ID NO: 517441 - DNA, 611 bp, Homo sapiens
gcagctgtgatcacatttcatctgtacaaactacccagtgaatcaggaagaaattcaggcccattttgccgatgaaacagactctgagattaactgacttgcctagggctccttagcaacgggaaggacaacctgtgcacctaggttagtattgtcctgaagccccttctcttcaaactaaatgccatgaggcagaatagcagcacagttaagccagcctacatcctggcttctccacctccccagcagtgtgaccaygggcaagtcacttcacctctctgagcctgcatgctgttctctggaagatgggggggtgcctgtcccatacagttgtttggagagtcaggagttcattcctgtaaattgcttaggagagggcggggcacacatggcttgtctggtcgtggggagggagggggtggtattatcccaaagcaagataaatcagttaaggggagaaggaaaggggcgatacagaccctggactcttgggagaggtgaacctgcaggctagcaaggggaggagtcccaagagtggccaagttcattaatcccaggcagaccaggaaggctgaagaaaaaggagaactttattttatttttgaaatgga

SEQ ID NO: 517442 - DNA, 611 bp, Homo sapiens
gcagctgtgatcacatttcatctgtacaaactacccagtgaatcaggaagaaattcaggcccattttgccgatgaaacagactctgagattaactgacttgcctagggctccttagcaacgggaaggacaacctgtgcacctaggttagtattgtcctgaagccccttctcttcaaactaaatgccatgaggcagaatagcagcacagttaagccagcctacatcctggcttctccacctccccagcagtgtgaccatgggcaagtcacttcacctctctgagcctgcatgctgttctctggaagatgggggggtgcctgtcccatacagttgtttggagagtcaggagttcattcctgtaaattgcttaggagagggyggggcacacatggcttgtctggtcgtggggagggagggggtggtattatcccaaagcaagataaatcagttaaggggagaaggaaaggggcgatacagaccctggactcttgggagaggtgaacctgcaggctagcaaggggaggagtcccaagagtggccaagttcattaatcccaggcagaccaggaaggctgaagaaaaaggagaactttattttatttttgaaatgga

SEQ ID NO: 517443 - DNA, 465 bp, Homo sapiens
taaatgcactaaggtcattcagttgttcgctttaaaatagttcctttatgtaatatgaatttcacctcaatgaaagaaagagggaggaagaagtgagcaatctcaagttccagtcaaaatggaataacagggactagatttaccatcctgcctgaaacagccaaaagggacaaaatgyatagaacagtggttttcaagacaccagacatcaggcaatgaagaacagtgatccctgaggaatggacactaatgaaatgagccttttaacggctcctgttcactatcatgagatagtccctcaggctgtgacacaggaagaaggaaacccagaaagacaccagttggcttcccaaggtgagggatggggaaccaaggtggccagagttcacagggcatggcatgagagaagacagtgctgcagagaaagaagtttgaagatctacagagggttcccaggtatacagc

SEQ ID NO: 517444 - DNA, 319 bp, Homo sapiens
ggtcaccccggcaggtgcgggccgtccgccgcgtgcacagggcgtactgcgcaaggctgcacagaactcgggggtgtcgtctgaggctggggcgtggctgcccgacgtggcgctccagaactcagagttgcacttgaggatcttgcacggggaggtggctgaggagaaaggaacgaacacaccgtcggggtgcagcctggcaaccccagcttctgctaccatctgtgggccaggggagcagccacacatcgcctcatctagggcagagccacccaygccacacacagatggtgaaaaatttcctgcaggtggtaggaaa

SEQ ID NO: 517445 - DNA, 571 bp, Homo sapiens
tggcaccccccgatttcaagacttactatgctgaatgtctcctggtccagatcatcatcctcatcctctccaatggggacaggttcacttcctgctgtaatatggacaggaccctgagatcgctttgatttactcgaagatttggcatcaccacttttaggcttttaaaaaagagttacaaggagtcattgtcatttgtgcaatcctaccgtgcgatttargtttcttacctatgttgtgttattaaaatgggtaaatatgatggtctcagtttattttttaaaaagtaaaataaaatcctgaaacatcatgaagacaaacctgtctgattagcagcttactcacacattattcccatttccatctctaaatgtacccaattataacttcaatttcatcagtgctatttttgggcttcttactcctttatccataaaatgcacagaaatgtcatcaagaggttaagcttgtaaattggcagaactctctagagtatcatgtagcaacctttattaacagcataccctttggtttaggaatctgtattaactacattattgtaaatgaactc

SEQ ID NO: 517446 - DNA, 540 bp, Homo sapiens
aaggaatcaatcttcagataatggtatcttttctacctgtgcccttgtcccttcctctytcctgttctcataaaaccttcccaccatttccctcaatttgctcattccctgctgagaaagcaggagcaactggtgtggagaagaaagcaacagggaattagacaacgaagtgacctttaaactattttttttttttttagcactttcctcgtccctgaagtacacatgtcactatggccacatctgtggatgatcccttctgcaaggttgcagagagaagcaaccgggacccaaaagggaatcggaaagcaggggttgtgtaggaagcagaggcaagggtttggcgaagtgaatgggagaaaataagaattcagtatatttccatggaaattaatatgaaaaattggcaaggaaaagttctgaaaaatccatttaaaacgcaaacagtgtaggttaatgaaatatctgcagagaaataaatctgtggttttatttcagtgataatccaaatagagaatatatgggttaacatttgggcag

SEQ ID NO: 517447 - DNA, 540 bp, Homo sapiens
aaggaatcaatcttcagataatggtatcttttctacctgtgcccttgtcccttcctctctcctgttctcataaaaccttcccaccatttccctcaatttgctcattccctgctgagaaagcaggagcaactggtgtggagaagaaagcaacagggaattagacaacgaagtgacctttaaactattttttttttttttagcactttcctcgtccctgaagtacacatgtcrctatggccacatctgtggatgatcccttctgcaaggttgcagagagaagcaaccgggacccaaaagggaatcggaaagcaggggttgtgtaggaagcagaggcaagggtttggcgaagtgaatgggagaaaataagaattcagtatatttccatggaaattaatatgaaaaattggcaaggaaaagttctgaaaaatccatttaaaacgcaaacagtgtaggttaatgaaatatctgcagagaaataaatctgtggttttatttcagtgataatccaaatagagaatatatgggttaacatttgggcag

SEQ ID NO: 517448 - DNA, 622 bp, Homo sapiens
ttatctatacatggaagtgagcaaaagtcaatttctacttcatgccatacaagatacatttctaaaagctaaatataaaagtcaaatccaattattgaaaaaagatttttaagaaaatttgtatagtgaagagcttccacaataatcacaaaactcgtaagtcaactcagatttgactaaaaaatttaaacttctatagagtataaaacaaaattaagagagatgcaacacataagaaggaaatacatgccacataaatatataacaggcaaaatcctactatccagaacatcaaaagagcttctgcaaagcaataagaaaaagacaaagatcagatcatggaagaaaaaaaatacgaaatgccaataaatacatcaaagattctcaactctctaatcatcactggaaataaaaactaaaacaataaaaaattttaattaaagaataaaaaagattaataatatctaacgtctaagaggacttgcaaaagtggtgttttcatacacctyggtgtattctaaatgggtaaaaatccttttcaggtaagtgactttgataatatctatcattaatttaaatgtgcatctctgatacagccattccatttgtcagaatccatcat

SEQ ID NO: 517449 - DNA, 535 bp, Homo sapiens
accctggtgattaatggggtgacagatgtcacaaccagatcgccctcacctctgagtttgaacattattggtgtatagaaatgctactgatttttgtatattgattgtgtatcctgaaactttactgaagttgtttatcagcttcaggagtttttgacagtctttagggttttcaaggtatgtaattctatatataatgtgtgtgtgttttattttttaaaaaatgtttcttttatcataggttttcagcaatttgattgtgacagtttatttgtttgtagcctacttgtactttattgagcttctcaaatctgtgggttcagagttgtaatcaagttaagaatatttctaaccattatttcttaaatagttttttctttctctgttacctctttctgccactcccagtacacatatgttatactgtctgatattgtctcaaaattcataaaagtccattcatttcctgtcagtctgttttctctttgtgcttyggtttggatagtttctattgctatatgttgaagttcaatga

SEQ ID NO: 517450 - DNA, 615 bp, Homo sapiens
cacctctgacaagtccagcaacaaagtatattcattcatcttgaacgaaagaagggactggactgttggacttggtctgagccctatgctcccagaaaggagcaacagttgagaaattctccctaccctcttgtattctgagaaagatctaaccccgaaggacaatgctgctcccacacactctgagctaagcctcactttccccaatgactcataagaagtcaaagataagacccatttttttcatcttcctaatgattcccataagacttgggatgactcccttgtttacttgcttctataaaaacccacsctcttttcttttttattttttttgagatgttcctcattaacaacatcttccttattgcaataggctgaataaaataatctccttagttatttaagcatattgtctttcacagtggaagattttattaaaaaacaaatgtgactgcatgtgtcctttaggatacacctacacagaggttgggggaggagtgttcaaagtaacggggatggccacatttctaaaagttttattcgtggttgttcaggacacacagtcattctccataatagtttaaactaataaaacaattgtcaatatctcag

SEQ ID NO: 517451 - DNA, 315 bp, Homo sapiens
tgctttgtgaataccatctctaaatcatgcatgctctgtcctttcccttcctagacagacagaaagaaagaaggatatraagccctctgctttgttgttcaccattgtactgaatgacatataatgcagtctagagtttatttcttttttgtttattgtctatgtattcccactagaatagaagctacctgagagtagagatttttgtatttttgttctctatgttcccatatacctagaatagtgcatacgttatggtagaaactctgtaaatatttgttgaatgaatgaatggataagcaattgttgctggag

SEQ ID NO: 517452 - DNA, 315 bp, Homo sapiens
tgctttgtgaataccatctctaaatcatgcatgctctgtcctttcccttcctagacagacagaaagaaagaaggatatgaagccctctgctttgttgttcaccattgtactsaatgacatataatgcagtctagagtttatttcttttttgtttattgtctatgtattcccactagaatagaagctacctgagagtagagatttttgtatttttgttctctatgttcccatatacctagaatagtgcatacgttatggtagaaactctgtaaatatttgttgaatgaatgaatggataagcaattgttgctggag

SEQ ID NO: 517453 - DNA, 574 bp, Homo sapiens
tcatttaacatacaactaggactagttagttaaactctcaatatatactggaattaaactaaatctagattctataatttttatattctaaatcgttatatatttttcattagaaaatgtgtcaggggatagtggctcacacctgtaatcccagcattttgggaggccgaggagggcggattgcttgagctcaggagttcaagacaagcctatataacatggtgataccgcktctctacaaaaaaattttaaaactagccgggtgtggtagtgcactcctgtagttacagctactcgggaggctgaggtgggaggatggcttaagtcctttttgagtgggaccgtgtctcaaaaaagaaagcaacagtactgaccatttggagtatggcttcgtgttaggtactattttgaatcaccttccaatggtttaatgaacttgtactgaatggagatgtgccttggtgtgtgtttgtaaacaagtccaccagccaagacatacatgtgtaaacatcatcacacattatagcaggatgtctgttaccacaaggatctggcatttcacatgaccttaaag

SEQ ID NO: 517454 - DNA, 608 bp, Homo sapiens
ggaagagatgaagaggttcctccagcccttttataagggcactaatcatgagctaatcacctcacaaaggggccacctctcaataccaccacattggagattaggatttcaacatatgacttttttggaaagacacaaacatatcagaaagctttgacagcaggtgactctatcggctggatgctccagatagccctgaacatgaatcacattttattcccagccaaccccctatcattacttctgcaagcaccaccacggagaaaatcagcaacctcatggcttgcaggtgggatcgctcgggtcactttagaggctgtcacatctctttgtaaatgtttctagatatccctccctgactccccaggaccattaattggtttgtttatctgtggtagaaacaggataytagtggaagaaagcaggcatataataggttctcagtgtgggtttgtagattagtaccaatgaatataggacatgttggcccaattggcattttctcctctggcctagattctggtactaaactctggctaataaactaaagcttctattaaagcacacagcagtgaattaaaatatagatgtaaaatatgccttgacag

SEQ ID NO: 517455 - DNA, 541 bp, Homo sapiens
tcacctcacaaaggggccacctctcaataccaccacattggagattaggatttcaacatatgacttttttggaaagacacaaacatatcagaaagctttgacagcaggtgactctatcggctggatgctccagatagccctgaacatgaatcacattttattcccagccaaccccctatcattacttctgcaagcaccaccacggagaaaatcagcaacctcatggcttgcaggtgggatcgctcgggtcactttagaggctgtcacatctctttgtaaatgtttctagatatccctccctgactccccaggaccattaattggtttgtttatctgtggtagaaacaggatactagtggaagaaagcaggcatataataggttctcagtgtgggtttgtagattagtaccaatgaatataggacatgytggcccaattggcattttctcctctggcctagattctggtactaaactctggctaataaactaaagcttctattaaagcacacagcagtgaattaaaatatagatgtaaaata

SEQ ID NO: 517456 - DNA, 561 bp, Homo sapiens
ggaaacttgcttgagcctaggaggttgagttcgcagtgagccatggttgcaccactgtattccaccctaggtgacagagaaagaccctgtctcaatgrggggggtggggggtggggggaagaaaagaaaagaaaaaagaaaaagtgggagaaaaacaagagttggaatgctgtctcacagctctgatgttttcccagaccatatcaatttttcttaccttcttgatgaactttgattaagagccctgctttcatttgacttgctgttttggtttttgtttactttttttgacctgtctctgtttattcgtttgtttttaatttttgtaatcttgttgggtcaagagaagaggttcactactaggcacggcctggtttggtcctcagatgactggctcagagccaagacatctggattctctaaaatattgaaaaaaccaaaggtgcttttcctactcctttgcttatactcacacagtcactcaacaatttacttctaacaacagatacgttgaggtttttccccacacacctagcaatctgcaatggacaccgactgcat

SEQ ID NO: 517457 - DNA, 647 bp, Homo sapiens
tgcttgaaaagctgagatgggaaacttgcttgagcctaggaggttgagttcgcagtgagccatggttgcaccactgtattccaccctaggtgacagagaaagaccctgtctcaatggggggggtggggggtggggggaagaaaagaaaagaaaaaagaaaaagtgggagaaaaacaagagttggaatgctgtctcacagctctgatgttttcccagaccatatcaatttttcttaccttcttgatgaactttgattaagagccctgctttcatttgacttgctgttttggtttttgtttactttttttgacctgtctctgtttattygtttgtttttaatttttgtaatcttgttgggtcaagagaagaggttcactactaggcacggcctggtttggtcctcagatgactggctcagagccaagacatctggattctctaaaatattgaaaaaaccaaaggtgcttttcctactcctttgcttatactcacacagtcactcaacaatttacttctaacaacagatacgttgaggtttttccccacacacctagcaatctgcaatggacaccgactgcatgccctaaaaatcaattcaattctgacactatctactgggagacagtgtcagatcccacaagcctgtt

SEQ ID NO: 517458 - DNA, 647 bp, Homo sapiens
tgcttgaaaagctgagatgggaaacttgcttgagcctaggaggttgagttcgcagtgagccatggttgcaccactgtattccaccctaggtgacagagaaagaccctgtctcaatggggggggtggggggtggggggaagaaaagaaaagaaaaaagaaaaagtgggagaaaaacaagagttggaatgctgtctcacagctctgatgttttcccagaccatatcaatttttcttaccttcttgatgaactttgattaagagccctgctttcatttgacttgctgttttggtttttgtttactttttttgacctgtctctgtttattcgtttgtttttaatttttgtaatcttgttgggtcaagagaagaggttcactactaggcacggcctggtttggtcctcagatgactggctcagagccaagacatctggattctctaaaatattgaaaaaaccaaaggtgcttttcctactcctttgcttatactcacacagtcactcaacaatttacttctaacaacagatacrttgaggtttttccccacacacctagcaatctgcaatggacaccgactgcatgccctaaaaatcaattcaattctgacactatctactgggagacagtgtcagatcccacaagcctgtt

SEQ ID NO: 517459 - DNA, 546 bp, Homo sapiens
gatgctttttagaatatgaattgatctcgagagctcctaataccttagctttagagttactagcccttcctcattcctctcatcgccatagtaatgttaaataatgtattaggtaggataaacagcaacaggtaaactcccaaatcacagtgatttaacaaaataaaactttacatcttgctcatgtaaagtcctaggcagggatgacagacagccttccactggtgatgcagggacccaggcaccttccatcgcatggtcccgccatcctagagccctgtaggccttcacttccagccagtgatgggaaggccaaacatggaggaggcatgccctcctcctccatgcatgccctccttccactgcagccctggaagctgcacaartctcttctgcttgtataccttttgtaagaacatgaccccacctaaatataagagggctgggaaatgcaatcccacactggcagttaagtccagagacaattgtgcaagggaagaagaccccacatcttttaaggaatttgtcttagttaaggtaacacta

SEQ ID NO: 517460 - DNA, 665 bp, Homo sapiens
atacttttgtgtcatttttactgtcttcaacagaagttatttcaatttaattttaacagaatattgacaattttgagttatagctattgatattcatgttcctaaagggtttttgctaagtttttgtttgtgtgacattcccaaatgttatacttacttactaattattttctatctttttaatttttataccctcaaatgtgtgtttataaccaatgttcctaaggtgttggttatatagaaatgaattctctaaagccattattcacagaactttcagctgactacttgctcccaaaaggcagtttcctgatttctgcatactggcgtatcatgcaaacatctgtaagcatatccatttctactaagatcggactgttctgtctgtgttattttccttcgtatacttttacgttttgtatgtgtttactctgaccatttttagaagcttaagcttcttcaacttgatatgtgataaatcatgtaatttgaggcgatgcatttcctaaattagtttgtttggcatcataaaaaccttatatttaacttgttttagctcacattttctgttttctaccttaaaatgactttttctaactgatgttcatatgatgaggaatatggraaaaagttctaaaattgttgttttcacaggcttgtcattt

SEQ ID NO: 517461 - DNA, 572 bp, Homo sapiens
ccactgttgaaaatgttctccaatgtctattgtgaaatggagagattttgagttcagctcctttcgggaggggaggaaagaatcctctccaaggcagcttcctctagcagtttcctgcctcttgtgggatgagaagatttgctgtctaagatattatcatatttatttgtattttgctgagttcttttactggatgtaaggcagtccaaatgttatttggaaatctcctatcaatcaatcatgcaatttagatagaagttagttccatacagtgtgatctctgacttgctaagtttagaataaactcaaagggcaatgtggcacagttattaaggtttgagagtatgcccatctgtgctctgactctacacatccactgcgagaagaaacatccatataacrccaaaaacactatatgaaaatcttgttgcacagtaggccacccatcaatattacagcttttctttttcttttgatgttccaggtgacctgcaggaaatgtagaaatcaggaaactgacatacaaaagaaaaagttagtagcaaatggaaacaactttataaaaatataat

SEQ ID NO: 517462 - DNA, 618 bp, Homo sapiens
aaaatatgtgaatttgttagagtttcatgaatatttatgctattccttccccaaacattcagaaaacacttgggagatgcaaagatccatgtctaggtttgtttggcggttaaaataaaaccttgacattaattcctgcagtcatttcttttagtgtagtctgctttcccaaatacccaaaagctgttgggagaataaacttgaattccaaggtcttaatcattaggycattttacatagaaactcagacactttatttttaagcaccaatctgtagatgttggagattcattttaaataatctgtggggctcattgacctgtctagaagaagaatggataaggcataaggattgagcaaaatttacttttgaaaattttctttttttttttttgataatatctggtcctgcccttatgggaaggataaagctctgtaaaagcacagggccagctcctgttttctgaaccctttctatggatggcgatgaatctatgtattctacttatcagagtaggtttaccctcatggattatatttgaggtcccacatctgagtggttgacatattgtgccaatatacctagccaaagtgcccttgcattaggcctggcttgtt

SEQ ID NO: 517463 - DNA, 618 bp, Homo sapiens
aaaatatgtgaatttgttagagtttcatgaatatttatgctattccttccccaaacattcagaaaacacttgggagatgcaaagatccatgtctaggtttgtttggcggttaaaataaaaccttgacattaattcctgcagtcatttcttttagtgtagtctgctttcccaaatacccaaaagctgttgggagaataaacttgaattccaaggtcttaatcattaggccattttacatagaaactcagacactttatttttaagcaccaatctgtagatgttggagattcattttaaataatctgtggggctcattgacctgtctagaagaagaatggataaggcataaggattgagcaaaatttacttttgaaaattttctttttttttttttgataatatctggtcctgcccttatgggaaggataaagctctgtaaaagcacagggccagctcctgttttctgaaccctttctatggatggsgatgaatctatgtattctacttatcagagtaggtttaccctcatggattatatttgaggtcccacatctgagtggttgacatattgtgccaatatacctagccaaagtgcccttgcattaggcctggcttgtt

SEQ ID NO: 517464 - DNA, 461 bp, Homo sapiens
acgccttctccaggtgcagatggctgggtttttctggctgccttgcttggcccacaggtgacctccctgggccactggctccttgctgaggggttgtccttctcaaaggttctctcgcaggggcctcagggtgttctgagacccctgcttcatccttagaggtgggtccctggagctccggagtccagggagtggtaggggaagaggggcataggaagtttgtcatgttgctgaaagccatgccaggggacacttcgctcttactcctgctggtggaagtgaaagactctgttgatctagctgtggccggggccaggaggtgcgtccagcagaggcagggagggggactgtccagtcttgacaagcaggtcttgttttggcatgaccccctgagttcatatgtcctccccragtgctcctgctcctccccctggactttgggggcaatgggggtggttcgg

SEQ ID NO: 517465 - DNA, 631 bp, Homo sapiens
tttatggattcactctctctgacaacagaaattgtcagtttgtaggattttataaaaatcaatttccctccaagctgaagtaggcacttaggtacatttactgcttataagaaaggaagtacaattgaggggaaacatccaaatgaggatgaaaatggacagaggtatcaatgggttctggagtctctgcctgtggctgtatttttaaaaactttttatagatatgactttatctggtaataactgctattcctctactactgagcatacctgactaagtcacaggtggagtgtctgttttaaacttctggactcatagcagtgtacaaaataaatctttccccracattctcaactcaataagtgcttaaattaaaaaatgttaagtataacaaatgcatcaaaaactaaatacttcccaggcaggaaaaaggaatgctttgcagagtctcttggttcattcagtctcagatataaagagagtagtgaacttaggtggtatttggtaccaagattccaggagatgactgaggagggagagtcaaatgtcacaccagttaggaatgactttccttgcccagtgctctcctcagggcacccttgacctctccgttcctcaggctgtaaatca

SEQ ID NO: 517466 - DNA, 620 bp, Homo sapiens
ttggcctagagtagatggcagctaatattctgctgggccacttggacctctgaaatcccagaaacatctgtcatattaagactagattctagcagaaggggaggaaagatcaggtggttcctggtctccttgttgcatgtacgaaacagcattggcctgatccatggttcactttgtgtcaatgttactaaaccacaggaccttgagtgctggagcctgtgtggtcctaaggacagacccygaggctagagtttgacccagacttacactgaggtcctaagctgcgtctatgtgtgttggggcacggggggatctgttgtagaacactgttaatgatagttgatactctccatcctgtctggtaattcctacaccctccgaccccacaggtacagcctcctggagtgaccactgtttgccagagctgcccttccctggtccgttctgcccacaagctctggggcatcccccaggaggggatggctactttcctgatctatttccaactccctgcccccaggctctgggcaggcagccttcgtcagctctctcatggatgcctgaaggggccagaccagggactgggcccttactcagcaaggcaaaagaggaaccaccag

SEQ ID NO: 517467 - DNA, 578 bp, Homo sapiens
tggacctctgaaatcccagaaacatctgtcatattaagactagattctagcagaaggggaggaaagatcaggtggttcctggtctccttgttgcatgtacgaaacagcattggcctgatccatggttcactttgtgtcaatgttactaaaccacaggaccttgagtgctggagcctgtgtggtcctaaggacagaccccgaggctagagtttgacccagacttacactgaggtcctaagctgcgtctatgtgtgttggggcacggggggatctgttgtagaacactgttaatgatagttgatactctccatcctgtctggtaattcctacaccctccgaccccacaggtacagcctcctggagtgaccmctgtttgccagagctgcccttccctggtccgttctgcccacaagctctggggcatcccccaggaggggatggctactttcctgatctatttccaactccctgcccccaggctctgggcaggcagccttcgtcagctctctcatggatgcctgaaggggccagaccagggactgggcccttactcagcaaggcaaaagaggaaccaccag

SEQ ID NO: 517468 - DNA, 650 bp, Homo sapiens
gattctaaataaaaccttttccagggacttttttttttttttgagatggggtctcactccgtcacccaggctggagtgtagtggtgcgattacagttcattacaacctcgaactcctgggctcaagtgatcctcctgcctcagcctctgttccagttcttctgtgggctcccaatccaatgctttagattctcaataatgaagggacctccttttcccaagccctttatcaatgaactctattaagaagagaagtgtctgattcaccagaggagacagaaaagaacattggtacccagtgagtgttcctttatttagaaggcaagatccctygggacatgattaaaatccaaacctgaggacacacattctaaaacaagtgagatgggaagaatattggatcctaagtacggtaattattctaaaaagaagaaagttgccagtgccagcctgggcagcatagagagaccccatctctacaaaaaattagctgggtatagtggcacactatgctactcgggagactgatgcaggagaattgcttgagcctgggacttcgagactgtattgagctatgatcacaccactgcactccagcctgggggacagagtaagaccctacctcgaaagcaaaacagaaagaaagctgca

SEQ ID NO: 517469 - DNA, 642 bp, Homo sapiens
  misc_feature (1)...(642): n = A,T,C or G
acctccttttctgaggattctgatacattttcaatcagaaacagaagcaaagattctgcagctcccacagaaactcccagaaaccttcaggtgcttcactcttctgagatccttgagtccaaatgtgggagctaaccnaggctgcctctttttactttaccatgaattcctcctagacatgttgtagctcctggtcttggttaactttcacatccactacaaacattggtaaggaaattcactcctctctaattatgtgctgattatytttctgcaatggggatagtttgagggaaagttcatgctaacttctttgaacatattatcacaaataatgtatgtatgtagagaattaagctaattttttatatgatggagaagtaactgcatgaaagcaacaaaactataaacatcaatgccagatttaaataaataaagaatacatcatccataaaattaacatgttgacttccactgccataatcaagactacaaaatcagctttagaggatcatggttttaagggactattgtgaaccttgaagaggcaatgcttgtcaggttcatacaatcttcaggctactcaagaaattgttaaagactgataataattgatctcagccattaagtgttcactgcata

SEQ ID NO: 517470 - DNA, 564 bp, Homo sapiens
aatgtgcatacgctctggtgagtctgtcaaagaaacacattgtgcaaaaacgtcccggtggaggtggagkttgatttaggcctaaagggtgaagattgttccaggtaataatactttccgccacctccacacatacctgagttgatgtctcaaggcgtcatgcagccttcagcctcctctttgtccaaaatactgctcttcctactatcaggagtgggtgtgtgtgtgtttgtttgtgtgtgtgtgtgtgtgtgtgtgtgtgtcagacatgggattgaggagtggcccagagctcccaccaccatggaaatgcagctcccatggccacccacacttccacccaggggcagctcaaggctcgccccttcaatagagcctttccttgccactctgtcccacatgaatcacacctgcctaggggtacaaataataatgcaacagaatgttttagaataccatttttccatttccatctaagtgtgccaagtgttggcggggggggtgtggtgggcagagtccattttatagcccacagcaatgaggatcctaccttgaaattatgca

SEQ ID NO: 517471 - DNA, 525 bp, Homo sapiens
tattggatcatgcccaaggcccatttgtattggggactggctagatggcttaggaataggcctgaagcttgaaggcacacagactggtgagcagtcagttccaacgcaatcagattattgcctcagtacccagcgcagaagttccagagagagcccccaggatgtcctgggagagtccagaaagtcttcacagacatagaggcagcatttgagctgagacttgaaggatgactaagatttttctagggagaacagtgcaagtgtgtatcccaggaagagacagcatgagaaaaggtaccgtggcatgggaagacctggagtgtttrggaaaccacaagttgttgtggatcactcaggcatgcagtggcaagggagtagggtgaggtggtgccaaaacagtgattgatttggccagaagggtagtcatttgacggccaacgtgtgtgccaggcactatcttaagcactaacttattgaacatgtacaacatcccagttacaaagctactgtcatgattcctatgtt

SEQ ID NO: 517472 - DNA, 661 bp, Homo sapiens
atgctctgagtcactctcagccccagcctgggcgagactgcctgcagggagtgagctcgaggaaggggacccacccacacccctgttgttcttgtcctgctgttcaggctggtaaagcctccctggatgtggttcagacacatccccagagaccacaggtgcaygggcctgagctggcccttatgcccttggcagggataagggttcattctctcctgtgttcccaaaaccttactctctccatcaccttctctcacaagcctccccctctagcctgattgcaaggacaaggtgtgtcctggccccagggcagagaacttgtatgagtaaagcagcttcctcgggagaggaggaggttgatgccaccagcctctgagccatgtgcgaccatctcagggggtctgccaaagcctctccctccatcttggcgctcaacagaacatgccccgtacagtggggaaggagaggggggaggaaacacaggccaggcggacatggtgcctgtgtgcacagcaggtgtgcgtacgctgcggggctgggtttttgtactcagtctgagcttgtcccttgtcttgtttactctccatagcaaagctggtctggtgggtgtcgttattcccattaggcagatgagaagtcgtgactcagtgaggacacccag

SEQ ID NO: 517473 - DNA, 636 bp, Homo sapiens
atccccagaagtgaatccgaaaggagctgaaagaaagaatcccgtgagccatgtgagcccgcaggtccaaggggccctctgactcctgggttcacagtagtcctggaggctccctccccggcctgcatctcgtgtccctttctctgggtgacggccactttgcagccatcccaaagcaaccccaaaccttctttaagcttctttcagcatcaccccaaggcaaaggcagggcaccagaaggaaccttgtggtgctcgaatcagtggaaagaaatggaagagattcaaagagaaactctgagcagtcggggtgccagcttcaattatgtgctgggctgtgacagaacaagaggagttagctttggctggggtggtcccaagtgtgcatccttagagaggggccaccaggccacagsgcctagcaggcctgttggaatgaggagccccctcctcatccaggcagtcagaagaggggaggacccctgaccatggccactcagattctgtctctggggatttggagtcagagctgagaggtgttactcaggagtcactgaaagtcactcaagaccaaggaggtataaacttgaccactgcagggaggccgtgcatggtcttatgtctgacaaagcggaga

SEQ ID NO: 517474 - DNA, 430 bp, Homo sapiens
caagagtgtcccccacctgccccaccaaccagtacacacaggggctctgcactgaagggggcccaggcaggcagggaggcggtggtgactccctcaacagtgcttatggttttatcttctagtccccatcgagactggaaatgctggacacttgtcatgttctgaaagcagagatccatgccctgacttgagtttgcagggccgtcctcgtgtttgtcactccaggacacctgggcactgtgttgtgctgggacagagtggggaggggatgttgagatgrgtccctctgaggttgagctgttgttggcccaccaatggcagtccctgtcatgtagggaggcccctcgagtgggtgggtcgggctccgtgttctggggaccctggaaaggacttggaggaaggacagaaagtggagggcagttcctccagc

SEQ ID NO: 517475 - DNA, 518 bp, Homo sapiens
agctgtggcttacagacatgagtaaggccctacccctgccctacaggagattatggtctgctctaaacaaaacgaacttgaatttcacgtgaggatctggtctagaaactgatggagtcaggatctgaacttcagcttgtctgactcagggtcctacctcattgatcctgcccctmtcctccagccaaactgccaatacagggggctggaaagcaatggacagggaggtatttgggcctctcatccttctggccacattcttggccattgtacactgaccactctggtcaaatggccagggctctcgttaacatcccagaatgtcagagcaggaagggacctttggatacagccaacgcttttgtcttatagaaaaagaaactgagacacatagaggccacgtgagtttcctgagtccacccaactagttggtggtagttgatggcagcactgggaccaaactccagcctctggactcctagttcaatgctgtctcccacatgcttccttgggccctg

SEQ ID NO: 517476 - DNA, 681 bp, Homo sapiens
cactctggtcaaatggccagggctctcgttaacatcccagaatgtcagagcaggaagggacctttggatacagccaacgcttttgtcttatagaaaaagaaactgagacacatagaggccacgtgagtttccygagtccacccaactagttggtggtagttgatggcagcactgggaccaaactccagcctctggactcctagttcaatgctgtctcccacatgcttccttgggccctgggacacacatctgtctttatcctcctctcctaagctagacagagcttgtcccagctttagaactatctctcttcagagaaccacagaagcagattgccagggtttttctgcctgcagactcagccatctgtgcccctctccctctgacactgatggtctctaactcaggtatagagatccttaaagccttcatttgagtgagtcacccaaggaaacatgtggagcagatctaaggtgcaaagtactgcggggagagtagcatgagtgagaagggtttcctccaccctggagaagataatgagccagtggggaagatggatatgaaagaacagctaatcttttaggcaggaggaatacctgctgagttgatgcttagatagggtgctgcagaagcacaaaaagagccagtggttctgatcagaggaaactgggaaatgcttca

SEQ ID NO: 517477 - DNA, 681 bp, Homo sapiens
cactctggtcaaatggccagggctctcgttaacatcccagaatgtcagagcaggaagggacctttggatacagccaacgcttttgtcttatagaaaaagaaactgagacacatagaggccacgtgagtttcctgagtccacccaactagttggtggtagttgatggcagcactgggaccaaactccagcctctggactcctagttcaatgctgtctcccacatgcttccttgggccctgggacacacatctgtctttatcctcctctcctaagctagacagagcttgtcccagctttagaactatctctcttcagagaaccacagaagcagattgccagggtttttctgcctgcagactcagccatctgtgcccctctccctctgacactgatggtctctaactcaggtatagagatccttaaagccttcatttgagtgagtcacccaaggaaacatgtggagcagmtctaaggtgcaaagtactgcggggagagtagcatgagtgagaagggtttcctccaccctggagaagataatgagccagtggggaagatggatatgaaagaacagctaatcttttaggcaggaggaatacctgctgagttgatgcttagatagggtgctgcagaagcacaaaaagagccagtggttctgatcagaggaaactgggaaatgcttca

SEQ ID NO: 517478 - DNA, 582 bp, Homo sapiens
caagcagctgtccccagagctccttgagctttaagatccaaatggccctgggttgacagaggtgccagctttactggaactgagctgccctcaagcctggctgctctcttggaaacatgacagtaatctggcacttcactcattattaatcacagtgagccattattgagcacttgataggtaccaggctctgggctaagtgcattacacacatgatcttacttattcctccccaaagtcctgtgaggcaagtgtattattaaccccattttatagatgtggaaactaaggctcagagaaatcatgcatacacacacacacacacacacagagagagagagagagagagagagagagagacagtaagtccaggacagagtcacacagtatcctgccttgcaatttagttatcaaacatattctgggcctccataggtatggctggcaatgtggaggtagaagctagagaggaaagtgacaagacccatcagtgccaccccttccccccaaagctagtgtttagctctrtgtagttggggatcctagaggacagggggtggtggtaatattggccctggaatt

SEQ ID NO: 517479 - DNA, 571 bp, Homo sapiens
gctgcatgactttggacacatcccctgacccccctgagcctcagtgttctcatctgtaaaatggggataataatactgtctccaggccacatgcagtcggtcacacctgtaatyccagaactttgggaggccgagatgggaggatcacccaggagtttgagaccagcttgggcaacatagaaagaccctgtctctacgttaaaatgggaaaattagcggggtgtagtggcacatgcctgtgattccagctacttgggaggctgaggtgggagggtcatttgagccagggaagtcgaggctgcagtgagccatgatcatggctaccctccagcctgggagacacagtgagaccctgcctccaaaaaaaaaagaaagaaagaaaatagtgcctccctcctagggcagccatgaggattggatgaggtaatgcctgtcaaagggctcagtccagagtaacctcctgatgaatgccaaccttagttcatgactgtggtacagaggcaggctccctgaggcaggctgctcatgttgggggtaagatctgtgtggacagtccagggcagatccatct

SEQ ID NO: 517480 - DNA, 559 bp, Homo sapiens
gataaatttggagttcaaactacaagacaagcagacctgggggccaagatgtctggggaagagaagcacgtggaggttagcttctaaggcccctttctctggaaggcattcacggatccgtaagcagcacccagccaaggagtgaagcatggctaagagaccgggaagctgagcagagtttttggcagtctcgtggggcttggaagacagacttggagttgaaggcccaccaaagaggaagagccctaaagaacaagccagayttccagcgagaacctcagatgggttacacaccaggaggcagggtgagctggaaatagagcggccttcaaaaagcctgacagcttcaaaccagctcaaccgcagcctggattacgaatgaccttcccttctctaactgccttccggaaaatgaagtaaatcctccatgatgaaggacagcatcagtcggagccaaaaagtatctccgtcacagaaacagccctgcaggtgacccagatactggagctccctgacacagacttcaaaataagtgtgattaacatagttaagaaaacag

SEQ ID NO: 517481 - DNA, 571 bp, Homo sapiens
ctgtgagccactacgcccaaacttcactttcaaatatacgtaagttaaagggcaagttatttagaaatttctagaaaagggatgataacttccaggtcactgccatgaaaaggggtggtaactttcgggtgttgccatggcaatgctaaactgttgcggcgctggtgggcctgtcttagggagaagagctttcagtgcctcttctgtgttttagctagtcttcaatcaggtctggagttgactcccacctcctacctcaatagtgttatatgtaccgtcaagcaatgctcaaccctggggatacattctgagacatgcgtagaatattatatgcatattgctataatgttatagcaccatatctgtttgtctgcacgcatgttgttggacgatttcgtcacgtgtaagtgamcttccacagatccagtagtgtactctaagatggcagagcctaccccatggccaggctgtacggtgtggcctgtgcgtcctgggctccagggctccaaatgtgcacagcaggtgacagcactgaacgctgcaggcaactgcagcacaatactgtatgtct

SEQ ID NO: 517482 - DNA, 543 bp, Homo sapiens
tgacctgtggacactgtgtagtttattaatagatttatctaatattaagccaactttgaattttttgtataacttctacataatcatggccgattcttatctctgtgatattctgtggaattggatttccttgagtgtctttgaggctttttgatccaatattcacgggtgagatcagggtggggtttcatttcctgcagggtcttggctggtttggggtttgaggctgtcctggcttcctcctccagctcatcaaacagtgttgctgctggaasgccctggctctgtaggcttggcccccctccccagtggatgtgttccggaaagtcctgcaggcaaacaccacacactgctttgtaaagtgaatgatcattttctcaagtgaaatgtcacgcctcatttgtcttctgtgctttccagattttcacgattcagggtcagctcaaagcagggtgaacgatagagaagcctcctctgggagagctcatgaccgcctggaaggcatccgacgtggcggattcggagatggcatctgggaggggc

SEQ ID NO: 517483 - DNA, 543 bp, Homo sapiens
tgacctgtggacactgtgtagtttattaatagatttatctaatattaagccaactttgaattttttgtataacttctacataatcatggccgattcttatctctgtgatattctgtggaattggatttccttgagtgtctttgaggctttttgatccaatattcacgggtgagatcagggtggggtttcatttcctgcagggtcttggctggtttggggtttgaggctgtcctggcttcctcctccagctcatcaaacagtgttgctgctggaacsccctggctctgtaggcttggcccccctccccagtggatgtgttccggaaagtcctgcaggcaaacaccacacactgctttgtaaagtgaatgatcattttctcaagtgaaatgtcacgcctcatttgtcttctgtgctttccagattttcacgattcagggtcagctcaaagcagggtgaacgatagagaagcctcctctgggagagctcatgaccgcctggaaggcatccgacgtggcggattcggagatggcatctgggaggggc

SEQ ID NO: 517484 - DNA, 222 bp, Homo sapiens
gtgtgtgtattgtgtgtgtgtgtattgtgtgtgagtgtgatttttgcgcaagttgtgyatttgcgtgtgagtgtgatttggggtaagactgtactatgtgtgtgtgatttttgtgtattgtgtgacttttgtgcgtgtgtatttgtgagtgcgagggtgtgttgtgtgtgatttttgtgtgagtgtgtatttgtgtgtgatttttgtgcgagtgtgtactgt

SEQ ID NO: 517485 - DNA, 222 bp, Homo sapiens
gtgtgtgtattgtgtgtgtgtgtattgtgtgtgagtgtgatttttgcgcaagttgtgtatttgcgtgtgagtgtgatttggggtaagactgtactatgtgtgtgtgatttttgtgtattgtgtgayttttgtgcgtgtgtatttgtgagtgcgagggtgtgttgtgtgtgatttttgtgtgagtgtgtatttgtgtgtgatttttgtgcgagtgtgtactgt

SEQ ID NO: 517486 - DNA, 555 bp, Homo sapiens
  misc_feature (1)...(555): n = A,T,C or G
tgatctgcctgcctcggcctcccaaagtgctgggattacagggcgtgagccaccacgcctggccatgcctgcttaatttttgtatttgtagtagagacggggtttcatcatgttgcacaggctggtctcaaacacctgggctcaagcagtcctccttccttggccttccaaagtgctggggttacaggtgtgaaccaccacacagccttcttatgcgattgtatcaaaaggcacaaggaaccgccatgagcactccacgctgggagcactccatgctgggagcactccacgggggagcactctacgctggagcatttccaacgctggagcatttcccacgctgnggcactccacgctggggcatttcccacgctggggcatttcacacgctggggcactccacgctgaggcatttcccacgctgggggcatttcccacgctgggagcactccacgctgggggcatttcccacgctgggggcatttcccaygctgggggcactccacgctgggggcatttcccacgctgggggcatttcccacgctgggggcactc

SEQ ID NO: 517487 - DNA, 519 bp, Homo sapiens
aagcctggaactgcggcccactgaggtgctcatggcatctcagggccatgctgcaagcggccaggccagcgatactccaatgtcctgagcagcctaagctagggcaggcagagagcccatgggctgctccaggtacctgtgatctccatgcagagaacagcaaggctgtgatactggagtgtgggtggctctcctgagctccggctctgggcagatgcacggcccctgtctgcctctatttcctgcgtgcggcggcaccactgatgcctatcgctcagggctgtggtgttacggagaggctgcatcaagaaggtgctcagtaaatgtgtccttctccttccacgcctttccccctcctccctcctgcatgctctggcagagaagcagctccttgasgtctgggccacatctttccagatcaaatcattgctatgaaaaaacagcagccctgtctactaatttccctctggctcccatgccccatgccggctgcctgcgccctggcccctgcagatcctc

SEQ ID NO: 517488 - DNA, 519 bp, Homo sapiens
aagcctggaactgcggcccactgaggtgctcatggcatctcagggccatgctgcaagcggccaggccagcgatactccaatgtcctgagcagcctaagctagggcaggcagagagcccatgggctgctccaggtacctgtgatctccatgcagagaacagcaaggctgtgatactggagtgtgggtggctctcctgagctccggctctgggcagatgcacggcccctgtctgcctctatttcctgcgtgcggcggcaccactgatgcctatcgctcagggctgtggtgttacggagaggctgcatcaagaaggtgctcagtaaatgtgtccttctccttccacgcctttccccctcctccctcctgcatgctctggcagagaagcagctccttgacstctgggccacatctttccagatcaaatcattgctatgaaaaaacagcagccctgtctactaatttccctctggctcccatgccccatgccggctgcctgcgccctggcccctgcagatcctc

SEQ ID NO: 517489 - DNA, 504 bp, Homo sapiens
tggtgctggaatggatggcgccatcgtccactgcagtgctccaccaccagcmacccccacaaacacccacccaaggccacttgacacctgagcttgtgctggaagaaaccaaatccacaacaaaaacaaaaaggaaagagcgggggggggcgctggagagatgacacaatgtatccaatgtccgcggcggtgcacaccatccgctccaggttcacgcctggaaatttatggcctcatcacccagccctggagatctatctatctctcgcctgtcactcacttgcatttttaatcctgccccccgccccgcaccggccccctcgtgtatttatgcaccacccacccgggcatctcgagggcctgcctgtttctttcttgtgaagatatatgaacaccccaagtccatgcacctctgctcataaatttcctccaatgcgatggtgtctgagtctggcacggagaaacacagtcccctaccaaaatggggaattggcttgtcggggg

SEQ ID NO: 517490 - DNA, 513 bp, Homo sapiens
agctggggtgtggtgcagagcccagccccatgaatgatgcttttgcatctggagggcaggaggggaagtgctgtggggtgctggtggggtgcagggaccagaggaggtagtgtctgcaagacaaaggggggttctaggtgcaaaggggttcgcgaggttgstgcagaggcggggggttggtgctgggctctgcgcatccgcgcccctggaggctgagggagcctcaggaggccctagtggggccaggaggggccccccggtctgtctgtctgcctgtgccccgctcccacagctccagggacagagtaagtgctagaaggcgaacaggaacctgtagctggaggaagtgtgtgtgtgcaaatagatgagtgagtggcatgtaattacctaaaattgtgggttagaagcagatgtaaataaccaaaaaatacgtggggaagtggggggatgctcatcagttagagattattacttaaccactaattgaaataataatggtgtgtatttgaatat

SEQ ID NO: 517491 - DNA, 606 bp, Homo sapiens
gaaggtgacggcacttattaaaagcagagggattggctgggcgtattggctcacgcccaccatcccggcgctttcgaacattaatccgaaataggccacraatttaaatgcaaaaagtaaactgtaatcttctaaaataaaatatagcagaaatactagaacatcttcaggaccactggctcggcaatgtggtaccaaaagcatgatctacgaaagtgaaaaatggatcaactagacctcaaaacgttaaaaaaaaatgcttgcattcaaaggatgaaaagacaagccacaggcagggagaaaatgtttgcaaagcacacatctgacaaaggtgtcgtttctagaaaaatgtaaagaacacttaagaccccacagtagaaacaaacgaaacatttagaaaatgggaaaaaaggctgggcacggcagctcacgcctgtaatcccagcactttgggaggttgaggtgggtggatcacctgaagtcaggagttcgagaccagcctgaccaatatggtgaaaccctgtctctactaaaaatacaaaacttagccggttgtggtggcgggtgcctataatcccatctactcgggagcctggggcaggagac

SEQ ID NO: 517492 - DNA, 601 bp, Homo sapiens
tgacggcacttattaaaagcagagggattggctgggcgtattggctcacgcccaccatcccggcgctttcgaacattaatccgaaataggccacgaatttaaatgcaaaaagtaaactgtaatcttctaaaataaaatatagcagaaatactagaacatcttcaggaccactggctcggcaatgtggtaccaaaagcatgatctacgaaagtgaaaaatggatcaactagacctcaaaacgttaaaaaaaaatgcttgcattcaaaggatgaaaagacaagccacaggcagggagaaaatgtttgcaaagcacacatctgacaaaggtgtygtttctagaaaaatgtaaagaacacttaagaccccacagtagaaacaaacgaaacatttagaaaatgggaaaaaaggctgggcacggcagctcacgcctgtaatcccagcactttgggaggttgaggtgggtggatcacctgaagtcaggagttcgagaccagcctgaccaatatggtgaaaccctgtctctactaaaaatacaaaacttagccggttgtggtggcgggtgcctataatcccatctactcgggagcctggggcaggagac

SEQ ID NO: 517493 - DNA, 580 bp, Homo sapiens
ggcccctgccctggaacaagaagaccaggcccatcctaaaatattttacattatctcccagaaacctgagcgtgtttgactttttaaatgctgatacatgttaaatattcggtatatcagaaagatatgacttgccttcagacatttagwtgttctagctatcattgctgcgcgtcagcttactcccaactctggggactaaaaaacacctaccatattgttatacactatcttttggtgcatcaagaaagtggtgatttgttacactgtaatagataactaatatgtcacttaaaaatagttcttcattgagctatataatatcatctgcaaggagtcttgtcaatgaagtttgaatctagaatattgatcttcatttagagaatgcttctacttttatttactgtttcggatctgtctagatttctgacattattaacccccagagattagagctatgtgtatgatttctgcagagtgccacaaatgtgagaagatagccaaaacatatgatttggtataaatgatacttgaaaatgaatataacatctcaaatcacttaaagtttatacaaattgag

SEQ ID NO: 517494 - DNA, 591 bp, Homo sapiens
ctcccatgtttctagtttttgaaaacagaaaaataatgggatcgattggaagaatgatacatctatggaatcagaaaaaggaagttagaagttccaggtgtggaataaataatgagatcagtttgggagttttctgagttctaagtaacaataggctacattactggatatatacaaatacatggttttaccttgatattaaatccaaacacagacattacaagaaaagaaaattttatgacaatagccctcagagatgcaactgtctttcacaaatattaacaataaaatccagcattatataaaaataatatatgacatagtcaagtgtagtttatctcagaataccaagkgagtttaacatttgaaaatcaattaatgtactataacacattaataaaatatcaggacaaaaaacatgatctcctgaatagatgcagacaaggcatttgataaaattcaatatctttcaaacaaacttggaatagataatagtatgcacaatttgataaaaagatacccacaagaaatctatggctaatgtcatttttagtagcgaaaggctgaatgcttgcatcaagcagtatcata

SEQ ID NO: 517495 - DNA, 413 bp, Homo sapiens
tgagacaaagaaatagccttggccatgcgacactggcttttacaagttgtcatcatttccatgtccgtctcatagccacagcttacagaatgctgctcagggggcatttcagagaggagctactgggaattttagcttaatctcccactagattgtcagagagaggatcaagtcaggacacsaagcttctagagaattaatgcgccgttctagggtgaggcagccttgagggagaaagaaacagctccaaagtatcttagcattgtcctcagagtttcacaaaataatgtctgctggacaaagtaggccaaggactatttttatacaagtgtcagctaagaatggtgtttcacacgcacaggcatgtttattgcagcactattcacaatagcaaagacttggaaccaacccaa

SEQ ID NO: 517496 - DNA, 644 bp, Homo sapiens
gaaaagctcagacacagagactaaccgaaaatgggaaacagaaattttaggcctaaggaacaaatgaaagaggtaagtaaaaagaccccctctgacattctcccagatagtctgttggggagaatgttgcaggtttgaaggtataatcctcaaaccagggacaaggaaaatcaaaagatgatgaagtattgctgttttatctaactcagaaagcccatttatcagcctttggtcttttggcctaagtttggctcagatgaagattgggtgtgtgaagctttaattctctatgtcaatgataaaaytccattctcacaagaggagatgggttatgctctttgttggtttgttggattagtgaactagccccatattcccccttaaagaggaagaaaaagcagagtaaggagcgcttgtccagtgaaaagccctgggatcccctaacatggtaccccctcactgcacatacatctcacaaagtagaggacaggtagatcagggggcaacaggaaggccggaggaaaaggaatctgggggtcatgaaggagctaaacccagtcttgccttaaatacttatccaaacttgaggaaagaattaaaacaatgtaagaaggacattgagaatttccctcttccttctaaac

SEQ ID NO: 517497 - DNA, 673 bp, Homo sapiens
cagctgtcaaaactcattgaattgcctactttaaatggatgcattatgttgtgtataattctacaatgaatttgataaagtttyaaagaaagatttaaaacttaaaaaatattaaattccactaattcttacatggtaatcattgccatggtttctcaacatagaaactggtatatattaaaaaaaactaataagagtgtagtttttgacatttatggttgtttgctggatagtttatgttaaaaatagggataatttttattgtattttattgtatttttacagtatatttatctgtagctttaagagtgtcaactagtaactcatagtgaatcaataaatcttatcattaatatgatattttggtaagtttaaggtacaacttttaaagtaatatttcccatgtaatattacaaaaatgccataagaataatatgagtaatacactgactattaaaaaataaatgagcatgaaaccgaatagtaatttgtgagacaaaattttgttatgtatttgtttatagttcaataaaatatttttgaaaataatttaaaatatttagaaatttaacataaaataactaaaatcatacaaacatgaaaagtaaaaaataaaatgtatttataaataataattccattgatagaaatttaagatgaaataggttaaata

SEQ ID NO: 517498 - DNA, 441 bp, Homo sapiens
cacccattgcattgcaccatatcacctcctatgtaacaccattaagytcacgcctggcactcattgctcaaaagtagtgtagggacataccaaattaattacctaatattcaatattgcaaaggttctgttattcctctcggaataaatctgcatcacaagaagaaagccttttgagggttgtgtttccttgagttaagaatcatgtaaaatactggccaagatgtttcctctctaatcatcttttttattcatagcttagtttggaaaatgtaattcctttgccccagggctccagaatgataagatttgtttcttatatctggattatgaacaggttaatcatctgcaactgattgcacttgtcttcgtgaatgttcataggtaattggagcactgctttttctttgctcattggatcatgacacaagagttgttcaat

SEQ ID NO: 517499 - DNA, 526 bp, Homo sapiens
tcacccattgcattgcaccatatcacctcctatgtaacaccattaagctcacgcctggcactcattgctcaaaagtagtgtagggacatascaaattaattacctaatattcaatattgcaaaggttctgttattcctctcggaataaatctgcatcacaagaagaaagccttttgagggttgtgtttccttgagttaagaatcatgtaaaatactggccaagatgtttcctctctaatcatcttttttattcatagcttagtttggaaaatgtaattcctttgccccagggctccagaatgataagatttgtttcttatatctggattatgaacaggttaatcatctgcaactgattgcacttgtcttcgtgaatgttcataggtaattggagcactgctttttctttgctcattggatcatgacacaagagttgttcaataactcatcctttctggtcacttcgaaacaaaaaattctctcaggaagagaaatttctaaacaatatttccctcagaaaaaaaaa

SEQ ID NO: 517500 - DNA, 526 bp, Homo sapiens
tcacccattgcattgcaccatatcacctcctatgtaacaccattaagctcacgcctggcactcattgctcaaaagtagtgtagggacataccaaattaattacctaatrttcaatattgcaaaggttctgttattcctctcggaataaatctgcatcacaagaagaaagccttttgagggttgtgtttccttgagttaagaatcatgtaaaatactggccaagatgtttcctctctaatcatcttttttattcatagcttagtttggaaaatgtaattcctttgccccagggctccagaatgataagatttgtttcttatatctggattatgaacaggttaatcatctgcaactgattgcacttgtcttcgtgaatgttcataggtaattggagcactgctttttctttgctcattggatcatgacacaagagttgttcaataactcatcctttctggtcacttcgaaacaaaaaattctctcaggaagagaaatttctaaacaatatttccctcagaaaaaaaaa

SEQ ID NO: 517501 - DNA, 623 bp, Homo sapiens
caatgcaaggctgaagtaaaaagtccrgtaaaaatatggcttgcttctaggagatgagtaatattatttacggaactcctttgaacaagtcatgatgttctcatttacatgtgtagcctgattggtgaattatgccctagattccaaatcattgttctctaaacttgagcccagaaatatacctgtggtccaacctccttctccttgtttctctcactctcttttccatgcagtgtggatggagcagggggcggggcatctggctgaaataaagactgctgctctatcattttaaagcaactggatgaaaagcaaaagaattggtcaaactgagtatttagtgtcatgtagaatttttttaaagtctcgtctggttgtatttaaaccaccaatcccttcgaagtttttctttgaaatttaaattggtgactatttgagtgaagataacaatcaaggtgggtaagtactaggaaagaaaaatcaatggtccagttcaagagggggtcaaaaggcagaagcagcagtcaaattttagctgtaaacttaactatgaataggccagaaaaatctccaaataacatgcaaatacactatgacttgaaatatccttccctgacagtaag

SEQ ID NO: 517502 - DNA, 623 bp, Homo sapiens
caatgcaaggctgaagtaaaaagtccggtaaaaatatggcttgcttctaggagatgagtaatattatttacggaactcctttgaacaagtcatgatgttctcatttacatgtgtagcctgattggtgaattatgccctagattccaaatcattgttctctaaacttgagcccagaaatatacctgtggtccaacctccttctccttgtttctctcactctcttttccatgcagtgtggatggagcagggggcggggcatctggctgaaataaagactgctgctctatcattttaaagcaactggatgaaaagcaaaagaattggtcaaactgagtatttagtgtcatgtagaatttttttaaagtctcgtctggttgtatttaaaccaccamtcccttcgaagtttttctttgaaatttaaattggtgactatttgagtgaagataacaatcaaggtgggtaagtactaggaaagaaaaatcaatggtccagttcaagagggggtcaaaaggcagaagcagcagtcaaattttagctgtaaacttaactatgaataggccagaaaaatctccaaataacatgcaaatacactatgacttgaaatatccttccctgacagtaag

SEQ ID NO: 517503 - DNA, 550 bp, Homo sapiens
gggttgaaaagacagtacagtggtataggagatgttggtgatgaaagccctgaattttttttcttgtgtcaaagtgctcctatctgagctgcttgccattgtatctagtattcagctgttatcctagaatcctccttcatcgtcctcctgaactttcttgttgggagcttatgggatccactttctatccctggtgttctgaaattttctagtgatgtgccttgatgtggacctgctttccctctatgtgcctgggacttagtgacccttttagtctcacaactcatatcctggagttaygaattttatattgtgattattttgttgatgatttcctctcatctattttattcttcctctctttctgaaactcattgttaacatgttcaattcccagaattggccttttgtctgttttccaactcttgctctgttttctgaaagagttcttcaactttatattccagcctgtactttgaattttaaaaatttctgttcatatatttttaatttccaagaacctttgttaaattttataaatgttcttttt

SEQ ID NO: 517504 - DNA, 702 bp, Homo sapiens
acttaatgctttaatttgtagtcattcttatttcatcgattgtcagtaacatgtttttatagtgctttttaaaagccagaatctaatcaaggttctcaaattgcatttggttatcatccctttttagactcttttaatctaaaacattcctctctccttttattgtttgtttgtgtgtgtgtgtgtgtgtgtgwgagagagagagagatactggcctttattttttaattatccaggtgactttttcatggaaaatcatccactgagtttttaatattaactattaactatttttcatttccagaaactgtttttttttcaaattgatcatttgaaatgcttgttctttgcttatgtttttctattctatttttccttgtttaaatattttacacacagttagtgcatattctatttctaagaattccatcatctgaagttcatggaagtctaaacgtctgttgtttctgatggctctttcagtaacttactttcttacaaactcagtaatttttaatcgggatctcctatttcagtgaagtaagatccagatagacctgcatagaaggtacatccctctaggaaaatttgtgtttccttttatggggatccgagtacgcaatagagggccattttagtttcatttctcagtttgaagtttccttactctccgggatagaataactttgaaccccagactag

SEQ ID NO: 517505 - DNA, 702 bp, Homo sapiens
acttaatgctttaatttgtagtcattcttatttcatcgattgtcagtaacatgtttttatagtgctttttaaaagccagaatctaatcaaggttctcaaattgcatttggttatcatccctttttagactcttttaatctaaaacattcctctctccttttattgtttgtttgtgtgtgtgtgtgtgtgtgtgagagagagagagagatactggcctttattttttaattatccaggtgactttttcatggaaaatcatccaytgagtttttaatattaactattaactatttttcatttccagaaactgtttttttttcaaattgatcatttgaaatgcttgttctttgcttatgtttttctattctatttttccttgtttaaatattttacacacagttagtgcatattctatttctaagaattccatcatctgaagttcatggaagtctaaacgtctgttgtttctgatggctctttcagtaacttactttcttacaaactcagtaatttttaatcgggatctcctatttcagtgaagtaagatccagatagacctgcatagaaggtacatccctctaggaaaatttgtgtttccttttatggggatccgagtacgcaatagagggccattttagtttcatttctcagtttgaagtttccttactctccgggatagaataactttgaaccccagactag

SEQ ID NO: 517506 - DNA, 702 bp, Homo sapiens
acttaatgctttaatttgtagtcattcttatttcatcgattgtcagtaacatgtttttatagtgctttttaaaagccagaatctaatcaaggttctcaaattgcatttggttatcatccctttttagactcttttaatctaaaacattcctctctccttttattgtttgtttgtgtgtgtgtgtgtgtgtgtgagagagagagagagatactggcctttattttttaattatccaggtgactttttcatggaaaatcatccactgagtttttaatattaactattaactatttttcatttccagaaactgtttttttttcaaattgatcatttgaaatgcttgttctttgcttatgtttttctattctatttttccttgtttaaatattttacacacagttagtgyatattctatttctaagaattccatcatctgaagttcatggaagtctaaacgtctgttgtttctgatggctctttcagtaacttactttcttacaaactcagtaatttttaatcgggatctcctatttcagtgaagtaagatccagatagacctgcatagaaggtacatccctctaggaaaatttgtgtttccttttatggggatccgagtacgcaatagagggccattttagtttcatttctcagtttgaagtttccttactctccgggatagaataactttgaaccccagactag

SEQ ID NO: 517507 - DNA, 622 bp, Homo sapiens
tagtcaacttgatatgtaaaattaaccatcacattcggagaaagaagaaataagtttatcagatgggaggagggagagagaaaaagtgttagacatttgagaacagaccaaaaaagcatgaaatagtcacgtatgaaatacctacacatcatatgcacatcaaatatgtatactccaaaagtgtaaatatacatacatttgtcagaatttaatcatatagtacaactatatgtttgataaagtttttttatcttaacaagttttatgcatctttttatagagtataaatacttaaaagccatttggtacacattgtcaaattgccttccagaaggttgttcaaatttactctctcatcagcagtacatgaaaatataaatcccgttgcatattcaattcactaacayggacttttaagatgatatttcacattaaaatggtaatatgggaatattatgaacaattttatgccaataaattccagaacttagatgaaatagacaaattccttgaaaagaaagacacaatgtatcaaaacttacacagaagaaagtaaaaattctgaatttccctaagtctatttaataaattgaaattgttactaaaaattctacctcaaaga

SEQ ID NO: 517508 - DNA, 469 bp, Homo sapiens
gaatagaattggcttatatctgcttgaataatacctcttggattgaatggctatcccactccaatcagcccttccgtgggtggtgatgggaccccaacaggccacatggcaccacatgaattttaggacccattatggtgggggagaaatcagttttcagggattggggaatgcagattggacgggtactaacaatgtcttccacatttcactatgaaaatgcttatgctttctgagccaagtcatgagatagtgtggcaatatagaattgaaggtcgttaaaatttttgaaacaaagaggattttcctggacacgattattttcactaaggcaattctgtatgtgagtggtkgtttcacttctctctagaattccctagagatgaggattttaagttccccacatagcgcttctgccaggttcttgcagtctgggagttcttctcccagtccaacctaaatctctcta

SEQ ID NO: 517509 - DNA, 486 bp, Homo sapiens
caagaaccaatgcctgctgcccactagttctgaattccctcctcctctgtgtgggaaaatcacttgacctttgtgggccttgatgtcttcagctttttwaaaaaaagggagttaggctgggagacagctatgacccaatctaggtctgaaattctatggttagcccccacagtgaccccaatgagatccaggccacattgcactttctcccttaaggtgtcagttccctttgctgaggttcatggtcaaatatcacacccctgagactcaccaattacctcctaaaggatggcgatcgtgacggtgactcagtgcccatctgtctccaccaccagaaaaatcactccaagtgcacaggtcagcaggagcatctcagaccacaaagagcactttatcatcaacgctagtccctgggaatatataggcctgtctgtttcctaatgattccaaggcaatactcaagaacattattatgaagattatgtt

SEQ ID NO: 517510 - DNA, 168 bp, Homo sapiens
ctggtcggtgaagaacaatgaaaaaccaaggtactggagattgtggattctaaatttggcttggcactagcaagccatgtgtccttcctatctctgggcctctttcctcaggtayaaggtgatagcattagtagttttcaagcttgttttccccttttaaaaaatata

SEQ ID NO: 517511 - DNA, 557 bp, Homo sapiens
attacccatcaggtcaatagaaagagccatcagggcaatagaaagaggaaaaatatattttaaattatcaattaatccaagatagtctttcttcagcttacagttgctttagataccaccttcaaaaggatttgattttcactagtcttatatcctcagctatcacccagccaaatatgatcctgtaagaaagaaaggagtagagaaatccacccaaagcatcccacagagatggagtaaggaagaagtgggctcaaatacttcttcagccaccataaaccaagtttttaatctctctataatactttttcctcatctacattatggggttcatagactctaatgagggcatcagcatcagtgaaataatcatgctaaaaattgtagaattatagctgtaacgaatgctagaaacccttttaacattgagcattgagtcctgacttagattgggaaggtcaagaaagccaaaaagcaattcctgaaggtgctcrgataggaaggttgaagaaggcagcgtgccaggctgcagaaacatatgttcaagggcccagcat

SEQ ID NO: 517512 - DNA, 492 bp, Homo sapiens
ataaaaccataatactgttgcaagtaagataaaggtcaatgaatttcaaaatgtcaaatgacaaaaggataatctcccttccagttttcagttagtgtagtttagtcgctgccaagtcttaaacctttctgacttcgtgtgcatttttagtctcgtagtagcagtttatgagcaatttattcaagtgtatattaatatcctcataaatgtcaatcagcaccttaagtgatgtgaaaatttttggtagatagattatatcttgggtataataattgtgcattgattcacatatatagacatttgaagccctactggggggcagtgtggaaggtggagttgctgggggttgagggtggccggtgsgtactaaatttttcaacgtttcatgctcactgattctttagggataataaaaatgtccaaatcacaaatgatggtggttctctggatatttagcaaacttttattgagtttccatatatggcaggcatt

SEQ ID NO: 517513 - DNA, 492 bp, Homo sapiens
ataaaaccataatactgttgcaagtaagataaaggtcaatgaatttcaaaatgtcaaatgacaaaaggataatctcccttccagttttcagttagtgtagtttagtcgctgccaagtcttaaacctttctgacttcgtgtgcatttttagtctcgtagtagcagtttatgagcaatttattcaagtgtatattaatatcctcataaatgtcaatcagcaccttaagtgatgtgaaaatttttggtagatagattatatcttgggtataataattgtgcattgattcacatatatagacatttgaagccctactggggggcagtgtggaaggtggagttgctgggggttgagggtggccggtgcstactaaatttttcaacgtttcatgctcactgattctttagggataataaaaatgtccaaatcacaaatgatggtggttctctggatatttagcaaacttttattgagtttccatatatggcaggcatt

SEQ ID NO: 517514 - DNA, 551 bp, Homo sapiens
ggcatctaatctgctattacattatagttacatacaacaccaggtgaagtcacagggcatcatgaatcactgccagctttgtgtctccactgttaaggtcattctcatgctcacccagttaaagagagagcaacagagggcagggtcccttccctggaataagtcatagtggctccagcaagcctcaactgcatgcatctctgcagaaagccaatagatctgggtaagcaagtgccatttcttgttgaccctttacttgtaagtttccccggaaatttgttctttgtacccatactatgtgttactatgaacttagagaaatttaagtaacatattagaaatcagtaggaggcatatgagctaggatacaaaccttggtctatctartaagaaagtgattcttgttaggaagattaacttgtcgaaagtcacagtcttacaaagttgtgaggctagaacttcaaccaggtttgccaattcacaagccactatttgttatcacagcccactcttccttaaagggtgaacttaagaccatctatacagtaatt

SEQ ID NO: 517515 - DNA, 566 bp, Homo sapiens
aaaggtttactatctttgtagatagtctgtggtagaatactttctttgagatgggtgagcaaagagggctgagagtgtagatgttggaaggatgattagaaagtgtttccgtgagaagacttgcctatcgttccctaggaaagatacggactgcttcatgagcctggtggtctccatgtgagcatgcggtagatttggttttcaaagtggaagatactsctctttctcattagaaacccaggtgtttcagggtcatacctgtgagtacagcatcattctacattctaccatggcttgctctgtttcaggagcagctttaggtggtggaaggagcatggccttggagcagaatttcttatgtcctacagtgggaccaaccctgggcaagcacaggagctggctgcctcatcaaggaaggtccacagcttgggtgtgaacctcaagcaggatttgaccagctttgtgcctcagcttcctcaactgtaaaatggggataatactaactgttatatataaacccatggggatttatatataataggtgataggtgagtgtatatgtaagc

SEQ ID NO: 517516 - DNA, 567 bp, Homo sapiens
gaaggctgttcccatttcttcacgcagtcattggtttctaggggtgaggagggcatgaaatctaacaaatcactgagtgcagtgaggacagtsgctcctccttgtctgcaatccctgaatctccatcctaacacttgctgtgtgcaaactctcccctccatcccacagcttctgccttcaacaggtcttcattacatcttgcccaggctatggtgactgccactgagtggttcttctttcagccctgcctccactttgatcttgtcattccctgcttaaagtcctttagagactctctgctgcttgtaggccaaacttccaacaaagccagtaagaccctgtatgatctggcacatgatggtcttttcagtcacagtcctggaaactgtgcctgggaacctcctactctggagttgccagaatacttagaatttccctaacctactggttatgctacacagtcacacctttctcttttttccctttccatataattggtgaacatcatggatttttcaacatagatatcaagccttacctattctgagaagtttcccctgatcccat

SEQ ID NO: 517517 - DNA, 567 bp, Homo sapiens
gaaggctgttcccatttcttcacgcagtcattggtttctaggggtgaggagggcatgaaatctaacaaatcactgagtgcagtgaggacagtggctcctccttgtctgcaatccctgaatctccatcctaacacttgctgtgtgcaaactctcccctccatcccacagcttctgccttcaacaggtcttcattacatcttgcccaggctatggtgactgccactgagtggttcttctttcagccctgcctccactttgatcttgtcattccctgcttaaagtcctttagagactctctrctgcttgtaggccaaacttccaacaaagccagtaagaccctgtatgatctggcacatgatggtcttttcagtcacagtcctggaaactgtgcctgggaacctcctactctggagttgccagaatacttagaatttccctaacctactggttatgctacacagtcacacctttctcttttttccctttccatataattggtgaacatcatggatttttcaacatagatatcaagccttacctattctgagaagtttcccctgatcccat

SEQ ID NO: 517518 - DNA, 567 bp, Homo sapiens
gaaggctgttcccatttcttcacgcagtcattggtttctaggggtgaggagggcatgaaatctaacaaatcactgagtgcagtgaggacagtggctcctccttgtctgcaatccctgaatctccatcctaacacttgctgtgtgcaaactctcccctccatcccacagcttctgccttcaacaggtcttcattacatcttgcccaggctatggtgactgccactgagtggttcttctttcagccctgcctccactttgatcttgtcattccctgcttaaagtcctttagagactctctgctgcttgtagsccaaacttccaacaaagccagtaagaccctgtatgatctggcacatgatggtcttttcagtcacagtcctggaaactgtgcctgggaacctcctactctggagttgccagaatacttagaatttccctaacctactggttatgctacacagtcacacctttctcttttttccctttccatataattggtgaacatcatggatttttcaacatagatatcaagccttacctattctgagaagtttcccctgatcccat

SEQ ID NO: 517519 - DNA, 567 bp, Homo sapiens
gaaggctgttcccatttcttcacgcagtcattggtttctaggggtgaggagggcatgaaatctaacaaatcactgagtgcagtgaggacagtggctcctccttgtctgcaatccctgaatctccatcctaacacttgctgtgtgcaaactctcccctccatcccacagcttctgccttcaacaggtcttcattacatcttgcccaggctatggtgactgccactgagtggttcttctttcagccctgcctccactttgatcttgtcattccctgcttaaagtcctttagagactctctgctgcttgtaggccaaacttccaacaaagccartaagaccctgtatgatctggcacatgatggtcttttcagtcacagtcctggaaactgtgcctgggaacctcctactctggagttgccagaatacttagaatttccctaacctactggttatgctacacagtcacacctttctcttttttccctttccatataattggtgaacatcatggatttttcaacatagatatcaagccttacctattctgagaagtttcccctgatcccat

SEQ ID NO: 517520 - DNA, 619 bp, Homo sapiens
ttcatgatgggatgagtgaccttatgaaggagacatgagagagatgatcctctctcaacactgaggacacagcaagaaggcaaactgtttggcaaaccagaatgtgaatctccgccaggaacgttattggctgacatcttgatattgaacttcccagcctccagaactgtgagaagcaaatgttagcaaatgtttgttgcttaaactgccttgtctatggtatttattatagcatcctgggatgmctgagatagacaggatttaaaacatctctgaaagaactttgggcatagtgagaggtacatgagtaaactagaatcaaatagatcagaatctaaatgcgtttttgaagaaattttatttccaacaaaattgtgtaatcctggaaaatacaaaacaaaatgaaaacaatctccttcccccagttaaagaccactttgcatgtttgatctctaggacactacatttggtgcagcaagaaggatggggaagtggaccagttcccaaggaagacatacctccttaacccttttcagatataacaaggagaatagtgggagatggacagaagtattcctatcacaagacaatatcaaagcctagtcaaggaactgccctg

SEQ ID NO: 517521 - DNA, 619 bp, Homo sapiens
ttcatgatgggatgagtgaccttatgaaggagacatgagagagatgatcctctctcaacactgaggacacagcaagaaggcaaactgtttggcaaaccagaatgtgaatctccgccaggaacgttattggctgacatcttgatattgaacttcccagcctccagaactgtgagaagcaaatgttagcaaatgtttgttgcttaaactgccttgtctatggtatttattatagcatcctgggatgamtgagatagacaggatttaaaacatctctgaaagaactttgggcatagtgagaggtacatgagtaaactagaatcaaatagatcagaatctaaatgcgtttttgaagaaattttatttccaacaaaattgtgtaatcctggaaaatacaaaacaaaatgaaaacaatctccttcccccagttaaagaccactttgcatgtttgatctctaggacactacatttggtgcagcaagaaggatggggaagtggaccagttcccaaggaagacatacctccttaacccttttcagatataacaaggagaatagtgggagatggacagaagtattcctatcacaagacaatatcaaagcctagtcaaggaactgccctg

SEQ ID NO: 517522 - DNA, 619 bp, Homo sapiens
ttcatgatgggatgagtgaccttatgaaggagacatgagagagatgatcctctctcaacactgaggacacagcaagaaggcaaactgtttggcaaaccagaatgtgaatctccgccaggaacgttattggctgacatcttgatattgaacttcccagcctccagaactgtgagaagcaaatgttagcaaatgtttgttgcttaaactgccttgtctatggtatttattatagcatcctgggatgactgagatagacaggatttaaaayatctctgaaagaactttgggcatagtgagaggtacatgagtaaactagaatcaaatagatcagaatctaaatgcgtttttgaagaaattttatttccaacaaaattgtgtaatcctggaaaatacaaaacaaaatgaaaacaatctccttcccccagttaaagaccactttgcatgtttgatctctaggacactacatttggtgcagcaagaaggatggggaagtggaccagttcccaaggaagacatacctccttaacccttttcagatataacaaggagaatagtgggagatggacagaagtattcctatcacaagacaatatcaaagcctagtcaaggaactgccctg

SEQ ID NO: 517523 - DNA, 483 bp, Homo sapiens
tattgaacttcccagcctccagaactgtgagaagcaaatgttagcaaatgtttgttgcttaaactgccttgtctatggtatttattatagcatcctgggatgactgagatagacaggatttaaaacatctctgaaagaactttgggcatagtgagaggtacatgagtaaactagaatcaaatagatcagaatctaaatgcgtttttgaagaaattttatttccaacaaaattgtgtaatcctggaaaatacaaaacaaaatgaaaacaatctccttcccccagttaaagaccactttgcatgtttgatctctaggacaytacatttggtgcagcaagaaggatggggaagtggaccagttcccaaggaagacatacctccttaacccttttcagatataacaaggagaatagtgggagatggacagaagtattcctatcacaagacaatatcaaagcctagtcaaggaactgccctgccctgt

SEQ ID NO: 517524 - DNA, 483 bp, Homo sapiens
tattgaacttcccagcctccagaactgtgagaagcaaatgttagcaaatgtttgttgcttaaactgccttgtctatggtatttattatagcatcctgggatgactgagatagacaggatttaaaacatctctgaaagaactttgggcatagtgagaggtacatgagtaaactagaatcaaatagatcagaatctaaatgcgtttttgaagaaattttatttccaacaaaattgtgtaatcctggaaaatacaaaacaaaatgaaaacaatctccttcccccagttaaagaccactttgcatgtttgatctctaggacactacatttggtgcagcaagaaggatggggaagtggaccagttcccaaggaagacatacctccttaacccttttcagatataacaaggagaatrgtgggagatggacagaagtattcctatcacaagacaatatcaaagcctagtcaaggaactgccctgccctgt

SEQ ID NO: 517525 - DNA, 483 bp, Homo sapiens
tattgaacttcccagcctccagaactgtgagaagcaaatgttagcaaatgtttgttgcttaaactgccttgtctatggtatttattatagcatcctgggatgactgagatagacaggatttaaaacatctctgaaagaactttgggcatagtgagaggtacatgagtaaactagaatcaaatagatcagaatctaaatgcgtttttgaagaaattttatttccaacaaaattgtgtaatcctggaaaatacaaaacaaaatgaaaacaatctccttcccccagttaaagaccactttgcatgtttgatctctaggacactacatttggtgcagcaagaaggatggggaagtggaccagttcccaaggaagacatacctccttaacccttttcagatataacaaggagaatagtkggagatggacagaagtattcctatcacaagacaatatcaaagcctagtcaaggaactgccctgccctgt

SEQ ID NO: 517526 - DNA, 619 bp, Homo sapiens
ttcatgatgggatgagtgaccttatgaaggagacatgagagagatgatcctctctcaacactgaggacacagcaagaaggcaaactgtttggcaaaccagaatgtgaatctccgccaggaacgttattggctgacatcttgatattgaacttcccagcctccagaactgtgagaagcaaatgttagcaaatgtttgttgcttaaactgccttgtctatggtatttattatagcatcctgggatgactgagatagacaggatttaaaacatctctgaaagaactttgggcatagtgagaggtacatgagtaaactagaatcaaatagatcagaatctaaatgcgtttttgaagaaattttatttccaacaaaattgtgtaatcctggaaaatacaaaacaaaatgaaaacaatctccttcccccagttaaagaccactttgcatgtttgatctctaggacactacatttggtgcagcaagaaggatggggaagtggaccagttcccaaggaagacatacctccttaacccttttcagatataacaaggagaatagtgggagatggacaraagtattcctatcacaagacaatatcaaagcctagtcaaggaactgccctg

SEQ ID NO: 517527 - DNA, 602 bp, Homo sapiens
aaagctagctgtccttgaaggccagggaagacttccttgagctagagttgagatttgaatatagaataagaattattcaaaaaggtgaagtaatgataatgaaggaattggggagtggaagtcatctggcagtaagtgtcccaggtagagcctaaggcgtgtgaagattctgaagcaggaagaaaaagggcatatttaaagagctaaaagatggccgaaatgacaggaacagagagagcttggggaagtgtaatatagatgttggcagaggtcggatcacacgtggctgtctggatcatgtaaaggatattgtcacaagccaggtttcccaaraagcagactcaagatgtacataagcagcatgcagggagtttattgatgagtactttagggatcaatacctgtaaaagagtgaagcaagtgggactagaaagaggataagttgaattagggtatagtctcaagaaatatgtcagttcattctatagagagctaggagggcttctcagaattaccaaagcttaggtgagggggctgggtctttatgctttctcaatgacaagttgaccagtagccaattgagaagtgcagtggggaagggt

SEQ ID NO: 517528 - DNA, 639 bp, Homo sapiens
ggatgaagttctttcatctttagaatgattgtgtaggattatataaaatctaaggtccctttaagcttgaatattctataatacttttgtcctactcttctaactgccttaccttttacacagcagaattggctcctccctcctctctsctggcatggtggcatgaaactgtcttgttacatctgcttacatcagtgttgatctccttctactaacccatgagctctttgagaacaaggacctcactttattcctttatttccccagcacactgcatggcagagattaagtttgcagtcagcgatggttgaaaagacattttaaagtataaagctctacacaagcttaagatattagttttatctttttcaccctaaacagccctggtttgcccttgccaagcctttaggccatagatagtgtgggaaactccagaactgaaaatccagcccttgcaaaacctgttttgttgttttctcttcaaaaagaacatattgcctttatttttttaaagccaaggatgaaataaaagctctttctcaagtgcccaactagaatttagtatggataggactaaattagtttagggtatactaaaatcaaaccaccaaaccaaagctacatccgtggtgggggagg

SEQ ID NO: 517529 - DNA, 576 bp, Homo sapiens
ttctccatgtgtctatgctccgcatccctgttctgtggcacacatgtacttgtgcctcagacaatgaagccaccactgctgtggaataacactgctccaggctttttttttttttttttttttgagacactctcrttgtgttgcccaggcttgagtgcagtggcatcatctcagatcactgcaacttccgcgtcccaggttcaagtgattctcctgcctcagcctcctgagtagctgggattacaggtgtgcactaccacacccagctaattttatatttttagtagagatgggttttcaccatcttggtcagactgatctcaaacttctgacctcaggtgatctgcccgtcttagcctcccaaagtgctgggattacaggtgtgagccactgtgcccagcccactccagactcttgaggtgtgatttctatgtacatgcctgtgctgcagaccctagctctgccactgctacataagcacctatgccttgagcatcttagccacatccacagtgagctagactgcactgcaggccctggagccatagtctctttgcatgcaactgcagtccaggc

SEQ ID NO: 517530 - DNA, 571 bp, Homo sapiens
ttgattctttctcaggtattactgacagcagatggagcctcaatgtcttgcaggatctaaaatattaataagattagggcttttatccttcaaacagtttagcctttccttttagaggctctgcacaatgtctcatctgttaatttataatactagctctccaggaagacctgacaccacttacggataccaaaataccactttgcccagagtccctctttttcacttcgtcagtgtgctggttcacgttttaaatcacgctcatctttcagagacatttggaggagtttaattccagtttgagatgagargtcttggggtgcgttttaataaatatttgatgggaatgctagccttggggggtcattcttatttacaaaattagagatggcatctcttaggaaagcttaacttcgtggaagaggcggtgtttataaatgcgcacagcactctcatgcacggggtggccgccacttttcagaacacagtagttatccacggttccatttttagaagcagtgattaaattgcagagcactgctgtgtgataccaattacaataaccattgtc

SEQ ID NO: 517531 - DNA, 431 bp, Homo sapiens
atgaagacttttgagttaaatttttctcttttcttttcttctttcttttttttgctaaagaaaaagccaattcatcaggtaggaaaggactgcttttcgtggtcccaggtcctgccagagacaaatgactgtaaaaatttaaaatcagttattaacagattagctgttggtccaaagtaaatagcttattaagcatcaggcagagtgagataaaggggaagagttattgaaaatgaggatgttgtctggggctctgcttgtggggtagcacaggaggaggctattgctttgtgactctaattacaaatggaaaacaaggtagttggctgaaaaagttgaatccctcgttgtgttaaacagagtcctgtggttttctgttctaygtcatggctttattcaccttgattagcatggaagttggttgtgctccc

SEQ ID NO: 517532 - DNA, 506 bp, Homo sapiens
catcaaccccactgaggacctaggggcacggcaatgtcgaattagaaactgtgtcaagggtgactgagccctgcttctcgtgtgagagtcatttatattcaaaatgaatgctgaggcaacttaaaattataaaaattcactaaatgccaggtgtgtatttaatgcagaaatgtattacatagacttgatataaaatagctagaattttatctctaagcttcctaggacaaatattagtattcttcattaaaagaataatttcagtttgcaatgtaataaagttcacacataagtagaacaaatacagttacttaaatataagtggaggcattacaaaatcaactgtcaacatacaaaaagttctgaattatttggtttgrgctaaaaaatataaaagtgttacttttgtattttgaattatttaaaataataaatattataaaaatagctagtgactttaccattataaaactaaaattattatacagtacttgtacactacacta

SEQ ID NO: 517533 - DNA, 601 bp, Homo sapiens
tttgtgactgaaagctgagcatagcttctagtatgcagtaggtgatcagttagcaaataattgattaagttgaacaaataattgagtaagttcaccatgaagagaatgagattttgatcctatactggtcatgtggttctagaaaagcaactaatctttctattcatctgtaaaataaatttatatatgtatttgctgaattgtgaagatgttatattagtcatcttgggttgctgtaaccaaatcccataggctggttggctcaaacaacagacgcttatttctcacagttctggaggctagtaagtccaagatcaagatgccaatagatttgactcatgatgggggctctcttcctggcttgcagatggctgccttctcatattctgcagagagaaaggtctggtgtctcttcctctagttataagggcactaatcccatcaagggggatctaccctcctgacctcatctaagcacaattattttccaaatgccccacctcccaataccattgcattgaggttagagcttcctatgtgaatgggagggtggaggaaagaacacraacattcagtttattacatatcttataaaatatta

SEQ ID NO: 517534 - DNA, 590 bp, Homo sapiens
  misc_feature (1)...(590): n = A,T,C or G
aagtatggaaaggagaagtgagtgaacttaataaacagaaaataacatttgaagactccaaagtacacgcagaacaagttctgaatgataaagaaaatcacatcaagaccctgactggacacttgccaatgatgaaagatcaggctgctgtgcttgaagaagacacaayggatgatgataacctggaattagaagtgaacagtcaatgggaaaatggtgctaacttagatgatcctctgaaaggagctntgaagaaactgattcatgctgctaagttaaatgtttctttaaaaagcttagaaggagaaagaaaccacattattattcagttatctgaagtggacaaaacaaaggaagagcttacagagcatattaaaaatcttcagactcaacaagcatctttgcaatcagaaaacatatattttgaaagtgagaatcagaagcttcaacagaaacttaaaataatgactgaattctatcaagaaaatgaaatgaaactctacaggaaattaacagtggaggaaaattaccgaatagaggaagaagagaagctttctagagtggaaggaaagctcagccgtgccactgaa

SEQ ID NO: 517535 - DNA, 326 bp, Homo sapiens
gctgctaagttaaatgtttctttaaaaagcttagaaggagaaagaaaccacattattattcagttatctgaagtggacaaaacaaaggaagagcttacagagcatattaaaaatcttcagactcaacaagcatctttgcaatcagaaaacatatattttgaaagtgagaatcagaagcttcaacagaaacttaaaataatgactgaattctatcaagaaaatgaaatgaaactctacaggaaattaacagtggaggaaaattaccgaatagaggaagaagagaagctttctagagtggaagraaagctcagccgtgccactgaaca

SEQ ID NO: 517536 - DNA, 581 bp, Homo sapiens
  misc_feature (1)...(581): n = A,T,C or G
gctagccaaagatcttgaagaagaattggagagaactgttcatttttatcaaaagcaggttatttcctacgagaaaagaggacatgataattggttggcagctcggactgctgaaagaaacctcagtgatttaaggaaagaanatgctcacaacaaacaaaaattaactgagacagagttgaaatttgaacttttagaaaaagatcctaatgcactygatgtttcaaatacagcatttggcagagagcattcccatgtagtcctcaccattgggtcggccttcatctgaaacgagagctttttcctctcctcaaactttgttggaggatcactcagactctcacctgtgcttccagggggaggagaaagaggcccaagcagcccagggggatcccctggaccatcagattaccaatgaaagaggagacccaagctatgacaggttaatcgatcctcacagggctccttctgacactgggtcctgtcatctccggtggaacaggaccgtaggatgatgtttcctccaccagggcaatcatatcctgattcaactcttcctccacaaagggaagacagatttt

SEQ ID NO: 517537 - DNA, 581 bp, Homo sapiens
  misc_feature (1)...(581): n = A,T,C or G
gctagccaaagatcttgaagaagaattggagagaactgttcatttttatcaaaagcaggttatttcctacgagaaaagaggacatgataattggttggcagctcggactgctgaaagaaacctcagtgatttaaggaaagaanatgctcacaacaaacaaaaattaactgagacagagttgaaatttgaacttttagaaaaagatcctaatgcactcgatgtttcaaatacagcatttggcagagagcattcccatgtagtcctcaccattgggtcggccttcatctgaaacgagagctttttcctctcctcaaactttgttggaggatcactcagactctcacctgtgcttccrgggggaggagaaagaggcccaagcagcccagggggatcccctggaccatcagattaccaatgaaagaggagacccaagctatgacaggttaatcgatcctcacagggctccttctgacactgggtcctgtcatctccggtggaacaggaccgtaggatgatgtttcctccaccagggcaatcatatcctgattcaactcttcctccacaaagggaagacagatttt

SEQ ID NO: 517538 - DNA, 581 bp, Homo sapiens
  misc_feature (1)...(581): n = A,T,C or G
gctagccaaagatcttgaagaagaattggagagaactgttcatttttatcaaaagcaggttatttcctacgagaaaagaggacatgataattggttggcagctcggactgctgaaagaaacctcagtgatttaaggaaagaanatgctcacaacaaacaaaaattaactgagacagagttgaaatttgaacttttagaaaaagatcctaatgcactcgatgtttcaaatacagcatttggcagagagcattcccatgtagtcctcaccattgggtcggccttcatctgaaacgagagctttttcctctcctcaaactttgttggaggatcactcagactctcacctgtgcttccagggggaggagaaagaggcccaagcagcccagggggatcccctggaccatcagattaccaatgaaagaggagacccaagctatgacaggttaatcgatcctcacagggctccttctgacactgggtcctgtcatctccggtggaacaggacygtaggatgatgtttcctccaccagggcaatcatatcctgattcaactcttcctccacaaagggaagacagatttt

SEQ ID NO: 517539 - DNA, 609 bp, Homo sapiens
ccaaactgcacatgcaagggatctacactgcaygctccttatgagaatctaatgcctgatgatctgtcactgtctcccatcaccctgagatggcaccatcttgttgtgggaaaacaagctcagggctcccactgattctacattatggtgagttgtataattatttcattatatatcacaatgtaataataacagaaataaagtgcacaataaatgtaagcacctgaatcatccccaaaccatttcccctgacccccattcatggaaaaattgtcttccacaaaaccacaccctggtgccacaaaggatggggaccactgctctaagtgaccatacagcctgtgattcccagaaggaacaaaaattatcaggtccattaaaacataaatttgggcatgcaaagaagcactccgttatcaaatggaagttatacagatgatattaatatatttattttgttttttaatgatagtctattaaaatatttgtttagatagaccttttataaaacaattactttttaaatattttatagatctctggtcatcttggtctatgaatttataatgcagtgtggtcaatggttacctgactgtgcagtgtgttagg

SEQ ID NO: 517540 - DNA, 609 bp, Homo sapiens
ccaaactgcacatgcaagggatctacactgcacgctccttatgagaatctaatgcctgatgatctgtcactgtctcccatcaccctgagatggcaccatcttgttgtgggaaaacaagctcagggctcccactgattctacattatggtgagttgtataattatttcattatatatcacaatgtaataataacagaaataaagtgcacaataaatgtaagcacctgaatcatccccaaaccatttcccctgacccccattcatggaaaaattgtcttccacaaaaccacaccctggtgccacaaaggatggggaccactgctctaagtgaccatacagcctgtgattcccagaaggaacaaaaattatcaggtccattaaaacataaatttgggcatgcaaagaagcactccgttatcaaatggaagttatacagatgatattaatatatttattttgttttttaatgatagtctattaaaatatttgtttagatagaccttttataaaacaaytactttttaaatattttatagatctctggtcatcttggtctatgaatttataatgcagtgtggtcaatggttacctgactgtgcagtgtgttagg

SEQ ID NO: 517541 - DNA, 616 bp, Homo sapiens
ttagcttggtctgcaattctcatctgagacttgagatcctctttcaagtttaatggttgttggaaaaattagattccttgtggttgtagggttgaaatctctgtccatttgtcactgctgttttctgtcctctgggatctgggatggcctgagctgcctgctgccactctggtgcctacatgggaccacctccgtgtttaaatcagcaatgtttgttgagtgcttcacacacttcaaatctctctgacttcctcctctgttactaggtgaaaaaaattcccagcctttagaagactcacctgattgttaccatggtaaccttcacattttaggacccattgatctacaaagccccttcacagcagaacctagattagtgtttgattaaataacaaaagtctaaggggggccatttagagaattctgcctatcccataaagccatttcatcttaaccactgagcattgttttcattttytgatcctatattttttccttgaacacatgctgttctatcaatgctatctttattataggcctcaagctattgcttcagatttcccacccaaaataacatggccctgaatccaaattccgaagggaaaaatttccattt

SEQ ID NO: 517542 - DNA, 496 bp, Homo sapiens
cttttcagagtatctatatttagaaaagcatttatataacagatacagcaatagtgtcagcataaatatgtctaatatctgtgagtcactgtggggtagggaaagacctaagaaaacagctaatccatcctataaagtcgtgacatacacatacattttcatgttttcgcactaatctgattaccggcttccccctttatttgcaccctgtgataaccttatacagaacaatttagcgtagatattagctgatggttagttatattaagttcttctacaggccatccttttccattggtatcaggaagttttaacctgattttgcaatatatttcatcatcagtttcaatattaacacgagttatttacataaaatagttraatattaccaacaatgccaatgttataccatactgcagtgtgatcatggtataagcagtttcattccagaacaaatcagtaagaattagagaagtatttactatccctttctaac

SEQ ID NO: 517543 - DNA, 485 bp, Homo sapiens
actatgctagttttaagatctagaacaagggttcacaaactactgtccctgggcaccattccagcagccacctgtttttacaaataaagttttattggaacacgggcacacccatttgtttacacattgtctatggctgcttttgtcagagttgagttgttttgacgcagaagatggccctcaaagccttaagcattaacctgtgtatcttcacaggaagtgtcactaattattgatcttgaggatgtgtactatgctcctgttaactcaatgtgacttggctactattggcacaaactctgctagtatcraccatttccaatattagaaatagatttccaataacctcaatgataaataagccattaaaaatttcagacatcttagtgggtatataatagtatctcatggtggttttaatttacaattccttgcttactaatggtggaaagcagcatttgtatgtttatcagccccttgtattt

SEQ ID NO: 517544 - DNA, 624 bp, Homo sapiens
acaggcttttctacccacttatttcagatttgaaatcacttttaaatagctttcaattttgtagtttctttaaagctttctgagataagacgctgcttttcagaagctggccagtactccctagcagcaactttaggtgcctcttttccatatctggtgtttgtagttttattttgagagttttccttacttcttcatcagcatctgttattgtaaattaggcatgagtgaaataattcttggctacatacaatgaatacrtgtatatatctttaaaataactaagcatggtgacatttctgaggtcttttaaataagaaattcaaaagaaaaaccaatttacattaagtggttacatttaaagatgatcgctgtatcgtaattgtattttattggactcttttctcgattataacttaatatgttgacatctctcagagcttatcttactttccagtgtgacagagtcttttgtcatcaatatattcccagctatggcaactggggttgctgtcggttcccctaactgtattcttctccatcacctgtgatcatgccagcagccctgttgctgttcagatggaatctgagcaggtgatggggatgggatcaggtgcagcccca

SEQ ID NO: 517545 - DNA, 624 bp, Homo sapiens
acaggcttttctacccacttatttcagatttgaaatcacttttaaatagctttcaattttgtagtttctttaaagctttctgagataagacgctgcttttcagaagctggccagtactccctagcagcaactttaggtgcctcttttccatatctggtgtttgtagttttattttgagagttttccttacttcttcatcagcatctgttattgtaaattaggcatgagtgaaataattcttggctacatacaatgaatacgtgtatatatctttaaaataactaagcatggtgacatttctgaggtcttttaaataagaaattcaaaagaaaaaccaatttacattaagtggttacatttaaagatgatcgctgtatcgtaattgtattttattggactcttttctcgattataacttaatatgttgacatctctcagagcttatcttactttccagtgtgacagagtcttttgtcatcaatatattcccagctatggcaactggggttgctgtcggttcccctaactgtattcttctccatcacctgtgatcatgccagcagccctgttgctgttcagatggaatctgagcakgtgatggggatgggatcaggtgcagcccca

SEQ ID NO: 517546 - DNA, 590 bp, Homo sapiens
atctccctacaattactagaatcaagtgcgtcaaaatcttctgtagctactttaataagaaacttcagtattatgagggtgatcagtggggcaggaaaatagggtctggagggaggaaacataaggccgattcatacttcagctataacaggaaatatcctctctatagggcatacaccataaatgactttctaactttacttcatcctcttcatttaaatggggtgtaccccaagaagagggcatttaaactcacaaaatcgctgtaacagggcctttgaaccctgatgctaaggcccgctcccacattgtggagtatactttcattttcaataaagccctttgtcgtttctttgtttgtgcattttgtccaattcttttgttcaagatgccaagaacctggacaccctccaccgttagcatattttggcgagccacccaggagtaagaggtaagcccaaagtttgggatttattcttttccttstgctccatacaggggaatctctttctgtttttctttccaaaccaggacccttggtgggcagcaactaaacatggaagcaactgcaggtttctggccatggccag

SEQ ID NO: 517547 - DNA, 496 bp, Homo sapiens
tagagttcactatttctcttgactgtgctttggaaaattatattaattgcagaattaaatgaaatagaaaatttccttattctactactgatggtattttctccctgtgcctcagtttctttataaaatggagataaaatatttgatttgtcaccttattgttctatttaytaaggtaatgctagtggatataactgataaatcccacattctcaatggcctgacaaaataaaatctggcacttgttcaacataagtattcctatctgagtatatcctctgtaattagtggtttaggagccatgttgcttccatattctggttacatcatcttcacatgtggcctccaaatttactgaggaaggggaatgacgctgtgggaaaagaagaactgatacacacagctacagcctgtaaacgacacacatcacacctcatgcacaagcacaatgcacatcccattcctagatataagggagcagggaaatgtcgtccta

SEQ ID NO: 517548 - DNA, 485 bp, Homo sapiens
tgcagtcagtctgcctctagaacccatggtcccagggaaaggtggacagcctggggaggggagtrgattcatgtggcactgaagctggcaggcagttgcataagaaggtttgtggcctcctttggaaactctcaggaacaaggagggggtactctgaagaaagaggggaatgtcccactattatgcagatgtgggctatccaacctggcaagcatcaattctaacagaaagttttagatatatgctaaggtctgaatgtctgtgttaccccaaatttcatatgttaaaaccaaatcaccaatgtgatggtgctagaggtggcacctgtaggaggtgattaggtcatgagggtggaacactcacgattgggattagtgttcttatagaagagacctcagaaagctgccttttcccttctaccaggtgaggaaacaccaagaacgtgccatctatgaaccctcaccagacactgaatctgccagagc

SEQ ID NO: 517549 - DNA, 485 bp, Homo sapiens
tgcagtcagtctgcctctagaacccatggtcccagggaaaggtggacagcctggggaggggagtggattcatgtggcactgaagctggcaggcagttgcataagaaggtttgtggcctcctttggaaactctcaggaacaaggagggggtactctgaagaaagaggggaatgtcccactattatgcagatgtgggctatccaacctggcaagcatcaattctaacagaaagttttagatatatgctaaggtctgaatgtctgtgttaccccaaatttcatatgttaaaaccaaatcaccaatgtgatggtgctagaggtggcacctgtaggaggtgattaggtcatgagggtggaacactcacgattgggattagtgtycttatagaagagacctcagaaagctgccttttcccttctaccaggtgaggaaacaccaagaacgtgccatctatgaaccctcaccagacactgaatctgccagagc

SEQ ID NO: 517550 - DNA, 561 bp, Homo sapiens
ttttttttttaaaaacaggatatacttttacatttaaaaaaatgctccttactccaccgcccccaaaatcagtttcaaagtcaatgtttcaattatctgaagaatgcagggatataaggatgggtagttcaacaaagccakgtacataagtaaaacctgtatagacatttggatttgtcattagagtgcaaggaataatggagcaagaagaacagagcatattctatgtgccagaaactgaagtaggcattttgtggtaggactcatggctaaggccattctcttcttctaaactagctagttcactagcctgtttcttacaatgcagctgttttgtggaaatatttatgttattagtctttgatttgggttagagaagttggaggtgttctcacattcaatgtgttgtgaataatatattgcactcacattctactttttgtgatttatattttgaagatagcttaaagctagttcaaggctaccacatctgtttgaagaataatgcacaatttataaaggtatagggtttctttcacttgtttaatgagaagtgatagg

SEQ ID NO: 517551 - DNA, 549 bp, Homo sapiens
tgtggaaatatttatgttattagtctttgatttgggttagagaagttggaggtgttctcacattcaatgtgttgtgaataatatattgcactcacattctactttttgtgatttatattttgaagatagcttaaagctagttcaaggctaccacatctgtttraagaataatgcacaatttataaaggtatagggtttctttcacttgtttaatgagaagtgataggcacagtatgaggctgggtgaattcccacaagacagactaaaaaagtgttgacaattttccatttcccaaataatgcatgtggtaaaaccccacagtatatccgtttaaaagcatctcaatattcagtttaaatgtgttttcaataccttgttccagtaagattagttttgtaattccaaatactttcaggaagtgagtatgcaatttgctaacagaccattcgatgtagacttgaaacgcaacctaagttatcaaattttagtttgttaccttgagaagttgtagaatacccacagttgtccaaaatctggatttgtatcca

SEQ ID NO: 517552 - DNA, 576 bp, Homo sapiens
aaatgagtaacaagtacacaaaataatttatccaattcaactgttttaaatatttatgttaaatggaagagacaggaggcatatgccatataaattaccctacgttgaaagctcctgaaggcagggacagtttgcttctgcattgctttatacatttcctaacatagaagtatatgtaaataaactacacatttctaagcatagtgatgctgggtgaggagtaggctgggtcaatctgaaataaataaataaataaataaataaataataaataaataaataaataagccagagcatcctccaaagtcttactctgagtgattttcttctgtcctgtgtttaccttccctcaatatccaatttacaatgtctcacttgttgtggaggcctcatgcgtatatcctgaattaattgaataatgtgtttaaggaagccttttatagtattctacaggtcatggggtatcttttatgcttagctaaattrgagaaccatttaatttttgcatatgtttttatacaattaggtcacatagagaagtggcaatttcttgctcaatattcaaaaaggccaaac

SEQ ID NO: 517553 - DNA, 616 bp, Homo sapiens
ttcattttgggaaatttgatctagtatttaaaaaataaaactcctgtttataatgtgccccctgggtagtaagtgaacttagaaggattctaacctgaggaggtgggcagcagtctgtctacattttgaggaaaatggtttgctttcctcaaattcttccggcaattctttcawctttcacatttaggaagagtgacttactatatttgcttgaaatctttgtttgaggtttgttggctcctactgcaggtcaagagtttaatatcctgggccaggcacggtggctcacgcctgtaatcccagcactttgggaggccaaggtggttggatcacaaggtcaggagttcaagaccagactggccaagatggtgaaaccctgtctttaataaaaatacaaaaattagccaggagtggtggtgggcgcctgtaaacccagcaactcgggaggctgaggcagagaattgcttgaacccaggaggcagaggttacagtgagccaagatcgcgccactgcactgcagcctgggtgacaaaagtgagactccgtctcaaaaaaaaaaaaaaaaaaagaatttaatattctggcttttctgtcagttgcctggtaggggaaccat

SEQ ID NO: 517554 - DNA, 620 bp, Homo sapiens
taagtaaggaacaaggagacccacctatcttccctgtttgtgcctgctttagagaaaaggagttcttaaaagcagccctagcaatctgtgaaaccaacagggttcatcattcagagtgagaatatgcattgttcccatggaaccattgagtcaaaatttgagaattcttgacaagtaactcacaacttcttaaagaataagaaactcaggtaaaagagttcccaggaggtggcccctcatgggacagcacagattcctgcttgatgttgcataaaaaaacaggtacaacttgccgtacaatcactgatgcttggaccttcctgcaagtgcttctctccagaaatgtatttcctgtacacaaagatgctatacaaaaaaaaaataataataataataatccatgctgcctgaggtcagctggcagagatgcttcacagtgaatttcagcttctactaaaatgacaaatgatcatctgcacttttttgacttgtttggtggtgagttgtgcctgatgtcaaacatctggataaaaattttaaaagttgttcagcaaaccagtgatytagatgtttggtgtcaaaaagaccaaacagtcagacaactatctgattccctgttt

SEQ ID NO: 517555 - DNA, 620 bp, Homo sapiens
taagtaaggaacaaggagacccacctatcttccctgtttgtgcctgctttagagaaaaggagttcttaaaagcagccctagcaatctgtgaaaccaacagggttcatcattcagagtgagaatatgcattgttcccatggaaccattgagtcaaaatttgagaattcttgacaagtaactcacaacttcttaaagaataagaaactcaggtaaaagagttcccaggaggtggcccctcatgggacagcacagattcctgcttgatgttgcataaaaaaacaggtacaacttgccgtacaatcactgatgcttggaccttcctgcaagtgcttctctccagaaatgtatttcctgtacacaaagatgctatacaaaaaaaaaataataataataataatccatgctgcctgaggtcagctggcagagatgcttcacagtgaatttcagcttctactaaaatgacaaatgatcatctgcacttttttgacttgtttggtggtgagttgtgcctgatgtcaaacatctggataaaaattttaaaagttgttcagcaaaccagtgatttagatgtttggtgtcaaaaagaccaaacagtcagayaactatctgattccctgttt

SEQ ID NO: 517556 - DNA, 396 bp, Homo sapiens
ctgattcagtatctccttctctttgaaaactctcacagaaactgccctataacttctactgacatctcatctcaatggctagatcagtgctatataacaaaactttctgcartgatagaaatgttctatatctgaactatccaagatgttagctactagccacttatgactgtttagcatttaaaatgtcacttgtggaactgacaaaatcaacttttaattttacttgattttaataaatttaaatttaaatagatacatgtgtctagtggctaccacaataaatagtgcagggctagaccttaatcacatcactaccccatctgcaagaaaagctggaaaatgaaggtttggagctaaacacgttgctaccctccacaaaattatgtttttctt

SEQ ID NO: 517557 - DNA, 609 bp, Homo sapiens
gtagcaagaccaacttttgagatgcactggttctcgctcacctttgcacgtttgtcattgctgttgttgttttaaaaagcagcagcaagcaacgtctttaatctgaagggacttccatcccctacctctcgccttctgacatccacccaactcgcccaggtggggtggggcgaatggagttggggagaaagaccgcggaggggaggggacagcakggcacgggtgagggataggtcagggaagtcccgaaggcggaagaaggggtacggttttcaaaatcggggaaggggaggggaagggagttctggctgaagttgcagcttcctctctgacagtgagaaagctgtgggacattgtagtcccttccaatggcttgacctggctgcggttggattcagcctctcaacctcctcccccacacttcttacaatgaggttctaataatattttagttgcctcttctcagtgttaaaaactaatgaataggcttgcaagtgctttgattcaacgtagtccttcagcgcttcttcctctatggaataaagtagccagaaggaaagggggacggggacaggggacgggactggagggaccactgaaaccaagcca

SEQ ID NO: 517558 - DNA, 611 bp, Homo sapiens
gtgtaaccacagacaaggtgcttgacctctgtaggcctgtcttctacctatataatggattttgtcagaattgaatgagacatgcctagcaaagtgtctgctccataacagatgcttgtgttcataattggtgctgtttacgaaggatttccagctctgtcctcttccagtcaaacttccctgccctctgaaatttgggtatagagccatatgacttgctttggccagtgaaatggaaatacgagtcatctgtttcactttgagaatcagtatatgagctgccatttcccttttctaatgctctagagatagtggaatcacatgttgagatgaagcctcayttatctgtgtctctgcataacttcagtgagtgaagacacaccaacccccacacagataccaacctaactttgacctgtagccaaagcaagacatgagcttttcttgtacaagtcactgagatttggagcttatttgttacagtgatataatccagtgtatgctgaccaatacagtgcttaataaatattagctctttttccccattaagtctcattagctgcacatttccctcttgcatttttttcttagaaattggtctaatcccaaag

SEQ ID NO: 517559 - DNA, 552 bp, Homo sapiens
aattgatttacatctatgtgtctaatgtgccccaagagagtcactgtgtcttcaaatcacaaattacttcagtgctgtggatatgggagaagcacaaggtaatcatcaagccttacagtgaattcagtactcctgccaaaagcaaccagaagcaytttgcccttctgactggtagaaaacttgactgctcctatgtagagctcagcatctgagacaactcctcttcaaagcattgttccatgtgctctcactataacacattagctaggcaggtaatgttttcctttcagttgagacttgtagatttttactcctttaagaggccacacaaatggtaagtgactgagtaaagactccacaaagatctcctaactcttcatcctgtggtctttacactgaactgcactgcctctagataaacttatcttttatcatattagaatttaatggttacaacagtaccgtttcccattattaaaagtaaaactgcataagggtttcttgtgattttaattcaccaaaaagagcagtgcttgtgcatacagaaagaaa

SEQ ID NO: 517560 - DNA, 566 bp, Homo sapiens
tgtcttcatgctgtgtggtgctcccctactggggtgcctttgaagctatcaggaaaagccatgtgccaggaagttcttggggtttggaaaaaagggagctcttgagttcccctaaggacaggactctaacaactagaagtaacagcattaaggcagatattggctataaagtgggaggaggggtgtcagaccaaaggcagatgtggctatgtctggcctgattttgctcagctttggagcaatgaagagagtcacggcccctctgactacatgcactgtgagaayatttgcctaagtatcatgtatcgacaatcttttctccctgaccgggccatcactggggttatgcctggccactgaaaatggggacctggacacaagtgtccagatacccaggctgagcaaagcaacaataataaatgtcaattaggtgccctgtgagctgtgagtacatgatggtgaggctcacattgcaggagtcaaggaaccctctaaagaaagaggccacgactcagcattcttgagatttctgtcaaactcaagctaaaatttcctcagattattga

SEQ ID NO: 517561 - DNA, 597 bp, Homo sapiens
aggtttcacatggcacaactccaaggcataccatttaaattgtggagatagtcaaygtgcaacttacacgtgcagcaactctgccaaacatttcacacacacgtctcatttaatacttccaacaatttaatacttacgtcgtgttttcttcattttgcaagcatggagttggggattcagtgaggttcataaagtgagtcagtaggggtactcttacttggcatgcagacatgtctgactccagagttgctgcttggagaataggagaaaacagtcccttgaagattaaacttgataatttgagtcacgtctcatctttgaactaaatgcttaggtttctggggtcaaaaagaagtgaagacagggaaatgattacttttccagattttgggcttcaagtcatgaactctgtaagacccttgccctgttttctgttactagaacaacatcatactcttagctcttcttcctcatttcttcaagagaagaatggatcatacattctagaaaaatccacctggtagaggtgccgagcacatcacagtcatcattaacaaaaaataaaggataacagccctggaccagcagaaatgagca

SEQ ID NO: 517562 - DNA, 597 bp, Homo sapiens
aggtttcacatggcacaactccaaggcataccatttaaattgtggagatagtcaacgtgcaacttacacgtgcagcaactctgccaaacatttcacacacacgtctcatttaatacttccaacaatttaatacttacgtcgtgttttcttcattttgcaagcatggagttggggattcagtgaggttcataaagtgagtcagtaggggtactcttacttggcatgcagacatgtctgactccagagttgctgcttggagaataggagaaaacagtcccttgaagattaaacttgataatttgagtcaygtctcatctttgaactaaatgcttaggtttctggggtcaaaaagaagtgaagacagggaaatgattacttttccagattttgggcttcaagtcatgaactctgtaagacccttgccctgttttctgttactagaacaacatcatactcttagctcttcttcctcatttcttcaagagaagaatggatcatacattctagaaaaatccacctggtagaggtgccgagcacatcacagtcatcattaacaaaaaataaaggataacagccctggaccagcagaaatgagca

SEQ ID NO: 517563 - DNA, 638 bp, Homo sapiens
attccagtgcagcttagcagaataagtgctgagtgaaagaaagaaatcaacagacgtgagtactatcactaacagtccccaagtgagcccccaacgagtcagcaatgtgggggamggcatagaaatgctctcaacacatgtgcctatcaccacggcaactccaaggaatgggaggaattcctagcacttcacactctccacttgggcatccccaggctgagagaagaaagaaggaagtcaaagtggccagaaccacccagatctaaccatccccaataataatagggatttaacagagcatgaaaaaaaaccccaaaatcatgtttcagggtgtggaagtgggtacactgagaacagaggaaaactcacttctcccctcagaactgtgaatgagaaatgaagtcttctgatactgttttatttttattcttctactggtaggattagaaatggctatgagggaaagacaggtgagtagaaatggcaatgtgaaacaaccaggatgatgtaagtaagggccacactgacttggaggacttatctaaagtaagatgatatctctgccctgtctccccaccacaagaatagaaaacagctccagccaagggcaacgagtcctgatttgttgttaaatacca

SEQ ID NO: 517564 - DNA, 523 bp, Homo sapiens
aagagaagttccaggtccttctaaggtcacataytgccccagaagaactccccaaaatctctcccactgctatttttttaaataattagaactcaatatgcacacctcgaagcagctcagaaaaggtagacaaagaagtcactgatagagtaagaaaagagtcaaggagaatcagtccacattattagaacaaatggaaactctgcgtagagttgcatggaagatgaagagtaagagtgtggcattaagagaatatactacagccaaatgagaaagcaagacagaagatagagggaaatgccaaaaattgtttaaaaaacaaaactaacttggaagaaaattctccaacagtactgcatgcaatcatctttctataggtttctacagaaaatgaaatcagtaaaataagaccacaaacaaaagatttttttaaattggatgagaggaaaattgagattgcaaagataaggaaacaagctaaggaccaaaacaacccatcatggaacaaggagtataatagaca

SEQ ID NO: 517565 - DNA, 505 bp, Homo sapiens
tcttctggatagtatgtaatgtgtgtgcatctgtatatgtttgcagagaacaatmtattcaatggagagaatgaggtaggttagagagagctattttttaacttcaaaaacatagtctaaatcaaatgcattcatcttggtgtaaatctgtaattggttcatgatgacaactggactgtttttgacaaactaattttcctctctcttaaaagcaaggcacttgggacaaccactcagcactccttttctttctccctgtgaggctctgtcttgatcttccatcttttgtttggagtctctcttcaatccttttccctttgtctcctttgcttattctctgactctctccatctatcaaaacttgtttaataacagcttagttaatccctgatggccttatttcccctgacttctgcatttttggtaacttattttctggtcttgaatttgtctgtccctagtttataactttcaaattgccttcctttgaatgagcaataaagtg

SEQ ID NO: 517566 - DNA, 505 bp, Homo sapiens
tcttctggatagtatgtaatgtgtgtgcatctgtatatgtttgcagagaacaatctattcaatggagagaatgaggtaggttagagagagctattttttaacttcaaaaacatagtctaaatcaaatgcattcatcttggtgtaaatctgtaattggttcatgatgacaactggactgtttttgacaaactaattttcctctctcttaaaagcaaggcacttgrgacaaccactcagcactccttttctttctccctgtgaggctctgtcttgatcttccatcttttgtttggagtctctcttcaatccttttccctttgtctcctttgcttattctctgactctctccatctatcaaaacttgtttaataacagcttagttaatccctgatggccttatttcccctgacttctgcatttttggtaacttattttctggtcttgaatttgtctgtccctagtttataactttcaaattgccttcctttgaatgagcaataaagtg

SEQ ID NO: 517567 - DNA, 506 bp, Homo sapiens
attctggttttaatatgtgttgggaaattagttttaggatgagaactgctctatcttctaccaaagtgaacattaatagggactttgggacatttgttttttacagatgaaaaaattcaagctcagagaggattggcagcttgcccatattatgcaattattctaatggcagagctggggctggagtaccagttttctatcagccagcccaaagctatttttaccacaggtaaaacctttagctggagaactgttcaaatgtaccaaggaacagtggatacaacaaayatccttgatttatttcaacctccgtacagagtcatacatcccttctacttgtaaataaattctattcaaatacagaaaatgcacagattataagtctatagcttcataaaccattttccttctatttttacaagttgtgagcagatcagtcactacagcaacataggtgacagagtatacagaaaatgaaatttacaacaaagcaaagggagagaaag

SEQ ID NO: 517568 - DNA, 650 bp, Homo sapiens
atccagaataagcatgtattaattataccataattaatgtataccatatccatgaattamagtacaggttatctaaaatttacaacagtcctcttttcttaaaaaaatgcagatatgattaggattgtatttaacacaaaagctttgtaattcctgctttaaatctacttggctataaaaattttaagggaattttatcgtgaaagcagcccaaatctattcaaaggagcaagcctttcaagccagtgacccccaatgcctttttttctttgccattcaatagtgcaaatcacccatctgttacaaacaggaacctgaaaaagcaacaacatcctggcagtgactagccttaaaaaccattcccaactctacctccagacctgacgctgtattcaagtgaatgtgcctgaggtgtgatcaccacaaggaaacagaactgtgtcctgtctatgcctatacttggccatgcttgttagagcaaacatcctgaagtgaccactgtgctgtccgcaccccagccaggcaagactggtatagatgggagagtgtcaggcctccaggcatatgctaggggaagctgccatttgagaagcttttgtttccctgacacctttgtcgggacatgaaaaatggaagggaatgagcagcag

SEQ ID NO: 517569 - DNA, 650 bp, Homo sapiens
atccagaataagcatgtattaattataccataattaatgtataccatatccatgaattaaagtacaggttatctaaaatttacaacagtcctcttttcttaaaaaaatgcagatatgattaggattgtatttaacacaaaagctttgtaattcctgctttaaatctacttggctataaaaattttaagggaattttatcgtgaaagcagcccaaatctattcaaaggagcaagcctttcaagccagtgacccccaatgcctttttttctttgccattcaatagtgcaaatcacccatctgttacaaacaggaacctgaaaaagcaacaacatcctggcagtgactagccttaaaaaccattcccaactctacctccagacctgacgctgtattcaagtgaatgtgcctgaggtgtgatcaccacaaggaaacagaactgtgtcctgtctatgcctatacttggccatgcttgttagagcaaacatcctgaagtgaccactgtgctgtccrcaccccagccaggcaagactggtatagatgggagagtgtcaggcctccaggcatatgctaggggaagctgccatttgagaagcttttgtttccctgacacctttgtcgggacatgaaaaatggaagggaatgagcagcag

SEQ ID NO: 517570 - DNA, 650 bp, Homo sapiens
atccagaataagcatgtattaattataccataattaatgtataccatatccatgaattaaagtacaggttatctaaaatttacaacagtcctcttttcttaaaaaaatgcagatatgattaggattgtatttaacacaaaagctttgtaattcctgctttaaatctacttggctataaaaattttaagggaattttatcgtgaaagcagcccaaatctattcaaaggagcaagcctttcaagccagtgacccccaatgcctttttttctttgccattcaatagtgcaaatcacccatctgttacaaacaggaacctgaaaaagcaacaacatcctggcagtgactagccttaaaaaccattcccaactctacctccagacctgacgctgtattcaagtgaatgtgcctgaggtgtgatcaccacaaggaaacagaactgtgtcctgtctatgcctatacttggccatgcttgttagagcaaacatcctgaagtgaccactgtgctgtccgcaccccagccaggcaagactggtatagatgggagrgtgtcaggcctccaggcatatgctaggggaagctgccatttgagaagcttttgtttccctgacacctttgtcgggacatgaaaaatggaagggaatgagcagcag

SEQ ID NO: 517571 - DNA, 650 bp, Homo sapiens
atccagaataagcatgtattaattataccataattaatgtataccatatccatgaattaaagtacaggttatctaaaatttacaacagtcctcttttcttaaaaaaatgcagatatgattaggattgtatttaacacaaaagctttgtaattcctgctttaaatctacttggctataaaaattttaagggaattttatcgtgaaagcagcccaaatctattcaaaggagcaagcctttcaagccagtgacccccaatgcctttttttctttgccattcaatagtgcaaatcacccatctgttacaaacaggaacctgaaaaagcaacaacatcctggcagtgactagccttaaaaaccattcccaactctacctccagacctgacgctgtattcaagtgaatgtgcctgaggtgtgatcaccacaaggaaacagaactgtgtcctgtctatgcctatacttggccatgcttgttagagcaaacatcctgaagtgaccactgtgctgtccgcaccccagccaggcaagactggtatagatgggagagtgtcaggcctccaggcatrtgctaggggaagctgccatttgagaagcttttgtttccctgacacctttgtcgggacatgaaaaatggaagggaatgagcagcag

SEQ ID NO: 517572 - DNA, 541 bp, Homo sapiens
aagagaaatggcatttgggggacactgaagaggagatggcagtgtccaggagtgaagaagtcagaggaaccctgmgagagaaaaacaggttctcctagaactttaccttgaaaaactggggtaacaaaaataaagaccactgcacttttacttacatcaattcctggattgaaattttctctcctctttgaatattaaaatcctatttggaaacctagtttactctccttctctataagtctttctcaaacccacccatctcacaaattggtccgttctcaggactcaaaaggcttctccttcatccatctagcagtcatattcacactgtcttgcatcatctcacattcctgtttggtgacatcatgtaactataacactattatcgccttttcacatgtgtgtacctcaattcttaaatttaattttaaccttcctcagagtgaagtccatcactattttagatttttttctctaaggcagcaaattgcatgtggtaggtgttcaatatatgctagccgatcacatgactaaagaaggc

SEQ ID NO: 517573 - DNA, 594 bp, Homo sapiens
cctcccaaattggatattacctcttctccccagcatagggaagatgatattcccataggattaggcaggtccctattattccaccccatagaaaataactgtcaaccatttctgctgaagacagcaagtctatttccaggctgcttagcttgactggcaagtcaaatacagggcagacatggacatgtaggatcagaaggcagrtctggtcttccctgagcccattccctgggcaggggtaggtaagtaaggaacaaggagacccacctatcttccctgtttgtgcctgctttagagaaaaggagttcttaaaagcagccctagcaatctgtgaaaccaacagggttcatcattcagagtgagaatatgcattgttcccatggaaccattgagtcaaaatttgagaattcttgacaagtaactcacaacttcttaaagaataagaaactcaggtaaaagagttcccaggaggtggcccctcatgggacagcacagattcctgcttgatgttgcataaaaaaacaggtacaacttgccgtacaatcactgatgcttggaccttcctgcaagtgcttctctccagaaatgtatttc

SEQ ID NO: 517574 - DNA, 505 bp, Homo sapiens
tagtatttacattatttacaacattttaaaatgaaaataactgtatttttcaaaaccaaagattagttagaagagtggtaccattttacttttttgtaaatctccttagagactggttaatgggagttggctggattgctatatattcttttgcatttaatctgttgggatatgacaaatatgtagcctctatacactcatatgagaatgagaataagggaggaaaagaaaatcttagttctttaagaaaatagtttgtgaaattattgtgaaaatagtttgggcttcacagagcacctgaaggggttccaggagtccccacatcatgttttgagaacggcttgctctccagaacaccagggccactttcttattttaggcttgcagatgacctagactattgtaaaggtggtttgttacataggktggtttggttgggctgtgcctacctcaggtcatagatgaattctcccttgttggttgacccaaggcaggctgcaagcag

SEQ ID NO: 517575 - DNA, 660 bp, Homo sapiens
ctaaccctaaatgctgtcccaacacccaccactttacagggctatggttagtctcaagtcaaattagataatatgtggagatggactttgtatactgtaagccactgtgtccaaagactagttactgggcttttttgtttagagatagggtcttgctgtgtcacccaggctggagcgcagtggtgcaatcayggctcactgcagccttgacctaacctgggttcaagtgatcctcccacctcagtcccccaagtagctgggactacagtcacatgctaccacattcagctaatttttgtagaaacagggttttgccatgttgcccaggctggtcacgaattcctgcactcaagcaatccgcccaccttggactctaaagtgcttagattacaggtgtgagccactatgcctggcctaatttttaaattatgtatagagacagtgtgggggggtcctcctatgttgtccaggctggcttgaactcctggcctcaagcaatcctcccacctcagcctcctaaagtgctgggattacatgtgtgagccactgtgcccagaagttgctgttatttatggagacttgctgaccctatctggagctgatattcctctgggaaggtaggaaaggatacctgctaaagggtccgtggctcagggtccc

SEQ ID NO: 517576 - DNA, 543 bp, Homo sapiens
ggtatgtggcagagctagattctgccatatttacaggctggaaagaaactccagtgtatgtttgagacccttctggaagaatctggatttcaaatctgaggcccgacaaaacccagaaacgaatagattacaacctatgatgtcaagcttattatttccaagaaaaaaatcrtgcttttggagaatcaagctcacagaattctggcccaaaaacagacaaggtccctacagtgaggggcaggagacctgggttactctctctccatggacctgtttccccacctgtaaaataggaaggtagtgactggattagcaactctaaggatcctccctgcatgcatgctaacaactggtatatgggagttgtgggtaggctggcctgaaaatactcctttcccttcacagatttgtagcaggaagggccagaagccgagctctagggccattggggagattgggaaaaggacaacagaccccaggacagggatttagtcagggcagagtaccaggagtaggatggctctaccctccttgccccacccc

SEQ ID NO: 517577 - DNA, 543 bp, Homo sapiens
ggtatgtggcagagctagattctgccatatttacaggctggaaagaaactccagtgtatgtttgagacccttctggaagaatctggatttcaaatctgaggcccgacaaaacccagaaacgaatagattacaacctatgatgtcaagcttattatttccaagaaaaaaatcatgcttttggagaatcaagctcacagaattctggcccaaaaacagacaaggtccctacagtgaggggcaggagacctgggttactctctctccatggacctgtttccccacctgtaaaataggaaggtagtgactggattagcaactctaaggatcctccctgcatgcatgctaacaactggtatatgggagttgtgggtaggctggcctgaaaatactcctttcccttcacagatttgtagcaggaagggccagaagccgagctctagggccattggggagattgggaaaaggacaacagaccccaggacagggatttagtcrgggcagagtaccaggagtaggatggctctaccctccttgccccacccc

SEQ ID NO: 517578 - DNA, 624 bp, Homo sapiens
ggttatataaaaaaaaattaagctgcatgtttccacccataattcataaagaaaagcccactttggggaggaaaaamcacatgcaaattctattataatgatagtataatgagcttggggtgaacatggtttggtgtttttgggcatgagccgctttagtacctttccacctgtgccctatttccttactctcagtgatgtgctggccagagactttaccacaaactctatctgttagagtagagttagggcggtcttgggaatgaagtagggtgggccagaggccagttagtgacagcctttttgctttcctctttaccgcctcccagctgctaatgtctatctacctacctaacagtattattgtatttggaaaagaaaacaatgttgatttttagaaaataattgatgttttattcatggtcccccagaaagtgcatggcgtgactttatttgtgggcttaaaaaagaatgaatttttattttcattttaaaagataattttcctggcttcccatagtcaaccaacacaaatttaagagaaaaacattgcatattccatatctatgccttttccacattgatgactccctggtagtgaaaagagtctctaatttcaaacaa

SEQ ID NO: 517579 - DNA, 583 bp, Homo sapiens
caaccaaatcagacagaggagagggactttgtgatttttaaagctctctggatgattctaatatgcagccagatttgagaaccataagaattataaaaagctatgaaaagaaaaataggagaggcttttctgtcctttctcccaccatactccctctatcccccaagtatcaacaagaaccttcccagcagggtcttcatcaattctggattccaaaatgttctccagcctagaaaacatcctttcactcacccatttctccaacccctaccccgtttcaatagcttcctttctttctaaccaccaatcattgagccaggtcactacaaacacttttttatggcaaatagagcctagttattmaaaaaatgacttcccctcgccccacccaacctgatgagaagtggagcaacacagaggtaaagtgaagccatagatttgagtttggtccattgccttttttaacagactcatgacagataacagataattaatggtcctagagaccatctgatcccattccctaattttaggtgtgaggaaactgagacccagagagtgcaggtgacttcccacgatcaca

SEQ ID NO: 517580 - DNA, 684 bp, Homo sapiens
taattgttgtgaaaaacttagcatatcacatttagtctttagtaaattatggaatcaaaattaaataagatttgataaagaaaatgtggtatatagaatgagcagagcaaaatgatcaaatagaaggctctatcaattgttcccccatgcgggaacaccaaatttaataactatctacaccaaaaaacaccttcaaaagaaccaaaaataagatgagcactcacagtacctggttttaccttcatatcgctgaaagagtcattgaagaggataggaaacacagtgctgaatcaccgatggtacccttccctcatcctctgccgggagctgcacggcacggagaaagaatctgttcacttcagtgtgagagtgcaacaattgtgggacagtgtgttgaactcagtgctgccctgtcacaacagaaagcaaaactgggctgaacttagccgacacccacccatcaagggagtatttaaaccagccctagccagagaggaattgcccatcccagtagttggaacttgagttctggcaagctgcaccactgagggctaaaggcctttgggccctaaataaacttgaaaggcagtctaggtcacaaagactccaattcctaggtaagttctggtgctgaactgagctcagaaccagtggactttaaggcrcacgacctactgagacacc

SEQ ID NO: 517581 - DNA, 344 bp, Homo sapiens
atcatgggaaagaacacaaatgcatcagtccagactgccttgtaccctcccaaactaaaaggaagaagctcataaaaactgttccctgctttacagtagagaaccagagagacacgacctcagccaggtggtcaaggccagcatccacagtgataatgtcatgatgacaatatgtacccttgatatgaaagaggtgctttmtctctgtagttttcccctcccaaacctataatcccagtatagttataagaaaaacatcagacaaatcccaattgagggatagtctataaaatagctgaccagtactcaaaactgcaaagggtcagaagcaaagaaggtctgag

SEQ ID NO: 517582 - DNA, 604 bp, Homo sapiens
gcttaccacaaaatcatagatgtttatttctttggagacaatgtcaatgaaagcaagcagtaaacaacatcagtcctgtgacatgccaattcagggtgtgtgtgtgtgtgtgtgagtgcatgtatttatctttttactttgcttgcttctgtgattaacattaactgcatcaaatgcacacacatcccacaggccagagtgaggcaggagaaagctgagctggaacctaactcctgttgatctgctgcagagaccctctcattccacaattgctccccccatggtaagctccattcctaattacctaggcaaactggcctgcatttctctccagagttctaaaggatggtgtgagagtgtctgccaagatttggattttacagagacaagtctcagcttttgctttctggttcaaggtttatgcttttggaaggctgtgatgacagcagcaggaaataggacaaataggagtttttgttaggggggcagctaatagaacagcctcatgaaggacctaggcacwccctagagatgcaagggacaggcctgcagtggtgtctccggaacacttggctcctataaacccagtgcactgaatccccag

SEQ ID NO: 517583 - DNA, 589 bp, Homo sapiens
ctgcgctgggggctgggggctcccgctgggactccacttccgtggatgtctaagcttcacctttcttgcgcccgcaggggcatgactcaggtgaaagggagccattttctcagacccctggcctcatgcagcccttcagcatccccgtgcaaatcacacttcagggcagccggaggcgccaggggaggtaagtcacttccggaagctctgccggtagtgggaatctggctgaacaagcagttgcaagaagaggggacatctcgagcttggggagtgagtgtttcctttttctctgaggatgcccacttgccatgcctcccagggtacccagcaggcttccccagtagcactcacatcacggggctgcagcctttcctgttggctctatcctctaggttgccagttcttggagactggagaccttttaaactcacctgtagctccccagcactgatcatagcccagcscatagttggtgctcaagaatgatctgttggttgaatgaggaatgaagaaattagaccagcatttggtcccattggtgaagccctggagtcacagcccttggattcaaacccagctcaccact

SEQ ID NO: 517584 - DNA, 638 bp, Homo sapiens
attttacatatgagaaaactgaagatcagaagtgaagtcacttgcctccaataaatggattttgaatccaggtctagattattttaaagcccatattataaccatgctgttatttggacttcagttatggccaggcaatattccccagtagtgaataagagaatgagctctaatttgaatctacactagattcaaattttggcccccttagtctatagttgtatggccttgggtagtttaatttatctcaatgaatctcatttttcccatttgtgaaattgggataataatggcatctacttcactggactgttgtgaagatagatgaagtgatatatgaaaaatatgtaagcacagagatcagcacacagcaagcacctaataaatgttaaacattagcaataaacttgtaaagtattgccaacattatcttttcaagcttattaggaattatacagtgctggcaccagatggggaaggaaacggtttttgttgttgtttttttttttcmccgagaaggcaagtaaataaggagcttcataaagaagttagatttcaagtgctaatacctgaaggtggcaaggctcacacacaagcctggaagagtactgagtggctcagatgccggtgctttccca

SEQ ID NO: 517585 - DNA, 585 bp, Homo sapiens
taaatcttactgaaatagattttgttctttattccygctattgcctgcagagctggaatggttatatttaaaattaacatacattgattattttatttttagcaaacaaatgtttttgtattacatcttcaaatgcaaagcatttttcaaaagcaaacagattaaaatatcagaggttttgtgacttatggaatattacaaattacttttacatacataaccaaatattagagtagatatgaaaaaactattctacaatgttaaagaagcactattattttttctggattagctttagtgtatttttttctttattatggtataattgactaataaaaatcatatttttagtgtaaaatgttttgatacatgtatatattgtgaaatgattaccacaatcaagtatcaaactagttaacatattcgctacctccctcacatagttacttttatgtgtatatacctatgtgtagtaagaatatttaagttctatttcctgggtaattttcaaagatgggatacagtattattaactatagtcaccatgctgtacaacagctttccagaattcattcaaactctaca

SEQ ID NO: 517586 - DNA, 553 bp, Homo sapiens
ttacaataaggaagttatgctgcctcttctgggtggggcccatgtaattctaagaatcctaaaagtgtaagaaggaagagaagagaagatcaaattgatgtgttgtgaaaaggactgcactcactgttgctggatttgaagatagaagaggtgattatgagccaagaaatacagccagcctctagaaattggaaaaggctcagaaatggattattccctagaatatccagaaagacatatagccctcctgccaccttgatttttaatccagtgagacttgtgttggatttttaaacctacagaaattaatgcaataagtttgtgttgttttaagaaattaagttagtactaataggttaatctactgctgatggcagtataaactattacagaggagtatatcatttttgatctggatatcttcttgttttatcattttgtatttcayataccatggccatgtttttgggagaaagaacagtcttgaaacaagttacttgctcatcttcactagaagtatgctaatcattcttccactatatcctctgcagtt

SEQ ID NO: 517587 - DNA, 584 bp, Homo sapiens
ctcttaagtcattaataggagcagagcttgatgatatgttytgactcaggcaacctagtcagactcttcatccctcttggaaatccatcatctaggatcaagcatcactatcgctctcccatgtaatcctcaggctcctcctggagccatcatgccaaatcccttgactccaataataatgcaaaggagccgcattgtgatggggggatttgtcctctgacttatgttttcacacctaagtgcttaaggcctcctttctgaagttctccctcaatctcgattactgcaataagaggcatttttttcttcaagaaaattgtttaaaagggacatggatctcagctataaagatcaaagaattgtttcctataaataataagtaaatagaaaagagaataagtttgaggcaattcagagttatttaaaattatcttttgagctgttctacttgtaggagaaaaaagttctccattcccaacaagaagtttagagagaatcctatctaagattcacaaagttttcagaggactttgacacctatcatttcaacccgccttcacaaacatcgcaggatatgaggaaag

SEQ ID NO: 517588 - DNA, 471 bp, Homo sapiens
gtgactgtttcctgaatcctacttccagcctgtggtctcatgttgcttctaccgtgctttaaaggactrccaatgtgtgaagctttttgtatttgatgtgttaatgaggttgtgagttttattctttgctcagccaaatgaatttgtaaagagaattatgtattagagaatttgtaaagaggattatacacatatatatatgaaatccacatatatataatccatgtatatatacatatgatccataaataatctgtatatatatgtttaatgagtaacaactatctattgatgaaaatggtggaagttatgtaagatgacttgtaaggagcatcccttccctgggagaaatcagcactgaatgtctcctgggaggtagcacattttgatgctgctgctgctgatgatgatgatggagaagaggaagataagcatctccattgctttttatgtgctaggtacatagtctca

SEQ ID NO: 517589 - DNA, 471 bp, Homo sapiens
gtgactgtttcctgaatcctacttccagcctgtggtctcatgttgcttctaccgtgctttaaaggactaccaatgtgtgaagctttttgtatttgatgtgttaatgaggttgtgagttttattctttgctcagccaaatgaatttgtaaagagaattatgtattagagaatttgtaaagaggattatacacatatatatatgaaatccacatatatataatccatgtatatatacatatgatccataaataatctgtatatatatgtttaatgagtaacaactatctattgatgaaaatggtggaagttatgtaagatgacttgtaaggagcatcccttccctgggagaaatcagcactgaatgtctcctgggaggtagcacattttgatgctgctgctgmtgatgatgatgatggagaagaggaagataagcatctccattgctttttatgtgctaggtacatagtctca

SEQ ID NO: 517590 - DNA, 456 bp, Homo sapiens
ctgctggctgatctcagcatatcagagaaaagctattaatttgtgccactacatctgtgcagrgaggagggagtctttggggaagcagcaaatcctgcaggctgtggcagcagctcacatttctggctgactggaaacaccaaccaatctttttttttttttgagatggagtcacgctctgttgcccaggctggagtgcagtggcgcaatctcggctcactgcaagctccgcctcccaggttaacaccaaccaaccttttacttttcttcccccaacacttttggactcatttcaaagactgcaatatcctggccagatcttccatacacatttttctctttcactccgaaattctcacaatgcatccaccatccctaccatttgccatcattccaaaacagtgaggcctgccttgggatgggatcatttcacttgtggcagaagaacagtagtag

SEQ ID NO: 517591 - DNA, 456 bp, Homo sapiens
ctgctggctgatctcagcatatcagagaaaagctattaatttgtgccactacatctgtgcagggaggagggagtctttggggaagcagcaaatcctgcaggctgtggcagcagctcacatttctggctgactggaaacaccaaccaatctttttttttttttgagatggagtcacgctctgttgcccaggctggagtgcagtggcgcaatctcggctcactgcaagctccgcctcccaggttaacaccaaccaaccttttacttttcttcccccaacacttttggactcatttcaaagactgcaatatcctggccagatcttccatacacatttttctctttcactccgaaattctcacaatgcatccaccatccctaccatttgccatcattccaaaacagtgaggcctgccttgggatgggatcatttcasttgtggcagaagaacagtagtag

SEQ ID NO: 517592 - DNA, 447 bp, Homo sapiens
attccactgcactctgtgccatgaacctgtcttgattattcagagtctaaacaacctggatcaattttgataacctccatgtcttttgctatgtcacgtgtcctattctggccttcatctttaagtgatgttctccaactcttggaaaattctagaatgccttttgcttagaacattcactaaattatttatacagcatatgggtaatcttggcatgtggtcaaatatcatggatactaagagcacttgaaagaatgttttccctcataaatccagaagactaygtcaaaattactcttgttaagatttgcaaagatggcatcagtatgtgctttataaaaacagaatatcactagattatcactttttttcctgctatcttcttgcacgttattcactccagactgaaatccttcagttttcatttcctgtcttcacagagcagta

SEQ ID NO: 517593 - DNA, 622 bp, Homo sapiens
tgaccaacatgcagaaaccccgtctctactaaaaatacaaaattagccgggcttggtggcccatgcctgtaattccagctactcaggaggctgaggcaggagaatygcttgaacctgggaggcggaggttgcagttagccgagatcatgccattgcactccagcctgggctacaagagcgaaactccgtctcaaaacaaacaaacaaacaaaaacaaaccaacaacaacaacaacaacaaaagaaaatcgaaatctaatgacatagatgccgggcgcagtggcttggttgggcacggtggctcacttctgtaatcccagcactttgggaggccaaggcaggcggatcacctgaggtcaggagtttgagaccagcatggccaacatgttgaaacccgtctctactaataatacaaaaattagccgggtgtggtggcagacacctgtagtcccagcaacttgggaggctgaggcaggagaattgcttgaacctgggaggcggagattgcagtgggttgaggtcacaccactgcactccagcctgggtgacagagtgagactccatctcacaaaagaaaaaataaaaaagaaagaaagaaatctaatgacatagagacttaaaca

SEQ ID NO: 517594 - DNA, 552 bp, Homo sapiens
ctgtggcggagcactagcctccaccagcctccggcaagtcaacatcaatagagggcacagaacagaatatgacagacgactttataagcccatatgatacactcagagataagaaataaatgtttgagattttaaataaaattagaaattggaggttacaaagagtcagtgaaattgggttgcacatataataaatgtgaccatttaacccaattcaatacttttaacaaaaaaaaaaaaattttttttggcaagtgtggtagccagcctacaagatggccctcaatgagtctcacctstggctagacacccccacacacactgaattatgccttccctgtgtgaccaacagaatatggttgaaatgacatgaggaacttccaagggtaggttgtgaaagttatcgtagtttccaccgtggtccctctctcgagttgctgtctctggaggaaatcaactattacggcacgaggacaatcaagttgccctatgaaaaattccacttgaggaactgagggatccagcaaacagctagcaccaacctgccatcca

SEQ ID NO: 517595 - DNA, 552 bp, Homo sapiens
ctgtggcggagcactagcctccaccagcctccggcaagtcaacatcaatagagggcacagaacagaatatgacagacgactttataagcccatatgatacactcagagataagaaataaatgtttgagattttaaataaaattagaaattggaggttacaaagagtcagtgaaattgggttgcacatataataaatgtgaccatttaacccaattcaatacttttaacaaaaaaaaaaaaattttttttggcaagtgtggtagccagcctacaagatggccctcaatgagtctcacctctggctagacacccccacacacactgaattatgccttccctgtgtgaccaacagaatatggttgaaatgacatgaggaacttccaagggtaggttgtgaaagttatcgtagtttccaccgtggtcyctctctcgagttgctgtctctggaggaaatcaactattacggcacgaggacaatcaagttgccctatgaaaaattccacttgaggaactgagggatccagcaaacagctagcaccaacctgccatcca

SEQ ID NO: 517596 - DNA, 546 bp, Homo sapiens
gcctattaggccctaacaatgcatgttatcctggccctgttcctccaagggctccaccctgaagccaataatccaattaagaactggcaaataaaaaaacttgattccacttatatgaggtatctaaaatattcaaacacataaaagcagggagtgcagtagtggttgccagkggctggagggatggggaactgagaagttactaatcaatgagtataaggttttcgttattcaagatgattaggttctagacatctgctatacaacattgtgcctacagttaacaataatgcattgtatattttaaaatttgttaagaggacagatctcatgttaagtgttcttgccacataaacaataattttcatctagagtactggaggtgggagggacatggtgtgctacatgttatgatgtgagtgacacatggttccatgtgaacacacagaagaaacattttacctgaccttaaggcgttaggaaagttttcccagaggaaatgatgtctaagcagagacctgaataagtatgagcttgccagggtat

SEQ ID NO: 517597 - DNA, 490 bp, Homo sapiens
agctagaagtacttctttttctaaaatgttactttttaaatttctatatcagtcaggactttttaatttctcccagtcaggcattcaggacgttaggttatgccatgcttggagttatgccaactctaaaatctcagtggcttcaaacaataaacatttattttctgggtgcagcggctcacgcctgtaatcccagcactttgggaggccaaggcaggtggatcatgaggtcagaagatcgagatccatggtgaaaccctgtctctactaaaaatgcaaaaaattagctgggcatggtggcgggcgcctgtagtcccatctactcccgtggctgaggcaggagaatggtgtgaatcctggaggcrgagcttgcagtgagccgagagcacaccactgcactccagcctgggcaaaggaacaagactccatctcaaaaaaagacaaaagtttatttccttctcatactatatgtccattgaggatcagttaa

SEQ ID NO: 517598 - DNA, 416 bp, Homo sapiens
tttgggaaattcctagcagaggctcagtctataaaatgaatagcatttcagcaacttcccttattcacagtgcttggttattctctagggagacatacacaacacatctctagttaccaaacaattcagtgtgatataaacatggcaaaaagtcaatgaatttgagggcaaggtttccagcaatcgccccggccattgcttacttcttccatgccctttctaagttttcttcagccaggcagccatcccctctggtttctcccagaccccygctgcaggctccccgccatcacagaaagcccctcgctcacacgtcttggctcaagcaactctttgtcttagaaatgcagatcccaacatttccttttaaactcaggcaacttggcttttttctgctctgtgatcttgaaagtcgc

SEQ ID NO: 517599 - DNA, 469 bp, Homo sapiens
tggagatcggcctctgccagcagcaggaagtggctgtggccagggaggagacacaaatatataaaagacgggagcagaaagttaacttgcaaagaccctaggtgggcagtcacggggtggagggcagcgctgtgtcacgtagcctattactgtacggtgtgtaatgttcacaaaaatgcccttggccaagaatcaaggttgaatgacgctgagagtcctctgcaaaagattgtgagcaacattttggagtcatatctactagaaatgcttgcagttgacttggaaacttctgcaagtcacatggaatctgcattcaaatgaggcaaatgcactggcccagtggaaggttagaggcaaagaatccagccaaaggggtacaggagcgagcgtcagatgtaactgggttataataacagctttgttacartgtaattcaaatacgtacaattggccgggtgtggtgactcac

SEQ ID NO: 517600 - DNA, 676 bp, Homo sapiens
caatgacatggcaattaccttaaacaaacaagttcatattataatgcagattataagttatttttaccactaataacaattgctattttactatttactgattcatatagaagtatatacatttcaggttgaaacttatgaaatcactgatgttcaaccacttttaacctacaaaaacagtagtttcatatggttccaccagatagttctaaaaacttgagtggcaatactgggttatacctgtggaatatcctctctgatttagacaattatacttttctcttggccagtgattcccagccaaggggcaattttgcctgccaagggacatgtgacaatgtctggagacatttctctttgtcacagcttgggaatgctactggcatccagtgggaagaggccagggtgctgctaagacatcctacaatggatagaaaagctcccacaacaaaggatgattcagccccagatgccaatagcaccaaggttgagaagccctgctataggcaaattgtacagactaaatggccacatgtgtataggtgtcattgtggtttagagttctctccttttcattttcakctaggcctttatttgtgcttaacttttgcttgtaaataccttgtattttgttaactgtgatcctcagcagaggggaggctaatttaaaattagc

SEQ ID NO: 517601 - DNA, 368 bp, Homo sapiens
gtgtcgggggatacaggcagacccgggatttttaaaaaattttatttttgttattattatttggtattttcagcagagacgggktttcaccatgttggtcaggttggttttgaaccaccggtctcagcctcccaaagtgctggggttacaggtatgagccactgcacctggccagactcgggatcttgaaagatggcttttagcatttgctgaagagctagttgcagtaagaaatgtaaggaccactggccatgatgagtttagcacctctcttcctcacatatccatttttatgagttctgtgttctatatgagggcaagcaatccaattggacccagacccccttccctcccaaggagctgcgtgt

SEQ ID NO: 517602 - DNA, 564 bp, Homo sapiens
  misc_feature (1)...(564): n = A,T,C or G
aatgttcagtagagttttccccagcttttcttctagaaattttataatttcaagttttacatgtaagtgttcaatccatcttcagttaattgttgtatatggtgagagacagggatccagtttcgctcttctgcctatggttatccaattttcccagcactgttaattgaatagggagtcctttccccagtgtatatttttgtcatctttgttgaagatcagttggttgtatgtatgtaactttatttcygagttatttattctgttccattgatagaagtgagatcatttatgttaggttgccggtccctgaaccatttagcttgtaaggacaggctaatttcctctctctgcattcagatccttacttctttactgatagtccctactctgctctgagaggcccatctcaaccttctcctgnggcttcttgcttctcttgatagntttcttccctgcttgccgaatctcccccatctgcaggacagtgtgagctggctctcttcctgcactgcctcagcccccaagcctgactgccggcagagtctcactctggctgcactg

SEQ ID NO: 517603 - DNA, 564 bp, Homo sapiens
  misc_feature (1)...(564): n = A,T,C or G
aatgttcagtagagttttccccagcttttcttctagaaattttataatttcaagttttacatgtaagtgttcaatccatcttcagttaattgttgtatatggtgagagacagggatccagtttcgctcttctgcctatggttatccaattttcccagcactgttaattgaatagggagtcctttccccagtgtatatttttgtcatctttgttgaagatcagttggttgtatgtatgtaactttatttctgrgttatttattctgttccattgatagaagtgagatcatttatgttaggttgccggtccctgaaccatttagcttgtaaggacaggctaatttcctctctctgcattcagatccttacttctttactgatagtccctactctgctctgagaggcccatctcaaccttctcctgnggcttcttgcttctcttgatagntttcttccctgcttgccgaatctcccccatctgcaggacagtgtgagctggctctcttcctgcactgcctcagcccccaagcctgactgccggcagagtctcactctggctgcactg

SEQ ID NO: 517604 - DNA, 564 bp, Homo sapiens
  misc_feature (1)...(564): n = A,T,C or G
aatgttcagtagagttttccccagcttttcttctagaaattttataatttcaagttttacatgtaagtgttcaatccatcttcagttaattgttgtatatggtgagagacagggatccagtttcgctcttctgcctatggttatccaattttcccagcactgttaattgaatagggagtcctttccccagtgtatatttttgtcatctttgttgaagatcagttggttgtatgtatgtaactttatttctgagttatttattctgttccattgatagragtgagatcatttatgttaggttgccggtccctgaaccatttagcttgtaaggacaggctaatttcctctctctgcattcagatccttacttctttactgatagtccctactctgctctgagaggcccatctcaaccttctcctgnggcttcttgcttctcttgatagntttcttccctgcttgccgaatctcccccatctgcaggacagtgtgagctggctctcttcctgcactgcctcagcccccaagcctgactgccggcagagtctcactctggctgcactg

SEQ ID NO: 517605 - DNA, 634 bp, Homo sapiens
ctgctggctgtgctgtgtcatcactgctgggcgatttagcaaaatgctccccagaagatggtagaacacagcaaggaggggcccctgggaagcaaaagcaactctgaccccattaggtaagcctaaccaccagggaatagagaaaggaaatgaggcaatttcctgagggccctggacaaccagatgtgggtccctcagggaggcaaggaagagaagagtggactatagcatgggtgctgcagccatcgtacactggagtactctcgcaggtgttccaatttcatgaatcccattactctcccatccaaggactaaccaggcctgactctgtttagcttccaagatcagatgagacccggcacgttcagggtgatatgggcagtggaccaatttcatgaatccttgtattacatgcactcttctactgacccacacaatggtttttatccatgttcataactctacacataagagattcgattagacgggggcaaggctgtgtcattttctccatgcagttttgggcatttgagtcarccttgatggcctctggcttagttttgccattagctgcatcttcttatatgagttactgttagaattctgtttccttatctgtaaaatgggagtccta

SEQ ID NO: 517606 - DNA, 409 bp, Homo sapiens
ctgcacttaagcagccacatgctcactgagattgcatgaaaggaggcagagatccccgctttcaataaaaggagcatggaataatttacaggtggtttataaccttcacaccacatcatattaattatcttgataaaattaacctcatgaataatagatgtcaaaagagtggttcaccaattatttgctatttttcttaactcagactccatttcatgaaagtggatgtaatttaatrttttattttcaaggttatttccaacttttgtaagagctcctcttcttttctcaatactttcttcaattctttctcatatgagttttctttgtctaatgatatgttacagcacatattgtcatagaattattcctcttcttgggtggtagaaacactttggtcttttgttat

SEQ ID NO: 517607 - DNA, 612 bp, Homo sapiens
tgctagggagtgaggagtgaggatgcccctcccctccccttcccgccgcgtccctcctcctctcccccgcttttttcccctctttccctcccctcaaggaatggcgctccctctacctgttcctcaggccccctcctcccttctctttcgtccactgggaggggaaactggggtgtggtggtaacgggaactgaagggatgatggggtctgagggtacacatgggccgaggagtcgagtttgaggggtgtggatgggggccgacagggagagcagaggagactgaacagggagagaggattccgagctgaggaacgaaggggaaactgagagggcaaaaggatgacagaaagaaaggaaggytgaggagagaaggaaggcaggggaagagagagagggttaaggagctaaatggggggttgggtaatttgtccaagatccgagaagaaagaaggagagatgaagagaaaggacacatttgaggggccacacgggctgaagcagggaaatcgggcatcgagagagggacttttcaaatctcactatccagactgaataagagacggaaatttccttttcacacaatggctctgaaaaggaaaagcattagaga

SEQ ID NO: 517608 - DNA, 516 bp, Homo sapiens
  misc_feature (1)...(516): n = A,T,C or G
actgtatagggtaactgttaacttgttatccttcctaccaaactatgagctccccaagtgtggtaactgagtcccgtgtccctgacaccaggcacagtacncagcacatagtaggtgctcaaaaaaaawtttttttttgttaaattgaatttttttttttttttgagatggagtttcactctgttgcccaggctggagtgcagtggcgcaatctcggctcactgcaacctctgcctcccaggttcatgccattctcctgcctcagcctccggagtagctgggagtacaggcgcccgccaccacgcccggctagttttttgttgtttttttttttagtagagacggggtttcaccatgttagccaggatggtctcaatctcctgaccttgtgatccgcctgcctcggcctcccaaagtgctgggattacaagcgtgagccaccacgcctggcccagtctgaaaacttaaaagtgcaatgcaaatgtgtgtctgggtccctcatttggggggagcagc

SEQ ID NO: 517609 - DNA, 516 bp, Homo sapiens
  misc_feature (1)...(516): n = A,T,C or G
actgtatagggtaactgttaacttgttatccttcctaccaaactatgagctccccaagtgtggtaactgagtcccgtgtccctgacaccaggcacagtacncagcacatagtaggtgctcaaaaaaaaatttttttttgttaaattgaatttttttttttttttgagatggagtttcactctgttgcccaggctggagtgcagtggcgcaatctcggctcactgcaacctctgcctcccaggttcatgccattctyctgcctcagcctccggagtagctgggagtacaggcgcccgccaccacgcccggctagttttttgttgtttttttttttagtagagacggggtttcaccatgttagccaggatggtctcaatctcctgaccttgtgatccgcctgcctcggcctcccaaagtgctgggattacaagcgtgagccaccacgcctggcccagtctgaaaacttaaaagtgcaatgcaaatgtgtgtctgggtccctcatttggggggagcagc

SEQ ID NO: 517610 - DNA, 501 bp, Homo sapiens
caggttgataaccaagtctgatatttcagataataatcagtattcttttaatgaccagaaaagatttggaggaaatatatggaaagaatgtatagagaaacaaaacattcaacttgcaaaagaaaaaaaacaaaaaacaaaatctatcacctccaccaaaaatgaaataattctccatttgtgtttcaaagacaatgagacatttaatccagtagatatcaacttttaaggacctttgtttttttcccccattttattttaattgtatcggtcccttagcaaaacccactatcattatagatgacaactgggatcatagaattctagagttcagtgggaacttggagattttccttccttccatgatattgctgtatattggctttccctccacccctacatagttcttagtcttctgggcaggctcttctttccctatccrtccttagatattgataattcagtccttcatgttctcactcttcccaggtgatcttactc

SEQ ID NO: 517611 - DNA, 531 bp, Homo sapiens
atgtgatcagacctctgcctcagcaaaatctcaaattattacaggtcaggagccttctgcaaaaggggagggcatgaggctcaggaagagtcacaatcacgaatcttcaatctagaaggttaagcatttagtggaggtagggagatttctttcttaccataaggggaaaagcggcacatcatctaaatcctgacagaaataataaataatgcaatatttccatttagtcaatattgttaaagatcataaaagggaagaaggcaagacctggtgggtaggtcatcttaaaaggattaggaaaygttttgcaagtggttcagagcaacctacagagaagaagacagctaaggttgcattaggccagggtttctcaaccttggcactgttgacccttgggcccacatgatcctttgctgtggaagttgtcctgggcattgtaggatacttagcagtatccctgccctctacttcccagatgccagtagcatacccccaaccccacatatgaccatgaaaaatgtctccagacat

SEQ ID NO: 517612 - DNA, 531 bp, Homo sapiens
atgtgatcagacctctgcctcagcaaaatctcaaattattacaggtcaggagccttctgcaaaaggggagggcatgaggctcaggaagagtcacaatcacgaatcttcaatctagaaggttaagcatttagtggaggtagggagatttctttcttaccataaggggaaaagcggcacatcatctaaatcctgacagaaataataaataatgcaatatttccatttagtcaatattgttaaagatcataaaagggaagaaggcaagacctggtgggtaggtcatcttaaaaggattaggaaatgttttgcaagtggwtcagagcaacctacagagaagaagacagctaaggttgcattaggccagggtttctcaaccttggcactgttgacccttgggcccacatgatcctttgctgtggaagttgtcctgggcattgtaggatacttagcagtatccctgccctctacttcccagatgccagtagcatacccccaaccccacatatgaccatgaaaaatgtctccagacat

SEQ ID NO: 517613 - DNA, 506 bp, Homo sapiens
agcatttagtggaggtagggagatttctttcttaccataaggggaaaagcggcacatcatctaaatcctgacagaaataataaataatgcaatatttccatttagtcaatattgttaaagatcataaaagggaagaaggcaagacctggtgggtaggtcatcttaaaaggattaggaaatgttttgcaagtggttcagagcaacctacagagaagaagacagctaaggttgcattaggccagggtttctcaaccttggcactgttgacccttgggcccacatgatcctttgctgtggaagttgtcctgggcattgtaggatacttagcagtatccctgccctctacttcccagatgccagtagcatacccccaaccccacatatgaccatgaaaaatgtctccagacattgctaaatgttccctgagggamaaaatctcccctggttgagaaccaccacattaggcaactaatgatctcacattttgggagagtggctggaccaaa

SEQ ID NO: 517614 - DNA, 604 bp, Homo sapiens
tttagtccattctatttcctactttatactctgatatcaagaagaatggctacacaataatttggtccatttaagaaataaggtggcactatccttaagatgttaaagatgctgtcttgttataaagtatttttaatatctgcacaaattctattactactcatatcaaaatataggtatgtaatattttgccagtttttttttcctgaagaccaaagctgtcatttgagttatgtcttcaaatgtcttgtttcctttaaactatatttataaagtatgccgagaaagaaagatttgaagactttaatgtgtttccatagctaaaggatttagttgagaaggcaggatgaggggccgcaggtgccagacattgtgtagaatttgcacttatgctccattaattgccagcatatcttcctctcccttttcctcccctccccacygactaaatccctctggaaaacagcagagcagcaggcccagactggtacccagcagcaacaccaggagcagaagtagccaattaccctccagaatacaaagtggaatggggggtgggggggggggtaaatgatgcagttacctagcaaccagaaagagcagg

SEQ ID NO: 517615 - DNA, 465 bp, Homo sapiens
tgccttcttggaagtcaccccatagtgactggtggtagcgcagttttctttgtgacagatcccaaacatatgcagtgcaatgaacagacataccatactttaagcaaatcataagtacagatgtttaaaaatccatatttttcagaaaactagagaaggcttattttctttgtaaaaatgttgctttgctttgcttcacagaatgatccctctcccaaagtgtttctgagactgaggtggtctgggatgaccctgagagagcctgttaaaatgcagatgtccaagccccaccctgcagagggtatgattcaggtttggggtgaaaytcagaaaactgaatttttttaaaaacacccttgatgattctgatgcaggtggtcttggcccacacattaagaaacattgcacatagtgggtttctgcatgcatttaaacagaagtccatttctgtttggaaaattatta

SEQ ID NO: 517616 - DNA, 427 bp, Homo sapiens
  misc_feature (1)...(427): n = A,T,C or G
gctgaacatgaggtctttcagatgaaaaaaacatgagaggagatcccaagtctctttttaagaagaaggctgnntatacccaagaatcctgggcaaatttctactaggctcttggtgtatcttaaatccccagaatcgtcacattaattccttattgatcattttctgagtaataagtactgttaatgcactantgtgcatttttacttcaccccccaagttgtctgcaattttttaatrtacaaagattcctgaatatgacttacaaatcaataaattcccctaccaaaaaaaatcatgtaacagataccatatgatgaaactaattccttgaacatttctgaaggaagtagttgaaacatatatttcactcaatctttaagttttctttattaatcattccaaatttactagtgatttgctttgt

SEQ ID NO: 517617 - DNA, 550 bp, Homo sapiens
gtgaccccaaacaggggaggacatacctcagtaagtcatagcacagctctctctaaaggaattctcaaaaattccattccaactagtgaactacctcccttgtaagtggatttgacagtcttgtcatttttgaggaggagccattttctttttaaatgacagaggtgttctgccacctcctttggaaggtacctgagggtaaacttctgtttttcataccctgttacgcttatttcgtgtgaccttctgtaggaaggatgtttggttgaatccataaacacgcatggagctctgtgttctgggccccagggaagctggaagtatcaaagctggtgcctctatagcttttggtctagtagggaaagggaacactgaacactttgccttcctctcaattaaccagcttagacaagacgatctggcaggaaatgatttgaacccgtggcagagcccaagacctttacatttctttcttttttgaacasggaaagtgggcacacctcagaaattttctcagtaactgaaagagaagtaggatcatcaggttttg

SEQ ID NO: 517618 - DNA, 462 bp, Homo sapiens
aattactggccaaagatacatgtttttattaatgcaaatcagcatgtcacactgaattatataaacatatagtgtgtatattaaacaaattaagtcatgaccttacaatcaggtcatatggtggtctgtacttaattatttttatattttattaacaggaagtgtgtaattaagcacggatggctcttcccacccctttcctttttacatatgtctgtyctgtcttctcacatttctggactgacttaaacttgtcagccagaaagatggatgtcattcaggtattggcaggaagagatgcttctgtaaatagtctctttcacatctgggtgttcagttttcctgctggggctgagagaatctgatgagctttgggtatttctttccacagccgggactgatccagcctgtgcctcctctctggcgtaacctcatcctgtccttcctcattttaacacccaa

SEQ ID NO: 517619 - DNA, 462 bp, Homo sapiens
aattactggccaaagatacatgtttttattaatgcaaatcagcatgtcacactgaattatataaacatatagtgtgtatattaaacaaattaagtcatgaccttacaatcaggtcatatggtggtctgtacttaattatttttatattttattaacaggaagtgtgtaattaagcacggatggctcttcccacccctttcctttttacatatgtctgttctgtcttctcacatttctggactgacttaaacttgtcagccagaaagatggatgtcattcaggtattggcaggaagagatgcktctgtaaatagtctctttcacatctgggtgttcagttttcctgctggggctgagagaatctgatgagctttgggtatttctttccacagccgggactgatccagcctgtgcctcctctctggcgtaacctcatcctgtccttcctcattttaacacccaa

SEQ ID NO: 517620 - DNA, 162 bp, Homo sapiens
ataattaaacaatgacaacccaatgtttgaagagaaaacagaaaattactgaactatctaattgtctttcctatgwtattagatacattctttagaagtaaagcaattgacaactatagtttctgtccctatttttattgaagtatggcatagaagatcatt

SEQ ID NO: 517621 - DNA, 552 bp, Homo sapiens
agttataacttagtggtcgaacattggtttattaactgggcactgtgtataatccctgacataggacaccttgatttatataaaatgaatgcacagtacacataaaattaattgaactccatcaatcatggatttgtgacaattcagrttccaatcctccgtgttttcttaaaagcaaaataggtcttcctttttttcctcacgtaatctgtaagagttcatctatcttttaaactgaaaacatgcgcagaaaaagtgctttgagtattctgaggacaagccagtttcagcacagtgtttctttaaggcttgtgctctggtggggtttgataaggattcctaaacatgtttctttctttctttttattttatttttggcaaatgtcctaggctaaacatttgcttacataagagggatgggtataatatctatgtacatatttatttttatatatatggaatatttatggaaagatatataacaaacttaaaatatatgttgcctccaaaaaagagaaatgggttgcctaaagacgggaataagaagaaaac

SEQ ID NO: 517622 - DNA, 643 bp, Homo sapiens
agcacctgtcttcggtaccattcccaaagcatttatcccacaatatctttcattgtgggtgactcrtgtgtgctttaatgaatgatcagatagtgcccccactggatggaaagcttctgaagggggagaaataaaggcccacttttttagaaatctcagcatgtctcccagcaaatagcacagtgcttctcacagcaggtgctcaataagtgtctgttaaaggaatgaatgaagacataaatgtacgagaaacagtatatttaaattcttgcaacagaattcctcttttcacccatggttacctatgtattttgatacttgaacacattcttatacacacatcctatataaatatacaaaccgagggctcccttgggctatctcctcagacgtgtgagtctgtgagtgtggcctgcacatcagcatgcccaggcagaaggaaaaacaagcaggcactcccaactggggaagtcatttgcagctcttcccattattactggctgaatctctttatttaaaacaaacaaagagctggaagaagcaactcatgtggccagctattagcaagttcaattatcaaaacacagacctggtctttaaacctataaaacagcaaaccctaaaagtctgctcctgaccttta

SEQ ID NO: 517623 - DNA, 643 bp, Homo sapiens
agcacctgtcttcggtaccattcccaaagcatttatcccacaatatctttcattgtgggtgactcatgtgygctttaatgaatgatcagatagtgcccccactggatggaaagcttctgaagggggagaaataaaggcccacttttttagaaatctcagcatgtctcccagcaaatagcacagtgcttctcacagcaggtgctcaataagtgtctgttaaaggaatgaatgaagacataaatgtacgagaaacagtatatttaaattcttgcaacagaattcctcttttcacccatggttacctatgtattttgatacttgaacacattcttatacacacatcctatataaatatacaaaccgagggctcccttgggctatctcctcagacgtgtgagtctgtgagtgtggcctgcacatcagcatgcccaggcagaaggaaaaacaagcaggcactcccaactggggaagtcatttgcagctcttcccattattactggctgaatctctttatttaaaacaaacaaagagctggaagaagcaactcatgtggccagctattagcaagttcaattatcaaaacacagacctggtctttaaacctataaaacagcaaaccctaaaagtctgctcctgaccttta

SEQ ID NO: 517624 - DNA, 643 bp, Homo sapiens
agcacctgtcttcggtaccattcccaaagcatttatcccacaatatctttcattgtgggtgactcatgtgtgctttaatgaatgatcagatagtgcccccactggatggaaagcttctgaagggggagaaataaaggcccactttttwagaaatctcagcatgtctcccagcaaatagcacagtgcttctcacagcaggtgctcaataagtgtctgttaaaggaatgaatgaagacataaatgtacgagaaacagtatatttaaattcttgcaacagaattcctcttttcacccatggttacctatgtattttgatacttgaacacattcttatacacacatcctatataaatatacaaaccgagggctcccttgggctatctcctcagacgtgtgagtctgtgagtgtggcctgcacatcagcatgcccaggcagaaggaaaaacaagcaggcactcccaactggggaagtcatttgcagctcttcccattattactggctgaatctctttatttaaaacaaacaaagagctggaagaagcaactcatgtggccagctattagcaagttcaattatcaaaacacagacctggtctttaaacctataaaacagcaaaccctaaaagtctgctcctgaccttta

SEQ ID NO: 517625 - DNA, 643 bp, Homo sapiens
agcacctgtcttcggtaccattcccaaagcatttatcccacaatatctttcattgtgggtgactcatgtgtgctttaatgaatgatcagatagtgcccccactggatggaaagcttctgaagggggagaaataaaggcccacttttttagaaatctcagcatgtctcccagcaaatagcacagtgcttctcacagcaggtgctcaataagtgtctgttaaaggaatgaatgaagacataaatgtacgagaaacagtatatttaaattcttgcaacagaattcctcttttcacccatggttacctatgtattttgatacttgaacacattcttatacacacatcctatataaatatacaaaccgagggctcccttgggctatctcctcagacgtgtgagtctgtgagtgtggcctgcacatcagcatgcccaggcagaaggaaaaacaagcaggcactcccaactggggaagtcatttgcagctcttcccattattactggctgaatctctttatttaaaacaaacaaagagctggaagaagcaactcatgtggccagctattagcaagttcarttatcaaaacacagacctggtctttaaacctataaaacagcaaaccctaaaagtctgctcctgaccttta

SEQ ID NO: 517626 - DNA, 475 bp, Homo sapiens
ttaaacagaaaaggctgctgggccttggcatgtattttgcaatggtttgtggtgtgagggatgtttggagcaattgtaaacaggaactgctatgtccttattaggaataatcacttctccaggcaaagaagtggctgttgaggcttttaaacacgttttgtgcttaaggtttcctctctccctcctagcccaagcctattctccccattcctcctgtaggaactcattgaagctgtactgcrtggttgctctttgtgattgctgcttggcagaacccaagaaaagaaacatccagggactccatctggctggattcaccttgatcctaactgctcacaagagctgtttattcccccaacactgagcctagtatacctctcctttctacagagtgcccctaagagctatccagcaggcctggcaaattttgccaaagacagaacactgggcaggacttcagggggtggggatgggt

SEQ ID NO: 517627 - DNA, 475 bp, Homo sapiens
ttaaacagaaaaggctgctgggccttggcatgtattttgcaatggtttgtggtgtgagggatgtttggagcaattgtaaacaggaactgctatgtccttattaggaataatcacttctccaggcaaagaagtggctgttgaggcttttaaacacgttttgtgcttaaggtttcctctctccctcctagcccaagcctattctccccattcctcctgtaggaactcattgaagctgtactgcgtggttgctctttgtgattgctgcttggcagaacccaagaaaagaaacatccagggactccatctggstggattcaccttgatcctaactgctcacaagagctgtttattcccccaacactgagcctagtatacctctcctttctacagagtgcccctaagagctatccagcaggcctggcaaattttgccaaagacagaacactgggcaggacttcagggggtggggatgggt

SEQ ID NO: 517628 - DNA, 528 bp, Homo sapiens
taaattatattcatcattttttcttttgattttatgataagttaaaacatgtttatgggcccttaaaaggattgtggggtcctggccctgggctggtggtatctggtggatgtcagcctrgggctaggacacagctcagagagggactgtggtgaaggggctcaagatctttcccacaaacattccactgtggtagccttccatttccaatatttgagagattagggatttcgcatataaaaccaatgactgacatttcttgttcaccagcaggagataagcatatggcagtggttaagaacatggttcttgcagccaatcagactttgaagtgaattccagctctgccactcactacctatgtgaccttgggcaatcatttaacctctctgagcctcagtttcctcacctatagaatggggaaaacaatacatacctcatagcattgtgagaattgaaggagggaatgaacgtaaaatggcttagcgcagtgcctggctcttcagggaagcatgcgctaagtagcag

SEQ ID NO: 517629 - DNA, 528 bp, Homo sapiens
taaattatattcatcattttttcttttgattttatgataagttaaaacatgtttatgggcccttaaaaggattgtggggtcctggccctgggctggtggtatctggtggatgtcagcctagggctaggacacagctcagagagggactgtggtgaaggggctcaagatctttcccacaaacattccactgtggtagccttccatttccaatatttgagagattagggatttcgcatataaaaccaatgactgacatttcttgttcaccagcaggagataagcatatggcagtggttaagaacatggttcttgcagccaatcagactttgaagtgaattccagctctgccactcactacctatgtgaccttkggcaatcatttaacctctctgagcctcagtttcctcacctatagaatggggaaaacaatacatacctcatagcattgtgagaattgaaggagggaatgaacgtaaaatggcttagcgcagtgcctggctcttcagggaagcatgcgctaagtagcag

SEQ ID NO: 517630 - DNA, 574 bp, Homo sapiens
gtggcactgtaaaatagtatatgttaasaaacaaaatatagcaaaatttattataattacaaatgaacaaagcatttggctctcttctagggatttatcttaaaatacactctcatctgttaaatgatgcatgaatgatgaaattcattgcagtgttattttaaataataaaagactggcaacaacttaagtgtccatcaataggtgactagttaaattatgatacatttatacaagaaaacatttttcagcttaaaacagaatgagaattctttttatgtactgacagaaagattttaaaaatatattaagtgaaaaaaagcaaagtacaaaatagtgcatagagtatgccatcttttgcaggacaaagtggggaaatagtgatatgcatttacttgtatatataaaatagctctgcaaggatacacaaaaaactagcagtgttaaagtcttgagcaaaagagtggctgagagacagatgtgaaggagctatttttacctattttctttcaaactttctaagttttaaacaggtcaatgtattacttcaaaaaaaataggcaacttatttttg

SEQ ID NO: 517631 - DNA, 638 bp, Homo sapiens
gctgcctgacatttaatagtggaacgcatattctcttgtgaacaaagacgaagcaattcgaccacttttgaatgtcaaagacatactaggttcctaactgactctcttaaacctttgttaattcttttcacatatgagaaaacccttaggtttcaatggaaaaaataaacattttattctcacatgatttcaaagactattgtaacaggatagtttgctctaaagctcgtgtcccagatggaaggcattgttgcaagaacattttacccgactgtcctgatcctagaacttgtagaatgcctgtacttctttctgtttcaccaaacttccctgattgtctggctcctctctttcggcataggttcctgggctcccgtctaactcttagtctcatttcccatggtccctctcttttcctgyggtttatcactcctttcatttcccacaatctctctctcataactggacttggaatacataatttagaaaaatatatacgtagaaaataaaaatgttatttagaaaaataaaactatttcttgctatattttatgatcttaaatttaaaggcttgttcagttccatatttctaaaaactagaaataatttacttgccaattatttaacttaatttttaa

SEQ ID NO: 517632 - DNA, 590 bp, Homo sapiens
cttgagaaagaaggaaatacagatttatgggaaagggacctggaaaatctcaaacagacacatctttattgcaaccgtctgagtctgtgggagagagaacagggcccagaaggatcagctctgaatttgctccaactctagacttcactcccttctttccaagctccccactcaggccaatattttaatctttcaatctctctccctccctcatcatcccctgtttattcaccttttccattccctcgtctcattttctcattctttctgattgccccgctctctcgcactcatatcccctcgcgtatcatctttctgttggagcctgcactcatggcctccttccacgagcarcaggtttgaatcagctccagttgaaaatgaaggcaggaggtgggggtggagtgaggccaggaggggaatagccactttctgatggccaatgtacagtaagcacagccctccaccctgcctccaggctggtccctgctgtcgctgtctctctgcccggaccccccaccacacacaggtatgtacaagagaaaacctaataatcccctgcaaggaagaggcccccatccccaataagg

SEQ ID NO: 517633 - DNA, 590 bp, Homo sapiens
cttgagaaagaaggaaatacagatttatgggaaagggacctggaaaatctcaaacagacacatctttattgcaaccgtctgagtctgtgggagagagaacagggcccagaaggatcagctctgaatttgctccaactctagacttcactcccttctttccaagctccccactcaggccaatattttaatctttcaatctctctccctccctcatcatcccctgtttattcaccttttccattccctcgtctcattttctcattctttctgattgccccgctctctcgcactcatatcccctcgcgtatcatctttctgttggagcctgcactcatggcctccttccacgagcagcaggtttgaatcagctccagttgaaaatgaaggcaggaggtgggggtggagtgaggccaggaggggaatagccactttctgatggccaatgtacagtaagcacagccctccaccytgcctccaggctggtccctgctgtcgctgtctctctgcccggaccccccaccacacacaggtatgtacaagagaaaacctaataatcccctgcaaggaagaggcccccatccccaataagg

SEQ ID NO: 517634 - DNA, 590 bp, Homo sapiens
cttgagaaagaaggaaatacagatttatgggaaagggacctggaaaatctcaaacagacacatctttattgcaaccgtctgagtctgtgggagagagaacagggcccagaaggatcagctctgaatttgctccaactctagacttcactcccttctttccaagctccccactcaggccaatattttaatctttcaatctctctccctccctcatcatcccctgtttattcaccttttccattccctcgtctcattttctcattctttctgattgccccgctctctcgcactcatatcccctcgcgtatcatctttctgttggagcctgcactcatggcctccttccacgagcagcaggtttgaatcagctccagttgaaaatgaaggcaggaggtgggggtggagtgaggccaggaggggaatagccactttctgatggccaatgtacagtaagcacagccctccaccctgcctccaggctggtccctgctgtcgctgtctctctgcccggaccccccaccacacacaggtatgtacaagagaaracctaataatcccctgcaaggaagaggcccccatccccaataagg

SEQ ID NO: 517635 - DNA, 590 bp, Homo sapiens
cttgagaaagaaggaaatacagatttatgggaaagggacctggaaaatctcaaacagacacatctttattgcaaccgtctgagtctgtgggagagagaacagggcccagaaggatcagctctgaatttgctccaactctagacttcactcccttctttccaagctccccactcaggccaatattttaatctttcaatctctctccctccctcatcatcccctgtttattcaccttttccattccctcgtctcattttctcattctttctgattgccccgctctctcgcactcatatcccctcgcgtatcatctttctgttggagcctgcactcatggcctccttccacgagcagcaggtttgaatcagctccagttgaaaatgaaggcaggaggtgggggtggagtgaggccaggaggggaatagccactttctgatggccaatgtacagtaagcacagccctccaccctgcctccaggctggtccctgctgtcgctgtctctctgcccggaccccccaccacacacaggtatgtacaagagaaaacctaataatcccctgcarggaagaggcccccatccccaataagg

SEQ ID NO: 517636 - DNA, 615 bp, Homo sapiens
  misc_feature (1)...(615): n = A,T,C or G
tgtgaagtcagagaaggataagtcatgggagctaagatgatataatacatgataataatgtcaatccatttctaagcgtttaccatctgctatatgctgtgctacattctttaaatagtatctcattatttcctaagtcaacttttaacattctatgatgctaaggaggaaatacagttcaaaattcttatgtcaaactacacgaagcaataaaataaattagtgttaagtgttgttcagaattacagggaaagaagaagtagcacttatgtctcaggaacgatccagttaagaatagagaagctcaaatctcattagaagaagaaaaagaaatgatagtaagttggtgaaagtcccttgttgataatcacaactttcccctctttatttctgtaaatcatggctcattccttcttctattccttcagataaatttctgttgaacacctataatgtgggaggtttcaatgctatcggtgtagaaccaagggaaaagacaatgatttttaagttgtggatatctttgtgactcataaactgagaaaataaaatatatatttttataagaaataaagaaaagttggtcaaatgrtatttctagttctagncattgag

SEQ ID NO: 517637 - DNA, 586 bp, Homo sapiens
cttgactccaagggctttcacacttacccctctgctctactgttatcccttttagaactaacaaactaaagaaaatagaaggagaattgctccttaaaaaaaaaccaatatgtggccagatgtggtggctcacgactgtaatcctagccctttgggaggccgagacaggcagctctcttgatcccaggagttcaagaccagcctgggcaacgtggtgaaaccccatttctacaaaacatacaaaaattagccagtttggtgttgcatgcctgtagtcccagctactcggggggctgaggtgggaggatcacctgagcctgagaggtcaaggctgcagtgagccaagcctgcaccatggcactccagcttgagtgacacagtgagaccctgtctcaaaaaaaaaaaaaaagtaaataaaataattaaaaagcaagatatgatactcttctagtccttgaagaactaccggagctatcatatactgataaaatgcagaaacagttttctggagttgaaygtaggaaagggaacccttaagcaggcatagtctgcctaagaagctagagaaatatacaccacaatttta

SEQ ID NO: 517638 - DNA, 611 bp, Homo sapiens
tggcagtggccagggtcagacaaaagtggtggggattctggtgagctgaagactacatatccttcccaaaagcattaaattcaagatgctgaaacatggtaacaactgtagtatcccttttagctctaacattctgtgcttttgagttttcaaataaaatgaacatgtayttattaggcagctgcgatgtaaaaccctgttatgacttcagagggacaacagaaacgtatgagcaatgtcttctgcctttgaagcatacagtccagctaaagaaatgaaactgggcaacaagataaagaggccagttcttcaagcaacacagggaaagcacactaattatttaagaaaaatggatttgtccctctaaaaagcagtgggctgtgtcagcaagtgctatagtcattttcggaatggctactagcctctagcatgagggaatgaggaaaggcctcactgaaatagtagagcttaagcccacacttcaggtgtagagtctagattggaatagtatggggttataagcagaatgtttaacttctgggagaccctttataagcactattaagaagtctggctttagtttgtttgtttcttagtttttgttaatggag

SEQ ID NO: 517639 - DNA, 465 bp, Homo sapiens
accattacaattagacctagaagatggcatagtcctacctcttgtgtcattcattcatgcaatagctattattgagcacctacaatgtgccgggcacagttctaagttacaagcacacagtagtaaacaagaaaaagtgattgcctactagattttacaaagatttgcccatagtttatagatgtaggatccrtatctttcttttttattttttaaataatatatacttttaattttttttccaaaacacactaattgtatatatttatggagtacaatgtgatgtttggacacatgtatacattatgtaatcaaggtaattagcatacccgtcacctcaaacatttatcatttctttgtaatgggaacatacaaaatgctctctcctagctatttcaagatatataataccttattgttgcctatagtcactctactgtgcaataggacaccagaacctatctt

SEQ ID NO: 517640 - DNA, 538 bp, Homo sapiens
ttgtgttcatgtttctcatctcttgattcaactacttagaatatagcctaaaggaagcagatggtaagtgagtgaataaagacctgaattctagttccataattatttagctaagtcccagagattggttggtagagtaggcttttttttttttctcccagagatagtatatatgaatcctctccaaggytgctaatactaatgataatcttcactatacaactctgtttaaacaaagcgcatatttctggaaaaattaccagggtatttttgtcattttgcaatgaaaataaataagatcattccacttccacaattgaaaggatgtcagaggttatgaggaaagtcaaacagaagtttgaaattttatttcaagaattaccatatagtaatttttagtcaatccatactctcagatgacttgtggcacctgtttatatcaaccaaggtagagcagatggagttactacaggtgaggctgaatttgggaaacaggaaaatgccacaagatttatgcactgacagatctgaaattgaa

SEQ ID NO: 517641 - DNA, 538 bp, Homo sapiens
ttgtgttcatgtttctcatctcttgattcaactacttagaatatagcctaaaggaagcagatggtaagtgagtgaataaagacctgaattctagttccataattatttagctaagtcccagagattggttggtagagtaggcttttttttttttctcccagagatagtatatatgaatcctctccaaggttgctaatactaatgataatcttcactatacaactctgtttaaacaaagcgcatatttctggaaaaattaccagggtatttttgtcattttgcaatgaaaataaataagatcattccacttccacaattgaaaggatgtcagaggttatgaggaaagtcaaacagaagtttgaaattttatttcaagaattaccatatagtaatttttagycaatccatactctcagatgacttgtggcacctgtttatatcaaccaaggtagagcagatggagttactacaggtgaggctgaatttgggaaacaggaaaatgccacaagatttatgcactgacagatctgaaattgaa

SEQ ID NO: 517642 - DNA, 659 bp, Homo sapiens
gatcttttatgttgtgttcatgtttctcatctcttgattcaactacttagaatatagcctaaaggaagcagatggtaagtgagtgaataaagacctgaattctagttccataattatttagctaagtcccagagattggttggtagagtaggcttttttttttttctcccagagatagtatatatgaatcctctccaaggttgctaatactaatgataatcttcactatacaactctgtttaaacaaagcgcatatttctggaaaaattaccagggtatttttgtcattttgcaatgaaaataaataagatcattccacttccacaattgaaaggatgtcagaggttatgaggaaagtcaaacagaagtttgaaattttatttcaagaattaccatatagtaatttttagtcaatccatactctcagatgacttgtggcacctgtttatatcawccaaggtagagcagatggagttactacaggtgaggctgaatttgggaaacaggaaaatgccacaagatttatgcactgacagatctgaaattgaatcatatgaaatttcaatatttgagtttctgactttcaaaatgacaatttcattttgtttaacccaacattaatggctaatatttattaagcagtaagggttttatatgta

SEQ ID NO: 517643 - DNA, 612 bp, Homo sapiens
ttcttgttcatatgtggaagttaaaaaaagttggtctcataaaagtaaaaactagaacagagagtaccagaggctgtgaagggtagaaggaagggaagaatagggggaaatttgttaaaggatagaaaattatagctagataaagggaataaattctacttctataccactgtaagatgtctatattcaaaactaatatatagtttccaatagctataaggaggatattgaacattctaatccaaagaataatgaatacttgagatgatgaatatgctaattatcctaatcatattgtattagggttctctagagggatagaatagggtaggtatatgaaggatataccctatctctaatatgtaccctatctctaatagagtagatatataaaggagtttattataaaatatgaacttatatgatcacaaagtcccacaataggctgtctgcaagcttgaggagcaggagtgccagtccragtcttaaaattgaagaattcggagtctgatgttcgagggcagaaagcatccagcaagggagaaagatgtaggctgggaggctgggccagtcttgcattttcatgtttttctgcctgctttatatttggtg

SEQ ID NO: 517644 - DNA, 617 bp, Homo sapiens
ggaacaaattttcttattttagtgtgttagggaaaacttggcatttgagcagaggtgtgaagaaatcagaggaactaaccatgcagatatttgtagaaggatcactcaagatagaaggagtaggcctcgagtacacagaggatgctatagctaagtagagtgagagaaggagagaaagagatcagagttgatgtcagggtctaggtctgagtgagatgagaagtccatgctttctgttttaaaggggtttttaagtaagaatgatataacttgttttaaaagactcctgacttctctatgccattttggggcaaaattgatagaagagagatgtactaggaagccattacagttaatcaggcaagagacaatggtggctgggactagtccccacragtagcagtggaggtgaggaagtggtcaaatatctagatgcattcagaagtataattttggggtgtacaagaaaggcttggccaaggaagattctaacatttttagttaactagatgagtggagttgccattttatcagatactgatgaagagagtttaaaggaagaaaccaggaatttggttttatatatgattaagtcaagatatctattagaaatccag

SEQ ID NO: 517645 - DNA, 669 bp, Homo sapiens
gggataaaaatttaatcccacaactaaataataggaaactgttaaaatatttacagtaaaatctgccaacttcccaggacaaatctcttcataaaacacatttacccaagarcacatcatgctctggggaaataaaatacacattgccgctttggtattgtctttctaaagtccttatattaaaaaatacaaaaaacaataataaatggcaatgtcctttctctctgtctttcctcctgctgcttaaaagaaagagaaaccaatgtttattgagtacccacatggtagtgaaaagataattggattgggagttaggagacgtgatttttgtcctggctaagtcactgtgtgaccttgggcgagtcacttctcaaatccaaacccccattttcttgtctgtatagtgaggaaattggtctagatcccttgcagctctaatgtgttatgccttttgaataataagaaagcctctccccaaagtgttggccttagtctttttttctttttatcacatgctatggttcaagtaatgcttgttactaagatgcatgctactgctcacacagcctcctaaatggagaaaatgtttctctggtgcagatgttggctaaagtatcccttcttctgtcccaaaccaggagaagaggtattaattaattctttgaattg

SEQ ID NO: 517646 - DNA, 478 bp, Homo sapiens
tgcagcaataacaagaaacttctgctatatggcatttcctttggtaattgctatggtctaaatgtgtcccccgaaatttatgtgttggggtcctggccctcaaaatcatgttaggagatggagcctttgggatatgatyagataatgagggcacatgggattagtgtccttataaaagaggccgaagggagcttgcttgcccttttcaccatgtgaggacacagcaaggggtgccttctacaaggaaccgtccctcaccagacaccagatctgtcagtgccttgatcttgaacttcccagcgtccatagctttgagaaataaattgctattgtttataagctaccagtttatgttattttattatagcagtccaaataaactaagacaataataaatcatctagaaaaagtataccccctaccaacagacaaaaatttcacagagtactttaaagaacttgtttccttcttttgtgat

SEQ ID NO: 517647 - DNA, 619 bp, Homo sapiens
gtgtccaagtttctgatctatatgaaccaatgaatgctaagtatcaaacaacctctagtgttggaaattcatcattttctttaacaattcttagtctttggacagatttcagtattatttactgatgcaggaaaacggagaagagttcagagagaacaggaaatgagctctatctgagattgctgagtttgagattaatctgagatatccagatggagagacatagygtataggtggaaaatcagaccaaaaggtcttaccaggaaccttagatttggaaattgtcaacacatatgcagtagttaagtgatgagaataaatgagatcaataagaaaatgttggccaggcgtggtggttcatgcctgtaatgccagcactttgggaggccaaggtgggcggatcgcttgaggccaggagttcaagaccagactggccaacacagtgaaactccgtcactaccaaaaaatacaaaaattagccggtgtggtggcgcacgcctgtagtcccagctactcacacgcctgtagtcccagctactcaggaggctgaggcaggagaatcgcttgaacctgggaagtggaagttgtagtgagctgggattgcaccactgccctccag

SEQ ID NO: 517648 - DNA, 619 bp, Homo sapiens
gtgtccaagtttctgatctatatgaaccaatgaatgctaagtatcaaacaacctctagtgttggaaattcatcattttctttaacaattcttagtctttggacagatttcagtattatttactgatgcaggaaaacggagaagagttcagagagaacaggaaatgagctctatctgagattgctgagtttgagattaatctgagatatccagatggagagacatagcgtataggtggaaaatcagaccaaaaggtcttaccaggaaccttagatttggaaattgtcaacacatatgcagtagttaagtgatgagaataaatgagatcaataagaaaatgttggccaggcgtggtggttcatgcctgtaatgccagcactttgggaggccaaggtgggcggatcgcttgaggccaggagttcaagaccagactggccaacacagtgaaactccgtcactaccaaaaaatacaaaaattagccggtgtggtggcgcacgcctgtagtcccagctactcacacgcctgtagtcccagctactcrggaggctgaggcaggagaatcgcttgaacctgggaagtggaagttgtagtgagctgggattgcaccactgccctccag

SEQ ID NO: 517649 - DNA, 391 bp, Homo sapiens
ggtaagagagacatatcgagaacaggctgctggggaacaccaatatttcaaggaaaggctgaggaagaggagccagcaaggaggctttaaagaaagtatcatagaaataaggagagaaccacagatactgtttcataagcctaggagtggagggaaattgagttggaaagaaagggagtggtcacctacatcaaatgtgagggatatcaaacaaaattaaggataaataaaatccactaaagaatttratctacctatcaggcagttcaaagaaagataatttaataaagggtccatctaaaatttgaatgccctcaaaataatgctgtcttgggaactgtccagttgcacttttatgaacactcccagtgttaaaactttaccacttaat

SEQ ID NO: 517650 - DNA, 628 bp, Homo sapiens
actaaatactttcctccaactctcactcagccacaaaaatgctttcacagactataatttaatattatgccttggcctttatcagaggttgatacaaggaactgcaatatgacaaacatttctgccttatttgtgaaattgctgttgaagataccatccatctcccttttataaagatcsacgcaattactctccttaaagctaagggacagaaaactcttctctttcctatttttgaaattccaagaaacctgtaatcccttaggtttgcctttagcctccagtaaactgaaagttaaatttagtgtttaagcagcaggggatggggcaggggtacattcagatgctgtgttttttgacccaattaccacccagttcttttctaattcagccaacatgaattgagtatttaggtgctaagcactgtgatagacgccaagggcacaaagattattaaaacaagatgctttccctaaaagagatcttggatgagtacctcttgttctttcattttattttcatgatctttctgtatatggacctttatttgtagcctatctcattcctatttttgaaaacagatatggtattagatacaagtaaataaaataaattagcatattctaga

SEQ ID NO: 517651 - DNA, 628 bp, Homo sapiens
actaaatactttcctccaactctcactcagccacaaaaatgctttcacagactataatttaatattatgccttggcctttatcagaggttgatacaaggaactgcaatatgacaaacatttctgccttatttgtgaaattgctgttgaagataccatccatctcccttttataaagatcgacgcaattactctccttaaagctaagggacagaaaactcttctctttcctatttttgaaattccaagaaacctgtaatcccttaggtttgcctttagcctccagtaaactgaaagttaaatttagtgtttaagcagcaggggatggggcaggggtacattcagatgctgtgttttttgacccaattaccacccagttcttttctaattcagccaacatgaattgagtatttaggtgctaagcactgtgatagacgccaagggcacaaagattattaaaacaagatgctttccctaaaagagatcttggatgagtacctcttgttctttcattttattttcatgatctttctgtatatggacctttatttgtagcctatctcatwcctatttttgaaaacagatatggtattagatacaagtaaataaaataaattagcatattctaga

SEQ ID NO: 517652 - DNA, 615 bp, Homo sapiens
tgctggactaatacttaagtgtgcctaactgtacaaaaaagctcttgcctgtaaagcaagctgccttacaaacgtggactttgttgaataaatgagtgggctctgaagtcagacacacctgtgttcaagacttgactcaggcacttactagctgtatcagtctgttcaggctgccataacaaaatacctagaattaagtaatttataaacaataggaatttatttattgctcacaattctgaaggctgggaagtctaagatcaaggtgccagaagattccatgtctgaagagggcttgctttcggcttcagaatggtctcttgtgtcctcacatggcagtagggcagaagggccgaaagggactgacagacttcctcaagcccttttacaaaggcactaacgccattcatgagactgcagccctcacgatctaatcgcttcccaaagtcctcaccttttaaagcaattgcactggggattaagtttcaactcgaatattggagggactcaaacattsaaaccacagcactagccttgggatctcgggcaagtctctaatttctttcatcagtcgggatgtgtttggctgcaaaggacagactaaccaacccaaag

SEQ ID NO: 517653 - DNA, 568 bp, Homo sapiens
tggactgagcttgagacctgggaacaactgcagaaactacggtggtatcacaggtcaaagtctaagaggatttctgatagtttaattaccaactccatctcccttcgtctttccacctctcttacaaaccacatccagttgttcaccaagcccagtcgatattcctccaagatctctcaaatctatcctgtttccacccacccatcacactgctattgttttaagatcatcatttattgcttcttctaacttggcctttctgtcacaagtcctaacacaaatcagatcatgatactcctctgcatttgtgtttccatgataaaatccacctttcaacatcatttgaatttcagtacagcctacctttttagtctcaggctcaccaacctcacrtctgcaggccttcctcaactagtttctagagcatgttctgttaggctgccttgtctttgcacctgctgatcctttctctggaaaacatttccctctctgcccacagcccccagtcacttctctttcctggattgtgagtgagtaagtgaatgaatgatcaagtgagagacagtaa

SEQ ID NO: 517654 - DNA, 399 bp, Homo sapiens
ttctcgttcacgtgaaaaccaaacattgtaaaatgtgtatgttaaagggaatttggaaaatagaaacacaaattttgagctattaatgttttgtgaatgtccatagtgtaacacccaaacatccacacattcattcattcatgaatctattccccatgcagatgttaactgagcaatagacagatgatgaggacatgcacaaagcagtcccttcactcctagaactgacagtacctgggggagatggcctgccatgcaccactaccacagtgtgacagaggaagaaggggccagaagcacataggaggggcgcccaatccagttagagygtcaacagagactgccgggaggatagtacccctaggctgagacatgagagaaaggaaacacattttggta

SEQ ID NO: 517655 - DNA, 486 bp, Homo sapiens
acatgtgtttgggaagaggaaaaggttattgagtgcctactatgtgtcaggcactgagctgaatgcttccacatattaatgttttatacttgagttttcattaacagctctaatctgtactattaataaaagataaagaaatccaggctcacagggtaagttgattatcttcacatgactggaacagagcaaaaccagactaggaatccagctcaggcagtcctgctccaaagtccttttcattatactctttccacttataaaaatgctcaattacactcccagatacagtggaaatgycaaagcctctaagctttttccaaacccacatcttgtgcccattcaggtccccactctgcctggacagcattaattcctaaatagtctacactctcaccatccccacttgcacctcaatgttaagagttttgccattctgtgtgatttttagagcagtggttttacccccacagaagacacaggaaa

SEQ ID NO: 517656 - DNA, 595 bp, Homo sapiens
gcttgccatttgaagaatcaaaaactgaaaatatttcaaataataggagaaaatctagaggaaytgtgacttaggaccaatttggataggatttctaagcagacaatgatcattttaaagatgtgtggatgctcattttcaaaacctacactgacttctttttagaagagccacaggctagaagagccttctcagtggaactggattcttttgtctttaatgacacaacaggtagttacatgaactgagtggtctcagacctgcattaatttgggcagacagagatttcaaaactggtgaaaaacaaaactggaagaaagccactcttaaagtgtttaatttctttgcatttgcaattcaagcagatgctaccaacaaaatacatatgcaagaatggttaaaggttgcaagggaatggtaattaaaattatctttgtaaggtgattcattttgtgaaagctaccagggatgtgataagccaatattaatgtaattaatcaaggttactggggaaacagagggaaagtggaatcttaaaaagagactggacagtggttgagtcctaaggagggttgatctgagtcactagtgattg

SEQ ID NO: 517657 - DNA, 602 bp, Homo sapiens
atagggcaatcttatccccttgccctattatcactgtaaaagtggtaggaaatcccaaataaatggctgtccttgaaagatttgatgcctctgatgtgtaaactgctggttcttttattacagagtatagagatccaaagtgggatattccttacatataatgtagaccaaaaacacctgccttctcaaagattcccatggaacatacatgccactgggcaataggtccccatggagtcactttcagactcttatttatttctactcacacaaatgcttgttataaatgactgttacaatcttacaatctaccaaataatcctataattaaatatataatgcaaaaggtggctgaatattacttgcaaataatataaaatatgcatcttaatattttgctgraagaaaggaaggagtaataacagagtctctggtttataagccaataataatctgtcatagtaattttaaaaagatcccatggtaggcagagtaatgccctccctcccctaaagatattcatgacaatctctggaatttgtgaatatgttatttcacaagacaaaggggattaaggttgaaatgggactaaggttgctaat

SEQ ID NO: 517658 - DNA, 638 bp, Homo sapiens
tcaaatttgaaagcaaaaaataaagcagtatgtgcttttcagatatttgggaaaataatgatcatttgtcttaaacgttctccttttcaaacttttctatagtattatcattcatcatgtcttcttaatatctactacaaccatatccatctggtttctgctcccactattatactgtacctgccttctaaaggatcatcatgctccaattatccarcccaatgttgtctcagatttacatcctacttctctgtaccatgtgactgctacaaagccacttttgcctctgaaaaatgtgtgccaccttggttttcttcctttctgctatcactttccatcttcttttccgtctttgcttatcctttaaatgaattttcccccaaattctgtcctcatctttttttctcctataccatctcccagggctgccttaatcatttctataaattattagctgcaagatctgtatctctagttttaacatctcctggttcaggccccatttccaaccactaccagaaatttcctacatatctcaccaccagtcaaattcggtacatcaaaattgcttcccttctctaaacatgctccttgacttatcttgatgtcaatggtatcactatcctctcaatcaccaa

SEQ ID NO: 517659 - DNA, 594 bp, Homo sapiens
gcacttaactactatacatgaagaaatgtgcaaatgcttcccccttttcattcaaaagccttccttcctctggcatggtcctttcttgttgccttattagcctcctggttgctttctattctcctgttcctttcctctccttcacatcctcttctgttccttggttcttgtgtttcttggcttcctggctcccctgttccttagtgtactgatcttcacagagaactggctgggcctcagaagctgggtgtggtttcacctgggtaaattaccacatcctggagcaccctccagcactgttttcttaggacttggggagttggagtcagtgcatttggggggaggataaaaaagtgaaaccatttactgagctagctccccagagaatagccctgtctaaatctccaaatggtgaaattggctgaaaatgaccatgsaggtgtcctgggtggggggccagaagagtagcaaattgagaaaggcctggggtgatggtggaatcagggtgaggcagccagggctgcaggtcatgtttagatttatgagttagcgcccctttccttcttcttttccacctaaccccctgagactcta

SEQ ID NO: 517660 - DNA, 540 bp, Homo sapiens
tcagctgtgctgctgtgcatggagtaattgtttagttccactgctgtctgttgctgggtaaaccagggctgggccctgctctaatatgaaaggaagattttaaaagaaaaatggaatgtccaattgtgacttccaaagcagtgctccaagtgcatggaacattccagccctcacgagtggaggtgggctctgcaaggtccatttttaggattccctgtgtaaaatgtttcttggaccattctggaacataatgttacagaaagagctattttattagagaggagactatgaaaactgtaatttcaagaatacttctgctgggcatgatggttcacacctttaagcccakcactttgggaggtcgaggtgggcggatcacttgaggccagaaattcaagacgagcctggccaacatggtgaaaatccatctctatgtcaaaacaaaacaaaacacttctgtgtatccctttagtttaagtccttagccctcccataaaatataagcaaatttcaggagagataatagattgacctttacga

SEQ ID NO: 517661 - DNA, 595 bp, Homo sapiens
aagaaatgcaggctgtgctggtggctcacgcttgtaatcctagcactttgggagcccaaggtgggaggatcacttgaggccaggagttcgagaccagcctgggcagcatagcaagaccctgcctctacaaaaaaaatagccaggcatggtagcacatgcttgtagtcccacttacttgggaagctgacgcaggagcccaggagttgaaggctgcrgtgagttatcattataccagtgcactcctgcttgggcaacagaagaataccccatctcaaaacagaaaaaaaatgcagaatctcaggccccatcacagacctactgaatttgaatctacatttaacaagattcccgggtgattcacatgcacagcaaagtttgggaaacataattaaagtccctcacaggggagcaggagaaaatagtaggaaacaagtgtcattagactttccctcttgccaatccagaaaagttggttgctatctgaagaagcctcaggatgaatggaggaggtagtgagttaccatcagctatttttgtgttctagggttttaaaaaaaaagccagaaaatttaacatttaatttttctgcagtggt

SEQ ID NO: 517662 - DNA, 639 bp, Homo sapiens
ttaggagtttgtgcattttgcatatctatagayggttgtttaaatacatgtaatctagattacagtgtttttctctgctcctagttattctttagaaagaattttcatcctgggagaaatgactggcccctgagcttgagcaggaaaaatacaaggttagcctggaatatcttgctcacaagaaaagaagtgatcaaaaaatgatggaaatgtgcaatatactagacctgcttatactagcttgtgaaaactaattgagcaaatcaaactagtgttttcattctcctctcttattttcttattaagttagctttatatgggtgtgtctaccattactgtttattttgtaacacttccaatttttttggactagcagtaacagaataactgatagaattaataactacatttcttagttcaataatgttctcctctgttggcaaaatgaagtaaggaggtttttacaatcaattgtgccattttgagaagttgaatttgtattttttctgatttttgtaatattattctttctaccagctacttcatttccaccttttgtgtccttcaaacttccaagggacagctcctctattcaagtaagctcaatttcccagaagcaatgcctttcttaaacttcaa

SEQ ID NO: 517663 - DNA, 639 bp, Homo sapiens
ttaggagtttgtgcattttgcatatctatagatggttgtttaaatacatgtaatctagattacagtgtttttctctgctcctagttattctttagaaagaattttcatcctgggagaaatgactggcccctgagcttgagcaggaaaaatacaaggttagcctggaatatcttgctcacaagaaaagaagtgatcaaaaaatgatggaaatgtgcaatatactagacctgcttatactagcttgtgaaaactaattgagcaaatcaaactagtgttttcattctcctctcttattttcttattaagttagctttatatgggtgtgtctaccattactgtttattttrtaacacttccaatttttttggactagcagtaacagaataactgatagaattaataactacatttcttagttcaataatgttctcctctgttggcaaaatgaagtaaggaggtttttacaatcaattgtgccattttgagaagttgaatttgtattttttctgatttttgtaatattattctttctaccagctacttcatttccaccttttgtgtccttcaaacttccaagggacagctcctctattcaagtaagctcaatttcccagaagcaatgcctttcttaaacttcaa

SEQ ID NO: 517664 - DNA, 637 bp, Homo sapiens
cagaactaaacttttcttattccagaatcaaacatatgaggactaagagtaatctcttgatttctaactcacaataaaaattctcattatatgaaaacatgaacaaaataatttcagttagaaaaggatgtcatgtatatatggttaaaatatatagatagtcctcattttacacagttttgatatttygttaaataacaccagttttccaaaaatggttcaaatttctattaccatgatataataactttgagaagtatataaataaacaattttcactgctaatcttcagtccactaatcactaagtaaataacagaagcttattatattcagtgatctattctttcatttaaaaaacaatttttctttggttggccactgtgcatttgttggtttatatacagacagttaagcatgtagttgtgttgcctgcttatctcccagtgataaattcatgtgacattttacaaaagtggataatcagaagagagaattggccaataaatttaaagtacagcaagtaaacgaaaagtgataatgctgaaggtgaaatttgagtctaatataaattgagttgtatgagaaatagcagaccataggaatgatgaaacacactgttcaagagactcgagata

SEQ ID NO: 517665 - DNA, 637 bp, Homo sapiens
cagaactaaacttttcttattccagaatcaaacatatgaggactaagagtaatctcttgatttctaactcacaataaaaattctcattatatgaaaacatgaacaaaataatttcagttagaaaaggatgtcatgtatatatggttaaaatatatagatagtcctcattttacacagttttgatatttcgttaaataacaccagttttccaaaaatggttcaaatttctattaccatgatataataactttgagaagtatataaataaacaattttcactgctaatcttcagtccactaatcactaagtaaataacagaagcttattatattcagtgatctattctttcatttaaaaaacaatttttctttggttggccactgtgcatttgttggtttatatacagacagttaagcatgtagttgtgttgcctgcttatctcccagtgataaattcatgtgacattttacaaaagtggataatcagaagagagaattggccaataaatttaaagtacagcaagtaaacgaaaagtgataatgctgaaggygaaatttgagtctaatataaattgagttgtatgagaaatagcagaccataggaatgatgaaacacactgttcaagagactcgagata

SEQ ID NO: 517666 - DNA, 589 bp, Homo sapiens
ggaggagctcagtgagacaggcattcacacaggtgagaaaatggttgtgacaatgatgaagaactcctagaggaactgatgttggttaaaamaacaacaacaacaaaaaaaaacaaaaaaaaacttcacactaaggaatttttaaagatattttataatattaaaaatgtgaagaataaaatattggaagtagatctaaatttataaagaagtatggcataggaaaaacgctccatgttgcaaggtacacaatgggaggagggcaaaaccttgttcaaattacttttccaattttttataaggacataaaatacttaattctcaatgtttctcatgtttaaaatacattatactaattattagttgtactaatttttctttttcctatacgtttataactgacaatgagagagtttctgtttgacaaaaatgtttaatgattatagaacaattgcaattttttccattaactatttggattactttgcacaatttagtaggtatggtcattttaacagtctcatagtaataggaaaagtgtaaactgcctttatttatatacatgtatgtgtttgtggtgtgtaagtgt

SEQ ID NO: 517667 - DNA, 612 bp, Homo sapiens
gggttttaatattactgaaaaatcaatcaaaaccaagttttcatataaacctacaactccaaatgttaggtgttttaatctcgtgtttagagtagccttcttaatctttgtgggagtatagaygctctacagcagagaagacaagtgcaatgttacatacgccaaaccattattaagccaagtcactatttaatcattacttaaaatgttccaaaaggaagattgagatgtctctgatttttcagtgagtaatcgttatgactcttttgttttctagcatgggttatacaataagttaaataaatgtatttcttctctttgatcaatttttaaaaaatcttaacattataaacattacctaatgtcaatattaattaagaatctacttttagagatttatagtggaaacctaaaattatgttctacagtaaaatttaaacatcccaacttatttgacatatatattttaaacataatgtagcattccatggcacaattgtttatttctgatatataacatgacacttggatatatattccttaatatatgtaaatatagaagagttatctaagatatcctgttatttaacaacttttaagtgatgcttataa

SEQ ID NO: 517668 - DNA, 586 bp, Homo sapiens
atttttatttgttctcattatttttacattaacattcttaccatgatgctctgctaatgatgattcttcctgctgtagtatatctcagaaaactttaattatctagttttaattttaatagttttcataagttttagaacatttttatacattgtttcatcgatataggatttcctgtttcaakaaatctctttacaatactgatgaggaaaaaagcaaatagcattcaactgaaaaataaaagtaaaaattaaacatatcctagactatgggaacaatgaataataattacaataacaatgaaaactttaaaaaagccaaaacaactatattgaaagagaaacacaatgatatttaataaaattatgaaattattgatatctcttatcaaagcaaacaaacagaaaatttaactgctcagaccatacttcttaaagtacaaaaaggacacaaaatccacacccagtaaaatgattgcattgcctggtttcactggttgcttcacatgcgtatttgagtaagttctagctagagagataaaattaaaaaagctatgataggaaatctagaacacctattgcgaggg

SEQ ID NO: 517669 - DNA, 640 bp, Homo sapiens
actttaattatctagttttaattttaatagttttcataagttttagaacatttttatacattgtttcatcgatataggatttcctgtttcaataaatctctttacaatactgatgaggaaaaaagcaaatagcattcaactgaaaaataaaagtaaaaattaaacatatcctagactatgggaacaatgaataataattacaataacaatgaaaactttaaaaaagccaaaacaactatattgaaagagaaacacaatgatatttaataaaattatgaaattattgatatctmttatcaaagcaaacaaacagaaaatttaactgctcagaccatacttcttaaagtacaaaaaggacacaaaatccacacccagtaaaatgattgcattgcctggtttcactggttgcttcacatgcgtatttgagtaagttctagctagagagataaaattaaaaaagctatgataggaaatctagaacacctattgcgagggatgggattcagctgaaatatcactctttatatccttcttatcctttatatccttctgggcctagatgagataatgaatgttgaagcatcaaaagctaccatatatcatgatacgtagttaaggatagaagacaaatgttagtata

SEQ ID NO: 517670 - DNA, 640 bp, Homo sapiens
actttaattatctagttttaattttaatagttttcataagttttagaacatttttatacattgtttcatcgatataggatttcctgtttcaataaatctctttacaatactgatgaggaaaaaagcaaatagcattcaactgaaaaataaaagtaaaaattaaacatatcctagactatgggaacaatgaataataattacaataacaatgaaaactttaaaaaagccaaaacaactatattgaaagagaaacacaatgatatttaataaaattatgaaattattgatatctcttatcaaagcaaacaaacagaaaatttaactgctcagaccatacttcttaaartacaaaaaggacacaaaatccacacccagtaaaatgattgcattgcctggtttcactggttgcttcacatgcgtatttgagtaagttctagctagagagataaaattaaaaaagctatgataggaaatctagaacacctattgcgagggatgggattcagctgaaatatcactctttatatccttcttatcctttatatccttctgggcctagatgagataatgaatgttgaagcatcaaaagctaccatatatcatgatacgtagttaaggatagaagacaaatgttagtata

SEQ ID NO: 517671 - DNA, 586 bp, Homo sapiens
atttttatttgttctcattatttttacattaacattcttaccatgatgctctgctaatgatgattcttcctgctgtagtatatctcagaaaactttaattatctagttttaattttaatagttttcataagttttagaacatttttatacattgtttcatcgatataggatttcctgtttcaataaatctctttacaatactgatgaggaaaaaagcaaatagcattcaactgaaaaataaaagtaaaaattaaacatatcctagactatgggaacaatgaataataattacaataacaatgaaaactttaaaaaagccaaaacaactatattgaaagagaaacacaatgatatttaataaaattatgaaattattgatatctcttatcaaagcaaacaaacagaaaatttaactgctcagaccatacttcttaaagtacaaaaaggacacaaaatccacacccagtaaaatgattgcattgcctggtttcactggttgcttcacatgygtatttgagtaagttctagctagagagataaaattaaaaaagctatgataggaaatctagaacacctattgcgaggg

SEQ ID NO: 517672 - DNA, 575 bp, Homo sapiens
tgggggtgggcccccgaccccactgttgagagggaaagagaaaggatcagcccaggaggaccaacaaggttttatgagtattctctttgaatacccagcacgttgcagtttctggcacttagtaggtgataaatttggatgggtgggtgggcagatgaatggatggatgaagggacggayggatggatggatggatggatggatggatggatggatggatgcatcaatgggtggatgggtggatggatggagggatggatggatgcatggatggatgcatcaatgggtggatggttgtatgggtggatagatagatgaatggacggatggatggatggatggatggatggatggatggatggatggatggacggatggatggagcaggaacagaacccatcataccccactagtatatcacattctttccactgcatttagagtcctggctccaggctaggcacagagcagtgctcagtataatgctcaattaactgagcacccttcccctcacccaggacaaagcctgcctcaacccaaaggtgaggcctcagtgctcagccacctctctcacc

SEQ ID NO: 517673 - DNA, 446 bp, Homo sapiens
tgtgatttggtaatttggccagattaaggaaggaaagcgcgttcgcctggagtgtggaatgaacgtacagggtgatcattaccgttttcagcgctgccgtcactgtcgccgcatgtgagacaccccctcctccccaaggccagtgattgcgccagagctcctgcgcgctggcaagcaggtgacgccgcgggtgacggccagccagggcgggggttgtgggggcgggaggcaaggggagaagagggcatgttcccrtcggtgaggcgagaactcacccgtggtccaaagcaacgagggcggggggcaccctccatctctaccgcactccctcggggcacacactggcgcgctccgcgtcctcaggtgctccgagcttccccgcgtcacccgcagcccagggcgccccccgcgacgccgccattcattcctcctacactgcgagcgca

SEQ ID NO: 517674 - DNA, 574 bp, Homo sapiens
tgacgtcctccttccccccaccaccaggggcccagcacctctggcaagtcctgactgtccaccgaggaagggcgggaggacctgctccagcctcggagggttcgagcagatcccaaagaggatagagagagaccccgaggaagttcgatccactccacagcccaagcggggtccgaggacactgagaggaaggggaaaggctgttgagctgtgcccctacttctgcagagatccccattttcatccagtattgcsgtatcatttctcggcccctcccccaccttccagaagaccagcgcccactgagtgctctcctcaactctaaaagcccccatcccacacatcactgaccctcgggcccctggggccattctgtggcagcccacttgccaccttcctgctctggataaattttgcctcaaaaccctagggtgaaaccaaacaatgataaattctgactctccttcccgtttcccagcctacccattcctcttggaaagcacactgagttcttccgccatcactgtcccccccaccaccgccaccctggaccctttgcaggagggttgccttc

SEQ ID NO: 517675 - DNA, 501 bp, Homo sapiens
gcctgttcagctcctcggaggggagtgccctctggccaggggcttccgactcctctcccagggtatactccaccttctgcaatggaaaaggaccgcagttaagaggtaaggttgccaacaggagacaagaaagaagactggccagcctcaaatgctagaattaacccaactccatccccaaacctgtcagcgacgaatgcaccaatgtcctggccttcaggtagaaattccttccagctaagcccggcttctcgccacagcgtccccacctttttaggaccctggaaaacacaagaccaacccagcttaccaaagctctctctctccaaggacccaacagctctaccacattaatccaacaaayatttactgaaagcctactaggtacttgctaggcattaaggatgctatagaaatactaataggcaaagcccttccattcctacggtctggtgcagggcacagatgtcagtcaaataaccacccaaataaataagaact

SEQ ID NO: 517676 - DNA, 510 bp, Homo sapiens
ggttttcaccccgcttaaccccctaaagttatgctgaccaggatggtcaaggaacccatactgttttttggttttttttttgagacagttttgcttttgtcacccaggctggagtgcaatggcacgatctcggctcactgcaacctccacctcccgggttcaagcagttctcctgcctcagcctccgagtagctgggattactgtgccaccacgccyggctaatttttgtattattagtagagacagggtttcaccatgttggccaggctggtctagaactcccaacctcacgtgatcctctaaggaatccaacccaccttggcctcccaaagtgcagggattacaggcataagccaccacacccggccagggaacctacactcttatgcaaggttccaagggtcccaaaaaggagatagaaaattgtgggtctgtataagtgggaggcccagagaagctggtcatacccttggtagtactgagcagtagacagatgcccagcacagagc

SEQ ID NO: 517677 - DNA, 579 bp, Homo sapiens
tgctggggattggagatagctggcttaaaaaggatgggaagggggggcagatattggatggggacaggaaggaaaatgcgccacattcaggtcaggattctgttctgaaattggctgtcgctgcgagaagtgctggaaaatgtcccattatctggagagagaggacagtgtgtctgcttgctgcccgtcttttcttgcttgtctttctacaggctggggttttaattttctgtgctggccgattcctccagtttgtgtatgagttttcattcttgtttggtgcctgggcctgttttacatgtgaatgccctttagaagaaaggacagtcctagccccgtttgctggggagagaaaggacaaggcctctgggccctgcaacctcttccttgcacctattgacstattcatcctgtgctagacacaatgccaggtgctgggagtagacagacatggtctttgccttcatggagcttacaattaaacagtggttgctcaggactggatacctaatttggagggccctgtacaaatgaaaaggtaaagccccttttcaaaaattaagagtttcaagacagtac

SEQ ID NO: 517678 - DNA, 490 bp, Homo sapiens
ctccgagtttgcttcccagggagcccartctataatacatagatgatcatgatagacctctgagttgggattacttgcttgattttgcagctaaagcacttgagatttaggactcaatggcttgcccagagtcagtggatagcagatctcaggttcaacccaaatctagttcttcccaaagcactctctttctttgttgccactgtctaggtgtgtgactctaaacagtagaaaccatggggttataaaaccggcttgcaggaactgaactcaaagttcatttggttacagctcctgttctttaatctctggatctgagtttcctcctctgcaaaatagggacaacggtacttaaagcaaggtgttagaaggatggagtgcccaactcatcctgatttgcctgggactttcctaatttccccactgaaaaccttatatcctaggaaccccctccatccctgagccttgatggttggtcaccctatgtgaa

SEQ ID NO: 517679 - DNA, 539 bp, Homo sapiens
tgcaaaaataagcaactgtaatgaaatcactgacatcttccaacaaagacaagattcctgctctactggcatttacattctggtggaaggctgttttttttttaaaccatgtaaataaaaagcactctggaggttaatcccagagggctggaattggccttctcggattaaccccagagtgctttttattccttcccaatgaggaaattacctaaaactgttaagccagacgaaccaagatctactggaatccaaatctctccatcttccctttactccaatagatcagtatctaaaatcaggggttttcaaactgcaggtcacaatcagtttgtggatcgtaaaataaatttagtgagccatatccttttttaatgaatktaatacgagtgcatcacatgaaaggcaaatattgcttcatgaaactaatttcagttttatatacacacatgtataaggcagagataggtacctgtgaatcacagtccaaaagtccaaaagccatagacaaaagcactgtctgttgtatgcactgacat

SEQ ID NO: 517680 - DNA, 412 bp, Homo sapiens
ttaatgagataaatataatctagtattttactgaattttcacttgcacaggcactgagccaggtgcttttcacacataacaaaaagtttaatttcaaaggttagctgataaatattttaaatttaggaataaatatccccctgccccatcatcacttcacgtactgtaaaaaacttacagcatttacaagttttaaaatcacattaaagtggttgacataaattaatatctttgcctataatattccttcccttttttttttgacttgtagatacagttgatttttgtyattcactgtagttatgttctttatagttgccttgaacactgacttagcaaatactgagcatcgctcctacgggaatatgcagggttaggttcctgtaggcctcggtcataacatttttgtcag

SEQ ID NO: 517681 - DNA, 555 bp, Homo sapiens
tgttgttaagacttcgatatgtaaccttgcaaatgtgtttttatgcactttcaggtgcatataaaaatatgtgaaaaatatttaatacgatttatatgtagtttaataacacttgagatcayatgcatactgttctgttgataacctaatgcattgtgaatattattcatgtaaatacaaatatattttgttcttaacttctacttggtattctgacttacttaacttctacctggtattctgacttaccataactttttagaaatcaaaatcagtttttaaattatttaaaagtaatgcatgcatgcagcagaatctccaaataggatagaatgatacgaagaaaactaagatctttttcccccatccccaagctttctagaggcagccactgttaatagttgtttatttcttgcttgctttattttaaatgataaattatactaaagagtcagtattaactatgggacatatttcatttgaaagctttgagaaaattagtgcatttattcttccttacattttctttttccagttaaatatattattattttt

SEQ ID NO: 517682 - DNA, 215 bp, Homo sapiens
tagcttaggaaccctgaatgcttctcataaaggacagtacttagaagaatgaccattatataaagtttcttatatcccattagagaagaagtttggataattatattgttttaaaaaaatytacatgccataacatgttgcctgcatgaagttacactatttgattgaagattaagcattaggcttctttccgtgacagtcttaaattaacatcc

SEQ ID NO: 517683 - DNA, 676 bp, Homo sapiens
tgcttctcataaaggacagtacttagaagaatgaccattatataaagtttcttatatcccattagagaagaagtttggataattatattgttttaaaaaaatttacatgccataacatgttgcctgcatgaagttacactatttgattgaagattaagcattaggcttctttccgtgacagtcttaaattaacatccttgccaatgatgaccactagtcatstgtttctagcacaggcctctccttgattgagagttatttgttgcctcatctcactaggcagagatccttccttgaaaacaggtctctctcacccatcttgaccctcagcatctggtacagtgcctggcactctttagcctttccattgttgagttgaatcctatgaggctctgactgaggtatacgtttgctagtacagtagactcttgttgcttttgtgagtgattcacatatacaaaactggaaaggagatacatccagtttcacaaattaattgtccttagaacttactgtgttcctgctgtcagagttttcttctttttctgagacaggatcttactctgtcacccaggctggagggcagtggcacggtcatggctcactgcagccctgaactccccgggctcaggtggtcctatcacctcagcctcttgagtatctgggactactacgc

SEQ ID NO: 517684 - DNA, 676 bp, Homo sapiens
tgcttctcataaaggacagtacttagaagaatgaccattatataaagtttcttatatcccattagagaagaagtttggataattatattgttttaaaaaaatttacatgccataacatgttgcctgcatgaagttacactatttgattgaagattaagcattaggcttctttccgtgacagtcttaaattaacatccttgccaatgatgaccactagtcatgtgtttctagcacaggcctctccttgattgagagttatttgttgcctcatctcactaggcagagatccttccttgaaaacaggtctctctcacccatcttgaccctcagcatctggtacagtgcctggcactctttagcctttccattgttgagttgaatcctatgaggctctgactgaggtatacgtttgctagtacagtagactcttgttgcttttgtgagtgattcacatatacaaaactggaaaggagatacatccagtttcacaaattaattgtccttagaacttactgtgttcctgctgtcagagttttcttctttttctgagacaggatcttactctgtcacccaggctggagggcagtggcacggtcatggctcactgcagccctgaactccccgggctcaggtggtcctrtcacctcagcctcttgagtatctgggactactacgc

SEQ ID NO: 517685 - DNA, 651 bp, Homo sapiens
ctgcctgttgctgtgcaagcttatctctataagcttgttgtcttgtttgtactacatcaggcattacggcatctatcagggacagagactctattggtcgaccatcaaacaaggtaccatcctggatttggaaaattgtgagagaagaaaaatcaaaggcaatatttaaagttatttgtatttatacaaaatcagaaatgaaatgaaaatcttcrttcctaaaaaaacatttttaggaactttctgaattcatataagaagtccggagggaataaagaaactacaagcagcaactggaaatgactgcttacattttccttttcatttaattcatactattattacagtatagagctgtacagatagagctgaaatgaaagagataataagatgtaggccgagctgataaaaaggcttattaattagattctgaaattctgttagtcaaagcaacaaacaatatggaatatagttcatataatgatcagaggcctggtgccccattatagtaaatacatcttttaaaaaactaaaaactttgagctgaagagtttcttgtgatttgattcaaatattaaagcagaaacagacttcatggggctatagtgctcttgaatattagggagttattaaaatttccaaagctctact

SEQ ID NO: 517686 - DNA, 621 bp, Homo sapiens
tgctggcagatctggtttctttttttttttttttcttttgagacagagttgctcactctgtcacccaggctggagtgcaytggcaccgtatcagctcactgcaacctctgtctcctgggttcaagcaattctcctgcctcagcctcccaagtagctgggactacaggtgccctccaccgtgcccggggtttcaccatgttggccagactggtctcaaactcctgacctcaggttatccgcccgcctcagcctcccaaagtgctgggatttcaggtgtgagccaccgcgcctggccccagatctggtttattctgaggcctctctccttagcttatagatagccaacttctctgtgtcctctcacgatctttcctctgtgtctgtgtgttaatctcttcttattaggacactgtaagaccaaattagaacccaccctaatgaactcatttaatcttagttccccctttaaagaccctatctccaaatacagtcatcttttgcagtactacgggttaagacttcaacgtaggagtttggtggggagcacagttcagctcatgacaccttcattcctaccacatctcatctttcactttactgcgaagattcagacctttaaac

SEQ ID NO: 517687 - DNA, 621 bp, Homo sapiens
tgctggcagatctggtttctttttttttttttttcttttgagacagagttgctcactctgtcacccaggctggagtgcactggcaccgtatcagctcactgcaacctctgtctcctgggttcaagcaattctcctgcctcagcctcccaagtagctgggactacaggtgccctccaccgtgcccggggtttcaccatgttggccagactggtctcaaactcctgacctcaggttatccgcccgcctcagcctcccaaagtgctgggatttcaggtgtgagccaccgcgcctggccccagatctggtttmttctgaggcctctctccttagcttatagatagccaacttctctgtgtcctctcacgatctttcctctgtgtctgtgtgttaatctcttcttattaggacactgtaagaccaaattagaacccaccctaatgaactcatttaatcttagttccccctttaaagaccctatctccaaatacagtcatcttttgcagtactacgggttaagacttcaacgtaggagtttggtggggagcacagttcagctcatgacaccttcattcctaccacatctcatctttcactttactgcgaagattcagacctttaaac

SEQ ID NO: 517688 - DNA, 676 bp, Homo sapiens
  misc_feature (1)...(676): n = A,T,C or G
gtgattgaatttgtttttgatactttatttamtttacaattgcatttgtaaaatcagaattagtctaatttatttaatgacccccatcacaggctgtaggatattttctgagggcttttaattatacatgaatcaacaccataattntagaagggttcaagtgaagtaggcattcacataatttccaccattggttctcagctaacaatttagtaatttccccctgctacagtaaagatcttcttaatacatacaaatgtttttccaaaaggttgaattcatctagtaatttagagatctatctgtctcttttacagttttgggatctagttattgactttttctattcagttctcaggatgaacatacttctatgaaggcagttaatgatgttatgactgatcttgaacaaaaggttaagttcttataaggaccagaattgaatttttggttaatttgttaaagtggtttcatctatgcttttgtttttcctccaaacttaagtgtcccttaattagccttaccttaaagggaatttgcattacatttctctcttttagggagaccatgatgatgacatttggaagcatctcaggagacaagaataaaacgccattttttttcccacttcgctaacaactcagtgttctgaaaagtctggaatgtgctatgaaaa

SEQ ID NO: 517689 - DNA, 648 bp, Homo sapiens
  misc_feature (1)...(648): n = A,T,C or G
gtgattgaatttgtttttgatactttatttactttacaattgcatttgtaaaatcagaattagtctaatttatttaatgacccccatcacaggctgtaggatattttctgagggcttttaattatacatgaatcaacaccataattntagaagggttcaagtgaagtaggcattcacataatttccaccattggttctcagctaacaatttagtaatttccccctgctacagtaaagatcttcttaatacatacaaatgtttttccaaaaggttgaattcatctagtaatttagagatctatctgtctcttttacagttttgggatctagttattgactttttctattcagttctcaggatgaacatacttctatgaaggcagttaatgatgttatgactgatcttgaacaaaaggttaagttcttataaggaccagaattgaatttttggttaatttgttaaagtggtttcatctatgcttttgtttttcctccaaacttaagtgtcccttaattagccttaccttaaagggaatttgcattacatttcwctcttttagggagaccatgatgatgacatttggaagcatctcaggagacaagaataaaacgccattttttttcccacttcgctaacaactcagtgtt

SEQ ID NO: 517690 - DNA, 404 bp, Homo sapiens
caactgtctctctgagcaacctggcatttccactccarttggaatctgcaaggggaagatgcgcaggggaagaagattaaacaaaccttttcagatttctggtccaggtgaatttttcatttatctggtgtgcttcactcttcttttgatcactgaccatttccaatattagggaacactggacacattgcaggttcatttttagaactgatcaacagccaaggaaaatgcaagatgagtgaactgatctatctttatacataaacacaaggcgtttaacctgcctgaacagttcaaattgttgctaataaaattttagatctgctctgtgaggcaacctgcctgtcacgttggctgttgctcaagtagctcccaccctcgatgcatgtttaggaaatgtgaca

SEQ ID NO: 517691 - DNA, 609 bp, Homo sapiens
tattactttgaacttgggtcacgtcacactttaataggaacctaattaatttgttgcatcacttatacagaaaaccaaatttttaagggtatcaagcatgtaaacagatacgatatataagaggcatcacacaatggctaccgtaatttttttgattagtatgttttatttttaattaatcatgcaaggtgctaagattatattgtaaggggagtcagacaatgttttttgtttctattagatcttggcaatcatatagttcataaaaagcaaaaggaaatctaacactttctttttctatttgctattataggacaaaaattaatgctgccttagctgaaggaaaaataactgtattttytaaaaatataatttaattctttgaatttgtgattccaagtccatactaaatttctattttctttcaaagtcacaaagagatctagtgatttgttaatgagcatgcttaatgaagatgactggtgtccactggaagagaagaataatgtttaccaagtgaaattctcaaaattatgctattataccctttgcaatttttaaaatccagggcatatgaagacgtgattagaataatataaacaagttcag

SEQ ID NO: 517692 - DNA, 529 bp, Homo sapiens
ctatcattgcgttttcaacccaattgctactttcttttgtcactttactcattagaaggctgctattcattagctactttgttatagttttggctgacaagctgctcactttccaactctctccacacatttggtgtcacacatttttcttataaatttaccttttaaaataaaattgtcgtgcatggttcctgtagaggtgagcaggctttcctttgttttctcctggggaagaaaagaaataataaaagaaaggatgatgtgctgacacattgaatccttaagccagacacttcattagtatagcaggaagtttttgatcatgagtctgatggacagtgctagtccatgtgtcttgctgcccttggacaccactggttgtcattgtctcctgagtatttcctatacaattctgtcaagtaaccatgcttaactttttttctactcctgtttcctgtgccatttcctaattattcaataaaaatagaaaagcaaccctycaggagagtgagagttaacaaagaattaa

SEQ ID NO: 517693 - DNA, 643 bp, Homo sapiens
tagatctggatgtactggaggctcatgttcccgtttttggtagatgagtagaaagttggctcagcaagttagagttagcccactagaacaggtggatgccagtttctgggctgcagagacccgaccctccctttctatcaagctacttctgtgaccacgggacatccaagtgcatagatgttccctgttccctacaggattgtagggcagggtccctttctactgcactgttagccatggacatgtggcccatctacacagggccgaaactgtgggataatgagagttcaggggattgcggacactctgctccttctctgcttgtaagctttccttttatcacctttattttttaccttccctatgtgacactaggcatatatgcccaggacacctctgcctgacacttcctcaccagactcacctgctgatacycagtgagcctgtggtatcccataatgatctgtggttttcagaaaatgtcccttctctgctagatcatgtgctatttagttttcgattacttacaccttcctggatcctggctgtgtccctccaagcagaaacagagctactgtgtttcattttacttagcgccccttcattcttctatcatgggacatctaacattgttttaaaatcc

SEQ ID NO: 517694 - DNA, 623 bp, Homo sapiens
taagccattaaacccagttttcaggttttctttcagtagacctaggaggggagaaaggatgctttactatagctttcccagggctggggattggtctaagggttgggaggggagaaactaggtgatagcaaagttgtggtraagattcagtccaggcaaaggcatgatgcaagggaacatagatggtggctggtggactaagaatggggatgggttaaaggactgaaggtcctaaggcagatgaaaagcagttttagaaggaggggtggaatgtagatggtgtaggacagattttctggaggtataagatatgtgggtggaatagagacagaaggtgaagatggagtcatagttagctagcagggtactgctgtaggttgggttctctggggagggggtactgagatggagtcccaaaggcttattaaggagtaacaccagtgaaaggaaaagaggaggaagaaggattgcacaggaagagccaacagaccatgaggcagatctgacaaactctttgcctttccagttaggagctccagggcaatgaatgccaactagaggagtcttgcactgggtggaaatggctgggccctagaaccaccatcttgcttaatcattggctt

SEQ ID NO: 517695 - DNA, 508 bp, Homo sapiens
tgacttacaaactcaatccactaaaagtcaaattttcattcaggagggattattgcctaatgataactagagagtatgcaaaactaaattagggctgtgtggctatacaatgccaaaatctgtggggaaaagttgaaatctcaatcattttatttacacatccccctcaccccgactccaaataaagggcaaaggaagatgctcaagytttcagaacaaatttactgcctagtttggcttggtatggacagttttaatgtgcccaaattttagatatgacttcccttcattctgagggcataatttattgagaagacatacaaaatgcttaccgtagacatgtaaatacttttaaaaaggaaactggataaaaacattaaacaggaggggaaaaaaaaggatgtttcttcttcagaaaatttaactgataaattataaggaaactgaaacccactaagatttattgagcatgtgccttaggtacttgcacacattataccaattaact

SEQ ID NO: 517696 - DNA, 593 bp, Homo sapiens
cttaaagtaaacctcagccaatcaaccgccagatccttgatcagcgcaatcacctagatgatccacaaaactgagtacagatgcacaagtgagcttagctgagctgcaggctagtgagcagtaataaatccttaccattttaagtcagtgagttttgaggtggtttctcatacaatagctaatacagggattcggtttttttccattttttacagaaaaagttagagtcttcaagtttgcaccaagagtaagcagaggggctaatatcccactgatacactgactccaaaatatatttttttatagtatgcactactgttttccaaaatctagtgtgttattttgtttctgtaggcatactaaataacctccctaaactcaacttataaaattattagatgcaattacaagtgaatattctgaataagtactgatatgttttcataatcagcccaaaagcatcctcatcatatactacttttctaakatggaatcaaatatgctacatagtaaaaattattaagtattgcagtggatgtttctaaacatgtcttatatttttaaaaagaacattttattttcatcataaatat

SEQ ID NO: 517697 - DNA, 461 bp, Homo sapiens
gctgaggtggttaggtaaggtctagggaaatttatttcttggaataaaaaatggaggtcaaagagggctaggggtggcctcctctagagtctgggtctcctgctaaaggtactttagtttcccaagatgtctaggccaactattgagaataggagaccaggaatggatttgtgactgatgctcaaactagtaaaattatgtatgtttgcctggaatattgtattttaccttcgggcttatttcactttgcataatgtcctccaggttgcctggaatattttatatactggaacaaaaagcacaagggtgactatggtagatcaacaggtttgggttcttggcgtcrcccatatctttaacaggtaactaacccatttgatcctgcatggtcctattttaaatgcatctactccatcttctaggaactcatgtagcaactattcccagcatagacagaattt

SEQ ID NO: 517698 - DNA, 637 bp, Homo sapiens
ctgcaagtcagttaaatattgtccaaatctttactatagaccccctcccccagtgatgtaaaacacgtggtccacatcctacacaattaaaaaatcactctttggtttgcatttagtgcatgtctttgtggtttattattatcatatcagtcttttgcttctaagtaagtatactttggtcacttgttctattttggtaggcatcaatgcttggatctgtcccagtttttgaaagggctttgggattcttaaactgctgcctgcatcctcacttcttgcttctgctcctgattatgcataaacatatatgtgcttacacttaytgatgcatttgcacatcagaaaagtaattttcatgtgccttattatttcccagaagtatatacaccagcccttggaccttcctcttttctaggttgtccactctgccaccatgtacaaggaggtggaaatagctaaaaactgctgcatctgcattgctactacgctttttgatctaccccccagatacgggaagaatattgcaacatctggaaagatgacagtaatggcatcttcagtatagcaacatgttagtataagcaggtaatcaggaaattctaccccctatttgtggttgttgtagtaacttgaattc

SEQ ID NO: 517699 - DNA, 598 bp, Homo sapiens
ctgaacttgtttatattattctaatcacgtcttcatatgccctggattttaaaaattgcaaagggtataatagcataattttgagaatttcacttggtaaacattattcttctcttccagtggacaccagtcatcttcattaagcatgctcattaacaaatcactagatctctttgtgactttgaaagaaaatagaaatttagtatggacttggaatcacaaattcaaagaattaaattatatttttaraaaatacagttatttttccttcagctaaggcagcattaatttttgtcctataatagcaaatagaaaaagaaagtgttagatttccttttgctttttatgaactatatgattgccaagatctaatagaaacaaaaaacattgtctgactccccttacaatataatcttagcaccttgcatgattaattaaaaataaaacatactaatcaaaaaaattacggtagccattgtgtgatgcctcttatatatcgtatctgtttacatgcttgatacccttaaaaatttggttttctgtataagtgatgcaacaaattaattaggttcctattaaagtgtgacgtgacccaagt

SEQ ID NO: 517700 - DNA, 605 bp, Homo sapiens
caaggtgaatgcagtttagccctttcttgatgtacttcctcattttcccattagtgctctagaaccattagtgtttccctgacttttgttctttgttttcacttttattagttatgtcttatatagtcagaatgtacctgtttctacactattttctcaaatgcagcaatgaaaagaagtggcgtcaatctgaacgtgactcagaaatcaagtcgtctatttaacttatagacattccagaattattctttaaattcaattcctttggcctcactgtagagtttcaggaagtagatgaagagaacctaactttaaactataatactacattatttttaaattatgggggaatttattattttgtatacataggtattatataataatttttatcctatataatacagcatcttcttctaacaagctataaaaatcagagaccccatagatgcagttgtatctggaggcaaaggaaaatgatatctaaagaaagtaggatgtatcaattgctcaaataaagcacagaaaatgggatttgataaggaaggtttatttgtaagaaagaaagaaaatrgtagaaatgaaagagtaggaagataagaaat

SEQ ID NO: 517701 - DNA, 693 bp, Homo sapiens
ctttgccttcctaaaactatctatcatgttcacaattgcctaacactgacttagagataaactgagctgaaggtatacagagagaagggttctatcataattgtgccacgacttctggctgactgaattctgtgaaacctacagcacaccctctgatattctccctcacctcagagcagtgtctcaacactttactaattagtgtactagccttgtgattttgccatatctaggtgtcatccatactattaattttcttaatgttttctattaattattataaaattaaatacatttgttcttaagaagccaactttatgttatatcataaataggaaagyagtgtctcctgtcatgaatgtaatagaaataaaatactagtacatactatctgaatactcttgcctatcaaaactctgagcctaaggcctcacatatcttttataaaggataacagcaagtgttacagaatactaaaaacttgaaataatcaaataagagtttcttcttgatgtatttcacattggttgaaaggtaattgtaaaaaggaaatgcaagattcgagtttggtaataaaaaagtcaggattgataatgttttagattcgtacatttccaggcacttcagaaaaatatcaattttatgtcaagctccaagacaacccagaatatcccatcaggcctccccaaggtt

SEQ ID NO: 517702 - DNA, 620 bp, Homo sapiens
tagcaatattacttatagaaaagctagaactcaaaatttaatctaaagaatacatagacaaaaccctggtagactttaatattcctcagacttattctgtcaatcctaaaggtgccaaaaatgtcaaaattgtgggcacatacaaaactggccaagggaagcaaagacaattaatagttcaatctcacttaggactacagatgtaaaaaaccaaaataaaatattagaaaatcaaagtcactggggtatttttttttwaaaaaaactatacattatgactaagtgtttattccaggaaggcaagaatgcatcaacattcaaaaatcatgaacacagattatgaaaaacagcatttcaccttgaaatcatatgtaactctgatagattatatcagttatcacattatcatagttcagaaggatctttatattttgattataatgatgaaaaaactggtatgcaatttcaaaaattaaggtatattgtaatttagaaacttttctaaaattgtctatatgaaaggaagtgctttttcctgagaaactataaagtgatacgaatcttagtggctataatttggaataaagaaaatataagaatccatcttttatcatgctatt

SEQ ID NO: 517703 - DNA, 574 bp, Homo sapiens
gagctctgctggaaattagcactgtctgggacctggcagcccaaaaaggaagtaaaagcatttgagaggggggatatwtgttgctttatgaagtaatgcctctgcgatgtctttcagtgtgagggaagcactagctcttactaggaaagggtggtccatctccataatctctgaggatttaggagagtctgcaaaaccaacttatcaggggtatccacttaatgcccctatctatatttccaggtctcaggtgtttccaaccagccttagctaaacattcaaatgtctctagagctctctgactctaactaccacattttcagtgggctgcttagctttgtttttgcaaagagggccttgtctttttgtaagacaccaaagatgtcctctgactctcacacttagcctttaactgcttgttaagagccctaagtttttcaatatccctcttcaaggtatcagtacaacttagcagtaaccataaagctctgctatccttgtaggtgctgttaagaaccatatctgtaggcactgttcccaccataactgccaaaagcccgaatctgaggaccta

SEQ ID NO: 517704 - DNA, 621 bp, Homo sapiens
ttaattaatgttatttcattgagtggatgaattgggtttgggagttagagctgggtccattacaggccacagcggctgatggttatttcatcgtgtgattgtaagtttgtttcttaagccgtctgagtcttagcttcstcacacatgaaatggaggtaatgacaccacttgttctagccatctacttcgcatgacagttgagatgttgcaatgagatactgtctgtgaaagtgttctgtacgataaaccacgatacaaagccttgttatttttaagtcattctgatttctaagattttttttctaagtaaatgatctctaaatttctttttaactttcagtatggctaattttcaaaaagagaaattgataaatgtctctctagcccctcttttgtgagctgtgttccctaggtaaacactatatttcaagaagctacacccccaaaagaaatcattttgccataggctttgaaatatacacattgggcttttgtttccttgtctcaattgcatctccttgccttccagaaattgtggcttttatgacttcctgatgatcagtaccaaatcaacaaggcacaaatttgtgaatctatgtctgaaagagaggttcagcaaca

SEQ ID NO: 517705 - DNA, 620 bp, Homo sapiens
tggttgattgattgatggacgatgatgaatgttgcctaaaagatcagaaagctggtccgggggggaaaccattgaaatgtgggcaacgtagaccaagaatcatacatttataaatttaatgagcataacattttcaaataagcactacaatgatcaaaatcaccacccaccaggaatcacatacattgataagtgtcaagatatttcaaacatcagaaagctgctttttcacctgcccagattccacaagtcccagttgatgaaatgacatacagagaatatgtgaatgcagattctgctaatgataaccatagccaaaccacatgcctgtgcagtaatttttcttactttatcttattgcaaaccctttagttggtggctagggacggtaaccttcaagatcacacagcccaaaagcttcattctattataagtggagaagaccaaagccttactagrgaatgtctcatggcaaattattggtggaaacatgatgacctttgcccacatccttaatgtccagtgttttttgatttatgccactaaatcagtaaagatcccaacaggacacggatgtcccactctgaataggtgggtttattttcaaaaagaataaatat

SEQ ID NO: 517706 - DNA, 492 bp, Homo sapiens
acagtatttactgagaataacataaatgcatgaagagagaggttctagtmattatttgaatctttaaatctcttcagccatagtggaagatgaattgaaattcaattatttctcccctaagcacttaggaccccatgaaacactcaagatgcttctctctaacactggtttggtgctaagataacaaacagtaagaaatctgtttagatttaatcccttaaacatataaagattatggaaaactagacaagcacctttattataagttaaatatggtttgtgagaaaagctttaagaaaattaaatactgactgaatctttggttaacaattgcagtttatgaaagattgagtgccatatattcacaaaggtctagttttaggttgactcaactgacacatgaggaaaattagtttaagtagagtaatttaaaacaaaaagcaaaagcaggtactaaaatttgaaaagagactgcacttgttttggtacaac

SEQ ID NO: 517707 - DNA, 492 bp, Homo sapiens
acagtatttactgagaataacataaatgcatgaagagagaggttctagtcattatttgaatctttaaatctcttcagccatagtggaagatgaattgaaattcaattatttctcccctaagcacttaggaccccatgaaacactcaagatgcttctctctaacactggtttggtgctaagataacaaacagtaagaaatctgtttagatttaatcccttaaacatataaagattatggaaaactagacaagcacctttattataagttaaatatggtttgtgagaaaagctttaagaaaattaaatactgactgaatctttggttaacaattgcagtttatgaaagattgagtgccatatattcacaaaggtctagttttaggttgactcaactgacacatraggaaaattagtttaagtagagtaatttaaaacaaaaagcaaaagcaggtactaaaatttgaaaagagactgcacttgttttggtacaac

SEQ ID NO: 517708 - DNA, 571 bp, Homo sapiens
tgtcctgcctagagatgcaattggacgtagctcagcaggataagtacaacctacaagggcactcctggaaggaggagaattccctgtgtttgcatttttttctggctacacaaatgctgtgctgacttaacagcccacaggtggctgttctcttctgcctcggtgtggaaatggaargagagactgactaattttactgaatcattttactagttatgtgactgtgggtttggttacccacaggcatttctgctgcaattggttagcctgggggaagttttattttaacatgttcacagaggcttttcctgtccaagtgaatggttgtgaatgacagcgagggagactacaccctctcacgtatatccatatacaaggattgggacagcctgaccttctgggattatatcctttttttggcatctctgggtaaaaggccttaggcttctaacttcaatgttggaattttgactacagggcaatgtctcatatttcaagcatctctgtagcctaccctttacaactatcctgaagagacctctatccatctgccacaaaaaagacctaacac

SEQ ID NO: 517709 - DNA, 413 bp, Homo sapiens
aaggcctttaaactcagactataccatcagctctcctgggtctctagcttaccaactgcaaatctcaggacttgttagcttccataattgccaattccttataatcaagcactttctctttctttctctctctccatatatcttctattggttctgtttttctggagagacctgactaatatgcctggcttttcccagtgtgtgtttatcaacatagggaaagagttcaaataagaagttgcagtataacttggctgaggagtcagaatttggagcttggggctgccagaacagttaaagaagtgatccacaaagtacagagcttcaaaatctatatacaaacttccaytgaattcttgactcttaaactgtacatatgagagaaaaggctccacggagcccagaagaatcta

SEQ ID NO: 517710 - DNA, 546 bp, Homo sapiens
tagtgggaaaaaaaaggaggcgtggggagacaaaacaagatagatgcattaaagtgacttatggaaaaaaatatttaatctctggtctttataatgtgattttggccttcagcactcctatcagtgacatgactgagaagtgactgccaggcagtagaagcagggccccatgggagttgtgggagtgaatgggactatgttgaatgtacaaatataatactcctcccttcagtctatgtgcacccctagcatcatttaggccaaccatgaacataacatgktgcttccaatatcccttccctctcctctccttcccagcaacaagatgataagacctcttatctgaattccattcttcatacctgttcctcaggtatgagcccttagccaagagctgttagctcatacctgaggaacaggtatgaaaaatgtaactgagataatgagagctttccctccccccccttttttttttttttttttggagatgagttcttgctatgttgcccaggctggagtgcagtggccattcactggcacaattac

SEQ ID NO: 517711 - DNA, 546 bp, Homo sapiens
tagtgggaaaaaaaaggaggcgtggggagacaaaacaagatagatgcattaaagtgacttatggaaaaaaatatttaatctctggtctttataatgtgattttggccttcagcactcctatcagtgacatgactgagaagtgactgccaggcagtagaagcagggccccatgggagttgtgggagtgaatgggactatgttgaatgtacaaatataatactcctcccttcagtctatgtgcacccctagcatcatttaggccaaccatgaacataacatggtgcttccaatatcccttccctctcctctccttcccagcaacaagatgataagacctcttatctgaattccattcttcatacctgttcctcaggtatgagcccttagccaagagctgttagctcatacctgaggaacaggtatgaaaaatgtaactgagataatgagagctttccctcccccmccttttttttttttttttttggagatgagttcttgctatgttgcccaggctggagtgcagtggccattcactggcacaattac

SEQ ID NO: 517712 - DNA, 697 bp, Homo sapiens
ttctgtttgccatgctgggaggaatcctggcaatatgatagcttctacttcagaggctgctggagtcaggcacagagcccaacatggaggacagagattcctaagggtaagctaattgatcaccttgactttaggcagagttcttaaatcctgtaaaattaaatgtctactcttcctactaaagagattctataacattttcatgataatcctactggacattaaaagaattatgcttttcatgtaatatatcagtcagaatataaggaatgttatgttttattttaattccctatctattacaatagaccaactaacatgagargagacatagaggtatctgtcctcagtacagtcaaatcttgtaagatttatattgcctcatttcatgagaagtatatacatctttgcaagtagccctaaattctttgggaccagaagagatatcattaactaaaaaaataggcaaaataataaagtaatgtattattcttttaaccctagggatatatataaatgatcctcctaaatattaatatattttaatgttttataatagcttgtttgaaacatacaatgaactgggcttcttacctttgcagctcacagcttgagaattatgcaatctggagtttagccgacacactgttagctagttaggcaacactgccactggctgtgttaacatactgatact

SEQ ID NO: 517713 - DNA, 697 bp, Homo sapiens
ttctgtttgccatgctgggaggaatcctggcaatatgatagcttctacttcagaggctgctggagtcaggcacagagcccaacatggaggacagagattcctaagggtaagctaattgatcaccttgactttaggcagagttcttaaatcctgtaaaattaaatgtctactcttcctactaaagagattctataacattttcatgataatcctactggacattaaaagaattatgcttttcatgtaatatatcagtcagaatataaggaatgttatgttttattttaattccctatctattacaatagaccaactaacatgagaagagacatagaggtatctgtcctcagtacagtcaaatcttgtaagatttatattgcctcatttcatgagaagtatatacatctttgcaagtagccctaaattctttgggaccagaagagatatcattaactaaaaaaataggcaaaataataaagtaatgtattattcttttaaccctagggatatatataaatgatcctcctaaatattaatatattttaatgttttataatagcttgtttgaaacatacaatgaactgggcttcttacctttgcagctcacagcttgagaattatgcaatctggagtttagcygacacactgttagctagttaggcaacactgccactggctgtgttaacatactgatact

SEQ ID NO: 517714 - DNA, 497 bp, Homo sapiens
ctgatgaaataagacctatactcagaaaatttgatcatcaggcagatccttggtaagatgttgatgagacagtcatattactttgagatgacaactgaaaacacaggcaattcctcaaattaccatcatgctggagatactgttcccatcttcacgaatgacaagactgtaccagttcttctcctgcacagaatgctcagtgtagagagacaaattgtgatatttcaggtggaagtgaaaatcctggctttttgttttcaggtgcagtttggaatagtgtggtgttttctgtaaaatgaagaatataaaatgaaggtcacgtacaccttctactccatattggacatcacgatgtagcatctcagggtaggtgacctcatcagacactttcaacctagtaattcctttctttaacctagccattttatttcttggaatttaccctaagaaataatcagagscatgcataaatatttatgaataagaatgttcattgt

SEQ ID NO: 517715 - DNA, 606 bp, Homo sapiens
atactcagaaaatttgatcatcaggcagatccttggtaagatgttgatgagacagtcatattactttgagatgacaactgaaaacacaggcaattcctcaaattaccatcatgctggagatactgttcccatcttcacgaatgacaagactgtaccagttcttctcctgcacagaatgctcagtgtagagagacaaattgtgatatttcaggtggaagtgaaaatcctggctttttgttttcaggtgcagtttggaatagtgtggtgttttctgtaaaatgaagaatataaaatgaaggtcacgtacaccttctactccatattggacatcacgatgtagcatctcagggtaggtgacctcatcagacactttcaacctagtaattcctttctttaacctagccattttatttcttggaatttaccctaagaaataatcagaggcatgcataaatatttatgaataagaatgttcattgtaggattatgtataataataaaaayggaatacctatgtggaaatgtctaaataaactatggtatatctatagaatggaatattatatgcccattaaaatcatgtgctcaaagattatctaaagacat

SEQ ID NO: 517716 - DNA, 530 bp, Homo sapiens
ctgccgcaactgcaaatgccaggcaygctaggatcataccaacagccattttcctaagtgatctgtggtggaaaggagaaacaattatatctaaactttagactctaaaggatgaaatccaaactctgtagcctattattaaagactgcattagactgttcttgcattgctataaagaaatacctgagactgggtaatttataaagaaaagaagtttaattggcttatggttctgtagctttacaggaagcacagtgctggcatcttccagcttctggtgaagcctcgaggagctttcaatcatgggagaagccaaaggtggaataggcatgtcacatggtgaaagcagaagcaagcgaggagatgggaggtgccacacaccttttaaatgaccagatcttgtgagaactcattcactatcatgaagatagcaccacagaatggtgctaaacccttcacgagaattcactcccatgatccagtcatgtcccaccaggccccacctttatcactgggaattacatttcaac

SEQ ID NO: 517717 - DNA, 530 bp, Homo sapiens
ctgccgcaactgcaaatgccaggcacgctaggatcataccaacagccattttcctaagtgatctgtggtggaaaggagaaacaattatatctaaactttagactctaaaggatgaaatccaaactctgtagcctattattaaagactgcattagactgttcttgcattgctrtaaagaaatacctgagactgggtaatttataaagaaaagaagtttaattggcttatggttctgtagctttacaggaagcacagtgctggcatcttccagcttctggtgaagcctcgaggagctttcaatcatgggagaagccaaaggtggaataggcatgtcacatggtgaaagcagaagcaagcgaggagatgggaggtgccacacaccttttaaatgaccagatcttgtgagaactcattcactatcatgaagatagcaccacagaatggtgctaaacccttcacgagaattcactcccatgatccagtcatgtcccaccaggccccacctttatcactgggaattacatttcaac

SEQ ID NO: 517718 - DNA, 530 bp, Homo sapiens
ctgccgcaactgcaaatgccaggcacgctaggatcataccaacagccattttcctaagtgatctgtggtggaaaggagaaacaattatatctaaactttagactctaaaggatgaaatccaaactctgtagcctattattaaagactgcattagactgttcttgcattgctataaagaaatacctgagactgggtaatttataaagaaaagaagtttaattggcttatggttctgtagctttacaggaagcacagtgctggcatcttccagcttctggtgaagcmtcgaggagctttcaatcatgggagaagccaaaggtggaataggcatgtcacatggtgaaagcagaagcaagcgaggagatgggaggtgccacacaccttttaaatgaccagatcttgtgagaactcattcactatcatgaagatagcaccacagaatggtgctaaacccttcacgagaattcactcccatgatccagtcatgtcccaccaggccccacctttatcactgggaattacatttcaac

SEQ ID NO: 517719 - DNA, 530 bp, Homo sapiens
ctgccgcaactgcaaatgccaggcacgctaggatcataccaacagccattttcctaagtgatctgtggtggaaaggagaaacaattatatctaaactttagactctaaaggatgaaatccaaactctgtagcctattattaaagactgcattagactgttcttgcattgctataaagaaatacctgagactgggtaatttataaagaaaagaagtttaattggcttatggttctgtagctttacaggaagcacagtgctggcatcttccagcttctggtgaagcctcgaggagctttcaatcatgggagaagccaaaggtggaataggcatgtcacatggtgaaagcagaagcaagcgaggagatgggaggtgccacacaccttttaaatgaccagatcttgtgagaactcattcactatcatgaagatagcaccacagaatggtgctaaacccttcaygagaattcactcccatgatccagtcatgtcccaccaggccccacctttatcactgggaattacatttcaac

SEQ ID NO: 517720 - DNA, 555 bp, Homo sapiens
tatggtagctagtatagaacccattcccacaataagtaagaatatcaaataaaatacatgacaccagttttcagacattgtactactgtcagaacaaagttgtggtctattttagagwgaaaacatgccaggtgagatttaggattgcctttgctttctttctgggaacacaatcagaatgagctgtaaggagattgaattcaagcagaacataatattcttatcagcaatagaaacagccaccagaatgtgagcctgctgtggatgaaggaagttggagggtaaagtatcaaagagatggaagctgtaaagagaaggaattccagaaatgtaataatgtcccatttggtctttgaacaatgactaagagtgcctacactaaccaagactctacaaggcctggcaggaaacagctgctggtaatctctgacttgaagggagactgtagttcacttgggtctgagagacataggagtttcacatagctagagtaaggaaaactcactgcacatctaaattaaagactactttgtatctaccttaagaaagattaaa

SEQ ID NO: 517721 - DNA, 657 bp, Homo sapiens
agctggcgggtaccatatttgctgtgtgcccattatgggccactgttctgtccagaaagtcttaacccttgtgtctctacatcactggatcccctgccaacataactgagccccattcagatggcagcagctacagagggctggtggtacacaggggagctgtgggatttccagagatctagccctcagggtgggctgcttttaggagtaaggagagtgaagcatgtcagagcacccctagggacaaaggaaaccagagtacacactgtactgtgcctgagagctccaggcttgtgagttgaaggtgactgtgccctttcaagtggaaatgcaggtaggtgctgggctctataggggaggaataaggttctwccccagagatgaggtgacaccagtgcccagaacagatgtgaaaagggtgacttctccttccctgtcgcccactgctgtggatgccactgtggctattcccatgaggtgctggcgtgggtgtgccagtggatggccattccagaatattagggtggctgcaacccaactgtcagtgtgcccaccaggcccagacttgcatagaaggcacagcatttccccctctctacacagagtggtagcattcctgcagcagagatcaggtgactggcaaagccatctgttttg

SEQ ID NO: 517722 - DNA, 667 bp, Homo sapiens
gtgacttctccttccctgtcgcccactgctgtggatgccactgtggctattcccatgaggtgctggcgtgggtgtgccagtggatggccattccagaatattagggtggctgcaacccaactgtcagtgtgcccaccaggcccagacttgcatagaaggcacagcatttccccctctctacacagagtggtagcattcctgcagcagagatcaggtgactggcaaagccatytgttttgcgctgaggtaagaagttaccctccaaggccatttggaggaagagtcacaagaaagttgttttctgtggccctcagctacaatgcagcctggagatagtgacagtgtctatctaagttagaaatcatgagccctggagcaggggtgtgatagagaagcggattacattcctgcctgcctgagacatgaagctagtgcagccccttccctctgaccccacccacagaaacctcatttcaccacaagctccccctgccacttccattagggctggtgcttatgcttgtcattggggttcccaagggtaagcttagcaggccagtgccatccagttttgttcccaacactggggcttaggagcaaactcagggcaccaggctttccacaggccagtctaccatccaagaccacagaaaactcctcccagctg

SEQ ID NO: 517723 - DNA, 601 bp, Homo sapiens
tctttccaagacaccatctaaagaatctgcttctctgaaggatgcattacctcctatatccagtgactgatcaatgtaagaatacaaaaattcggccagttggcctaaatttcgacaactttaaagagccctgctgacttcagaatttcctgtgggatcagaggaggtctttgttttgactgcattgcagcagaactgctctgttcccctattctgcttccctctcttcagtacagttgtttcttcctaatgcactcccattaatttcctggacacagatctccctttyacggcctgtttcccagagcaccagacctatcacagttagtgccagaagtgttcgaggaagcacgttgtaaagtgttatttctgtttttgtttttgtttttatggtttttttgttgttttttgttttgttttgttttgtttttgtgagctctaataccttctggtggcctgccacagcaataacgcaattgttagaagttttaatggtgataagtagagatgatatactagtgaaagtgaatgtgcattgaaggtgaaatgtatcaggctccagaaatatgagaaaaagctattacaggaactgtagaattag

SEQ ID NO: 517724 - DNA, 646 bp, Homo sapiens
tccaatgcattaaaaagactttaaataaaacaaaccagtgtaaatggactaaatgactaaattctgccatgcacctctctatgtagtttcaaactacatggacaagctaggtcataggtaagtgcaatgtggacacagcatgagttagaaagaaagtgatatagataattaaaatcactagagtttgacacatgaggcagggatgaaactttggtgcttgtggttttgtaggtggcgctgagaatctttgaataaaaatctcagttaaagtaactgtatgtcttcttaaagagcctgtgaaaatggagaagttataggatacattatctcagaaaatgaataaaaaatgtaaaagcattagagcttcaaccagatgtgcactcagaattgaaagctgaaggatgcaactatcaccatgaacatgatgtacaacatccatctttggtccatccattcacttagcgacctgtgaataatgtttttcaaatggcttcatcatcactcacacaggcccgaacccagacccacrttataggttccggagtcaaaattttgttgacaatgaagagtcctatgcacagaaatataagcaagagcaatgtataaataaatcttttagcattaaccagccataaaatttttcttc

SEQ ID NO: 517725 - DNA, 580 bp, Homo sapiens
ggttttaaaactttatcttatattacaaactctgccttaaagaaatttctgtgatctttagacattggcttaatattcttgaagttcagtgaattcatctacagagtagggtgagaataactgtttcatgtaaatgttgagatgatttcattaagcaagatttgagttataattagtaaagcttgacataaatggaaattttctgaacgttgttaaggagctttcccattaggtttgcctaaagtatttattarcacccccgcctttctatctcttatcatcagcaaatatttttaggagcctgtttcctttatattcattggtaccattctaaacgaccattacttctttacaggactaaagaaatctttattttgccacttccaattcttttttcacaacaccacacagatcctttattataaatttaaataagaaaagatgacttccttatacaaaaccaaaaaaaaattattcatattgctcttggtataaaatccaaactactaactctaactcaaaaacaaaacagacacacacacacacacacacacacacacactcacaaacaatgcccact

SEQ ID NO: 517726 - DNA, 580 bp, Homo sapiens
ggttttaaaactttatcttatattacaaactctgccttaaagaaatttctgtgatctttagacattggcttaatattcttgaagttcagtgaattcatctacagagtagggtgagaataactgtttcatgtaaatgttgagatgatttcattaagcaagatttgagttataattagtaaagcttgacataaatggaaattttctgaacgttgttaaggagctttcccattaggtttgcctaaagtatttattaacacccccgcctttctatctcttatcatcagcaaatatttttaggagcctgtttcctttatattcattggtaccattctaaacgascattacttctttacaggactaaagaaatctttattttgccacttccaattcttttttcacaacaccacacagatcctttattataaatttaaataagaaaagatgacttccttatacaaaaccaaaaaaaaattattcatattgctcttggtataaaatccaaactactaactctaactcaaaaacaaaacagacacacacacacacacacacacacacacactcacaaacaatgcccact

SEQ ID NO: 517727 - DNA, 590 bp, Homo sapiens
cgctaccctctcactgctctgaaaatgtggactcctctcccactggagtgctggctgcatatatcagcttgacactcctgggctgcacactgcagctctagggtgagctcaggctttatgttctcaccccagcttgaagacaacaggggaagggaccttggcagtgattgtggtagatgaccttttacttgtttcttggggttccaccccagagagatgcagaaccactattaatcagtacaatcgaccagggtggagtggctgtgctgtgggattaagccaaggggggtctcgcytggtgataaacaggtgggacagggatgtcataggggagacaaagtggcctcttctccttaaggaaactacagcttgctggaggtgtggttaaagccctccgagtgtttgttacttcctaagtctgagggcagaaagggcagtactgtgcagtggcagtgacagaggggcttttggttatctctgggtgcttcaccttagaaaaatgtggagccattgctgctgggcatgttcaaccaaaatgtgaggcactacacagctagcccaagctaagggctccacttggtgaagaacta

SEQ ID NO: 517728 - DNA, 650 bp, Homo sapiens
agccaagatattgacatgcatgtgtataattagtttatctatacaattaatctatgctttaactataatttgatttaaaaaatcaatgtgatatggtgacataacaagaaatatatatttgatcttcctctctggttcttggcacagagtttctaaaatctttgtaacctcaggagtgttaagattgataggagtgtaattttatattcataacaagtcccttttaatcacacctgagttggtgtctggaagttcctagatgacttcaggatggggctggttgacagaaaaagcaatcatgtgattagaggtttggaaatttcagctccattcatgggggacttcagggagaagagaaattctgggagytgcatttatcacctaaagccaataatttaaccaatcatgcctaattatatagtgcctacataaaaaccctaaatgaagggattcagagagctttcacattggtgaaagcatccatgggctgagagaatggccctaactctctgggacagaagctcctgccttcaggacctttccagacctcttcctatccgcctcttcatctgggtattcttctgtatgctttataatatccttgattttaaaccattcaatgtaagcaaattctttttctgccttttatc

SEQ ID NO: 517729 - DNA, 641 bp, Homo sapiens
agccaagatattgacatgcatgtgtataattagtttatctatacaattaatctatgctttaactataatttgatttaaaaaatcaatgtgatatggtgacataacaagaaatatatatttgatcttcctctctggttcttggcacagagtttctaaaatctttgtaacctcaggagtgttaagattgataggagtgtaattttatattcataacaagtcccttttaatcacacctgagttggtgtctggaagttcctagatgacttcaggatggggctggttgacagaaaaagcaatcatgtgattagaggtttggaaatttcagctccattcatgggggacttcagggagaagagaaattctgggagttgcatttatcacctaaagccaataatttaaccaatcatgcctaattatatagtgcctacataaaaaccctaaatgaagggattcagagagctttcacattggtgaaagcatccatgggctgrgagaatggccctaactctctgggacagaagctcctgccttcaggacctttccagacctcttcctatccgcctcttcatctgggtattcttctgtatgctttataatatccttgattttaaaccattcaatgtaagcaaattctttttctg

SEQ ID NO: 517730 - DNA, 641 bp, Homo sapiens
agccaagatattgacatgcatgtgtataattagtttatctatacaattaatctatgctttaactataatttgatttaaaaaatcaatgtgatatggtgacataacaagaaatatatatttgatcttcctctctggttcttggcacagagtttctaaaatctttgtaacctcaggagtgttaagattgataggagtgtaattttatattcataacaagtcccttttaatcacacctgagttggtgtctggaagttcctagatgacttcaggatggggctggttgacagaaaaagcaatcatgtgattagaggtttggaaatttcagctccattcatgggggacttcagggagaagagaaattctgggagttgcatttatcacctaaagccaataatttaaccaatcatgcctaattatatagtgcctacataaaaaccctaaatgaagggattcagagagctttcacattggtgaaagcatccatgggctgagagaatggccctaactctctgggacagaagctcctgccttcaggacctttccagacctctycctatccgcctcttcatctgggtattcttctgtatgctttataatatccttgattttaaaccattcaatgtaagcaaattctttttctg

SEQ ID NO: 517731 - DNA, 628 bp, Homo sapiens
gcttgcttcgtgtgtggggaaaatcccacacatttggtcacagaagtctcctgtgttgattattactgagtgagagaagagaaaaaccacttaagagtttatgtgtgtttttccacacaactggtagaaatgtatggaggctagctagttgcttgtatgagtgagttctgccagatctcctagaaacacatattagatgcacaataaatatatttggaataaaatgggtrgacaaggttagcatgagatcgatagtaaaatcagaagagggtgtcacttataagtcagtatcacttatgaacatagatgcaacaatcctaaagaaacttagctgacagactctacaagtatattaggagaatacacatatgtctacttctttaaatcttgctcagatgtcattttctgaaggagctatgctttgcttgctctagcattgcagcttcccctgcagcactcccaagccaccttatcctgttccctattttgtctcatagtgtatatcaccttctaacatgtcttataattatttgttatttattgtcttctcctcctggtacaaggtaaacaccataagggcagggctttttttctgttttgttcactgatgtaagccaactacctggaa

SEQ ID NO: 517732 - DNA, 523 bp, Homo sapiens
ggaaaataattatatgcagaatgaattattgccatgccattcttggagtccttagaattttcactatttcatttaagatctaattaccatccagtggatggatgtcattatattagactcagttcagcaataaacaatctgagtatgagtaatgaaggcaaagttaaattagtattgacttcccattatcttcttcttgtttaggaaaaggccactcactcagaactcygtctgtttaagtaattttgagaattatacaattgatatcatagcacttttactccatcttgaactgtgtttactcttttataagtatttcctatagtattgtgtaatgatagattaaagttatactccaccattataggaattagactagacttctgagtttacttctaatctttacaagtttgggatgccacttccaggagtaaaaattgtgtgagcagatccaagcataaggggataggtgttatgacaaggaaatcaaagcaaacatcatctggcataagtttggttccag

SEQ ID NO: 517733 - DNA, 624 bp, Homo sapiens
cacgagcaccacagcaggactattaagacaccctgttcccctgtattttctaagccaagtaaaatccagtttttatctcaggtcaaaacaactaaacatagacagaaaattgatgcataacccataggctgtcccacatggaatataaaggccaactgtgtctcttacaagaaagataacagctaagtctttttaaatactccatttatggtataatacaaagacctccttatcctattaattttaaacgaattgtatatgttatttagagggagatttttttttttttttttgagacagatcttgttcggtcaccaagactggggagcagtggcctgatcatagctcactgcagcctcaaactactgagctcaagcaatcctcctgcctcagcctcctaagtagctaggatgakaggtgcatgccaccaggactagctaatttaaaaaaaaaattagagatggggtcttgctgtgttgtccaggctagcctcaagtgatcttcccaacttggcctccctaagcactgggattatagtcatgagccaccatgcctgaccctagagtaagaatttgacttaataagttgggtgccaagatacacaggtcttacttttcttcttta

SEQ ID NO: 517734 - DNA, 640 bp, Homo sapiens
tctgtcttgattcaaactctaatgaagatcaatcaataatttcagaataaattgattagctggggtagccataaaaacaaatcagtttaagccttgtgattatttttcagcattaaagattatgtttcactatttctcaaaggatgtatatgttatatgtaaatccattggaaggataaaggaaaaagtaactagtgtaagtttcttaatatttccatgtaatgatccaaaattgatacttttggttagtcttagcatccatattattgacaaatgaaatgtttattacttgttaaaataaaactcagtatagtttagttaattacattggaagtttggaaataggtgtagtgagttgaatgattactaactccccccttgcaaagatgtccacctggatcctcaaaatataactaaatktggcacaagggccttggctgatgtaattaagataggcatctcaaaatgagatcatcctggattagggtgggcctaatccagacccaatgacaagtgtctatataagagacagaaaaaaaaataaaaagaagaagacagagagacactgggaagaaggccacctgaagaatccagcagcaattggaatgctatgtctgtacaccaggaacaccaaggatcg

SEQ ID NO: 517735 - DNA, 592 bp, Homo sapiens
caatgtctgctcataaattttaaaagagaactgtaaatataaatttgtgaatctttacygcaccaataatttgaaggtaggtggcaaaaaaaaaaagcaaaacaaaggcaggaaataactcaaatgtggctttttgccatttcaaatagagtaaacttaaataaaaattataaatggatgtagtataccaataaagatctagatcatgttatcaccataaacatccctgaaccactgatcctacccctctctgctaacttgatactgaagaaatcagcactagggtaatccattttgaagcgagtcttgccaaaatcttctctctggcttctacctgtagtatattatcttttcttccctgacattttatctcttttgttctatttgctcccatcagcctgaatttctgaatgtttcatcttttcttggacactccagtatacaaacatgtcttcactttggacataatcttagtggaattcaactgtgagttgtgtaagtgtaataaacagcttaactaccattctgtaaggaggctgcttacctaatccagcaggctcttgatgacaactgctcattggatcccctaaac

SEQ ID NO: 517736 - DNA, 637 bp, Homo sapiens
ggcatggtggccctcgcctgtagtcccagcttctcagggggctgaggcaggaggatcacttgagcccaggaggttgaggctgcagttagctgtgatcatgccattgccctcccgtcgaggtgacagagtgagaccccatctaccaaaaagaaaaaaaaaaatatgagtaaggctgtaaggctcccacctcatttttgtcctaccctttcttccaatctttaacatctgttgcaataacaagggaaaccgtcattgcaagctctgggcaatgatttgtcctgttgggcgccttaagtaactgatcttttttgtttgyttgtttttcatgtggttataaaactgaaaattagtcacagtgggagaacatttaaagtagaaaaaaagagtgggcagaagtcaaggaatgcaaatatctgagaaacactacatgagaggaactttctatagaattaggccagataccacaaattggcctctggggaaatttccaggtcacaccgagaacatccaaacctactggaacctaagataagaaccaggcaaagcttcaccaatataacatactttattttgtaacctgggcataaaaagtacattaaagagagataagaagaactaaaatataaaatgctgtgaa

SEQ ID NO: 517737 - DNA, 372 bp, Homo sapiens
cggggctggagacgccgcgtccttgggctgggggaagagggagtggggagaagagggaaatggccagtgtaagtaaagagctccccgccgaggcctggacgccggcagctagtgagagccctgaggccgagaagcagggagagaagagggctggaaccgtgcggggaagggccgcgaggagagcaggggcgccgccggtgtcgctgcactcactctgcgtagccagtggcccagggcagccgccgagtctccttgaggatgaggayggggcgggcgatgtggtcggcgctgcactccacctcgtcctgagacagccccaggaactctggccgcccgtaggggaaacgcaggggcaggtccgagcctccgcag

SEQ ID NO: 517738 - DNA, 600 bp, Homo sapiens
tgccaggctaattttgtattttttttttttagtagagatgcggtttcactgtgttggccaggctggtctcgaactcttgacctcaggtgatccgcctgccttggcttcccaaagtgccgtgattacaggcgtgagccaccatacccagtgagattcactaaatttttagatattactttgttctytgccttcttgttacttctttcctgttcctttcttttttccttgtccatctttaatttggttaatatgaaaatgatacagtaattcatagtagctttctttgccactttgcctcattcagagcaggtaatactagctttctcttgaaacattgtagttttgaaattggcagcccaataaaaaatgttgaataccaaatttaattgaaccttttgtaattttccatttaaataaattaaatttctctagactctttgtttaaaagcattgagtgtaaataccgagtttcctttccaaaaataagtgctattaagatgaaacaagaaaaagaatgattaccgagtgattactaggctttctcctctcagggaaagcattctctcctgacgggtgcgtagtattagaaaggagaaagag

SEQ ID NO: 517739 - DNA, 596 bp, Homo sapiens
gaaaagggagactgagcaagtgagagctccagccagcaggaagatagatctttcccatgcttgtttatgaccttttcctgtgaagctgttgtaataatagcttctgtatttattgggaagtatttttaagttgtaattcacatggtttcaaactaattccttgaaattagttggaaaaccaaaaaatatttgagagtaaaacatctgcacgtttccttctttcagtaccaggggaggaggcaggaaagctgtttaagtaggtgttaacttgggggtcttgaytggtgcagggcaagataactgtcaaatgagaagagatattgaaaggaccccaagactatgctatctcctctgggacttgggggatttgctcctctagacttatcctggtctagggatggacttgatgcatgccagtacctcttctactccatctgttatcctgacacatttccagccttgaatgggggcttttgggtctccaatcattcttcgtattactccttgacttaaatctggtttcacaacattctgtttctgtcctgggttgttacttgatcccaatgcctggatatttccttctttaacaagttctt

SEQ ID NO: 517740 - DNA, 622 bp, Homo sapiens
cagagctgataagtggggggggtggtacgggaatccaggaattccaaccctgtagcctgcattcttaatctctatattacattaatctcttagagatgagtccttattcactgaacatgttaaattaattttttcttggattgtttctttcaaataacacttaaaaaatttaaaactcccatttgatgttctgggaaataatttcaaggaaaattaaattaacgataaaacacgyaaagctcatgatattttggaaagttgatatgacccaagttggcattaaactcaaaatcaaagaacaaaacaactttacaaacaaatgttatttaaaggctcagtgacttatgataattctgtcagccttcactatgatagcaaattgtgaacaccacatttgtacatttccttctggttccacatgtttgtaataatgcaatgttatccagtttaaaatgaaacagatgctcacaagtttaagacactctggggaggtccactcagctggcattatttcagcagtttcacgtgctgatgacaaaggactggaagatagctgaaggtgaggctgattagccaaatcactaaagggtgctgggccatcctaaaagcacagggcctgtgc

SEQ ID NO: 517741 - DNA, 622 bp, Homo sapiens
cagagctgataagtggggggggtggtacgggaatccaggaattccaaccctgtagcctgcattcttaatctctatattacattaatctcttagagatgagtccttattcactgaacatgttaaattaattttttcttggattgtttctttcaaataacacttaaaaaatttaaaactcccatttgatgttctgggaaataatttcaaggaaaattaaattaacgataaaacacgtaaagctcatgrtattttggaaagttgatatgacccaagttggcattaaactcaaaatcaaagaacaaaacaactttacaaacaaatgttatttaaaggctcagtgacttatgataattctgtcagccttcactatgatagcaaattgtgaacaccacatttgtacatttccttctggttccacatgtttgtaataatgcaatgttatccagtttaaaatgaaacagatgctcacaagtttaagacactctggggaggtccactcagctggcattatttcagcagtttcacgtgctgatgacaaaggactggaagatagctgaaggtgaggctgattagccaaatcactaaagggtgctgggccatcctaaaagcacagggcctgtgc

SEQ ID NO: 517742 - DNA, 622 bp, Homo sapiens
cagagctgataagtggggggggtggtacgggaatccaggaattccaaccctgtagcctgcattcttaatctctatattacattaatctcttagagatgagtccttattcactgaacatgttaaattaattttttcttggattgtttctttcaaataacacttaaaaaatttaaaactcccatttgatgttctgggaaataatttcaaggaaaattaaattaacgataaaacacgtaaagctcatgatattttggaaagttgatatgacccaagttggcattaaactcaaaatcaaagaacaaaacaactttacaaacaaatgttatttaaaggctcagtgacttatgataattctgtcagccttcactatgatagcaaattgtgaacaccacatttgtacatttccttctggttccacatgtttgtaataatgcaatgttatccagtttaaaatgaaacagatgctcacaagtttaagacactctggggaggtccactcagcyggcattatttcagcagtttcacgtgctgatgacaaaggactggaagatagctgaaggtgaggctgattagccaaatcactaaagggtgctgggccatcctaaaagcacagggcctgtgc

SEQ ID NO: 517743 - DNA, 633 bp, Homo sapiens
  misc_feature (1)...(633): n = A,T,C or G
agtgcagtggcacatacctgtaatcttagcacaytgggaggccgaggcgggtcaatcacttgaggtcaggagttcaagaccagcctggccagtacgtggtgaaaccccgtctctactaaaaatacaaaaaaattagccaggcatggtgacgaacgcctgtagtcccagctactcgggaggctgaggcacaagaatgtattgaacccaggaggtggaggttatagtgcgccaagatcataccactgcactgtggcctggatgacacagcaagactctgtctcaaaacacaacacancaaaaacaaaacaaaacaaaacaaaacaaaacaaaacaaaacaccacgtaccactggacccctccccagaggctgagtttcaggaatggaggtgtctgggagtcttgggtaacttgcatttccagcaagttctcaggtcatgctgatccaggcccaggaaccacactttgagaaccaccagcttaaggagttatgtgggcatttttactttattctgaagataagcaaccaacctctctaacggaagtaatgtatgaaaactaatggctgtttctccattacttacccaggaattacctagcaagccatggccaccatccctcttaccctccacaatt

SEQ ID NO: 517744 - DNA, 563 bp, Homo sapiens
gtgatattctggtaaccgtttaacaacctccactggggaaaggggaggaccctactttgtagtgtttgcagatgtccatggtataaatactcccactatggccaattttaagctactaatgtgatttcaaccggctcacaaaattcctccaaatttaataatgggcattcaggagccaccaggagctggctccagcacaccactgtgacccttaaagagccatgatagggcattgtctatatcaaaatctaacttgagtgggccccacagactgataagtttttacctggacttctatctgagtaatacacattgtgatcttcaaaaagatggctcattaataagtcaaatattaggctgaattaaatcatataagcttcattctactaaccagcctattttaactccttgtctgcyttcattctactaaccagcctattttatttttatttaccttgtgtataggaaattgatttccctttagcatgaccttatattccataaagtaatcattcttcaattgagctaggaatctgccattaacaagttgctttttgcaagta

SEQ ID NO: 517745 - DNA, 370 bp, Homo sapiens
tgttaacagagcattggcatccggggcagtgtcttgaatcaggaaactgtgttgcctccatatatagaggataaattagtaggttgaagaaaagatatactacttcrtttttctaaaattaaattaaatctatctctgaacccctacacatcaaggcagatgagtaacagtccaatacttgtcatatgggagatgcagttcctcctcccatgacatcatacaagaatactgacttataagatgccagaaaataaatgggagggagaagccaaggagccacgtttatttttgaccctttttgtcatccaatttgcctggtattaggcagcctcaaaggggctcctccttttgtctgttcatgaactcaacc

SEQ ID NO: 517746 - DNA, 642 bp, Homo sapiens
agtataggattgtgcctcttctttgtaaaagatgattcaccattccagtcagtcaggatttatctggactctgattaaatcaatcagttaattccacaaattcctcccaggcttgggtcactcacaaattttatcaccatgccatcagcaccctgacgttaaggtactgaaaggaacaaagttagggatagagatacatggcatataagtacagacctctcttcagtctgcctgattctttcagtagtaagycaggtttttatttcacctaactggattgccatcagtccatctccatcttgctcactaagagaggcagtaaagcacatttgctagctagagaagcagactttgaagctaggtcatctggattcaaatttcagctctcccatttactagctctgtgggcaagttccttaatctctttatgcccatgcttccacatctgtaaaatgggaatagtacctaataattggttaggagcattaagctagttggcctatgtaaaacatccaaaacagtacctggtatataataaatttgctataataatgactactgtaggtacctcctgccagcatccttctgatgctgcctgtctagtataggtcttgctttctttctgaactgatactgtagtgt

SEQ ID NO: 517747 - DNA, 645 bp, Homo sapiens
ctgagtataggattgtgcctcttctttgtaaaagatgattcaccattccagtcagtcaggatttatctggactctgattaaatcaatcagttaattccacaaattcctcccaggcttgggtcactcacaaattttatcaccatgccatcagcaccctgacgttaaggtactgaaaggaacaaagttagggatagagatacatggcatataagtacagacctctcttcagtctgcctgattctttcagtagtaagtcaggtttttatttcacctaactggattgccatcagtccatctccatcttgctcactaagagaggcagtaaagcacatttgctagctagagaagcagactttgaagctaggtcatctggattcaaatttcagctctcccatttactagctctgtgggcaagttccttaatctctttatgcccatgcttccacatctgtaaaatgggaatagtacctaataattggttaggagcattaagctagttggccwatgtaaaacatccaaaacagtacctggtatataataaatttgctataataatgactactgtaggtacctcctgccagcatccttctgatgctgcctgtctagtataggtcttgctttctttctgaactgatactgtagtgt

SEQ ID NO: 517748 - DNA, 558 bp, Homo sapiens
caatcacgctcacccccttctcgttggcgccccagctccgccgcttggcctttcgggaagggtggaggaccagaagacggggactaggagcgctctgccgacgtcagcttttgtctccagtattttcgggggctggtggacgcgtgggcgatagggtgctgtccttggggtgctgtgtatatgggatgatgacgcttatcagcattatctagtcctttccaccccgaaattcgccccgattaaagactgtgttgcattatcaggtaatgagatgtgagggagggtctttgaaagtggaaaacctgggcgtcgaggccactgtgccatcttgggcctcagtttccttatctgtgaaatgagggtgaatgtaaagctgctatgtaaaatgtaaagctctacataaaccactctcygcattactttggatatatgagaatattaacgtttgacgtctacgagactagatcccattcgagcatcacctcccataaccttacagactaacccctcttttaaatctcagtggttcgtaatcttacagactaacccctcttttat

SEQ ID NO: 517749 - DNA, 629 bp, Homo sapiens
gttactttgtaaccattagaatggtaaaaatttaattaatgtaattaaattattgggagaaagcttaaaactttcgacaatactgctttgttaataacttgttacaaattaaattttatgtttttaaaaggtggtatttaaacttctgactagaaaattcagattatcaagtaagtgcccctacaaattctcctaaaccttaagaaaagctatttttatgacctgcttctgtgtttatgatcttaagtgataaagtcttagacagttgaaagacaattgctcaatgaccttacctgttgatattaatttatatgacttgatttctttccctaagattgaaaaggctgtggtgtctcagcgcctgacagaatctccgtgtgctttggtggccagccagtacggatggtctggcaacatggagagaatcatgaaagcacaagcgtaccaaacgggcaaggacatctctacaaagtaagcatcctcggraaagtccctgccagggcgttgccccttacccaatctttgttttggagataataccagcttcaatacaaagagtaaaattgccttaaatgtctaccactgtctactataaggtagacaacaagtttacgaagggatttctccta

SEQ ID NO: 517750 - DNA, 588 bp, Homo sapiens
tgtgcaatgtttttacatatcctccaattaatcaaatatatacacatgtgtatatttattttaaattgaatgcctatttagattttgtttagttatgaaatattttaagcatatggaaagctacagaaacaaaagtcatttagtacccagtatctacaataacgttttgtcatttttttttcagagttcctaacctttcaggcccaattactatcactatcttgagggtggagagtgtctctcccatgcatacttttatacttttattacatatgcatgcctcacaatatcatacagtattgttttatgttgattttaattgataaacatggtatactgaacatattttgccacatgctttctactctattattgagatttgtacatcatagtacacacagctctcattcattttaacttctaacatgatataaatatactyttattttgtattgtttacagatacttttagttattgtttttgctactgtaatgataccaatgaacttttctgtacatgtattctgcactgtgtaataatttatctggaaaatacacttagaaattaagcaactggatcttagttga

SEQ ID NO: 517751 - DNA, 515 bp, Homo sapiens
ctgtcttccacaatggttgaactaatttacactcctaccaacagtgtaaaagcattcctatttttccacaccctctccagcatctgttgtttcctgactttttaatgatcaccattctaactggtgtgagatggtatctcattatggttttgatttgcatttctctaatgaccagtgatgacagcctttatcattctaggaaatgaaatgagtactatattctgtacataatcctattaaatttcttaaagaatttrttgccatttaatccatccttgcgtttcatgggttgctgtagttcagtggctgttgtagggaatttgtctcccttctttttctatcccagttattttgtgattttttccagatgtgcatgttctccattgatatatctatgcattgtcttagaaagtttaaaatctacccaggaatctatactagctaaaagctctttgagtgtcccttcacagctatacaagatgtttttagtaattgtgttctgtagagctcagcag

SEQ ID NO: 517752 - DNA, 614 bp, Homo sapiens
tctgtattagcagtgtgaaaatggacgaatacagtggtaattgcaagtggcttcatatacgatataatttccctaataaaaatttatgcaaacatgacttaaaagtttttactattataagtagaattcaatactattttggtttgggaaagtttggttattagatcataaagaatttaagatttaacttttactctttggctttaaatgtatactccagagtaacattgaataaatcaaatctgtcttccaccagacagttcttttcagtgtttttaaaaaagctatcatgttcctcttaaaatgtgtctcttccaaggtaaacatcctcagctctttccatcattccttacaagttgtggtttccagacccttcacaagattgtttgttctcctctggatgggctccaatttgtcaaagttctttgtaaaatatggtgccagaattaattactgtaaraacaataaccgtaataataataaccaccatttattgactgcacacaatgttccaggaactgtgctatagacttagctcttttaatcctcacaaaaccctctaatattgtatgttattatctttatatttttagacaagaaaaccagttttaata

SEQ ID NO: 517753 - DNA, 614 bp, Homo sapiens
tctgtattagcagtgtgaaaatggacgaatacagtggtaattgcaagtggcttcatatacgatataatttccctaataaaaatttatgcaaacatgacttaaaagtttttactattataagtagaattcaatactattttggtttgggaaagtttggttattagatcataaagaatttaagatttaacttttactctttggctttaaatgtatactccagagtaacattgaataaatcaaatctgtcttccaccagacagttcttttcagtgtttttaaaaaagctatcatgttcctcttaaaatgtgtctcttccaaggtaaacatcctcagctctttccatcattccttacaagttgtggtttccagacccttcacaagattgtttgttctcctctggatgggctccaatttgtcaaagttctttgtaaaatatggtgccagaattaattactgtaagaacaataaccgtaataataataaccaccatttattgactgcacacaatgttccaggaactgtgctatagacttagctcttttaatcctcacaaaaycctctaatattgtatgttattatctttatatttttagacaagaaaaccagttttaata

SEQ ID NO: 517754 - DNA, 436 bp, Homo sapiens
ccttgcctgagtcttccctgcccccactcttgcctctgagcctatgccactgctgttcyctctgcccgtgcacagcagggacctgggaggactcgggaaccaggccccctcggtctgaaacctggcctggtgggtgaccggatgatgagcagttcctaacctctctgtgcctcagtctcctcatctgtaaactgggggtggtgatagtgtctgcctgactctcacgggggctactgtgaggatttaatacaagtaaacgcttagaacacagccccagcacgtggcaggtgacagcagtgtgtgacggtcagtccccaccctccacgtctgcctaacatctcaccctcggggctcagcatagacgcccctccccggaaggcatctggcatctctgcaaccccagtgcccagcacagggcctggcacatggaggctcc

SEQ ID NO: 517755 - DNA, 540 bp, Homo sapiens
ttatagagatgaatggaggtgggaacagagatgtcctgggggcaggaccccagttgggggtcacacagctaatgacagtcagagacagaattcaaacccattaattaacacactaattcatgtaatgaatgtttatcaaagtgcagttctgtgccacagcttggaaggcctgaatttagtaaaatccaacattatctaagggtgtcgtgtgaactgacttggcacctgtgcatgggggcattgcctggcctgttgcccaggctggagagcagtggcacaatcctagctccctgcagcctcgacctcctgggctcragtgaccctcctgcgtcagcctgtgttgacttggtaagtgtgggtttcctttcattctcatagcagtgtggggaagaagatactgttatcctcacattactcaggaggacactgtagctcccagaggtgaaggaatgtgaattgaaggcgtccagctaggaaagcatggaggtggggtccagcctgagcccctggactccgtgtccagtgctcttcccacagatg

SEQ ID NO: 517756 - DNA, 472 bp, Homo sapiens
ccctgagaggttccagtgcaagcagagagctgcgaaagggaggagggcaggaggcggacagctcctctccctcagcacccaccccagcccctgcgttccatccctgtctaggagccatggaggatcccagagggtccctcctgctgacaggtgcccctgcctctacctccacctcctcttaacagtgggggtgggggaagtgcaggacctaggggctcttgacttcagctcctctcccctgaggaacgaggcccacattcatggctaaccaagactggccttagtggcttcgcacctgctgggcctccactccctcygcagcctgagctgggaaggaccctgtctcctggctgcccccagcacctatggctcccggcgggggtgcatttcaagatattcagggaggaggaagctgagcctaggtctgcaatctcttaccgaaaagaaatttataaaatgcgtaaggcatagc

SEQ ID NO: 517757 - DNA, 472 bp, Homo sapiens
ccctgagaggttccagtgcaagcagagagctgcgaaagggaggagggcaggaggcggacagctcctctccctcagcacccaccccagcccctgcgttccatccctgtctaggagccatggaggatcccagagggtccctcctgctgacaggtgcccctgcctctacctccacctcctcttaacagtgggggtgggggaagtgcaggacctaggggctcttgacttcagctcctctcccctgaggaacgaggcccacattcatggctaaccaagactggccttagtggcttcgcacctgctgggcctccactccctctgcagcctgagctgggaaggaccctgtctcctggctgcccccascacctatggctcccggcgggggtgcatttcaagatattcagggaggaggaagctgagcctaggtctgcaatctcttaccgaaaagaaatttataaaatgcgtaaggcatagc

SEQ ID NO: 517758 - DNA, 472 bp, Homo sapiens
ccctgagaggttccagtgcaagcagagagctgcgaaagggaggagggcaggaggcggacagctcctctccctcagcacccaccccagcccctgcgttccatccctgtctaggagccatggaggatcccagagggtccctcctgctgacaggtgcccctgcctctacctccacctcctcttaacagtgggggtgggggaagtgcaggacctaggggctcttgacttcagctcctctcccctgaggaacgaggcccacattcatggctaaccaagactggccttagtggcttcgcacctgctgggcctccactccctctgcagcctgagctgggaaggaccctgtctcctggctgcccccagcacctatrgctcccggcgggggtgcatttcaagatattcagggaggaggaagctgagcctaggtctgcaatctcttaccgaaaagaaatttataaaatgcgtaaggcatagc

SEQ ID NO: 517759 - DNA, 472 bp, Homo sapiens
ccctgagaggttccagtgcaagcagagagctgcgaaagggaggagggcaggaggcggacagctcctctccctcagcacccaccccagcccctgcgttccatccctgtctaggagccatggaggatcccagagggtccctcctgctgacaggtgcccctgcctctacctccacctcctcttaacagtgggggtgggggaagtgcaggacctaggggctcttgacttcagctcctctcccctgaggaacgaggcccacattcatggctaaccaagactggccttagtggcttcgcacctgctgggcctccactccctctgcagcctgagctgggaaggaccctgtctcctggctgcccccagcacctatggctccyggcgggggtgcatttcaagatattcagggaggaggaagctgagcctaggtctgcaatctcttaccgaaaagaaatttataaaatgcgtaaggcatagc

SEQ ID NO: 517760 - DNA, 588 bp, Homo sapiens
ttttagacagcaatgcgctctccctcatcaaggaccccaagccccatgcgtgtcctctgtcatggctctgagcacaccattcatgtatcgagttccctggagactgtgacaccggcacgccagggtcagtggcttttctagacagagtttggaggcggtaggtgctcagagagtgtttactgagagtcagtgaatgcccagaggtagcaaaaaccaccacccaattgtgcttgtttatggtgcacctgctgtgtgyccggctccgcgcaccacacgattccatttgacctcagcaatcctgtgaggcaggtcagtgattatccccattcctcagatgaggagccgaggcccagagaggttagtggctggctcaagggtgcagagctcggctggggcctggggccatctgaccccagcacccgagctcttatcttcatgatctcaccagcatagaatgaagggacagtgggtgaaaagatgctgtaattggggagcaagtgggtgagggcatgctgtctgcctgcgcattgttgggggagagaagccttgtacctgtcatgggatggctcgggtcccaaggtcacagcc

SEQ ID NO: 517761 - DNA, 574 bp, Homo sapiens
ttgggagattgcagtgcaagcctgtgcgtgcaggtctgagcacacagtaggtgctgaataaatgtgagttcctctccatcctatgtcctagagagccacatgggtgcctggagagccgagcttcctccctttctcctgggtcagggcctggcatcttcgtggaaggtcggggcccctcagagtctaagtcaggctctgaggttgcctcgctctgtgactgtgggctggtcccctgccctctatgagtctcgtgagccatccggcaatggggacaaagtcctccctcgtcccctgccgcagggttgttgagaaaaggtgaaatgggggagggtgagcctgggttttaaatgcaggtggttttcacaaaagtagaaatacctctggtgcctggtgctggggctgaggggagggagggggkactgcagagggagaggggatgggggcgcctctctgcctccactgaggcactgaggggaagggttaggccttaggcagagcccgggtggctggaagatgccgggcagcggagggaattggccaagatttgaaccctagccctgcatatgaccagctg

SEQ ID NO: 517762 - DNA, 592 bp, Homo sapiens
aattggataggacaggtgtcaggagctcagaaggatagctagaggatgctcagctctcaccttgaccatagtgggatgggggctgcaagyctagtctacatcctagctctgccccagcatagcctcgggtcaattactcaccttcctggccttctgttcccacctctgtaataacttgcctgggccccagtctctctaaggctcctctcctctgactttcaggagactctaattagcactaaccccagggcatgggtcttttgtcatttgtacagcttcaggaacttcatcgcagaacctcatttgtattttatttgcagccagatatttcttcaggacatgcttctgggaaaagcagaaaccctaactctcccagtcacctgcattcctgttaatgaggccagggttcctgagcctccccctcccagggcagtgtatgggagaacagagagcaagagaccagaattcaagtctgaacccttatgtctgctcagagagtcaccatgagcacatccctaccctactctgggcctcagttcctctgtttaagtaaaatgcactgtatctccaggactcccacaacctgatagtc

SEQ ID NO: 517763 - DNA, 583 bp, Homo sapiens
ccttttatcaacatgcagacaccagcaagcaacttgccaaaggccccctgctcagcccatggggaacacagagggccaagcctggccttgggccatttgcttcacttctctgagcctcagtttcctcatctgagcagtgagctagcaatccctccttacaggatgttttgaggagccagcaggggggccaggcaagcaatgagtattccaggggtggcaaaggaccctgcggccttgaaaacacatttaggtttcagcccagacttgctgccagaaacaagggcagctatttcttctagctgggcaggagggcaccaaggatgggccctccaggcatgggcacaggcttgagagccaaagcagtgcccrtcaacatggcctctttcatctgagcatcaaagcaaatcaccaaagtggaaccagtttccctcagcctggcagcgcctgctggcgggttgccaaagacagggaaaaggagcaggaattcctggtggccaccttggcagcctgatcaggtgcacaccaagacacacccccgaggagcaatgtcctccagagacccaagaaggcagcaccctgtgct

SEQ ID NO: 517764 - DNA, 583 bp, Homo sapiens
ccttttatcaacatgcagacaccagcaagcaacttgccaaaggccccctgctcagcccatggggaacacagagggccaagcctggccttgggccatttgcttcacttctctgagcctcagtttcctcatctgagcagtgagctagcaatccctccttacaggatgttttgaggagccagcaggggggccaggcaagcaatgagtattccaggggtggcaaaggaccctgcggccttgaaaacacatttaggtttcagcccagacttgctgccagaaacaagggcagctatttcttctagctgggcaggagggcaccaaggatgggccctccaggcatgggcacaggcttgagagccaaagcagtgcccatcaacatggcctctttcatctgagcatcaaagcaaatcaccaaagtggaaccagtttccctcagcctggcagcgcctgctggcgggttgccaaagacagggaaaaggagcaggaattcctggtggccacctyggcagcctgatcaggtgcacaccaagacacacccccgaggagcaatgtcctccagagacccaagaaggcagcaccctgtgct

SEQ ID NO: 517765 - DNA, 588 bp, Homo sapiens
cctggccacagggcacaatcccactacacagctcagcctgttcttcggctccaggccagaggtgggagtcggggaaggcgggaaggacgggagagtygcgccgggaagttcagggcctcctggtccttgtgacacacgcagccatggcccttcaatctccttgtgataggatgcaaggctgggccaatgtctctcctcccgtgacctctgctcccaatccacacttgccggggcttctcagcgggccctcttcccatgggtctttgcaagaagcaacaactgacacagactgggccccagcccgtctaaaagcctccactcggagtagaaaaaaaaggtgcttggtctcatctctgaccactgtgtggcctcaggaaagtcacttgatgtctctgggcctctgccctcaagtgtgaacaggagctcgctttccatttctgtgaattacactgcaccaactgcttgggggtctgataaggagcaaataacatccatgaagaaatctgccattccacaaaaaaactgacaccaccagaaggttgacaatgcctctcaaactcatccccgtccctgccgccccataggatg

SEQ ID NO: 517766 - DNA, 650 bp, Homo sapiens
ctgccactgctcctgcctcttaagcttcagtgctttgtttatctactcagtaaatatttgttgagcatctactacacgctcggttctgttctaaaygctagggatgcaaaagacagcaaaacagacatggcttcctaaggaaggggatagatttggtcggtaaagaaacaacaaacaaaaactgagctctctttagattcaggcagcttatgacttgaatagccagtaaaagcaaggtcagcaaagtgacagccccccatgtcccatggcccacgggatgacctgaacacagagggggcccgatgacaccgcgacgtgggcagtggggtgatctgttgctgagaagctgatccgtgctgtggctaagcagtcaacagcctgcatctgcaccctaaggcagccactctcatgttcccagggttcacgggcattctgccaagacttggatcagtggcagttcagtcttgcctacagggtcaatatggagagaataagggagctggggccccatggcagggccgctcctgtacacagccttgtctcaggggcccttttgaatccatgatttaaaactcccaggtaattccaacgggaagcatgcagtgagtgccctagtctacagtttgtgtgatttccgaggattacttcca

SEQ ID NO: 517767 - DNA, 650 bp, Homo sapiens
ctgccactgctcctgcctcttaagcttcagtgctttgtttatctactcagtaaatatttgttgagcatctactacacgctcggttctgttctaaacgctagggatgcaaaagacagcaaaacagacatggcttcctaaggaaggggatagatttggtcggtaaagaaacaacaaacaaaaactgagctctctttagattcaggcagcttatgacttgaatagccagtaaaagcaaggtcagcaaagtgacagccccccatgtcccatggcccacgggatgacctgaacacagagggggcccgatgacaccgcgacgtgggcagtggggtgatctgttgctgagaagctgatccgtgctgtggctaagcagtcaacagcctgcatctgcaccctaaggcagccactctcatgttcccagggttcacgggcattctgccaagacttggatcagtggcagttcagtcttgcctacagggtcaatatggagagaataagggagctggggccccatggcagggccrctcctgtacacagccttgtctcaggggcccttttgaatccatgatttaaaactcccaggtaattccaacgggaagcatgcagtgagtgccctagtctacagtttgtgtgatttccgaggattacttcca

SEQ ID NO: 517768 - DNA, 535 bp, Homo sapiens
ggcctgcagcaggagtgcatctggtgtgttcaaggcccatgaagggtggtgagactgtagggcaatgagagggtggagagttcctgctggaatgagaggctaagaggcaaaggaggccagagcgtggggagacctcctacgctcctgtaagcacttagctttgactgrgtgaggacaatcacctgaagctctgaggagggctgacacgatctgacttatgacatcaggggatgctctggctgctgcgagggcacattataggggcacaaaggtggaggcagggagaccagagagaggccacagcagtaacctgggggaggatgatgggggctcggtacgcccgtgtggcaacgggggggacaaccatttgaactcttggcaagcacctccccatccctccatgtcctcaatcccccaaccaggggcatctttctcctggcccatggacagccctaatcaaaatccttgtgtgtcctttcacatctattgccaacaccctgggggcctagatttttgctacttaaaaggcagagga

SEQ ID NO: 517769 - DNA, 610 bp, Homo sapiens
ggataccagtctcaaatccaactaaaattaggggtttatatggcaaggaagaaatgtaactatgtgtgggaaaacaggaatgagggagggataaggaagaggarttggtcaacaggaagcaggtggtcagttaagcaatcatgacagatgaggggcttggcgtcttattgtccagatataattatctgataagtttcagttccttgacactatttgggttgcctgatggttggtttcccaagaaaaaaacccagataagacaaccgtaagtttctcaagttttaagactggaggggtcaatttctatgtttattcaaaagaaaccataaacgtcagttctatgggacaattgggctggtttgattatgattgtattgatgattatattttctttgcattaaatggagagcagcccaattataaggacttgatagactagattttctcacaaatcttcacatactttatagatattcatcttttaaatgtaataaaagttattttcctgaatatatgtattaagaaataatttaacatattttatgatgactacaatgctttttaagtatttagaagtattaaataatctgatttttcactgatctgtgtg

SEQ ID NO: 517770 - DNA, 610 bp, Homo sapiens
ggataccagtctcaaatccaactaaaattaggggtttatatggcaaggaagaaatgtaactatgtgtgggaaaacaggaatgagggagggataaggaagaggaattggtcaacaggaagcaggtggtcagttaagcaatcatgacagatgaggggcttggcgtcttattgtccagatataattatctgataagtttcagttccttgacactatttgggttgcctgatggttggtttcccaagaaaaaaacccagataagacaaccgtaagtttctcaagttttaagactggaggggtcaatttctatgtttattcaaaagaaaccataaacgtcagttctatgggacaattgggctggtttgattatgattgtattgatgattatattttctttgcattaaatggagagcagcccaattataaggacttgatagactagattttctcacaaatcttcacatactttatagatattcatcttttaaatgtaataaaagttattttcctgaayatatgtattaagaaataatttaacatattttatgatgactacaatgctttttaagtatttagaagtattaaataatctgatttttcactgatctgtgtg

SEQ ID NO: 517771 - DNA, 503 bp, Homo sapiens
aagcagacattattgctccccaggccatctccttaccaaccaagcagtgaataaactggggacacagcagttactgacatatctctaatcgattaaaacaaatcacagaacaacaagcaaagtgttgtctttaccatttggatggtaggatgcatattttaaaatgcataatamtgcatttaaaaattttatattgtgtatttcaatgcctacaaaataagaatgcaaagtaaaataaacaataaataaataaaaggtaaaaaaaaaacaaatcagtaatacaacccaaataagtaatacaaattatatatgtaaccccttttacctagaaacctatgccttgctgtgggaaattaatataaaatttacactgagaaagtaatatcttataaataacatttgaagaacatttgcaacacatcaggatatacagtaaacatgttatatgcatgacctctgttaatagtctcaactctacaaagtagtgcatggttcctatttga

SEQ ID NO: 517772 - DNA, 588 bp, Homo sapiens
agactaaagaatgttaagtaactttcccaatgtcttatagctgaaaagtggcagaactaggaatgaaatccrcaactttatcatttcagaggctgcctctttaaccattatggtatactttctcccaaagatgacaacaaaaataaccgtaaacgatgtaaaagtgagaattattttaaaagtctgccgctagtaatagaagcagtatagtagtagcaataatatgaataaacacaagagaaagttgtggcatctggtttctagctggcttttgataacaagtaattcaatttttgaaggtctcaattgctgacagggaatgagagagggaataaaactagatcctactggaagtctttttccagactaagattccgcactgaattctaggcctctatctttagcatgaaactttactccaaaatgacgacataaagcaccactttatcagccttccctattacactctgagtatgtaggcctgtaaatatatttacaactgtggataaacagaggccaccttacctgtaaatgaatggtgccactgtcgcggtattcgggtggctatgttgctgctgttgagggagt

SEQ ID NO: 517773 - DNA, 571 bp, Homo sapiens
ccatgtttaatgtcattttcttaatctttctggacttggatatgctttttagaaaaattctttttttcttacataaatatctagaacagtgcctatcaataaataatcattgagctgaaataagctataatattgtggttccaatcggatattggtttatacccctcgattttaatcatcatagtcaacttaaaatgcctttgtatgagatttttcaattgttttcatttaatgtagtgtggattccaagctatatgggaatggaacattcttttccaggttaatgggactttgacaacagtttttcatgttcactaaacaaacatgaattaggttccaggtataatgttagtagctaatgatacaaatattgaccttgcrttagagaagaacccattctggagaaatagaggaacctctcacagtggcttttcagcataggtgcatttaattaggaaattcagtgataggagctggtaagaaagggagagagtgagggtagacttaaagagaaaataatataaatgctatgaaaaaattctgcccaccattccatatagttttgctcttt

SEQ ID NO: 517774 - DNA, 626 bp, Homo sapiens
catgtttaatgtcattttcttaatctttctggacttggatatgctttttagaaaaattctttttttcttacataaatatctagaacagtgcctatcaataaataatcattgagctgaaataagctataatattgtggttccaatcggatattggtttatacccctcgattttaatcatcatagtcaacttaaaatgcctttgtatgagatttttcaattgttttcatttaatgtagtgtggattccaagctatatgggaatggaacattcttttccaggttaatgggactttgacaacagtttttcatgttcactaaacaaacatgaattaggttccaggtataatgttagtagctaatgatacaaatattgaccttgcgttagagaagaacccattctggagaaayagaggaacctctcacagtggcttttcagcataggtgcatttaattaggaaattcagtgataggagctggtaagaaagggagagagtgagggtagacttaaagagaaaataatataaatgctatgaaaaaattctgcccaccattccatatagttttgctctttggtaatcatgagatggaagacttagatcccttagttggcttcaatttctacacaac

SEQ ID NO: 517775 - DNA, 598 bp, Homo sapiens
acagatttacactgactgggccaaccactacctagcaaaatcaggccacaagcggctgatcaaggacttgcaacaagacattgcagatggagtactcctagcagaaatcatccagattattggtaagcccttccttctgaaagaaagcatgaaagtctctgctcccatctctttggtaaagcacaacttaagttaagcgccttactgaactggtccatgtgtctctgagattcatgtagctctcccctgatttaattaaaatgtttatatgaggatgtttgaaaaaggcagtttggccatacttttaaataactagaactgtatctttatatacataaacttgctaacctttattgaatcatttgaatygaactgtcagaaatgaatgcttcattaaaccatatgtctcccatgtgtgtatttcgttagctggagcaactcatacactctgagatgccttgaaactgtatcctgatccagcagggacaattgtgaaaggtttcatgtcagcaatcatttggcacaggctaaagaattagcagcaacttccttctcactcatttttttttttgcctgatttgtgcatatagaattggca

SEQ ID NO: 517776 - DNA, 554 bp, Homo sapiens
ctatttaatcatcctcttgtattttctttacacagtttattactatctgttcttttcttktttacttattaactagtgtgatttcagccacctcctaatgtaatgtaagttcattgaaattaagagtcttgtctttctcatttagtagcataattgcccagtacagaggccacctacagtagataccaaataaaaattgttgaatgaaacactatcatcctgtgttagaatcacttgctatagaagaattttcaaacctgccaaaaatgtacactggaacaaaaaaaaattctgaagtctctcacttcctataaatgggagggtttaactgaaatacaaagagctttaaaatatttaaagaattaaaccataccttctcttcagcacattcattcacttattttttatcttctttcaacaactacctactaaatatctcttatgcatgagacatcaagaattgagtgaaaaaatcatacgtcctatgtcgttttcttttcatcatccacaatgtggtagacaaggggcaagctcaaagagaacaacaaaatgca

SEQ ID NO: 517777 - DNA, 554 bp, Homo sapiens
ctatttaatcatcctcttgtattttctttacacagtttattactatctgttcttttcttgtttacttattaactagtgtgatttcagccacctcctaatgtaatgtaagttcattgaaattaagagtcttgtctttctcatttagtagcataattgcccagtacagaggccacctacagtagataccaaataaaaattgttgaatgaaacactatcatcctgtgttagaatcacttgctatagaagaattttcaaacctgccaaaaatgtacactggaacaaaaaaaaattctgaagtctctcacttcctataaatgggagggtttaactgaaatacaaagagctttaaaatatttaaagaattaaaccataccttctcttcagcacattcattcacttattttttatcttctttcaayaactacctactaaatatctcttatgcatgagacatcaagaattgagtgaaaaaatcatacgtcctatgtcgttttcttttcatcatccacaatgtggtagacaaggggcaagctcaaagagaacaacaaaatgca

SEQ ID NO: 517778 - DNA, 589 bp, Homo sapiens
ccaacaccctgccccctaacagagcaaactcaaacacactagaaactcacaggaactaacacaggaaaccaagctcagagcacacgtggtacaggaaggtatgggatgccccggtgctttctcgagcacaaaatcatacctcaatgtcacttagcaagaaaaaaggcatgattatgacaaaacaccatgggccctccgtgcatgtaccactttcaaagggaaacttggtccagagactatgggtctcaatatatccagctaggaaccttaacactggcacaatggacaatttttttctgcagagaacgagaaactgagaaacttaggctaccgtatgtgccagggagcctcttgcagaaccaatggaaacactgagtttcaaaaaagatctgattcaagcccaaacccctcggttaaaaatarcctagaaatcctggcatagctaaagccatctcacattctgactctccgtgaaagtcaaaacctgctcattggcagggagaatatttcaccaagaagcggccccagggagcagaaccaaggcctggaagctgaaaatataagagaagaaattttaagaagaaccatt

SEQ ID NO: 517779 - DNA, 605 bp, Homo sapiens
aattataaattaatagaatggttggaagataaagctgtagacattttttgaaaaacagacaaagaaagggaaaacagaaaataatgctagatgaagcaaagaataactgaggtggtctcaagattataactccaagtcctcaccaacagtacacaagatggtagcacaaagcacacctgagacacgaggattccttcagagcagagggaaagggattattgatgtgagcttgggacttctccacatgcaatctgcaactggacatcctctctccagacyggagagcttgggaccaacactggcagacttcttctgtacttctgggttcaaaggattacagtgtgacacagtgtttcctcattaagagtcacatgcatgttacctacacaacttttatgatacctgggacctcctatattaaaatttacttaataattttgtttaaatcagattgtcttttaatacttaaatacatttatctaaaggtaattttatgacttggctgtcaagagaaaaacagtattatgttctgtggtagctagcctccaaaattgccccattgtgacttctcctgtgccctcttttagatcacttactcgagagca

SEQ ID NO: 517780 - DNA, 551 bp, Homo sapiens
gggggggtatagaggtaagtccattaaaaattcagaaatgtgcaagattgctgtggtctggctaagcacggggaaacttcaggaaggagatgggagttgaagtggcctttgatggttgttggggttacgatagagtagatcagggcatagatattgtaaggtgcgttcaggtcagagaaaagagacccgtctgggctgggcacggtggctcatgcctgtaatcccagcactttgggaggccaagrtgggcggatcacgaggtcaagagatcgagaccatcctggccaacatggtgaaaccccgtctctactaaaaatacaaaaattagccgggcctggtggcgtgtgcctgtgatcccagctactcaggaggctgaggcaggagaatcgcttgaacccaggaggcagaggttgcagtgaactgagatcgtgccaccacactccagcctggtgacagagtaagactccgtcacaaaaaaacaagagagagagagaccagtctgacggaagtgaaccagagcattgaagccagggctggaaagcatgggccag

SEQ ID NO: 517781 - DNA, 527 bp, Homo sapiens
cctctgcccagcttcttcctaaaacctagctccttttgttcaacctgagcaacccttaggagagcatgttgccttatttctccttactccattgttttttgtcttgttttttgagatggagtctcgctctgtcacccaggctggagtttagtggcacaatctcagctcactgcaacctctgcctcccgggttcaagtgatcctcctgcctcagcctcctgagtagctgggactataggcatgcgccaccatgcctggctaatttttgtattttttartagagatggggttttaccatattggttggcctcgaactcctgacctcgtgatccacccccaccccaccccacctcccaaagtgctgggatcacaggtgtgagccaccgcacccagcccattgtcttttaaaatattaatttcagtgatttcgtcatttacattcaatgcaaccaatatcctatttaaggtaattccagagtttcagtaaaacatctctgattacccacttcaagtaagaaattctaagaa

SEQ ID NO: 517782 - DNA, 605 bp, Homo sapiens
gacaaatatatagcttggacaaaatatagacctttgtccagcaaactgctgagattcgagagactttgttctcacagcataacctagactatcctgatagggatgtgtttctcgcctctctcttatgtctactcgtgttctagaaacacagagatgattcttaaatgctacaccttacccacgtaagactaaaatatgcataacccctaatctgaaagtctttggaaaacaaatcaaaaaataaatatactcaaatcattccttgcaagggtttccatgtttgctattttcttcctacattcagccttccagaatgcagagtggcaacctgtagggattgaaaaggaaggaagtacttgggaggaagtggcattaaaactgtcttgaacacattccatttaaggattttagtgtgatcctttttccactaagacaagagtcctggtaatagaatggcttctcaggctgttgcctgcatcaccattacaactatgccattctctctctgtcacttccttggtttgggcctgactcggagctccacrtcaagtgacaatatttggtcaccggaagtggtgtgggaaagtgaagaatggaatttacct

SEQ ID NO: 517783 - DNA, 296 bp, Homo sapiens
tgacattgagcagcaacaagcctggttggttcttrctgtcaggaagctaggagtcttgtgtaggagaaagacaataagaaaaaagttcgcaaaaaatacataaaattaccaactgtgatagatgctttggaaagaaggtacatggtgctgtgactatataacatgacaaagtgacctagaccagtgcatctctaactatgtgtgctgaaagaccacttttcccttcaatctgccctggactgatactagcatacaaattgtgctacatgtgactgaccacgtgattttgacaacac

SEQ ID NO: 517784 - DNA, 360 bp, Homo sapiens
tgttttatagtaatacatacaaagtggtaaacatttgcagagtaactactatgtgctgagtattactccataggtcatatgcatattaagttatttaatttttatagccatcctatgaggtaggaactgttactactctcattttacagacaaggaaaccaaagtccagataggggccaacaaggaagtggtagaaactcttgcctttaaccattttgctatttgcatgttatagtcatgttgtagtgttgactttatctrgagagtgagaacacaggccttgacaggagtcacacccagggtcaaaccccagctcagccacttactcatcaggtagctttggcaagctgcttagcttct

SEQ ID NO: 517785 - DNA, 607 bp, Homo sapiens
tgtgaatatgatagcagtaataatcctccctataacctttttacagattagcaaactgaggcttggagaagtggaaaacttgcctaagattaaacagcattaaaggaacagaggctgggcttgcaactcagctctgggactccaaagtctgccctttccaactacatcgtcttgctgatcgcgagctcagttgatggtaaagacctgtggtaggtgctatttgggatgtggttttgatcaagagacgccctgatcttgtacacaattacctgtgataagagccatgtgtgagagttccacctgagtggagactaaatggcacgctgctggagtactgagcagagaggaatcacrtgactgtgagctcagatcatttctgggtagtctcaaacctttggctgagtgcctaaatcttcatttcacctcttgctgtgaaactcttgtttttctttaaacccaagagtccaactccatgtgtaatacaatatcatgtaaatgagggtaaccttggaaggcaggctgcttgtcatactatagtggctttgttgctgtaatgaaaaccacatgcttcatggtacttttagactagttaatattagcagatcag

SEQ ID NO: 517786 - DNA, 565 bp, Homo sapiens
tgtgctttttctggttatttcaagagaattcacaatttctaccaagccataagcttttttcaggagagtggagaactggaagaaaatggccagcactttcctctcggctctctggtttccacatggaatttgtcattgttttcccsagtcattgtgaaaggaagacgtggttgacccagggacttgctttcaaagagtaatggaataaatagcaaggtgaaaaaagtatgaaaaatgacttgactttgtcctggggcgaagagaaaagagtagaaaataagaaagagggaggaaaaggggcatgcctaaccaccttgctgagatcttgaaatttgctggaatgatatggttatgattacgattatgattatgagtgttttgagaaagggaggatcatttctttccattcttgagtcctctttggagtcatttgaatctctaaatttgcttctcagagaaagttttatatttcttggggaagatcttaaattactttctttcccaactaaattgggtccctctttctctacccaacattaaatatccaatgtccctgtgactggaa

SEQ ID NO: 517787 - DNA, 602 bp, Homo sapiens
tgccttcttggccagacatccgatgacagtctttccattttatcacaaggctttggacttcagtcactctatgtttccctccctgaggcagtgcagaccctgatttgtcttagacaaaattaagaagcagtcaaagaatgcctttagggccatcaaactcccccttttccctctcgtatggagtttcacactcagtggcttaggtgcccagcatgccatgatctttctctccttccattaaaacgatgaccaggaaagaatctgaagcatagtcattggaagggaggaaggagtaattatgacaacaatagcagctaacacttagatagcacataccatgggcaagacamacgattctgagtttcatgtgcattgactcacaaattgctccaataactctatgcattacagaatatcattatctccttatgacacagagaggttagtttacttacgtaaggtcatgtagaaggttgtagagacatgatttgaacccaggaagtctggtttcttccatgtacttaaccattatatttgagaatgaacgtgattagttggccaagatgttgcaagcactgtgctagatactgtaatgtgttata

SEQ ID NO: 517788 - DNA, 602 bp, Homo sapiens
tgccttcttggccagacatccgatgacagtctttccattttatcacaaggctttggacttcagtcactctatgtttccctccctgaggcagtgcagaccctgatttgtcttagacaaaattaagaagcagtcaaagaatgcctttagggccatcaaactcccccttttccctctcgtatggagtttcacactcagtggcttaggtgcccagcatgccatgatctttctctccttccattaaaacgatgaccaggaaagaatctgaagcatagtcattggaagggaggaaggagtaattatgacaacaatagcagctaacacttagatagcacataccatgggcaagacaaacgattctgagtttcatgtgcattgactcacaaattgctccaataactctatgcattacagaatatcattatctccttatgacacagagaggttagtttacttacgtaaggtcatgtagaaggttgtagagacatgatttgaacccaggaagtctggtttcttccatgtacttaaccattatatttgagaatgarcgtgattagttggccaagatgttgcaagcactgtgctagatactgtaatgtgttata

SEQ ID NO: 517789 - DNA, 667 bp, Homo sapiens
tagtctgggaggtctgatgttagggaaaaagaaggaggaaagcaagattaaaaatcattcctggaaatgcaagagaaaatgtgctggagtggtaagaccaaagttttcttcttccttttttttttttccgctcttcacacacacacagacaccccacaargaaaaagataggtttgcctagaaaactactgcttcagtttctcctctctacttttcctctcctgcaagttaagtaaatctccaagcccatgaaaaatgtatggacgcctggtctggtgtgtatatcccagtactttgtgaggcctacgcaggaggattgcctgagtctaggagttcaagacaagcctgggcaacatagtgagaccctgtttctaaaaaaaaaaaaaaaaaaaaaaatttaaaaattagccaggtgtagtggcccgtgcctgtatacccagttactggagaggctgtaattgtgtggtgaagaaagtgttaattaatttgattgtggtaattattatacaatgtatgtgtatctcaaattatcatgttgtatacattaatataattttcatttgtcaattataccttaataaagctgaggaggaaaaattttaatgtaatcctgtcaagaccattttccactatgactggctttccttcatactttcccttagaatgg

SEQ ID NO: 517790 - DNA, 449 bp, Homo sapiens
acagtaattaatctcacaatctcctgtacctgatataatggcttaggggcagaggagaactactgtagtgtaagtggggcttgtgttctgatgggcaatggcaataggcaggaccattaatacagactcaggcatatggaagtagtattattgtgcccaccttgctaatttaaaactcactttacactttagaatttctcccatgaaataagcaacgaaatatgtatctacagtaaagtcatttggtggggggattgggtatttaatattaatatggttaatatttacattaacctctacattcatcctgaggataagaataagatcagaacaaccagggaataagagatwaggatgaccacttttatctttacattctttatctcctctttgtagaaataataataataataattaaagctcttttctttcttagaagtgtgtggtgt

SEQ ID NO: 517791 - DNA, 504 bp, Homo sapiens
tctgaagaactttaaataataactggctaacagtactcaatacatactggtggtrtttatcacctctatcatcatatgagaatttggattttacagtaattgaatccttgatacagttttatttcttcttgacattgtattctagaacccatgttttaaagtagaactttaaggaagaaaagaagttgtattacatacagtggccaaagtgatatataatttaaatgatacttatttctactaatgtaaaatcatttaactgtgtatttgaaggtaaatttatgcttactaaaagccaagattcattcccagttgaaataaaaataattttagataggaaatttcattaatcttcttttcatgacatatattagaatgacagaagggtttttaatcacttgctagcttttcttttatctaacttaactgtatctgtcaatcattgaacataaaataggtgttgggcattgtgctaggccaaaagttctcagtagtggctgcaca

SEQ ID NO: 517792 - DNA, 504 bp, Homo sapiens
tctgaagaactttaaataataactggctaacagtactcaatacatactggtggtgtttatcacctctatcatcatatgagaatttggattttacagtaattgaatccttgatacagttttatttcttcttgacattgtattctagaacccatgttttaaagtagaactttaaggaagaaaagaagttgtattacatacagtggccaaagtgatatataatttaaatgatacttatttctactaatgtaaaatcatttaactgtgtatttgaaggtaaatttatgcttactaaaagccaagattcattcccagttgaaataaaaataattttagataggaaatttcattaatcttcttttcatgacatatattagaatgasagaagggtttttaatcacttgctagcttttcttttatctaacttaactgtatctgtcaatcattgaacataaaataggtgttgggcattgtgctaggccaaaagttctcagtagtggctgcaca

SEQ ID NO: 517793 - DNA, 485 bp, Homo sapiens
acaattaggacatatctgcaaaatagtaaatattgcttaattagaataattaattaggaaaatataggtaaaaaataggatttgagtcatatctatggaaattaaaatgaaattagagtccttaagtaattagagtggttagtgtaattaagaagtaatactaaaatttctgtggcttaacccaataattgatttattgcacacataattgtctagtgcaggttttccttattatcacatactcttcctccatgattgattcagggattcagaggccaatctttaaacatccagccaacgaaaagaaaaacagaatgtagagagaggacaactgcttggtaaaactttggcaagaagtgatttgcattggtgagaaatagaagtccacacctaaayagaggagtttagaaatgtagccactggctgaacagccatttcccagtgacaactctaaactatgaaatgcaagcagaaattgtagcaaa

SEQ ID NO: 517794 - DNA, 585 bp, Homo sapiens
ttattaatgtaacattagtttttctttgctcctgtaaatgaatgaacaagaaacatcttaaaactataattttgaattggcactgggatagggagaataattgcccaaatatgttcacatcttaatttccagaacctgtgaatatgttacatcacatggcaaatgggactttgcagatgttattaatgttacagactacaaaatagagagattttcctatattatctagccagcctcaatctaatcagatgagtccttaaaacggagaagcttgtctggctagmaggaaaagaaaagtgcagcacaagaggaagaaaagaaatggcagaagtacaaatcataagagctcccaagtgtgagaaggatttaacatgctttgctggtctgagattcagagaccacatgcaagtctcagagagagacttctaaaagctaacagtaatctctggctgacagtcggcaagggaacaaggacctcagtcccaatctgaaaggagctgacttctaccagcaacctaaatgagctttgaatgggactacttatttctctcttctcctgataatagctcacctagccaacatctt

SEQ ID NO: 517795 - DNA, 599 bp, Homo sapiens
agtttctccttactaaaatccactagttttctaaaagtgtaggttttaaaattagtgaggtcatagcatttttttttatgtagagcttcttgtcatgatggggaattttaagtggtatttggaaggcccattattgcctttttctcaccaggtttaagtgtatctccattttaatgactttttctgatatatttgttatgtcaaaycccagcacatgatagtatcctccctttactttataccaagatacccagttccttcattcccaaaagattattcaacattaaaccggatgcattcttttgtaacctataactgaattttatcctcttgggtacaaaaattaaaaacaaaaagtctctgacacctcttactgctttctttgtgccccaacaaccaaaaaatgcataaaaatttagattttcttttcaatttctgaataaagaactcaaactccagtttttgttcgttactttctttttaattatttagtaagactctctttgaaggtacaataaaacctctattattaagactgcatattaactcactccacaagatcttttaagcccatgacttttatcatttatcctgagttt

SEQ ID NO: 517796 - DNA, 653 bp, Homo sapiens
ttaatattactagcagaacattctcttagaagtagagctagtacctagaataccagttgtgaggcagagccaataatagatttccttaattccataatgccctttgcttgttaggcacctctcccacccatacacccatttttgataaacactttaatggttttcaaatcaggatacgccacatttaatgtggtagctttgctttttatcctcaaaagttatctaatcaatagtgtgctctaaaattaatgtcttagaattcattaaatgtatttttgtgtggtattttgtttggagttatacctcccagtgtcttcatccagtttccaggaaataactattctaagaatactccctggctaccccttgtggggcattctctccaatatacacaatgatccctctccccatacttcctaggtaggacctactataggccaagcatgagttccttcatatggtctctataatgaaactgtgcagtggggctattagatctactttggctgtgacgaaactggtggtttaagatgytgactgtccacagtcatgcagcaagattcaaacccaggactggctacccaacaaagcccatgttctgtcactgtccacaccgctttgaaagaactccacggagctagaaaattaacttc

SEQ ID NO: 517797 - DNA, 581 bp, Homo sapiens
tggagcaggaactgaagcccaggagtctcactccagcacggtaccctcttcactagatgattttctgtcatgtagctcaattagcccgggtaacatggttggttgatgacacgtctactagatgatcactcgagaaaagaaagttaatcacgaggcattgtttttcagggacaatgggagaaattgactttttaacatgcttatttagcatctgtataattgtagtgggccctgtagaagtaattttatagaagtagacttaggtagaaatgaagtaggtaacagtcaagaaataagattgcttatttgtatgcaaaacaatagcctatkgcttatgttgccaagaaaagactttgtttttcctttttaagtgatgactacccatatgctgctcaaaagagaccagagaaaacatcaaagaaccctacaagaggctgaaccagagaatattctggaaggttgttaaagaataatttcactgaggagaaattttttacagatgaaactggcagatgggagttattcattcatctcttccagaaatagctgaaaggaatacaatagaaatcattctattttga

SEQ ID NO: 517798 - DNA, 618 bp, Homo sapiens
agctggcattctttctccttgtcttgatgtacttttctgcactgcacttttcgctgtctgaaatttgtttccctgtatattgactgtcccctgccagaacataataaattccctgagggcagggcttggattagtctgatttaccactgtgcccccagtacctggaaccatgcctgaaacatagtaagcactcaaaaaatttcaccttggggtctcagtcttggctggtatatgttgtgtttttcaatggaaataatgtacaaagtgtacaatttccacagctaagtgattttccatgagttaataggttaagttttaaaaaagatcacaatctgrtgtcttatcttattttgaaagggaagattcatctctttcaaaagcaggtaaaaatatcaggtaatttatttacacagtacatagtcacatatactgattaggtgctccgtttactgctgcaactaattttatttttctttgaaacccagccagactcctacacctcagccttaatatctatcaccacatttgctcataactatagcggcagtcaactggggcctggcacccccttgctatgatccttacgaggacatgtatttgcttcttattttacaactg

SEQ ID NO: 517799 - DNA, 629 bp, Homo sapiens
tggcattctttctccttgtcttgatgtacttttctgcactgcacttttcgctgtctgaaatttgtttccctgtatattgactgtcccctgccagaacataataaattccctgagggcagggcttggattagtctgatttaccactgtgcccccagtacctggaaccatgcctgaaacatagtaagcactcaaaaaatttcaccttggggtctcagtcttggctggtatatgttgtgtttttcaatggaaataatgtacaaagtgtacaatttccacagctaagtgattttccatgagttaataggttaagttttaaaaaagatcacaatctggtgtcttatcttattttgaaagggaagattcatctctttcaaaagcaggtaaaaatatcaggtaatttatttacacagtacatagtcacatatactgattaggtgctccgtttactgctgcaactaattttatttttctttgaaacccagccagactcctacacctcagccttaatatctatcaccacatttgctcataactatagcggcagtcaactggggcctggcacccccttgctatgatccttaygaggacatgtatttgcttcttattttacaactgcagtcactcccaag

SEQ ID NO: 517800 - DNA, 613 bp, Homo sapiens
tgtgtatggcttttagaaaacaacagcggtgggggagtgggaggcaactggggaagggaaggggatgggagaggaggggagggaagggaagggagaaggygttagttaaatgtgcatgttacactactttatcttttccacagcccttgtcgttattggaaattaacttatccattggggttttgtggggattttttggtttactttgtctagtctagcattgataactgggttttcctttgtttccagaccttggctttacccaagtcctctaccagagcccctgccttaggagcctgctgaaagtgtcactccttgatagatagctgcctagcttctgcaagatccctccaaggaaccggactcaggggccgaggccctgcctgctacctgacttctccaatgccaagttgcctgctgtatgcatcccccaacatggctgcccagtcccctgtttccacatcttaccagcctgtgcagaggctcctacagtccatgctggtcccagatgcctttgtgtaccagtgtgattgctggtgtgccctttttctgtgagccagctctttaaattcaaggacctggccttgcctagtctgctcctcctgactgaatt

SEQ ID NO: 517801 - DNA, 515 bp, Homo sapiens
gtatttgcatctatctctatatctgtatctttcactgtatctgcatctgtatcccagcttctcttcctaagcgcccaayagcagaatcgtctgcttctccttgtccctatctccctgaaacttggctaccctcggctctccccagggatgatgtctttgttgctgatcccaagagtgggtctcttcttctgtacctgcctccgtttccttgggggttaactggggcagaatcacagggaccagtccctgggtcatcaaatggtaaccgggtatcaacaacaaagcagtgtaggatgaatagtgccgagcccatgatgaagaatgtcatcaggctttcaggtgtcttctctgtgtattgggaaagtgtctggctccaggagcactgatgctttgaaggcttctatttttaggcagcctactgcctgtgaggtctaaaaccatcagcgctgagctcctggtcatctgagaccccaagtggcctgggcagtgacttctgcatgggagatctgaacaca

SEQ ID NO: 517802 - DNA, 601 bp, Homo sapiens
gggaaccggtggtggttgctaacttctggaaggaacatcttctcaagactccttggtcgtttctaccatccgacctctgattctcctcaccaaagcctctacacggcaaaggtcctcttagctgagagcagagcttagtatatgagcattaaagcatgctgggaattagaagtttggcctgtctctgcacatagctgcaaatgaactttatcagagttcaggggaaaacagtcttcaggtaaacaggaacatgtgccagtggaaatcccagccgtttgtatactgagcaatgagagaagatttcttctttgacagcacgacggataccatcataaaacagtcctgcgatcgcagcagagaatctgtctgaagagcaaacccagtgctgcacctgcacatcgagcaggttctgccctcctgtgatgtgtggtacccaaaagtcagcctccctcaccaggaactgggtaatagtccccggaggtaatggttccgagatggccacagccctccagatcaccaaaattaatgacttsgcttagcatatttgcgtagcttcatccagattaccatcatcaagatacagtaagtaaagaactgctga

SEQ ID NO: 517803 - DNA, 651 bp, Homo sapiens
tcctgggcactgtgccctctttctaggaagcccctcgttaaccagaacactgttcccccagggcccctgaccccttgggctgcagcccctaggactggtggctcctgtgcctgaagactgctggcctgctgagcccccacacaaggccagctttgcaaggagcctgaattccacattcagctcacccctggctctgcactttgctctgatcgatcgtgggggttgtgtgagcacagcttcgcccactcgcctgccyccccccaacaccctgcaatggcctccacacacccagcgcacacactggcccccactctctcccctgtgctggggtgcagcccccagacctgctttgcccatccaccctgacgcccgcagttcactctgtaactgcccttgagcacgcctccatcccatttgcagagctctacaaaaaaaaaatgtattaattgaagcacaataaaagagcagtatttttacatttttctaaggcacttaaagcatttcaaataccagtgctttaagttatggtcactcataattatcctcggtccacagaggctgagtcttcaggaggggctcagtcctctttcttcaaaatgcagggagagccagcctgcactataaagtccctggggaagaaaaattaaataa

SEQ ID NO: 517804 - DNA, 411 bp, Homo sapiens
ccaacattttctacttcaccaaccaggccttcctgcagtcagaaccagacgtaaaggggctgtcttctcggtgatccactttatcttagaagcagaagcagaatcagtcagtcagacgccgagatratcccaccttccaccgagttcacagggcctccatggtgggctgagatccgctctgcaaagggcagattcttctctgagcggtactctctacatttccatgcctacccccaaatcagcagcgtcagggagaggcttctgcactgcatctccgagggctctcctcagcagcctctgggggacggcagcccccctggccttgggagcaaagctgactcgggagaagtcggtcactagggcccagccagggaggctgtgcgcccactccccttcttcccgctgctttaa

SEQ ID NO: 517805 - DNA, 644 bp, Homo sapiens
ccaattttaaatccctgtcttttgctggagtatttggtccatttacatttaatgtaattaatgacataacaacgtttgtatctaattttttgctatttgtttattctatgacatgtcatttttgatctgctattttttcattgttgccttcttttaggctaaaactttttaatatgccattttaatctccttgtgctttcttttactgtatcatttttttgagtaattttctgtctttctttcttttttttttttttttttttttttttttgagatggaattttgctcttgttgcccaggctggagtgcaatggcatgaatgtgtgatcctgactcaccgcaacctccacttcctgggttctagtgattctcctgcctcagccttccgagaagctggaattacaggcatgcaccaccatgcctgactaattttttgtatttttagtagagacagggtttctccatgttggtcaggctggtctcgaactcccaacctcaggtgatccrcccgcctcagcctcccaaagtgctgggattacgcaggtgagccaccacgcctggcctttttttgagtaattttcttaatgattttccttaggaatataattagcatttgtatttataacaatctctattgaattagg

SEQ ID NO: 517806 - DNA, 640 bp, Homo sapiens
tatcattttaaccatttttatgtgtaccgttcagtggcattaagtacattcacagtgttatgcagccattacctccatccatcgcaagaactgttttcattttcccaaactgaaattctgtacctattagataatttcttattatctccttcccacagccatcagaaaacatcattctgctttctgtctccatgaattggaccactctagtacctcctataaggagaatcatacagtatttgtctttttgtgtccggcttatttcacttagcataatgtcctcaaggttcatgtatgtgggatttctataaatttcattctacattgcttatttatatatatcactccactacataatgtgttccctgagggcaggsattacatttttaattcctttgtgtcttcagtgcaaatgcaagtgtgattaatgagtaaattaacacttataactttatttttcagcaaacattttgtcagcattcacaatgatttttttaaacaaatttttgtttcctgaattgtaaaagtttaaattgttccttgattgccatctcaaaactcttcattcagcaaaattcagacaccaatcttttgctgtttgtttttaatattttggctaacagagctattgcccattaca

SEQ ID NO: 517807 - DNA, 301 bp, Homo sapiens
attacagacacctaccgccacaccccgctaactttttgtacttttagtagagactggagtttcaccatgttggccaggctggtctcgaactcctgrcctcaagtgatctgcctgcctcggcctctcaaactgctgggattataggcatgagccactgcacccagccctcttttctttgtaaattacccagtctcgctatttcttcatagcaggatgaggacaaactaatacacagtgtttaaacgaagattttggtttgcgcacagaaaagcaaatcgtgtgttgtttgtggctgcaacat

SEQ ID NO: 517808 - DNA, 301 bp, Homo sapiens
attacagacacctaccgccacaccccgctaactttttgtacttttagtagagactggagtttcaccatgttggccaggctggtctcgaactcctggcctcaagtgatctgcctgcctcggcctctcaaactgctgggattataggcatgagccactgcacccagccctcttttctttgtaaattacccagtctcgctatttcttcatagcaggatgaggacaaactaatacacagtgtttaaacgaagattttggtttgcgcacagaaaagcaaatygtgtgttgtttgtggctgcaacat

SEQ ID NO: 517809 - DNA, 386 bp, Homo sapiens
taatcccagctactggggaagctgaggcaggagaatcgcttgaacccaggaggcagaagttgcagtaagctgagatcatgtcactkcactccagcctgggagacagagtgagactccctctcaaaaaaaaaaaaaaaaaatagttcatggggtctcattcttagcgcatcctatcagcagtgagaggcagggaacaggaagtctgctggcgtgggagagatgatcagtcgcgcttctcaggagccgtgtgaagaggttcactgaatgaaccagaacttttcatggaatacgttttcttagcaggaaatcacagccaaagaggtggggaaaatgaggagggaataggctttgagccaggcagcggtggaggccacccgggctcggca

SEQ ID NO: 517810 - DNA, 386 bp, Homo sapiens
taatcccagctactggggaagctgaggcaggagaatcgcttgaacccaggaggcagaagttgcagtaagctgagatcatgtcacttcactccagcctgggagacagagtgagactccctctcaaaaaaaaaaaaaaaaaatagttcatggggtctcattcttagmgcatcctatcagcagtgagaggcagggaacaggaagtctgctggcgtgggagagatgatcagtcgcgcttctcaggagccgtgtgaagaggttcactgaatgaaccagaacttttcatggaatacgttttcttagcaggaaatcacagccaaagaggtggggaaaatgaggagggaataggctttgagccaggcagcggtggaggccacccgggctcggca

SEQ ID NO: 517811 - DNA, 386 bp, Homo sapiens
taatcccagctactggggaagctgaggcaggagaatcgcttgaacccaggaggcagaagttgcagtaagctgagatcatgtcacttcactccagcctgggagacagagtgagactccctctcaaaaaaaaaaaaaaaaaatagttcatggggtctcattcttagcgcatcctatcrgcagtgagaggcagggaacaggaagtctgctggcgtgggagagatgatcagtcgcgcttctcaggagccgtgtgaagaggttcactgaatgaaccagaacttttcatggaatacgttttcttagcaggaaatcacagccaaagaggtggggaaaatgaggagggaataggctttgagccaggcagcggtggaggccacccgggctcggca

SEQ ID NO: 517812 - DNA, 386 bp, Homo sapiens
taatcccagctactggggaagctgaggcaggagaatcgcttgaacccaggaggcagaagttgcagtaagctgagatcatgtcacttcactccagcctgggagacagagtgagactccctctcaaaaaaaaaaaaaaaaaatagttcatggggtctcattcttagcgcatcctatcagcagtgagaggcagggaacaggaagtctgctggcgtgggagagatgatcagtcgcgcttctcaggagccgtgtgaagaggttcactgaatgaaccagaacttttcatggaatacgttttcttagcaggaaatcacagccaaagaggtggggaaaatgaggagggaataggctttgagccaggcagyggtggaggccacccgggctcggca

SEQ ID NO: 517813 - DNA, 644 bp, Homo sapiens
ctcaccacgaaggtctgcaccttcactgctgagcmagcgagaccacgaacccaccagaagaaagaaactcctaacacatccgaacatcagaaggaagaaactccagacgtgccatcttaagagctgtaacactcaccgtgaaggtctgcagcttcattgttgaagtcagtgagaccaagaacccaccaattccggacacagaaggacgaggaatgaagggtgttccggtgggtacatgttggctcctttgctcagctcaagtgacctctgaagcctgttctacctttcacagtgggaagagaggaaagggtcactagagtcatgtgtaaaatgtggctccatcttctcaaatcagggatgaatgcctgcctatttctggatatgtcagggaaggcagacacagagagttagagaaagggaaagagaatgagacagagagagacagagataagaagggggagagggagtgaaaaagagagaaggagagggtaagggagaggaagggagggaaagggggagagagagaaagagggagggagagagagaaacagaggagacagggctgagataccagacagtggatttagagttcctggttcccacaaggctctttgtgtgaatcagaacaagtttttcccactgga

SEQ ID NO: 517814 - DNA, 488 bp, Homo sapiens
gcctcagccacaggttccatttcatttgattttcccataggcaagcttgcgcatggctgctgggggccgtgcctcgcgtggctgtcatagcgggaaggcttccatccttaggaggcatgcactcaacagaattctgtaagggaaggattgtttttatgtacaactctgataccatgattgttttcttgtgcctagagagcaatgtggctatatattaacttataccctgggggctgsaaccctttccagccccttcaagtagcctctttgggctactaacactggcagttccaagggcctttccagcaaacagagctctctaacaaggcaatgcacagagcagttctgctttgcttgtgtttccccttattttacattcctctatcttctatggcataaacaagaggtagtttatgtttataaattgctatgatttgaatgtgtcccctccaaaattcacacgttgaaacataatggccaatgcgata

SEQ ID NO: 517815 - DNA, 488 bp, Homo sapiens
gcctcagccacaggttccatttcatttgattttcccataggcaagcttgcgcatggctgctgggggccgtgcctcgcgtggctgtcatagcgggaaggcttccatccttaggaggcatgcactcaacagaattctgtaagggaaggattgtttttatgtacaactctgataccatgattgttttcttgtgcctagagagcaatgtggctatatattaacttataccctgggggctgcaaccctttccagccccttcaagtagcctctttgggctactaacactggcagttccaagggcctttccagcaaacagagctctctaacaaggcaatgcacagagcagttctgctttgcttgtgtttccccttattttacattcctctatcttctatggcataaacaagaggtagtttatgtttataaattgctatgatttgaatgtgtcccctccaaaattcacaygttgaaacataatggccaatgcgata

SEQ ID NO: 517816 - DNA, 493 bp, Homo sapiens
gctgtgcttacacattcctttgtaaggacaggacagtctcccctaagttaggggacagaagtgactcctactgatggcattagctctgcccctactctcagatgcaatgccagggactgtgagractagagaccctggagctgctggctgggtgtggtcgggggccagttatcagcctctctgaactccatgtccttagtactaaacagaagccccttttgcagggtgggcactgggaagcactgttggggccatcctttgttggtggcctcttctcttccatctcctctgggttttcacggctttttcaggaggaggccttgccaccctgagtgccctccatgaccacagctgccttctgaggaaagaggcctcgggggtcctctctgcatgtagttgcccggcagcctcgcctggctgtatatgggaatcacctggggaacgttacaaaccactgttgtgttgccctgcctcccagagattctgcaccttg

SEQ ID NO: 517817 - DNA, 493 bp, Homo sapiens
gctgtgcttacacattcctttgtaaggacaggacagtctcccctaagttaggggacagaagtgactcctactgatggcattagctctgcccctactctcagatgcaatgccagggactgtgagaactagagaccctggagctgctggctgggtgtggtcgggggccagttatcagcctctctgaactccatgtccttagtactaaacagaagccccttttgcagggtgggcactgggaagcactgttggggccatcctttgttggtggcctcttctcttccatctcctctgggttttcacggctttttcaggagsaggccttgccaccctgagtgccctccatgaccacagctgccttctgaggaaagaggcctcgggggtcctctctgcatgtagttgcccggcagcctcgcctggctgtatatgggaatcacctggggaacgttacaaaccactgttgtgttgccctgcctcccagagattctgcaccttg

SEQ ID NO: 517818 - DNA, 493 bp, Homo sapiens
gctgtgcttacacattcctttgtaaggacaggacagtctcccctaagttaggggacagaagtgactcctactgatggcattagctctgcccctactctcagatgcaatgccagggactgtgagaactagagaccctggagctgctggctgggtgtggtcgggggccagttatcagcctctctgaactccatgtccttagtactaaacagaagccccttttgcagggtgggcactgggaagcactgttggggccatcctttgttggtggcctcttctcttccatctcctctgggttttcacggctttttcaggaggaggccttgccaccctgagtgccctccatgaccacagctrccttctgaggaaagaggcctcgggggtcctctctgcatgtagttgcccggcagcctcgcctggctgtatatgggaatcacctggggaacgttacaaaccactgttgtgttgccctgcctcccagagattctgcaccttg

SEQ ID NO: 517819 - DNA, 606 bp, Homo sapiens
ctgccttctgaggaaagaggcctcgggggtcctctctgcatgtagttgcccggcagcctcgcctggctgtatatgggaatcacctggggaacgttacaaaccactrttgtgttgccctgcctcccagagattctgcaccttgtattaactgagcacctagagccaggtgtggtgatgcacacctgtagtcccagctactcaggaagctgaggtgggaggattccctcagaccaggagttcaagattaagcctggggaaactactgagacccccatctcaaaattaattaattaaaaaatactgagcacctactcaatggccagcactgaactaggtgctggagttacagtgatcactaagatataattgttgtcctcgaagaacttcagtcaggtgggaatagatatttattgaatggaataatatttcaagaaatatctaccaagaggccacttcttggaaatccctgttggaaagatttttatcttttttatgagcagagtgcaaagttgtctctttagatggatgaattttgaagggaagttagtaatctagttcctatcccccaacctcccattttacagacgcaaaaaccaaggccaaaca

SEQ ID NO: 517820 - DNA, 606 bp, Homo sapiens
ctgccttctgaggaaagaggcctcgggggtcctctctgcatgtagttgcccggcagcctcgcctggctgtatatgggaatcacctggggaacgttacaaaccactgttgtgttgccctgcctcccagagattctgcaccttgtattaactgagcacctagagccaggtgtggtgatgcacacctgtagtcccagctactcaggaagctgaggtgggaggattccctsagaccaggagttcaagattaagcctggggaaactactgagacccccatctcaaaattaattaattaaaaaatactgagcacctactcaatggccagcactgaactaggtgctggagttacagtgatcactaagatataattgttgtcctcgaagaacttcagtcaggtgggaatagatatttattgaatggaataatatttcaagaaatatctaccaagaggccacttcttggaaatccctgttggaaagatttttatcttttttatgagcagagtgcaaagttgtctctttagatggatgaattttgaagggaagttagtaatctagttcctatcccccaacctcccattttacagacgcaaaaaccaaggccaaaca

SEQ ID NO: 517821 - DNA, 588 bp, Homo sapiens
ccaacacacaagacctcagtcctggcaaagcaagccccrattccccaatcaatgagcttcagtcaggctattgacttggcaccaacttgtgtgcagtggccaagctggatgctgtcctgaattatatcagtgtgacaaggcaacgtctcctttagtgtgaccttaacagtggatttgtccctctttatcagagtaggctccctgtgttcccaaactcaggaaactccaggcattggcagcccacttgcacattctacatcagatcctgcctcactgggagttgtggcagaggatggccagacagacaccatggacagacaccatggagaggggcaatgaacaaaccttcatcttctatacataacatgaattctgctttctcttctgtgcctgtgtacagacactcagccaggaatcccaccaccaggagcattttcatccacttctctaaaggagtccagtgccttgctgcataacagtgtgtgatagactatacacagttgcccagggggtccagcctccctgcactctcctccctgtgtgatccctccctacattcactccaggcttagtcatgtgatttgtgag

SEQ ID NO: 517822 - DNA, 588 bp, Homo sapiens
ccaacacacaagacctcagtcctggcaaagcaagccccgattccccaatcaatgagcttcagtcaggctattgacttggcaccaacttgtgtgcagtggccaagctggatgctgtcctgaattatatcagtgtgacaaggcaacgtctcctttagtgtgaccttaacagtggatttgtccctctttatcagagtaggctccctgtgttcccaaactcaggaaactccaggcattggcagcccacttgcacattctacatcagatcctgcctcactgggagttgtggcagaggatggccagacagacaccatggacagacaccatggagaggggcaatgaacaaaccttcatcttctatacataacatgaattctgctttctcttctgtgcctgtgtacagacactcagccaggaatcccaccaccaggagcattttcatccacttctctaaaggagtccagtgccttgctgcataacagtgtgtgatagactatacacagttgcccagkgggtccagcctccctgcactctcctccctgtgtgatccctccctacattcactccaggcttagtcatgtgatttgtgag

SEQ ID NO: 517823 - DNA, 616 bp, Homo sapiens
ctgcaattaacacctatttaaaaagcgaaacaacactgattaattccaggaaaaaaaaatctaagtacaagaaatgactctattgttctactagacccagttgtgaagaatatttgcaatcatatagaacacacatgttgaatcttgatctaagctttaaaattgtgctgtaactttatcaggagattgaggaagagtaaaagtgagtgaagaaagtataagagaattaaatccttatttkgtagagtagaaagtcagtagaagctacactaaagtgaaaacatggagcatgttttctgaacaggagctaaaccccagaatgaaaagagttgaacttgttttcgtcttgtgtggggagaggcaatagcagggacaggtcagggacggaatgctgaatagcatttgaatttcaagtatgatatggatagctttaaaaacaatggttgaaaacaacagtaggaagggatagaaaatcaagtctactaccccagcatgatgggctaatggtgtccttccaaattcatatgacctcagcatgcgactatttggaggcagtctttaaagatgaaataagttaaaatgaggtcattagggtgggccctagtccattaagaca

SEQ ID NO: 517824 - DNA, 557 bp, Homo sapiens
tcccagaactgagggttcctccctttttagaccatttagggtaacttcctgacgttgccatgtcatctgtaaactgtgctggcactgatggagtgtctttttagcatactaatgcatcataaytagcgtacaatgagcagcgaggatggcaaggggtcactttcattgccatcttggtttcagtgggttttggccagcttctttaccatgacctgttttatcagcaaggtcttcatggcctatatcttgtgctgacctgctgtctcaccctgagacttagaatgcctaatctcctgggaacgtagcccagtagatctcagccttattttacccagcccccacgcaagatgaaattattctggttcaaacacttctgacatcctgccaagaagcagacacatgcagggggtgaccatgcaagctcacagggaaaaaacatccatctgcaacccaggatccaaatttcaaaagaaaaaattctgcccacacattgatcttttaatctccataactagcagacaatttgtaaagcgcccccctgaagcactttgttaacg

SEQ ID NO: 517825 - DNA, 557 bp, Homo sapiens
tcccagaactgagggttcctccctttttagaccatttagggtaacttcctgacgttgccatgtcatctgtaaactgtgctggcactgatggagtgtctttttagcatactaatgcatcataattagcgtacaatgagcagcgaggatggcaaggggtcactttcattgccatcttggtttcagtgggttttggccagcttctttaccatgacctgttttatcagcaaggtcttcatggcctatatcttgtgctgacctgctgtctcaccctgagacttagaatgcctaatctcctgggaacgtagcccagtagatctcagccttattttacccagcccccaygcaagatgaaattattctggttcaaacacttctgacatcctgccaagaagcagacacatgcagggggtgaccatgcaagctcacagggaaaaaacatccatctgcaacccaggatccaaatttcaaaagaaaaaattctgcccacacattgatcttttaatctccataactagcagacaatttgtaaagcgcccccctgaagcactttgttaacg

SEQ ID NO: 517826 - DNA, 557 bp, Homo sapiens
tcccagaactgagggttcctccctttttagaccatttagggtaacttcctgacgttgccatgtcatctgtaaactgtgctggcactgatggagtgtctttttagcatactaatgcatcataattagcgtacaatgagcagcgaggatggcaaggggtcactttcattgccatcttggtttcagtgggttttggccagcttctttaccatgacctgttttatcagcaaggtcttcatggcctatatcttgtgctgacctgctgtctcaccctgagacttagaatgcctaatctcctgggaacgtagcccagtagatctcagccttattttacccagcccccacgcaagatgaaattattctggttcaaacacttctgacatcctgccaagaagcagacacatgcagggggtgaccatgcaagctcacagggaaaaaacatccatctgcaacccagratccaaatttcaaaagaaaaaattctgcccacacattgatcttttaatctccataactagcagacaatttgtaaagcgcccccctgaagcactttgttaacg

SEQ ID NO: 517827 - DNA, 576 bp, Homo sapiens
atgctggatgccaagggctgtgaagagctgagatggtccctccttgtaagctaatgagttggcctgcctyggtgcatggggctgcgagatgagagactcctgagtcagggactaatgatggccttactcacagcaagagcagaagccagagtgtcagcatgatcaccttggctccctgagctccaaggccatcagcggtgatgcaggcaggtctagacgggagcccacccaccccccacagtgggctacacctaagagaggacacagggccaggggaaccaactgcccacagcagcctgctcattgtctggggaagggacactgtctcatctcccaaaggtgcttgttccaacacaaccttgagaaatggccagataaagagacatcagagcttgacaagctgtatgggagagggagagaccatgggagaagcgtctcccaacattaggaagaaagtcgtcttagtcagtttgggctctgtcacaaattcccatagactgggtggcttaaacaacaattaaattgtcacagttttggaagctggacaattcaagatgagaatgcaattctaaaacc

SEQ ID NO: 517828 - DNA, 639 bp, Homo sapiens
tgcagccccctgggtcacctgcagcactggaggtgaggccatgcttctcccagacagccggcccttgaggacacagtgggggaacttgagcctgctaattcctgtccctggcctgggtctcctctgcaggctgtctttgctctaacactccctgtggcctggctgaggctttctcagaggctgctccacagtccaaggctctctctcctttcttccccttctcctttcatagatatccgaccttcctcatagtctgaagtctttccctgcttcctcctgcttcttctccttttattgttcccaggcattatccccaataaatctcttgcatttttaaccccaayttcatgattgtaccccagaagacttaaactgaccacccctgtatgcagacatgctggagaaacagaagagctgcgtgtagaaagtaaaggatgcatgtacaactgcatgtacatatacatgtggctgcatgtacaactatgaggagaaaataatcaggaatatgtctataatgattggggtagctctctttaaggaagagcaaaatctgaaagcatgatagataacatgggatagttagttatgtggcaatcaaatattactgtcctgcaacagaaaccatacataaaattgact

SEQ ID NO: 517829 - DNA, 570 bp, Homo sapiens
gcttttcgtctgtctttgaggtgtggggatgaaggccggggcagtccctgagagtgcatcgctgtaggtccaggtctcacggaattttgcagaacgttccagaggagactgaatgggatcstcttaatttctgtccccactttcggccttttcttttcttccaccagtgtattacctttgctccgctcagagagatgtcctctaataacgccagcgacgcattgtgctcctagcagagggcacgcaccaccctcctgtgtgttcgcataggtcaaatacaggtttgctcctttgcacatttagcgctgtgagtaaacaaggataagtttttgtaatattaagtctaatcattacgaaggagggaaatgggggctgcttcccaaaacccagaagagtttttgcatcacactgctaaatgacaattggttaaagattaaagagccctctgcattatagtggatacctagagctagagtattcgattaagcaaatcatgcggtgatatcgttgaatactttgaccctggacgtttagtgttctctgaagtttcatccccaaccaatgtgacca

SEQ ID NO: 517830 - DNA, 512 bp, Homo sapiens
actgagagagggactccacactgggtcagggaactggactggggagcccttgaatgctctscctgcactgctgtgtcctctcttttgcagcctaactcactccttctgcaaagtcttcttgtgcacaggtgagagctgtactcggcaccgggagatatttataaagaatggcttgataattgttctctttatccatagcagcatgggcgtgtgaatgggaaatgaggaggggagaggcaggaaagacaaagctgcttaattcctattatgctttctagtggctcaatttgggaggggggtgatggattaggatcaaaagttggtccagtgggactgaccaaccaggcagcccctgcctatttattatgtcagtggtttctaaagtgtggtcccccctggggaccagcaacatcagctactgactcagaaactttgtttctgtgttttaacacaccctccaggtggttctgatgcacactaaagtttgagaaccattgtactaggtgttaggc

SEQ ID NO: 517831 - DNA, 512 bp, Homo sapiens
actgagagagggactccacactgggtcagggaactggactggggagcccttgaatgctctccctgcactgctgtgtcctctcttttgcagcctaactcactccttctgcaaagtcttcttgtgcacaggtgagagctgtactcggcaccgggagatatttataaagaatggcttgataattgttctctttatccatagcagcatgggcrtgtgaatgggaaatgaggaggggagaggcaggaaagacaaagctgcttaattcctattatgctttctagtggctcaatttgggaggggggtgatggattaggatcaaaagttggtccagtgggactgaccaaccaggcagcccctgcctatttattatgtcagtggtttctaaagtgtggtcccccctggggaccagcaacatcagctactgactcagaaactttgtttctgtgttttaacacaccctccaggtggttctgatgcacactaaagtttgagaaccattgtactaggtgttaggc

SEQ ID NO: 517832 - DNA, 537 bp, Homo sapiens
attactggtgtgagccactgcgcctggccttgatttcttaaaaagcactgatgagcagtcaagattcagcctctctaggtagaacacagccaaagaagttgtagaagaaagacctaaagtatttgttgtttcattcattctttcaccatttattaaaacctagtatacgtcaggtgatgtacaaaactgggaatggaaaagagtaaaaacacttcctgtcttctcagcttcctggaggtggctctggaggtctcagagcccaaaagaaggaggaggactttgctggggggatcagggagagaacggcattcaaaatcaagggcaactctgcatttgagaaaactctgctcctttccagaactcccgtacaatgctcagggtgactggtgcacgggagggcagggcacggtggtggctgatggtagattttattgtgcaggcgaagggtgcactgcagggttgcagcacagacgagcagttataactrctgacttcgcatgcaccgcgtgcccggcactggtccggcccattgtgcct

SEQ ID NO: 517833 - DNA, 522 bp, Homo sapiens
tccatccgtacgctttctgttctcacagataaagaggkagccagccccagcatgatggctcatgtctgtaatcccagcattttagaaggctgaggcaggaggattgcttgagctcaggagttggagaccagcctgggcaacatagtgagatcttgtctctacaaaaaataaagaaatagccaggtgtggtggctagtgcctgtagttccagctactcgagaggatgaggtaggaagatcacctgagcccaggaggtcgaggctgcagtgagccatgatcgcaccactgccctccagcctgggtgacaaagtgagatcccccccaccccatcttaaaaaaaaataagttgtaaaaagagggagtcagcagcagggagggaaataatcaaatcaataagatatcattgccaagctctctgggaattagaaaatggatttagtaattctgcagaatactggatggccagaagccccagtcctaccaaaccactaaaaagataagcatcttcagtcaggagaagca

SEQ ID NO: 517834 - DNA, 481 bp, Homo sapiens
ggacttccacatcgctccacccaaaggcttccttccacctcaatatgggtgccagcagtaagatccggaggaactggacggttgagctgcgtgtctgatgtgtgctgctgaccatcaggtgccggctgagccacctggagtctgcacttaaccaggggtcaggctacctgctcttggagaaccatgtgtggagatctggggggcatggtgggcccaggagctgcagcctcctccaccgaacctctggtccccgggggccctggggtggccgagaatcccatcgccagggctgcagtgggctcttcttcctcatccctcccctttctttctcctcccttcaactctaaattacttaaattatggtgggggkttggggaggacatggggggcactgggacctagatttgttcttctaaataaagtggggggggaaaaaagcttcaaaggtccaaagctcggcatagctaattttgtagcaaca

SEQ ID NO: 517835 - DNA, 598 bp, Homo sapiens
tgagcttcagtcaggctattgacttggcaccaacttgtgtgcagtggccaagctggatgctgtcctgaattatatcagtgtgacaaggcaacgtctcctttagtgtgaccttaacagtggatttgtccctctttatcagagtaggctccctgtgttcccaaactcaggaaactccaggcattggcagcccacttgcgcattctacatcagatcctgcctcactgggagttgtggcagaggatggccagacagacaccatggacagacaccatggagaggggcaatgaacaaagcttcatcttctacacacagrtatgtaattctgctttctcttctgtgcctgtatatagacactcagccggtaatcccaccaccaggagcattttcgtatattactctaaaggattccagtgctctgctgcataacagtgtgtgatagactgtacatgggtgcccagtgggtccagcctcccctcattctcctccctgtgtgacctctttctacattcactccaggcttagccatgtgatttgtgagagtaaggcaagcagagacaagtactagtccattccttgtggaatgttccctcctggaacg

SEQ ID NO: 517836 - DNA, 598 bp, Homo sapiens
tgagcttcagtcaggctattgacttggcaccaacttgtgtgcagtggccaagctggatgctgtcctgaattatatcagtgtgacaaggcaacgtctcctttagtgtgaccttaacagtggatttgtccctctttatcagagtaggctccctgtgttcccaaactcaggaaactccaggcattggcagcccacttgcgcattctacatcagatcctgcctcactgggagttgtggcagaggatggccagacagacaccatggacagacaccatggagaggggcaatgaacaaagcttcatcttctacacacaggtatgtaattctgctttctcttctgtgcctgtatatagacactcagccggtaatcccaccaccaggagcattttcgtatattactctaaaggattccagtgcyctgctgcataacagtgtgtgatagactgtacatgggtgcccagtgggtccagcctcccctcattctcctccctgtgtgacctctttctacattcactccaggcttagccatgtgatttgtgagagtaaggcaagcagagacaagtactagtccattccttgtggaatgttccctcctggaacg

SEQ ID NO: 517837 - DNA, 598 bp, Homo sapiens
tgagcttcagtcaggctattgacttggcaccaacttgtgtgcagtggccaagctggatgctgtcctgaattatatcagtgtgacaaggcaacgtctcctttagtgtgaccttaacagtggatttgtccctctttatcagagtaggctccctgtgttcccaaactcaggaaactccaggcattggcagcccacttgcgcattctacatcagatcctgcctcactgggagttgtggcagaggatggccagacagacaccatggacagacaccatggagaggggcaatgaacaaagcttcatcttctacacacaggtatgtaattctgctttctcttctgtgcctgtatatagacactcagccggtaatcccaccaccaggagcattttcgtatattactctaaaggattccagtgctytgctgcataacagtgtgtgatagactgtacatgggtgcccagtgggtccagcctcccctcattctcctccctgtgtgacctctttctacattcactccaggcttagccatgtgatttgtgagagtaaggcaagcagagacaagtactagtccattccttgtggaatgttccctcctggaacg

SEQ ID NO: 517838 - DNA, 383 bp, Homo sapiens
aagcatctcatccctcaacaagataaacaacaggtcctcaagcagcagaacctcgtgtcttgctgtcgagctcatcagcctgaacatttgcagtttttcttgagttctgggaattctcagatggactgtatttttaggaaaggttggcagaaagctgggtgattttcttggccccattatacattctaatgggttctctttaaaattgaaggaagtggtttttaaatatttagtcaaatctactggctctaagactacgttttcaaagaacattggtgaagcaggcccggaggagtckttctgtgatttaatgctgaccactgttttccaagtcacaggaaaagaggcatggactgacagaagaaacttttccagcaagtgct

SEQ ID NO: 517839 - DNA, 494 bp, Homo sapiens
ttcaatacagaggaaacgcagaggacagtgcaatcaatcactgccaagcttatcttctaacaaggagtagggctccagtttccagatgtaacattaaaacttaatgtttccactggggtttagcatggcaggtttccctgaaacttcagtttcactcagttaactaattatgagaaaatgtgacattggtatttcctttttctacagggacaaatcattaccartaggagggagaagttgttatttttgttctgctctgttttgtcattaaaaagaaattaacttacacagtagtaaatatactcttgttagaggagggaagaattatctccatagttctatccattcaatcatgtctttggttttccagggacatggccgataaaagagagttaagagtttgattgttagaattgggtctgaaaattaactctctcacctactagctatgtgaccttaagcaagttatttaagcactctgagcctgcttttgc

SEQ ID NO: 517840 - DNA, 503 bp, Homo sapiens
agcaatttaaatgacgaagtgataggcattcaatacagaggaaacgcagaggacagtgcaatcaatcactgccaagcttatcttctaacaaggagtagggctccagtttccagatgtaacattaaaacttaatgtttccactggggtttagcatggcaggtttccctgaaacttcagtttcactcagttaactaattatgagaaaatgtgacattggtatttcctttttctacagggacaaatcattaccaayaggagggagaagttgttatttttgttctgctctgttttgtcattaaaaagaaattaacttacacagtagtaaatatactcttgttagaggagggaagaattatctccatagttctatccattcaatcatgtctttggttttccagggacatggccgataaaagagagttaagagtttgattgttagaattgggtctgaaaattaactctctcacctactagctatgtgaccttaagcaagttatttaagc

SEQ ID NO: 517841 - DNA, 494 bp, Homo sapiens
ttcaatacagaggaaacgcagaggacagtgcaatcaatcactgccaagcttatcttctaacaaggagtagggctccagtttccagatgtaacattaaaacttaatgtttccactggggtttagcatggcaggtttccctgaaacttcagtttcactcagttaactaattatgagaaaatgtgacattggtatttcctttttctacagggacaaatcattaccaataggagggagaagttgttatttttgttctgctctgttttgtcattaaaaagaaattaacttacacagtagtaaatataytcttgttagaggagggaagaattatctccatagttctatccattcaatcatgtctttggttttccagggacatggccgataaaagagagttaagagtttgattgttagaattgggtctgaaaattaactctctcacctactagctatgtgaccttaagcaagttatttaagcactctgagcctgcttttgc

SEQ ID NO: 517842 - DNA, 184 bp, Homo sapiens
cacggtcacagagctactaagaagtgcagtggtttatacctcwgtattttggaccttggagctcaaatattgagcgattaaggctactgtttctaatgtttcatccgtatccacatgccctgtcgtatgtccagggtccttgattccacctcttaaatcagaactgctgaagatgggctccagg

SEQ ID NO: 517843 - DNA, 589 bp, Homo sapiens
taatctgataaacattgaagacagggaactgctgctgtaggttatttgacctctaactgtacatacattggatttggggtttgacatgagagacaaatgggagataaaatctatttattagcctaagaaagagatggcattatattacagaggaataaactcaaactaggaattttaagacttttgttttcatatctgtatgtcattgaatatggcccccttaacttctctaagcctgcatttctgtatcaattttttaaaaatcccactcaatctacctgagtagagttacaaaaatatgatgaaaaaataaatgtgaaacatttttaaaaacaggccttatagctacatagaagttataatgaaaataatgcttcaaattactagctttgtcactttgaataatatggtttgttaaagaagaggtaagtaaggttttctccattctggaggtagtcttgaatcggcaactatgaaaagtttaaaattatcaaggtgaaatatgattaggaagacactgtagagaaccagcaagcctatatgacatttgkaatgaagggagtgaaggaaagagagtgggagaagtttc

SEQ ID NO: 517844 - DNA, 561 bp, Homo sapiens
gatgggtagccgcgggcatgcctgactcacagactggataatcagctctggaataattctgggtagtgactctggtcagaaattgtgaagaacagctttcttccttgtccccaccttcatattgtcaaattattgctgtgctagctcaattaaaagccttgaggatcccctcacttgcatagaggcttagaccctggataactgtggactcaccgtggcatggctctgagaacaccgaatgacagagctgaatgaaggagaaaagtaaacaaggcccctgttgcctaaatagttgtgcaattagcagtaccaatgggaacagagctactaatgagtgtaggctgctcatgttcatggaatttcttccaaaaggagtggcttagaatgttcactgaaggygacaggcactctttaagaggaccattgggtacttaagccccttgctgacgtgaagagtgccctgttggcagctaaataggcctcaggtgcttgtttctcaggacatagaatttgagtcaacaagtgtcttcacatgtaagtgggagtaaagtgaccctttca

SEQ ID NO: 517845 - DNA, 635 bp, Homo sapiens
cctggccatcacatttctaaacttaaataccagaaaataaatataactgtccgtttattaagagtgcagagaagtttgggatctgtttcttcatttaaaaataactcatgcaaagtttaattctaggatcaaaatcaaaggacaaaatcatctttaaaaaactcttatgagaagaagaatgtttctctttaaatggatcttcayatagttaatgatttttcttggattacagcaaaattcatgcttcgtgagattttcctttgtatccatatggtcaggatttgaaatcagtgatgcactattatcctcaaaaatcatacagaaagtctgattcagatatctttaaggattctgttagggaaatgacttgagaatgtaaaatatgcaataaattacctctcccaaaatgcagacccaaactccagattgtgggtgcttagagaaagaacagtaattttagggcccccacctaaaattaaaaagtatatgtccttagctaaagtttctaaagcttccaaaaggaagtaaaaattatttaggtagaataatgacttttctcatattttcttctcaagaatatttagatcacatttttacaaagtcttgagctttttaagttgcaaaggaataaagaa

SEQ ID NO: 517846 - DNA, 544 bp, Homo sapiens
tcagaaataatcattcatttaagataacattggtttggagactatttcttgactactggatagcctgtgtgattcagccaagttatgttagaacagcctaataaatatgccacgtgacctaatgaaagtcttcaagagctcatagaatataaaggaaaagactgtccaatgtcaagggaccaagtgccaactataagggggctggtatcactcaaaaaaaaaaaacgtagaaatagaatcctatgtgattctttcagattttggttaaagygataaagctttcactcataaaagagtaagaaataagagaccatctcactgcttccattcatgattcaaggagttcaaggaacaaaaccagctactgtgtgcttttataaagctctaagaatgatacctacacctctcctcagaaccccttgctgtgcaaggctactctcagggccagtagcgtggacctcacccaggtgcttgttagaaatgcagactctcaagccttactccagcacttttgaatgagaatttccattttgacgagattaag

SEQ ID NO: 517847 - DNA, 512 bp, Homo sapiens
ggtaaaagcaagaatcaaacttggtatatttgactctaaacatattctcaagattgataaaagaagggaacatagctattgtcatgaaattagagccttggtattgaaatgtgatctctcagcaccctagcactttatctttcaaatgactttacactggagggtttcttttttatcaaagggaaagagcagtcctgtgaatcattggaagagaactttggctttcaggtgtgtgttaggcagaattaaaagatactcccaagaacacacgacttctcttatcgatcgagcaaccacraatccaagtgttgctgtaaagggatttcacagatgacattaaggttccaaatcagtcaaccttaaaatagggatattatctaggtggccctgacctaattacatgaggccattaaatctgagtcttgtggtcagagacggagaaagtcagaaatttcaagtgtgagagggagctggcccaaggaaattctactggctttgagatggagggatca

SEQ ID NO: 517848 - DNA, 614 bp, Homo sapiens
ggcacctgtacctcacaggttgggcatctacagctttactgaccgctgcctacgggtctctcattgtccttgaccaccagttttgacttgagtatcaagtgccagttgacatccccaacggcatcccagatgtggtcagacactcagagtacccaagtgagcctgaggcaacamttatgtcctctgacgtaagcgctgactccattttttcaaagctcctactgaagtaagttaagggaaattgtcttactttactttctccttcatatactatgaaaatgccatactctgaattgagtgtcccatctgaattgctgaaacataaatttctagccagaggcagtgaaatttgaatgactgcgggttcttttgacatacttgagaagtagatgtaacttggctagggtttcaaccactcacctttattggaattagatcctttggcatcctcctctaataacccaatggcattcagtctctgtgttcccttgtgtctgcagaataaaactaggattctgataaagtatgagaaaccgtcagtctttgcctgccctgaaccaataaaaatgcacatgaattttgccactttatgttcattgccactgatgtaaaat

SEQ ID NO: 517849 - DNA, 586 bp, Homo sapiens
gctgccctggagggtcacttggacttagagcagattttgcaagacagcaaactctgttgcagtaacctgaaatgttgaagatgctgttgtcagagcatgaactagcctcctctgatgacttcggggccctctgacaacttcagggccctctgatgacttcaggtgcttgtgccagaccaaggagtccttcacastccttctccctcccctccatgtccaggccaccaccaatccaactcaaccctcacaaacattccctaggccaaaccaacatttcccacctgggctcttgcaagagcccttagatctattctctacatagccaccaaagtcgaaaccacaaagactttcaaacacctcctctgtttaaatcccttcaatggctccccactgctctcaagctcaaatccaaagtctttaacatggcccgcaaaggcctgtgtgatctaaccagggcccaactgtccagacctcatcccgcgcatccatccatctctctctccctcacctcattcctctctcctatccccatcccacatcagtggctccagccctctctcagttgcccaaacatgccaagctccta

SEQ ID NO: 517850 - DNA, 706 bp, Homo sapiens
ttgaagcaaagaagttaagatccagttcaaaatgagatccattccaatctcccaacacctagagtttagaacaggagcacaagcaagacaaagttatggagtcacacatgaatcatttacacttggttaagttagatgtttctacctggagaaggaagtcagactgagaatctcccgtcctcacacaatgagcctctaccacaaaggaaactcaatgctggcttattcctctgtaatctccccsctgtagcatcacctcccaacatggtgcagtgagccaggccaacttcagcaatagcattctccgaactcctctaacggagaaagagagattctttattcatttcaaaaatattaacaagaagcttcttcccatcaatcactgagtttggagattctgagacaagagcgaagcccaggatgcgttcttattcccagaaatcagataacagactgatgaattctttgagaaagtaaacaaagatattatgtgctactaaaatatacttacatagtttcatcacatcaataaaagcaaaatctctctaatgagaatgttgcaagcccagcatttcctggcctctgtctctttctctgtcccctaccagtttctcctgtcttgctctctggtgaccacacctgacttcttcaagttccccagacacaccacactgtcattcatctgctgttcctgaacttcccgcag

SEQ ID NO: 517851 - DNA, 706 bp, Homo sapiens
ttgaagcaaagaagttaagatccagttcaaaatgagatccattccaatctcccaacacctagagtttagaacaggagcacaagcaagacaaagttatggagtcacacatgaatcatttacacttggttaagttagatgtttctacctggagaaggaagtcagactgagaatctcccgtcctcacacaatgagcctctaccacaaaggaaactcaatgctggcttattcctctgtaatctcccccctgtagcatcacctcccaacatggtgcagtgagccaggccaacttcagcratagcattctccgaactcctctaacggagaaagagagattctttattcatttcaaaaatattaacaagaagcttcttcccatcaatcactgagtttggagattctgagacaagagcgaagcccaggatgcgttcttattcccagaaatcagataacagactgatgaattctttgagaaagtaaacaaagatattatgtgctactaaaatatacttacatagtttcatcacatcaataaaagcaaaatctctctaatgagaatgttgcaagcccagcatttcctggcctctgtctctttctctgtcccctaccagtttctcctgtcttgctctctggtgaccacacctgacttcttcaagttccccagacacaccacactgtcattcatctgctgttcctgaacttcccgcag

SEQ ID NO: 517852 - DNA, 551 bp, Homo sapiens
ggagcacttgaaatgtggctatccctgagatgttctgtaagtgtaaaacagacatacaattcagtatttttaaaatgaatgtaaactaacttgttaagtatktttatgttgattacattattgcaatacatgagaatagtctgatgtagtaagtcagttggattcgtcatgtgttgggttaagatataagcatatataagattaatttcaccagtttctttttacattttctgatgtagctactagaaaatgtaaggctacacataggctctcattagtggctcaccttatacttttaatgaacagctctgatctaactccttattatacgcatgactctgggaggcagtattagtatcaagagtgcctgggtccagatggttataagccagtaactaaagcagggtgactgcaggaaagcaacttaacttctgtatttcctcatctataaaacagtaatgatataataacaaaagtcaatagcaccaactattaaatgaagtaatttaataagtagtcagtaaatggagcctttactaacgatgctctga

SEQ ID NO: 517853 - DNA, 318 bp, Homo sapiens
atacttttaatgaacagctctgatctaactccttattatacgcatgactctgggaggcagtattagtatcaagagtgcctgggtccagatggttataagccagtaactaaagcagggtgactgcaggaaagcaacttaacttctgtatttcctcatctataaaacagtaatgatataataacaaaagtcaatagcaccaactattaaatgaagtaatttaataagtaktcagtaaatggagcctttactaacgatgctctgagacacttgtagtgataagtatgaatttgatctacaaccttgtagctaaggcatata

SEQ ID NO: 517854 - DNA, 605 bp, Homo sapiens
gcttgcgccacttgcatggagtatgaacggtttcacatgaagcccgcactcactgtgcaagggaaggtctcgcagagtggagggtggcagaactcctcccatcaagtaggaaatctgactgacaaagacacaggtcagtagggtgccccaaggagcacatttcttattacactctgccttttttttttcttctgactcccagacrcacagaggcccagggacagaaaaaaagcaaaagctacaggttcctaagcagactcaggccctacctgttttgaatagcatgtgtttccagtaattctatttctaatccttttcatggtcccctaggttaggactcatcacagtccctgacccagtaaaaaaatcaaacagatatcaaagactaatgtcagagttcatatagggcttatgggtttgtttgcaaatggaaaccaaggctccgctctttgagacttataggtgcttaccaccccccagcccccatgctattgcttctatccaccaggtgttgagggccatgagcttatcaggagtttgcacttttagatgagaggacaatctggttatagacaactgccagggcacacaggtggctggggcag

SEQ ID NO: 517855 - DNA, 610 bp, Homo sapiens
cctctctcaatgccacctaccatgtatgtatgcttccctaatcatttccagtaattctagaattggggcagcccatcattgacttaatttcatgggacacacttgatatatttacttttaaggaaagtaagttataaccaattttgttttcagaacttgatgagatccttgagaaaaagtgaaaacaccctgcagtaataaaaagctgaacttagraactgtacatttacatgatggaagatgaaaacccagggtttggttagagtctagaagcaattatggctcttcttctctctcaacatcttgtttgttttgctttgttaatgtaaagcaagcacctctgttacttcttattttaaaccacttctctatatactcactgtaagcaaacattcagggctgaggtaggagatagggactttccaagtaaaactgtgtagtgctacaaggaataaaaacaagtgcacagacattttgtacactttatttttgattaacagtgagaaaaaatgcaatagtgtcatagttttttgtaggcagtctcagctttttcgcctttacttatttcttccttttattaatctacattcttttgtgcaccttattgagt

SEQ ID NO: 517856 - DNA, 610 bp, Homo sapiens
cctctctcaatgccacctaccatgtatgtatgcttccctaatcatttccagtaattctagaattggggcagcccatcattgacttaatttcatgggacacacttgatatatttacttttaaggaaagtaagttataaccaattttgttttcagaacttgatgagatccttgagaaaaagtgaaaacaccctgcagtaataaaaagctgaacttaggaactgtacatttacatgatggaagatgaaaacccagggtttggttagagtctagaagcaattatggctcttcttctctctcaacatcttgtttgttttgctttgttaatgtaaagcaagcacctctgttacttcttattttaaaccacttctctatatactcactgtaagcaaacattcagggctgaggtaggagatagggactttccaagtaaaactgtgtagtgctacaaggaataaaaacaagtgcacagacattttgtacactttatttttgattaacrgtgagaaaaaatgcaatagtgtcatagttttttgtaggcagtctcagctttttcgcctttacttatttcttccttttattaatctacattcttttgtgcaccttattgagt

SEQ ID NO: 517857 - DNA, 600 bp, Homo sapiens
tgcacttcatcattgcactccttggtgagaataatgtgggttttcatggtaacatcacaaagtgtaatcaacagtggaccttgattcagataaacctttgctctcttggtggttctaaattactagccatccatcttgtatcaggccacttgaacacctttgagcctcctttcttcctaagcacagtagacataatgataagctcacctaagaggatttatatgaagattaaattgcataaagcagcctggcacagtggctgacacctgtaatcccactactctgggaggccaagatgggaggattgcttgagtccaggagttcaagacccctgggcaacayagcgagactccgtctctacaaaacaaaacaaaaaaggcaaaaaaaatgtataatgcatgtcagagccattaatatagtccctgaaagaaaagaatgataaaataagattgctgaagtagataaaaaacctaggtaatgctttatagggcattaaaatggcaatttgggggctatcttttctaatggacaagaatcattcacactgctatcacacaggaatcctttgcatcactgtccattttctataggtattcattt

SEQ ID NO: 517858 - DNA, 668 bp, Homo sapiens
agttcaataagtgttagccagaaattagtgattctgaaattactatacatgaaattccataggacattggcaaaggagtaataagaggacaattggtagcatcaagtgcttgcactaagaaaaagaacattaaatatgactatattatgttataaaggactacctgtctacctgatagctgaacccaaagagagactgaggtagactgaagataggaatttttctcagaaagaaataaactggctggaatatagacagccacagtcgtaaactgtaatgaacaggttagaatgtctgcaaaatatatagtcaactgaaccttatttaatttacttatatatcaaagcaaggaacaacataagacccacaaaaaacttaaaaatacttttttcatgacctctcaaattagactttgttaattttatttgtcatttccctttcttctcttttgaataacaacacttaaaatatctcatgctcaaaagagaaatayttagttctcaaaggtttgacagaaaattgatagaaggctcaagcccatctttggaccaactctatgaggaatacatagggtaaaggtatgggtcataaaaggcatctgtaagacagccccattgggcagcatccatgcacaaaaggcgttatggacagcatgcctgtgaagatgc

SEQ ID NO: 517859 - DNA, 668 bp, Homo sapiens
agttcaataagtgttagccagaaattagtgattctgaaattactatacatgaaattccataggacattggcaaaggagtaataagaggacaattggtagcatcaagtgcttgcactaagaaaaagaacattaaatatgactatattatgttataaaggactacctgtctacctgatagctgaacccaaagagagactgaggtagactgaagataggaatttttctcagaaagaaataaactggctggaatatagacagccacagtcgtaaactgtaatgaacaggttagaatgtctgcaaaatatatagtcaactgaaccttatttaatttacttatatatcaaagcaaggaacaacataagacccacaaaaaacttaaaaatacttttttcatgacctctcaaattagactttgttaattttatttgtcatttccctttcttctcttttgaataacaacacttaaaatatctcatgctcaaaagagaaatatttagttctcaaaggtttgacagaaaattgatagaaggctcaagccyatctttggaccaactctatgaggaatacatagggtaaaggtatgggtcataaaaggcatctgtaagacagccccattgggcagcatccatgcacaaaaggcgttatggacagcatgcctgtgaagatgc

SEQ ID NO: 517860 - DNA, 565 bp, Homo sapiens
ccctcaaggcctcatctcaacctaattacttctcaaagccccatctccatataccatcacatttgtggtgagggcttcaacatacgaattttgggggagaacaagcattcaattcataaccaacagatatggaattattgcattgaggtcagagatgatgggagcctaagtcatgcattaatggagaagctgaggagaactagagaaattcaagtgttagttacgtttgcagtagagggcacgtagaactgatgttcactctggttggggaagctctcaaactagcaatttgctttygtcttcctgcatcggctcaacccaacactaaacttgcttggctttcttgtagcctagtgtccaacacaatatcacctacaacatttattcccaggtcgaggacagactgaagatgtaaaagggatgactcccctcttgtttgactttctgtgacaccattactttgcattcatctccaatgtgtccccatttcttaatcattatattactgtccattggtgaagaacatccacccaaaaatgcaaaatttactgtctgcaccagtacc

SEQ ID NO: 517861 - DNA, 495 bp, Homo sapiens
agggcttcaacatacgaattttgggggagaacaagcattcaattcataaccaacagatatggaattattgcattgaggtcagagatgatgggagcctaagtcatgcattaatggagaagctgaggagaactagagaaattcaagtgttagttacgtttgcagtagagggcacgtagaactgatgttcactctggttggggaagctctcaaactagcaatttgcttttgtcttcctgcatcggctcaaccmaacactaaacttgcttggctttcttgtagcctagtgtccaacacaatatcacctacaacatttattcccaggtcgaggacagactgaagatgtaaaagggatgactcccctcttgtttgactttctgtgacaccattactttgcattcatctccaatgtgtccccatttcttaatcattatattactgtccattggtgaagaacatccacccaaaaatgcaaaatttactgtctgcaccagtacc

SEQ ID NO: 517862 - DNA, 565 bp, Homo sapiens
ccctcaaggcctcatctcaacctaattacttctcaaagccccatctccatataccatcacatttgtggtgagggcttcaacatacgaattttgggggagaacaagcattcaattcataaccaacagatatggaattattgcattgaggtcagagatgatgggagcctaagtcatgcattaatggagaagctgaggagaactagagaaattcaagtgttagttacgtttgcagtagagggcacgtagaactgatgttcactctggttggggaagctctcaaactagcaatttgcttttgtcttcctgcatcggctcaacccaacactaaacttgcttggctttcttgtagcctagtgtccaacacaatatcacctacaacatttattcccaggtcgaggacagactgaagatgtaaaagggatgactcccctcttgtttgactttctgtgacaccattactttgcattcatctccaatgtgtccccatttcttaatcattrtattactgtccattggtgaagaacatccacccaaaaatgcaaaatttactgtctgcaccagtacc

SEQ ID NO: 517863 - DNA, 681 bp, Homo sapiens
tgttccaccctgcttttaaacaaaaaatatctccrtggacttctaagtcacctattaatcagatgtgttctcctgtttcgagttttgctgggtaggtttatcaagacttcttagatctatatccattgtctaccacccagtgtctgatgaacaacagccaaagaaatagtattaatcagtaactcaaggaatccctccaatattacaataaatactgacaacaggattgactgaacagtctcatgagagcaaaatttacagaatatttaaatgtccatgctttgaagtctacagatgtgaaaatcctagctctacttcttaatagccacgtaacttatttttctctaagcctataaaacatggatgttgggataatgatacttctttcagacagtgcctagcacatactgaatgctcaaaaatggagccaacatgaatgctaaccactatacacttgtaatggttattaatcgattgcatgacagtcaggtgaaagtaccaatattctttactttgtcttcaaaatgttttaaataaatatatgtccatttactattattaataaatattattagtaagtaaatatttactaatttatagatatataatgaatatatacattcacagtcctagtccctagaggtcaacacactgagttttttcttttttgaattttttggt

SEQ ID NO: 517864 - DNA, 681 bp, Homo sapiens
tgttccaccctgcttttaaacaaaaaatatctccatggacttctaagtcacctattaatcagatgtgttctcctgtttcgagttttgctgggtagrtttatcaagacttcttagatctatatccattgtctaccacccagtgtctgatgaacaacagccaaagaaatagtattaatcagtaactcaaggaatccctccaatattacaataaatactgacaacaggattgactgaacagtctcatgagagcaaaatttacagaatatttaaatgtccatgctttgaagtctacagatgtgaaaatcctagctctacttcttaatagccacgtaacttatttttctctaagcctataaaacatggatgttgggataatgatacttctttcagacagtgcctagcacatactgaatgctcaaaaatggagccaacatgaatgctaaccactatacacttgtaatggttattaatcgattgcatgacagtcaggtgaaagtaccaatattctttactttgtcttcaaaatgttttaaataaatatatgtccatttactattattaataaatattattagtaagtaaatatttactaatttatagatatataatgaatatatacattcacagtcctagtccctagaggtcaacacactgagttttttcttttttgaattttttggt

SEQ ID NO: 517865 - DNA, 560 bp, Homo sapiens
atcaatggattacaatcactattacgatttgtgaggtccaagcgtatcctcttacagagtatcttacactttagatttgtcagtttttcctatcgtgtcattgtatttattctgctgtcctttgcgtttccacaaaaactaggtctcatgagatttaggctgaacatttttggcaagaacacttcatgggtgatatggagacttcacattgcatcgcatcaatatcagacgcatcacatccttgtcaatctgtcctactatgatggtgctaactttaaacacttggtaatgttgtcaccactaacgaggctttccagtgaaaaggtacatttttcacttacaaataataagcaatctatggagggatactttacattgtgcctatatcctattctagaaccacattttacccartaattttagcatctactgataattctccccaattgcaattttcttccagctttcttcccagttactttagtgtatttccccacttctgacttccagtaaccatatctcatttcacacctaccttcaggtcccctggaattggtgtt

SEQ ID NO: 517866 - DNA, 515 bp, Homo sapiens
ggtgttcagtgctcttccaagccatgaattgcctaattcctacatgaatcattctgcatagggagtagtgacagctttcagtgtctaacagcttatggccagcggctgctcacagtcacccagcagtggtaggaaatgggaaacgtgctggttaatccaggctatcattaaaaatagttggctttttttgttgttgttgttttttaaaggaaagttcgtgaatgtatagatttttttcatttagcagaggtgtattgagtctcctrttagatcctattcacacctacatactgtggtaactagtactgaggggtggggaaggctacagaaatgaactaagatgccttgttctcaagggacagagagataagatagatatgtagagtcctcagaagttattaatttaatgtgctaagtacacagagggagtaattacatctatttagggagataagggggcatctgattagaggaggtggctttgacatggatattaaatggtaagtaagagtccc

SEQ ID NO: 517867 - DNA, 500 bp, Homo sapiens
gtgttcagtgctcttccaagccatgaattgcctaattcctacatgaatcattctgcatagggagtagtgacagctttcagtgtctaacagcttatggccagcggctgctcacagtcacccagcagtggtaggaaatgggaaacgtgctggttaatccaggctatcattaaaaatagttggctttttttgttgttgttgttttttaaaggaaagttcgtgaatgtatagatttttttcatttagcagaggtgtattgagtctcctattagatcctattcacacctacatactgtggtaactagtactgaggggtggggaaggctacagaaatgaaytaagatgccttgttctcaagggacagagagataagatagatatgtagagtcctcagaagttattaatttaatgtgctaagtacacagagggagtaattacatctatttagggagataagggggcatctgattagaggaggtggctttgacatggatattaaatgg

SEQ ID NO: 517868 - DNA, 413 bp, Homo sapiens
tgagcgaaagtgtggagatgggatttttttttgtttgtttktttttggtgactcaccataaagatccagaagcatggggaacgtgtacagaatagtagaattacagagaccagatggtggatggctttggctgacaagctaagtgactgacacttttttttttttttcttttgagacagagtcttgctctgtcgccaggctggactgcagtggcgcttgatctcagctcactgcaacctccacctcctggattcaagtaattctcctgcctcaggctcccgagtagctggaactacaggcatgggccaccacgcccagctaattgttttatttatttatttattttttttgtattttagtagagacagggtttcaccatttctggccagaatggtctcaatctcctgacctca

SEQ ID NO: 517869 - DNA, 518 bp, Homo sapiens
tgggcgcagtggcttgcgcctgtaatcctagcactttgcagggaccaggcaggtagatcaccaggagttcttgccttctgctggggatgaagctgaagctgaagctgtctgcagccatgctccctccatggggaaaggtcatccacaataggaaagaatgaggcaaggagaagcaaagacaagtcaagaggaaaacattcaaaagggaacaaggacagaaggcctagctatgttcagtttctgttgagtttcctaacacttttccttcagttctctgtactaccctaacatccttcctagatagacaaactaataaattcctcattaygctaaatcagcttgagttgtttctgtcccttacaattgaaaaactcctaatatatcaacctaaccatatctgtttactgccctgagttccaaacttgtcattaaatgactggaaggcaaaacagactgaagttacacactctaaccttgcagtcaagaggaaatggtcttttgctccccaattctagagc

SEQ ID NO: 517870 - DNA, 628 bp, Homo sapiens
cacagcgagtgacctgatcaataaggaggatgaatgcagccagaaaccagagatgatgtggcttgacccccaggcaggaggtgagcattggaaaagatgtaagcatcaacgtgatgcccagtgtgagacagaagtacttataaagaacttccttccccaaacagccactgcctagataaggttctgggcggctaactgatgtggtgtttatttggggtcatccttgtgagtggaaagaacagacagtggtatgggagctggcgagctcagggaggaaatctaagcttttcccgttagttttataaagttcagttttgtcacctttaaaatggatacagcaatacctctctcctagggttgctgtaaggattcagtggaaggcggcacctggatgaccagaccagaacaggtgttccataaacatgggaatttcatcatccctacctccaataggcaggaggtttaatttaggtaattcttttggtgttaactttcctctctcrtcatttccagtcatagcatctttgcacgagcagggagattagggatcatctaggtccagcttctacccaagccggtgataatccctgccacactcctgagatgcagcctttcagtcacctgctgg

SEQ ID NO: 517871 - DNA, 511 bp, Homo sapiens
atgtcttagactcactgtaacaccacaatgtgaaaatagctggcgatgtatactggaaatattatatattcaagtctatgatggtcaaatctatkgtactggctttcaaatgcacttgaaaaccattactcccaagtgagtcccctggaaacaagccagagcttgtccggtccatgagttactcccaaagtataagtaaagaggttcatcagctctgcatatcccttcgggagcaattgagaaaatgaatagtctgctgctccatgagatccaagtggcctaatgaaatagtgcatctccacaaggccctaaattatgttgagagattatgttggtcattaggtagcacccctactgtgaggagcactggtcaacgcaaatcaaagagagttgggaaacacatccagtcactgaggagtcatgagctcattgcctatataaaatgcaactgaactgactaccctggtgtacgggtctccccagcccatgggcaagctactatttgccaggg

SEQ ID NO: 517872 - DNA, 511 bp, Homo sapiens
atgtcttagactcactgtaacaccacaatgtgaaaatagctggcgatgtatactggaaatattatatattcaagtctatgatggtcaaatctatggtactggctttcaaatgcacttgaaaaccattactcccaagtgagtcccctggaaacaagccagagcttgtccggtccatgagttactcccaaagtataagtaaagaggttcatcagctctgcatatcccttcgggagcaattgagaaaatgaatagtctgctgctccatgagatccaagtggcctaatgaaatagtgcatctccacaaggccctaaattatgttgagagattatgttggtcattaggtagcacccctactgtgaggagcactggtcaacgcaaatcaaagagagytgggaaacacatccagtcactgaggagtcatgagctcattgcctatataaaatgcaactgaactgactaccctggtgtacgggtctccccagcccatgggcaagctactatttgccaggg

SEQ ID NO: 517873 - DNA, 670 bp, Homo sapiens
tcattgcctatataaaatgcaactgaactgactaccctggtgtacgggtctccccagcccatgggcaagctactatttgccagggaatacttatgccctctggatgtgtctagaaatggttaggtggctttttgggcccaatgtagttatgttaacaaaatcaatagcaagccagtgttaggctaattcaaaagctgtatcttgctttcaaatggcagattcagtgaattttagtccatgttcatatactgtaatatttttggatgtgcctttttaagataaaaagagtagaaagtctagctccatgcaattccctcaaatgaaaactacaatttcctaacctttgaaggttcatttctcttaggctgtcattaaaattacatatgcttttaatttgctgagttgcatttagtgggaagcctcccaagccacatgctgtgctctgttactcactcctgtattccrggggcattgctcctcaaaagagtagtcataattgaaataccctctaagataggataaaatcatcttctacagaacatgctcaggcacatcattttttaatgctgtgtttttagaaacacctcactgattttttaaaataagcttgactctgctttcctcccttagtgagaaagtctatcattccaaacatgtcatactcacaatt

SEQ ID NO: 517874 - DNA, 609 bp, Homo sapiens
tgtggaagggacccagtgggagataattgaatcatgggggcggttccccacatactgttctcgcgccagtgaataagtctcacgagatcagatggttttataaggggaaaccccttttgcttggctcttactcttctcatctgctgctgtgtgagaygtgcctttcaccttctgccatgatggtgaggcctccccagccatgtggaactgtgagtccattaaacctctttcttttgtaaattgcccagtcttgcatatatctttatcagccacacgtaaaggactaaaacagccttgtcccttctaaaaaaaaatactagtactctactggcctaattgcaaagttgaggagagcagctctgttttttgttgccatccttatctgatgatgcaacctatctgatatcttgatcaaagtgcattaaggcacaaaaggaggcaaaccatttagtgagtggttctactgaggctgtctattcaggtggggcattctcccagcacaggcacccccagaattctctctcaacactcaatgacaccacaacagcgtttttcattcaaaggggcacacacattttgaggctcttaatgctcttactataaggtgca

SEQ ID NO: 517875 - DNA, 609 bp, Homo sapiens
tgtggaagggacccagtgggagataattgaatcatgggggcggttccccacatactgttctcgcgccagtgaataagtctcacgagatcagatggttttataaggggaaaccccttttgcttggctcttactcttctcatctgctgctgtgtgagatrtgcctttcaccttctgccatgatggtgaggcctccccagccatgtggaactgtgagtccattaaacctctttcttttgtaaattgcccagtcttgcatatatctttatcagccacacgtaaaggactaaaacagccttgtcccttctaaaaaaaaatactagtactctactggcctaattgcaaagttgaggagagcagctctgttttttgttgccatccttatctgatgatgcaacctatctgatatcttgatcaaagtgcattaaggcacaaaaggaggcaaaccatttagtgagtggttctactgaggctgtctattcaggtggggcattctcccagcacaggcacccccagaattctctctcaacactcaatgacaccacaacagcgtttttcattcaaaggggcacacacattttgaggctcttaatgctcttactataaggtgca

SEQ ID NO: 517876 - DNA, 609 bp, Homo sapiens
tgtggaagggacccagtgggagataattgaatcatgggggcggttccccacatactgttctcgcgccagtgaataagtctcacgagatcagatggttttataaggggaaaccccttttgcttggctcttactcttctcatctgctgctgtgtgagatgtgcctttcaccttctgccatgatggtgaggcctccccagccatgtggaactgtgagtccattaaacctctttcttttgtaaattgcccagtcttgcatatatctttatcagccacacgtaaaggactaaaacagccttgtcccttctaaaaaaaaatactagtactctactggcctaattgcaaagttgaggagagcagctctgttttttgttgmcatccttatctgatgatgcaacctatctgatatcttgatcaaagtgcattaaggcacaaaaggaggcaaaccatttagtgagtggttctactgaggctgtctattcaggtggggcattctcccagcacaggcacccccagaattctctctcaacactcaatgacaccacaacagcgtttttcattcaaaggggcacacacattttgaggctcttaatgctcttactataaggtgca

SEQ ID NO: 517877 - DNA, 615 bp, Homo sapiens
ctctctgtgtgcagcaaggtttgtgtgcttcttggagaaagtattgggaagaaagaaggcgagtacgtttatatttagagtgaggtagttaatcttgtcygtttcacacatattactcattgcttttgaattagtttgagataatgtttttatctcagtaaggataattttggtgatttactgttaacatataggacaatgaaaataaaaagataaaaggctagataatcccattactcttaaatagtcaattataaatgttaggttcttttaccatagagatattaagcaacttgtagagaagctctttgggaaataatttcatcttaaataagactactatcaaaatagctatcttttccatttgttaacatctaacctacttttatctttatatttaatgaggatttcttataggtaggtggcattatcttcttattaagttatttaactattaactattaacttttgtttttatttaagttcaggaactttgcagatctcttattaactcttcagttaataatgaggtaagtcttaagtaaatattcaaattttatctaagttttttttcacttaatagtgccatcgtgagttcagagaagacattgaata

SEQ ID NO: 517878 - DNA, 615 bp, Homo sapiens
ctctctgtgtgcagcaaggtttgtgtgcttcttggagaaagtattgggaagaaagaaggcgagtacgtttatatttagagtgaggtagttaatcttgtctgtttcacacatattactcattgcttttgaattagtttgagataawgtttttatctcagtaaggataattttggtgatttactgttaacatataggacaatgaaaataaaaagataaaaggctagataatcccattactcttaaatagtcaattataaatgttaggttcttttaccatagagatattaagcaacttgtagagaagctctttgggaaataatttcatcttaaataagactactatcaaaatagctatcttttccatttgttaacatctaacctacttttatctttatatttaatgaggatttcttataggtaggtggcattatcttcttattaagttatttaactattaactattaacttttgtttttatttaagttcaggaactttgcagatctcttattaactcttcagttaataatgaggtaagtcttaagtaaatattcaaattttatctaagttttttttcacttaatagtgccatcgtgagttcagagaagacattgaata

SEQ ID NO: 517879 - DNA, 615 bp, Homo sapiens
ctctctgtgtgcagcaaggtttgtgtgcttcttggagaaagtattgggaagaaagaaggcgagtacgtttatatttagagtgaggtagttaatcttgtctgtttcacacatattactcattgcttttgaattagtttgagataatgtttttatctcartaaggataattttggtgatttactgttaacatataggacaatgaaaataaaaagataaaaggctagataatcccattactcttaaatagtcaattataaatgttaggttcttttaccatagagatattaagcaacttgtagagaagctctttgggaaataatttcatcttaaataagactactatcaaaatagctatcttttccatttgttaacatctaacctacttttatctttatatttaatgaggatttcttataggtaggtggcattatcttcttattaagttatttaactattaactattaacttttgtttttatttaagttcaggaactttgcagatctcttattaactcttcagttaataatgaggtaagtcttaagtaaatattcaaattttatctaagttttttttcacttaatagtgccatcgtgagttcagagaagacattgaata

SEQ ID NO: 517880 - DNA, 615 bp, Homo sapiens
ctctctgtgtgcagcaaggtttgtgtgcttcttggagaaagtattgggaagaaagaaggcgagtacgtttatatttagagtgaggtagttaatcttgtctgtttcacacatattactcattgcttttgaattagtttgagataatgtttttatctcagtaaggataattttggtgatttactgttaacatataggacaatgaaaataaaaagataaaaggctagataatcccattactcttaaatagtcaattataaatgttaggttcttttaccatagagatattaagcaacttgtagagaagctctttgggaaataatttcatcttaaataagactactatcaaaatagctatcttttccatttgttaacatctaacctacttttatctttatatttaatgaggatttcttatwggtaggtggcattatcttcttattaagttatttaactattaactattaacttttgtttttatttaagttcaggaactttgcagatctcttattaactcttcagttaataatgaggtaagtcttaagtaaatattcaaattttatctaagttttttttcacttaatagtgccatcgtgagttcagagaagacattgaata

SEQ ID NO: 517881 - DNA, 501 bp, Homo sapiens
aaataattagggatcacctttcccataagccatcaaataaatctatcctgtctgggatttttttttttttaaatttctaggtaccatctgtgtcagtttgggttgctataacaaagtacaacagatkgggcagcttaaaacaatgcaaatttattttctcacagttctagagtctagatcaaggtgtaggcaaattttgttcctacagaggtctctctttcaggcttgcatatagccgccttcttgctgtgtcctcatatggcctttcttctgtgtgtacacttgtctgtgtcttattcccctcttcttatgagggcaacagtcaaattgcatcagggtccacacatacgacctcattttatcttaactaccaatttaaaggtcctatttccaaatatggtcacattttgaggtcctaggttgagaatgtcaacacatgaagttagggggaagaaataattcagtctataaagttgactaaaatatattaaagtctgacta

SEQ ID NO: 517882 - DNA, 600 bp, Homo sapiens
caagttatttctggttatgctccctccctaatataacactcaaaattggtcccaggcttcaatccttgctcatccctctggtcaccatctctgggcatacacagttagctacttcttcctcctcctgatccagggtcctgaactacttttgccagaccctctcctgtttctaaatcacaggctgtcaacagatttcttcagtctggatattctagctccctattcttcagactgagcctcagccctcagatggcctgttgcagggctttcatgctaaaacacttgaccacaagcatgcgtttaatcattctttcatttcatccatgtgttgaatggccacatcatttaaacttcyctcttcctgtgtgctgggattttgaccaaatatttctataccatttgcacactctgtttgattgaccttcctggggtatctgctgtcaaccccaacatataggcccatttctgattcccctgctcatcttagtgggtgggtccacatgatggccatgactcttttcaccttctctgtttcaaaagtgtgaaaacggttatttccaatcaaatagttctttcttctgtacttggcagacacacgtt

SEQ ID NO: 517883 - DNA, 600 bp, Homo sapiens
caagttatttctggttatgctccctccctaatataacactcaaaattggtcccaggcttcaatccttgctcatccctctggtcaccatctctgggcatacacagttagctacttcttcctcctcctgatccagggtcctgaactacttttgccagaccctctcctgtttctaaatcacaggctgtcaacagatttcttcagtctggatattctagctccctattcttcagactgagcctcagccctcagatggcctgttgcagggctttcatgctaaaacacttgaccacaagcatgcgtttaatcattctttcatttcatccatgtgttgaatggccacatcatttaaacttccctcttcctgtgtgctgggattttgaccaaatatttctataccatttgcayactctgtttgattgaccttcctggggtatctgctgtcaaccccaacatataggcccatttctgattcccctgctcatcttagtgggtgggtccacatgatggccatgactcttttcaccttctctgtttcaaaagtgtgaaaacggttatttccaatcaaatagttctttcttctgtacttggcagacacacgtt

SEQ ID NO: 517884 - DNA, 670 bp, Homo sapiens
ctgtggagttgagtatatctgagtcatcgtaagaggtgtcctcgggmgaagaaggcgagtcttcatcagcactcagcatactatgctcggtgtaagtagccacatggacctgctgcacttgctgggccactgcatgtgcttctatggtagccatatgttcggtttgggtcactccgtgttcctccatgaagttctactgtcagacaaaaaagaaaaagaacaggattcagtgtgtaatataacacaatgtttaaactaagagatattttattcaagagcagaggaaccttgacaaaattccaatttcactacttaccgtgccacaccaagtcacaggaaatgggaagcaccatgcaaatgtgacataaaaatgacagagtggtgttcttacgtgaaaccattttgatggaaattcgctgtactaattttatacctcagatcacaaaacaacagatacccttaataataaaaagacattcaaatataacaataaaaacatacttaagatagctcagtgactagcatttggccttgtgaacataagaacacttagtaaataagtgaaatacttaacattttctttgtatgtcaaagacgagtgagagtcaaataacttttttcccaaaaattcaaattggtctttctgcttataaaactgcttcttgagggc

SEQ ID NO: 517885 - DNA, 576 bp, Homo sapiens
ccccctgcgagccccatcaccagacctgctccatttcatacatttcatatataacgtgttttcttatactgacgttctggggaaaaaatcgtatttaaaaaatcctaggccgggcacagtggctcccgcctgtaatcccagcactttgggaggccaaggtgagtggatcacttgaggtcaggagttccagaccagcctggccaacatggtgaaaccttgtctctactaaaaatagaaaaattagctgggcatggtggcgggcgcctgtaatcccagctattcaggaggctgaggcaggagaatcgcttgaacccaggaggcggaagttgcagtgagctgagatcacaccactgcactccaacctgggcaacagagcgagactccatctcaaaaaaaaaataaaaataaaaaatgagggtgagtgatggtgcctctccatcttgggaattactattaaagtgaattgtctttctttctccaagcagaagcctcaagccatgacttgttcccctgcatcctcactccctggtttctcacacagcttactcycttaacatggcatatgccatcgctcca

SEQ ID NO: 517886 - DNA, 682 bp, Homo sapiens
gctgctgtatctggtgggaaagcgaatgctttagcgaaaataacaggcatcccataaatacatagactagaaataagttttggtttcattaagagcccagaagaatgcctttgttgtccaaccccagtttgatgctcttkgggaatctgacgaataccttgtccttaatctatgtgaatcatactgactacacatatagtttaccgcacttggttcttagacaaaggtgcatgccagaaaaatggcttgcaatccttttgcaaagcaccttcacaaaatatgggtttgcccagactttttgtagccttctagatctctctttgcaccccactctaggtgttagctgtgtctgtgcatactaggtgtggttcagcaagccttccaccaaaagccagcatcctttgatgttcttgaggttagaaagccttgatgggcttgatccagaactctcagaagaatttggaaagtaaggctgtccattcagaatcagtaagacaaatttcatcagtctttggaaagtgagactctatcaaagcagtaagttccagtacagtaacttatcaaaactctctagaggaagaaaagtgaacagacagaaaaccacagaagaaaaagttgactctaatattgtagcttccagtatttcaaattagaaggtacaaaatagtaaattgatcaccct

SEQ ID NO: 517887 - DNA, 682 bp, Homo sapiens
gctgctgtatctggtgggaaagcgaatgctttagcgaaaataacaggcatcccataaatacatagactagaaataagttttggtttcattaagagcccagaagaatgcctttgttgtccaaccccagtttgatgctcttggggaatctgacgaataccttgtccttaatctatgtgaatcatactgactacacatatagtttaccgcacttkgttcttagacaaaggtgcatgccagaaaaatggcttgcaatccttttgcaaagcaccttcacaaaatatgggtttgcccagactttttgtagccttctagatctctctttgcaccccactctaggtgttagctgtgtctgtgcatactaggtgtggttcagcaagccttccaccaaaagccagcatcctttgatgttcttgaggttagaaagccttgatgggcttgatccagaactctcagaagaatttggaaagtaaggctgtccattcagaatcagtaagacaaatttcatcagtctttggaaagtgagactctatcaaagcagtaagttccagtacagtaacttatcaaaactctctagaggaagaaaagtgaacagacagaaaaccacagaagaaaaagttgactctaatattgtagcttccagtatttcaaattagaaggtacaaaatagtaaattgatcaccct

SEQ ID NO: 517888 - DNA, 604 bp, Homo sapiens
ttcccacaggcattgctcacttcctccctgaaaagctgagattccctcttcatgccacacatccactgccagaacatggagaaggggtagtgtcagcaactcaagactgtctttcctaatgtcttcagtgcttctctcagtgatatgaagttaaaaccaggactgtgattgctcacttgattttttattcttatgaaattgcttttttgtctagatatcaactttgatgttcctgtttggggttgggggacaataagtaagggcttctattcagctgttacctttcccttaactagaaatttagttgagatcaaccacgtctatcttgataatttctgaaaatattttctagggctaaacatcttcctgtaatggtaaaagcaaattttcttattttttctttcaaaacatatactttattttgatatttttaaggaggcaatatctcagttcattttcatggtggagatgagttatagtcctgagttcaataaataattaagcatttactaaagaagcttcatytatttctccagctttttcatattgactcacccatctggcaactttttactaatatcaaaatcgctctgcacacaaaaat

SEQ ID NO: 517889 - DNA, 639 bp, Homo sapiens
tactgttgcgtttaagtgtaattgtttaacaaatttttttttgaaagaaaaacacttcagaaaacacagtaagaggtcttcaagaccatgctatggaaaaaaaaatcttgctaataatgtcccattttccttcctccaactgagtaagcctgtggtaattatgacatgataatctacggagacagagacacggtggttgcccgatcctttactagctttgtggcattaagagaatcacttaatcttcctgagacccagtttcctcctttcctaaatggattctttaaaggttaaaagagatgatatgtttataatgcctgacatgtagctggtcttcagaagtaattgatggtaagtagagtaagaattgcaatagtggcaggtgcacccagagacaactcgggattcaggccactgctctagtgctcttgcaagttttgttccctggttctccctcaggtttgggagatttcttattagctttcatttcttgggttcrtgttgtgagacatgatagtggtacctcatagttccctcttgcatttggaggttatagatggggactttcatggaatggtcacgtttaaaacctatttgctctccaaagcttgtccatgagatgttgtaggccttttctca

SEQ ID NO: 517890 - DNA, 624 bp, Homo sapiens
cgggtgctgagcactgatccagggagcggtactccaggtaatatttcttgatttataatacatagtgtgtagttattagatayattatgtaataacatgtattttcctctttgacaagggatggcaatgaacaagacatcatctgctctcttagaacttacctttagtgggagagacagataaaaagtaaacaaatatatacataactttaagtaatacatgctttttatatttttataatttcatcagaaaaatatgtagattaatgagagagagggtgacggggtgaggggcagaggtgtctattttagagatttcttactgagaaagtgtgattggaggggacactgaatggaaaggacctagctacgcaaaaacctgtaaggaaggtaagtaacattccaagtaaagggtggcagtgtcacagggcttcagatgggaacggactcagagtatacaaaagctgcacgaaggcaggtggggctgagaagagcaggtgaggagcagagcggagccagagaggcacagaggcagcctgcaactgagggaggctctgtgggccctggtgaggactagattttattccaaataccacggactctagcaggtttggagcaaggagtg

SEQ ID NO: 517891 - DNA, 473 bp, Homo sapiens
tgaaaatggaggtccttctgttgaagccaggataagggactcagaaccccatctgcttgttggggtccccttgctcttctcagggcccctaaggaacatctaaggaatcctgataatttattaaaacacatcaggacaaccactgatatcatctcggcaaacgttttccaaaggaactttctgtggtggtgaaaatgttttatatctacactgtctgctatggcagccactagccacatgtgtctatcaagcacttgaaatggcaccagtgtgactaaggaactgaatttttaattttaattaagtaccatattggacagtgcagcctagcccatttattttacaaataggaccttgaggyccaatatcattccacaggctagtgacagagttagcatgaagatgtagtttccatgttctctgttgctttcttcctcagctctcaggcccagctcactgttagcccagtgccc

SEQ ID NO: 517892 - DNA, 379 bp, Homo sapiens
gattcatttattcagtaactctcactcagattttactcattcgttgaataactaattctagggtttttcctgtgtcttaggaagcctgatttaaacactgggattacctcaggaaataaggcagtcttagtgagcttttattttcgtgggagagaagaaacaaagaaayaatttgcaaagcagtaataagtggtgtggagaaaggtaaagcaagataaacagaaaatgatgctggggtgggagagtaggatgattagatgtgaggttgtcaggggaaagggacagttgagtagacacccagatgagtgaggaagcaggccctgagacgttctggggagaatatttccatcacagtttctcctgaagcaggaggtcaatg

SEQ ID NO: 517893 - DNA, 423 bp, Homo sapiens
taggatattcttagctaagatttaaattagatttgggaaagttgtgcatgtgtcattttcaatggttcgtagagcataaaagcacaaatttactttgatttttgattctaatttgaatcctagaaggaactgttttattttctagaaaatctagtacatggatagtgtttatttaaatatgtacaaatataaatgtcctcatgagwtcaaagtataaaataagtataaaataagtatattttttaaaccaaaaggcagatgaacatacacactgtgatggttagtactcaatgtcaacttgattggattgaaggatacgaaatattgatcctggctttgtctctgagggtgttgccaaaggagattaacatttgagtcggtgggctgggaaaggcagacccatccttaatctgggtgagcaca

SEQ ID NO: 517894 - DNA, 423 bp, Homo sapiens
taggatattcttagctaagatttaaattagatttgggaaagttgtgcatgtgtcattttcaatggttcgtagagcataaaagcacaaatttactttgatttttgattctaatttgaatcctagaaggaactgttttattttctagaaaatctagtacatggatagtgtttatttaaatatgtacaaatataaatgtcctcatgagttcaaagtataaaataagtataaaataagtatattttttaaaccaaaaggcagatgaacatacacactgtgatggttagtactcartgtcaacttgattggattgaaggatacgaaatattgatcctggctttgtctctgagggtgttgccaaaggagattaacatttgagtcggtgggctgggaaaggcagacccatccttaatctgggtgagcaca

SEQ ID NO: 517895 - DNA, 636 bp, Homo sapiens
ctactccaaaaataaaataagaaaagaaaaatattacgtagtcatttctgtactgatactaatttaatctatttcagaaagaaggtcatattttctttcaatttaaataatgcaaatgcaaataaatataaattaaattgtgataacgattgttatcatggcaaaaaattaaaatgcctatctcgaggcatcttttgcctttaagtgctacttttctcttactcttggaggctcagtggtgattaatgatattcttcacactctcaaaggctttctttaggaaccctttcccagtgaccccacaagaagacaaggcttcaccagctacggaggacatatggtttaaagatcctcaattactctaaggtagtcacaggctgtgaacaaaatttctgtcatattcctgtaatgccttttatagggagaagcagggaaatccagattagaatatagttttcctggtgagatttgatgaggtttataattgtctgagagtttggttcctatagctcctagacccctaaggttttaattatcaaatatttrattcaaccttgaaaataagaacctttgaaagaaaagcaacacttccctcctttgaaaagcctatattgaccttgcacctctatctagcag

SEQ ID NO: 517896 - DNA, 626 bp, Homo sapiens
cacagcacatttgtcattctagggagttctagactttatgacattaaacactaagaaaaatctgggtgcagtggctcacgcctgtaatcccagcactttggaaggctgaggtggatgaatcacctgaggtaaggagtttgagaccagcctggccaacacagtgaaaccctgtctctactaaaaatacaaaaattaaccaggcgtggtcgtgggcacctgtaatcacagctactcgagaggctgaggcaggagaatctcttgaactcggaagrcggaggttgcagtgagccgagatcgtgccattgcactccagcctgggtgacaagagtgaaactccacttcaaaaaaaaaaaaaaaaaaaaaagagctggaaagaaaagaaaagaaaacactaaaaaaaaaaaaaaaaagaagaagaagaataagacaagtccacagagcttagacctagaaaatacactgatgttataaaatttctggactgttagaactgaccctacatgctttatacaaaacttatacagccttacttccaacaagatggttttgagttagaaggctcaagaatcatattttatgacacttcagttctcctggggcctgcagacaagttggggatacctaga

SEQ ID NO: 517897 - DNA, 534 bp, Homo sapiens
tttaggatgacagctgatgttgcctggatctgtatgccatccaaatttacattcttgacttagagatgtgatttgaaatatttaaaatatatgttaaggctgggcgcggtggctcatgcctgtaatcccagcactttgggaggccgaggcaggcaggtcacctgaggtcaggagtttgagaccatcctgaccaatatggagaaaccctgtctctactaaaaatacaaaattagctgggcgtggtggcacatgcctgtaatcccagctgctagggaggctgaggcaggagaattgcttgaaccygggaggcggagtttgccgtgagccgagagagcgccactgcactccagcctgggcaacaagagcgaaactctgtctcaaaacataaaaaaaaaataaataagtaagtaaataaaaaataataaaatatatgttaatcatgattataaaaaataaaaaggatgttaagaaatgttctatgatattttaagataaagcaaaagagagttgtatgctttcaatttcattgaaagc

SEQ ID NO: 517898 - DNA, 565 bp, Homo sapiens
tggaaatagaaacaatttttgtatcattggataccctgatatgtaaataaaatccaatcacatcctattgcatcacatatgttgcatgtttgatttgttccacagytcataggtgaaagagtcatcgcatgcttttatttttctaaattcatttcagtaagactctgtcccttccatcagggttggtgggaagtctaatctgtcattttctcagggagctcctcttacccatttggcattatacaagaactctaggacccagtggtcagagataatggggatgaagttcctggttatcagttagttgggtttatctctgagaacttggacttcctgaccatgtaatccatttgtcatgggtaactcctctggcagtgtttatattctccatggccaggttttagcagtgttatcttcactgagaatcccactcaggatgctgagttcctggcctgcctgggttcaggcagaaccatggctattggcgctcctaccagctcctgagctttaggtaagtgcatcaatcccatcctactgtcttctggaaaccaactctcctcctccc

SEQ ID NO: 517899 - DNA, 523 bp, Homo sapiens
ggagggagtagaagggcaggtggtggcttaaaggcccatcctcatatgatgsaagggatgcctttgactcagtggttcagagctgcagggccattagaattaccagatgcaaacgtaattcatcagttactatttcagaatattctacacatcagtctgttgtactgtcattctgacccagtttattagatacagaatgcaatcctagcattttaaaggcatgtttttatcaacaatattgcctctaaatgcaagtcaaccgtttaatctagtgcctaaccaaagctagaagaaatgatggctgagtttgatttacctagacatggtgtgtgttggtttccagcagggtacctgcataactgaatttcaaagctacttgtgcttattcatgattttcaccttatattctgattttataatctaggcctttcaaagaatgactccatataacttttctctgctcttttttttttcctgctctgtgctcaatgatgtgattgttcaaataaggtacagtgcctaa

SEQ ID NO: 517900 - DNA, 523 bp, Homo sapiens
ggagggagtagaagggcaggtggtggcttaaaggcccatcctcatatgatggaagggatgcctttgactcagtggttcagagctgcagggccattagaattaccagatgcaaacgtaattcatcagttactatttcagaatattctacacatcagtctgttgtactgtcattctgacccagtttattagatacagaatgcaatcctagcattttaaaggcatgtttttatcaacaatattgcctctaaatgcaagtcaaccgtttaatctagtgcctaaccaaagctagaagaaatgatggctgagtttgatttacctagacatggtgtgtgttggtttccagcagggtacctgcataactgaatttcaaagctacttgtgcttattcatgattttcaccttatattctgattttataatctaggcctttcaaagaatgactccatataacttttctctgctcttttttttttcctgctctgtgctcaatgatrtgattgttcaaataaggtacagtgcctaa

SEQ ID NO: 517901 - DNA, 486 bp, Homo sapiens
aagcaacttgcccaaggtcacacagtgagtaattggtagggcttgggttcataccctggccaactgctctagagcctgaactcttaatctctttgctctgctgctgccgtgttatgtggttaacacttccagtgacaragcctgtagtagctaggttggcatctgtttaatgtctaacccataatggtgattgtataatatgactaaaaattttttaaaaatcgagcctgtaattgagggcctctttagctacagtgtgcagaaaacacaggctgcagggctctacctgagtcccatgctctcatgatccaaatttccaaaacaaggctaggcctatcgatgtttgaaatctgcttctcagttctgcgtttgtgattttacaatgacttccgcattcattagcatcccattaatgggccagtgtatgggaacagttgtactatgaagggaggggatttttttttcttttcttttccgttaaaacca

SEQ ID NO: 517902 - DNA, 486 bp, Homo sapiens
aagcaacttgcccaaggtcacacagtgagtaattggtagggcttgggttcataccctggccaactgctctagagcctgaactcttaatctctttgctctgctgctgccgtgttatgtggttaacacttccagtgacaaagsctgtagtagctaggttggcatctgtttaatgtctaacccataatggtgattgtataatatgactaaaaattttttaaaaatcgagcctgtaattgagggcctctttagctacagtgtgcagaaaacacaggctgcagggctctacctgagtcccatgctctcatgatccaaatttccaaaacaaggctaggcctatcgatgtttgaaatctgcttctcagttctgcgtttgtgattttacaatgacttccgcattcattagcatcccattaatgggccagtgtatgggaacagttgtactatgaagggaggggatttttttttcttttcttttccgttaaaacca

SEQ ID NO: 517903 - DNA, 547 bp, Homo sapiens
ttctttatataaattattttgatttccatttgatttactaccaaggaatacattggaagtgaaagctcaaattgtttgtactctttttgtttttgcatcattcttgggacaggagcaaacaggggttatggaaagctgaaaaaaataattaagaaaatcaattaatttgtcccagatagggccaaacattcctccacatgattctagtgtgatactaagtttaagaaccactgacttgtacaatggaaggatgattactacaaaggctactaattaataaagatgtgctttgtggaaggtaaggcagtattacaactgggcctcagcaaagattgaaactaggatacaaaaaaagatttacagaatttatgaaatcttttctctgtcttctttgtttgtctctatttgctaccttcatyctctttccttaaggtttttctgcacttagttcacatgattgaaatagggctgccagtagctccgaggttgagtgtttagccaggactactccgaaatttctcagcctcaattacaaattgatgagagc

SEQ ID NO: 517904 - DNA, 599 bp, Homo sapiens
aaaaatattgattgtatgcatgcaatttggataaaacagatttttaggcttgctttatgatttatttaatctcttgcagagaagaaaaatggaattgtttcttaaagrttttaaagatagataatgcatctaattttcttttgggaagtattgtaattttatatttgcatgtcagctggaaagaacactataaaagggaattttcctcaattactaaacagtaacatgtttcagtcactattctcgggtgagaggcagctgatctctcatcctcaggaaggaacaactggacagtaaccagggatcaggcactaactaggttctaaaagtgtattaacaaatccagagtatcaatcatcaaaagtcagacaggccttttctgtgacttcgtatcatcgtgaaaattttaagagaataaatatttttagagtctttaagagacccatacaaacattatggtcagaataacaagacaagcctgtctcaaggtttaatctaaatgaagaatcatgagtactcacctcaaggcaatttaacagatctgaatttgccttctgaagtcttttgatctaaagctaaaagaaaaccagttattccag

SEQ ID NO: 517905 - DNA, 599 bp, Homo sapiens
aaaaatattgattgtatgcatgcaatttggataaaacagatttttaggcttgctttatgatttatttaatctcttgcagagaagaaaaatggaattgtttcttaaagattttaaagatagataatgcatctaattttcttttgggaagtattgtaattttatatttgcatgtcagctggaaagaacactataaaagggaattttcckcaattactaaacagtaacatgtttcagtcactattctcgggtgagaggcagctgatctctcatcctcaggaaggaacaactggacagtaaccagggatcaggcactaactaggttctaaaagtgtattaacaaatccagagtatcaatcatcaaaagtcagacaggccttttctgtgacttcgtatcatcgtgaaaattttaagagaataaatatttttagagtctttaagagacccatacaaacattatggtcagaataacaagacaagcctgtctcaaggtttaatctaaatgaagaatcatgagtactcacctcaaggcaatttaacagatctgaatttgccttctgaagtcttttgatctaaagctaaaagaaaaccagttattccag

SEQ ID NO: 517906 - DNA, 586 bp, Homo sapiens
gtcgaccctggatttgtgacatttgtgttttccacgtagaacgatcttggccactattgtgacagagacttttgcacttttttctattttactagaaatagtgcttttattcataaagattgctgaatttggtcagttttcttttcagtacctgtcggtgaggttctctgaattttctgtgctaattggctaatgaaatgacgtctctgatgactgcgctgccctcgtaagcctggccttcatctgcttggccataacacgatgctgccgacgctgtgttgggtcctatttgctgttctcttgtgtagaatccgccgacgctgcgttggttcctatttgctgttctcttgtgtagaatccgctgatgctgcgttgagtcctatttgctgttctcttacttagatttttttgcatctgcgaaaagtgatatttgtctatggttttctctttttgttccacatcaggtttttgaattagattatccyggtttcatgagatgaattacagagttttccatcctttcatgtcttgggaaggttaaagtaaccctgggatgactttccttccatggaaggtgaggtcatcg

SEQ ID NO: 517907 - DNA, 155 bp, Homo sapiens
atctgcgaaatgtgggaaggacgtgcgggtggcgtggaaaggacgtgggrgagctgtgggaataacacgggggtggcgtgggccctgctccctgtccctcttctttggacgaggctgccagtatgtggaaccagggggtgccctgtggcccagca

SEQ ID NO: 517908 - DNA, 504 bp, Homo sapiens
ctggagtgcaaggagctgcctggagatgaagtgattggcgggctcgcctagctcaggtgagcgatgcttcccagaatagatgccgtggcaccactgcagtatctgcccatctccctcctggctccgcgcggccgcygcgtccgagtggcgtgtgtgcggcaggtggggctggctgacaaacgtggacgttaattagagccattttaattagaaattatggacgaggtgctcctcgttaattttcaaataaaatttacagagggtttaaatcacttccctccgtgtctccccatttagcacggggattggcgtcgttaactccgtgtgtagaacagggcacgctaattcagtcatgcctgatttaaatatgtttagaacttccaactaacatgtaggagatgggaacatggaacgctgctagctgcaggcaggaggcaggagcctagccccggaaggcccagcccgtcctcgtgctgtctccggccggtgctcgtgctgaggctc

SEQ ID NO: 517909 - DNA, 504 bp, Homo sapiens
ctggagtgcaaggagctgcctggagatgaagtgattggcgggctcgcctagctcaggtgagcgatgcttcccagaatagatgccgtggcaccactgcagtatctgcccatctccctcctggctccgcgcggccgctgcgtccgagtggcgtgtgtgcggcaggtggggctggctgacaaacgtggacgttaattagagccattttaattagaaattatggacgaggtgctcctcgttaattttcaaataaaatttacagagggtttaaatcacttccctccgtgtctccccatttagcacggggattggcgtcgttaactccgtgtgtagaacagggcacgctaattcagtcatgcctgatttaaatatgtttagaacttccaactaacrtgtaggagatgggaacatggaacgctgctagctgcaggcaggaggcaggagcctagccccggaaggcccagcccgtcctcgtgctgtctccggccggtgctcgtgctgaggctc

SEQ ID NO: 517910 - DNA, 452 bp, Homo sapiens
ttcttctcagtgaggaccttctggactgtgggcttcctcccttgtagactttgatttttagacaaaaatgagatttaaaacagcctttaaaaatgttggagttaagtgtggtgtttaccctaaactgagactgagaagcttacagagactgatgggtgacgtcccctgatgaccacctcccctccctccaggtgtggccgtctccccccaagctagagactgagcggcctttctgggttgaygtgaaggtttttctctcctgtgctcacacacgctctctctcttaagtctaaacctgaggttatttagggacagacattcatcaggtttaattttctgttctgtgatgctttaacctaacatggaccggttgttttccatttcatacatgatttctctgaagtaagagtttttacacctaatgctctgaggtgcactctgcactgagctgt

SEQ ID NO: 517911 - DNA, 564 bp, Homo sapiens
  misc_feature (1)...(564): n = A,T,C or G
ccaccatcgccatcttgcagcgccggtcctgggccggcccgagccatgcggagcctctctttccctcgacccggctgcaaaggcagagtccgtgcgcctgagcccgggccgagactggagcgttctctggcggcctccaagcgcgctngnctcctggaagcccggcctggsgcagatcccttttgctgtcgtctccgtgattgccgggacagaattcccttccagtggggaaaagggaaggcggtcgcgccttcccgctgccctgagtggggaggtgaaacctgagagttggggcaagagggcctggagctagggccgaggcggcgggtgcgcagggtgttccgttgagcccgagcccccccccccctccccggcctctccaccgtttctgtaggagcgcggcagggagcacacgtccctcgggaagaaaacggcgctggcggctgggcccgaccggcgcgtcctcgctgagctcctagcgcgtggcctttgcgcgtctgtgtacccgtctgcagcttggggcagggttgggggagaaccgtggggtaactatttgccgttgca

SEQ ID NO: 517912 - DNA, 564 bp, Homo sapiens
  misc_feature (1)...(564): n = A,T,C or G
ccaccatcgccatcttgcagcgccggtcctgggccggcccgagccatgcggagcctctctttccctcgacccggctgcaaaggcagagtccgtgcgcctgagcccgggccgagactggagcgttctctggcggcctccaagcgcgctngnctcctggaagcccggcctggcscagatcccttttgctgtcgtctccgtgattgccgggacagaattcccttccagtggggaaaagggaaggcggtcgcgccttcccgctgccctgagtggggaggtgaaacctgagagttggggcaagagggcctggagctagggccgaggcggcgggtgcgcagggtgttccgttgagcccgagcccccccccccctccccggcctctccaccgtttctgtaggagcgcggcagggagcacacgtccctcgggaagaaaacggcgctggcggctgggcccgaccggcgcgtcctcgctgagctcctagcgcgtggcctttgcgcgtctgtgtacccgtctgcagcttggggcagggttgggggagaaccgtggggtaactatttgccgttgca

SEQ ID NO: 517913 - DNA, 381 bp, Homo sapiens
ctgttagttctgagaggtgggcgtgtggttggggatgtcagcgagtaggatcttcccttttaytcgcttgtcattaacctgagaacgtggcagtgggggaggagaggcttggcccggggtgcacaggactgtgggctggtcctgtccctctgatgagtgggacgagccttggtccagtcctgtgggcttggcgcagagccggccccctgccatgtcctggtgggattggaagtgctggctcgtcctgtctgcctcccccaagggctgggagccccccactctttggacatttgtagtgtaagcagacagcaactgttaaccatcattctgttaaattttttctggaggaaccctggacagaagtagtcatgctctccagga

SEQ ID NO: 517914 - DNA, 369 bp, Homo sapiens
tcagctgcacgttggggtcagcctyggtgctgtgtcttcatgccagagcaggggccaggtgtgggcagctcagtgacaccctcccgagggctgggcgatcgtgtgcactctcaagcctctactggaaggcttggcctctcagggcgccctgccctgtgcattcagccactggggttcgtgccctcagcttcccgccagccctggcgtcagcggtcaggaagagctgagcagtttttttgggagaattgagggagcgtcgccaggatgcactgagggtcggaggtggagccggcgcgctagatgcaggcagtgcaggctggatgctggaaagcagcagcacctctcccgggtggctcctgggaagttcca

SEQ ID NO: 517915 - DNA, 547 bp, Homo sapiens
ttccgcatagggtctgttgacctgttacccccactccgcatagggtctatttgcctgtgttaccctggctccgtgtagggtctgtttacctgtgttccccccgctccgcgtagggtctctttgcctgtgttccccccgctccgtgtagggtctctttgccttgttccccctgctctgggtagaatctgccctagagactcgcggggcctccacctcataatgtctgagccgagctcagagctgtgccctctgcggcctcgtctgttgcaggggagcaggcaggtcccaggaagtgcgtgtccttcctcccgcaagcagacacgtgctgcctcgaagcctcagcagccagccgggcagsgatggcaaacaacaccccagtgtctcgggggcaggcgcagtgtgagctacatcctctgctggggccgtcttgggagtggttctccaggtgccagggcctggtcagggaagtccggcctcagctcagcgtggccctggagccacccacaaggcacacgggagctgggctggggtggcaggtggggcatcg

SEQ ID NO: 517916 - DNA, 547 bp, Homo sapiens
ttccgcatagggtctgttgacctgttacccccactccgcatagggtctatttgcctgtgttaccctggctccgtgtagggtctgtttacctgtgttccccccgctccgcgtagggtctctttgcctgtgttccccccgctccgtgtagggtctctttgccttgttccccctgctctgggtagaatctgccctagagactcgcggggcctccacctcataatgtctgagccgagctcagagctgtgccctctgcggcctcgtctgttgcaggggagcaggcaggtcccaggaagtgcgtgtccttcctcccgcaagcagacacgtgctgcctcgaagcctcagcagccagccgggcagcsatggcaaacaacaccccagtgtctcgggggcaggcgcagtgtgagctacatcctctgctggggccgtcttgggagtggttctccaggtgccagggcctggtcagggaagtccggcctcagctcagcgtggccctggagccacccacaaggcacacgggagctgggctggggtggcaggtggggcatcg

SEQ ID NO: 517917 - DNA, 500 bp, Homo sapiens
gaaggaaggtttgcatgttggaagggaagagataagtctctggtatttgctgacaagcatctgtgtacaagacccaagaaaatcagccaaagcctgcagctaatcctgrgactggccaggtgacctcacaggagcgcctctggtgcctgccaactgtctcccccaagctgaggcggaaacaaacggaaacaaagtcgcagacagcgggtgccctgtgacaggacgtgtcctgctctgtccttacgacgcagggtctggccctgcacgcgattccacagtgagtgggcacagtggtcagaacctggtcccagccactggcacccggctggtaaagaccgtgggagtgaccagggccgccaaccgtggtgaacggtgaggccgccggatgaccagacgggctgtgctcgcgggcggcgggctgttagtgttgtaaactacatgcgctttaaataccttttaccgagtgctagagccgttcatcaccaccccacgcagaattt

SEQ ID NO: 517918 - DNA, 161 bp, Homo sapiens
ccaagcagggcacagggcagggagccaggctcttcgggccccaccccaggctggccctgcaccccatcctgccttctctccccactgtgggcccagaacttgccccgtgggggycgggaagcacccaccatccccacccctagctgctctcagccagagcc

SEQ ID NO: 517919 - DNA, 545 bp, Homo sapiens
ccgtggtccagcagttcatcctcctggtcccagggccccagccgcaaggaacccaggttttgagacaggctaggtggagaggattcaggtcgggccggaaggcgttcttagccgtaggcctcccaggctgtccatgcctctcccgcgccctctggtggtcacattcatccacgcccgttcgctgcgcggacctctgggcagagatgccaggcacaggtgtctgtgggcagtggtctgagccccagcctggctgaaggccctgccacctgtttattttgtggctgycttgcccttgccagccccttccccaaaacttcactgtttgcttctcggcagtcagcctttcttgtgaggggcaccacgagagtgtgaggagggggtgccacggccctcctgagacacctcctgatgtgggcggagcacggccctgtgtcttcagactacatgtaccccagatccttctcctgacagactgtggtcccaggtgtgggacctgccacaggccactggaaacgcaggcctcagggcagctcacaaggcaggca

SEQ ID NO: 517920 - DNA, 365 bp, Homo sapiens
ctgctcttcaagtttgttgtttggcctcttktcaataggcgcttgtgctcattttgtgcaggaggatttgtgcaggagaaaatgttggcgttcataactgccattcagttggggagtaccacggtttctctgtttagtttttgattttacaaagaacctaagtttaacacatggacttttcctttctacccgcagccatttctatagcttcattgtaagctatgcatgtattaaaagcatttgaaattgtatttgggctgtgaaaatatctgatgtactgggccactaccctgttgtcttatgttgtaatttataagaatgcacagacataaatgacagtaaagaaccgtttcaggctacagagc

SEQ ID NO: 517921 - DNA, 527 bp, Homo sapiens
tgtctagttactatagaatgaattggtagcccagcatttacaataagcagaagtctgcagacctaggaagaagagggaaagataaaattgatttagaggtaacttgtatttgagaaaaaataatttgccccacatcctaatactaagcttatttatgcttatgtcactatataatattgagaaacgtggaaacgttttgtaaaactgggacaaaaaagttgtggaccaaaatgttgcttaaaaacttgaaatgttctctccttaggttgtagttattctatagcgttaacactattttggtaacttggatgtcatttaagyggtgggaaatttcaaattttcccttccaaaaatagagacaaaaatgtttctaactatcttataataacaatgagaactggagtgctttgataaatcttttcctacctgaatggaattttctcatgttgaaactgacactaattgctgtgggaagcagatggcattgtgctacttcaaattactgtctgcccgcagttccagcagtc

SEQ ID NO: 517922 - DNA, 527 bp, Homo sapiens
tgtctagttactatagaatgaattggtagcccagcatttacaataagcagaagtctgcagacctaggaagaagagggaaagataaaattgatttagaggtaacttgtatttgagaaaaaataatttgccccacatcctaatactaagcttatttatgcttatgtcactatataatattgagaaacgtggaaacgttttgtaaaactgggacaaaaaagttgtggaccaaaatgttgcttaaaaacttgaaatgttctctccttaggttgtagttattctatagcgttaacactattttggtaacttggatgtcatttaagtggtgggaaatttcaaattttcccttccaaaaatagagacaaaaatgtttctaactatcttataataacaatgagaactggagtgctttgataaatcttttcctacctgaatggaattttctcatgttgaaactgacaytaattgctgtgggaagcagatggcattgtgctacttcaaattactgtctgcccgcagttccagcagtc

SEQ ID NO: 517923 - DNA, 540 bp, Homo sapiens
gaaatactgcaacttataatcaaaattgtaaagttaaccaccaacaaataccaaatatagactrctgagggaggaaagggagataaaaatgaaatatattttataattaaaaatataaatacacacaaaacatagcatattgagaaacacagattgaggatgtagactttgtctttgtaaccactcaggaggctttcactgggatttaagatctgctttctctactgctccttccatggtccctctggtcctagtcacatccatctgttgccactgtgaaccagcagctctatttatctttgtcaggatcaattacaccagccaaaattatacaccccccttttttgcctgtttatcctttacagcttgaaatagctgggtattggtacatattctaattcagtggaacaaccattatattatcgagtaaaaacacacttccttagagattagggcccaaagtcacaggtacaaaaaggaaccttttgcttgtgagtcattcggatataattgtgatcagtatcatgcatttccactttt

SEQ ID NO: 517924 - DNA, 402 bp, Homo sapiens
gtactgtattaatattcttatcttgctctaacagaccatctgctgaaaggacatcaggaaaatgtttgcctagggatctatagcattcaaatgaaattaccttctgatagttcagtgcccaagttgagggctgagctctctttggagattccccrggaagctgagtgactcggtgacagggttcagggttgttttcttcctgttttcttagactcaaaatgcctttccagtggcctgatacctttttataccaatgcataccaataaatgtgaaatactcattatatgccaatattttaacaggtggttggaatattggtatagtttttcccttatttatctatgtttggtattttctaagtttactacactaagcagtactttgaaatcaaaattattttt

SEQ ID NO: 517925 - DNA, 406 bp, Homo sapiens
aagtactgtattaatattcttatcttgctctaacagaccatctgctgaaaggacatcaggaaaatgtttgcctagggatctatagcattcaaatgaaattaccttctgatagttcagtgcccaagttgagggctgagctctctttggagattccccaggaagctgagtgactcggtgacagggttcagggttgttttcttcctgttttcttagactcaaaatgcctttccagtggcctgatacctttttataccaatgcataccaataaatgtgmaatactcattatatgccaatattttaacaggtggttggaatattggtatagtttttcccttatttatctatgtttggtattttctaagtttactacactaagcagtactttgaaatcaaaattatttttta

SEQ ID NO: 517926 - DNA, 406 bp, Homo sapiens
aagtactgtattaatattcttatcttgctctaacagaccatctgctgaaaggacatcaggaaaatgtttgcctagggatctatagcattcaaatgaaattaccttctgatagttcagtgcccaagttgagggctgagctctctttggagattccccaggaagctgagtgactcggtgacagggttcagggttgttttcttcctgttttcttagactcaaaatgcctttccagtggcctgatacctttttataccaatgcataccaataaatgtgaaatactcattatatgccaataytttaacaggtggttggaatattggtatagtttttcccttatttatctatgtttggtattttctaagtttactacactaagcagtactttgaaatcaaaattatttttta

SEQ ID NO: 517927 - DNA, 538 bp, Homo sapiens
cgttcggctgatggcctgttaggggccaggtgtggctgagatgctggcactctctctacgtggtctrttatcccgggctgctttacagcttggttgtttcagggcaccacaagagtgagaagagaggatgaaaggttcttgaggtcttgcaacatcagttcttccgcttttctattagtcaaaacaacttataaagccagcccagattcgggggcgtgggggtaggaacagggtaagtagattctacttcttgatcggaagaactacaaagaatgcacaagaatgaagggaacccactgaggctgtggaggtacttggtgactagcagcagtgagaaggcattagcctctctacacctgaaggggccagggaagcaggaacgttaccagagccctgtgaacaccagagtgttaggaaagaggccaccccacaggagcctgagggatggaagaactgcatacacctccgtgctgaactgagatggagactgctcatcctcctatcctctgaccacttatcagcactgtccattggccat

SEQ ID NO: 517928 - DNA, 622 bp, Homo sapiens
cgttcggctgatggcctgttaggggccaggtgtggctgagatgctggcactctctctacgtggtctattatccygggctgctttacagcttggttgtttcagggcaccacaagagtgagaagagaggatgaaaggttcttgaggtcttgcaacatcagttcttccgcttttctattagtcaaaacaacttataaagccagcccagattcgggggcgtgggggtaggaacagggtaagtagattctacttcttgatcggaagaactacaaagaatgcacaagaatgaagggaacccactgaggctgtggaggtacttggtgactagcagcagtgagaaggcattagcctctctacacctgaaggggccagggaagcaggaacgttaccagagccctgtgaacaccagagtgttaggaaagaggccaccccacaggagcctgagggatggaagaactgcatacacctccgtgctgaactgagatggagactgctcatcctcctatcctctgaccacttatcagcactgtccattggccatgtgtgaatgaaagccagaggtcaaggaagccaagtgctgttatccaggaagtgtagctttccagaacacagacgaggatggcga

SEQ ID NO: 517929 - DNA, 640 bp, Homo sapiens
gctgcgttcggctgatggcctgttaggggccaggtgtggctgagatgctggcactctctctacgtggtctattatcccgggctgctttacagcttggttgtttcagggcaccacaagagtgagaagagaggatgaaaggttcttgaggtcttgcaacatcagttcttccgcttttctattagtcaaaacaacttataaagccagyccagattcgggggcgtgggggtaggaacagggtaagtagattctacttcttgatcggaagaactacaaagaatgcacaagaatgaagggaacccactgaggctgtggaggtacttggtgactagcagcagtgagaaggcattagcctctctacacctgaaggggccagggaagcaggaacgttaccagagccctgtgaacaccagagtgttaggaaagaggccaccccacaggagcctgagggatggaagaactgcatacacctccgtgctgaactgagatggagactgctcatcctcctatcctctgaccacttatcagcactgtccattggccatgtgtgaatgaaagccagaggtcaaggaagccaagtgctgttatccaggaagtgtagctttccagaacacagacgaggatggcgaatgggtctggtgta

SEQ ID NO: 517930 - DNA, 538 bp, Homo sapiens
cgttcggctgatggcctgttaggggccaggtgtggctgagatgctggcactctctctacgtggtctattatcccgggctgctttacagcttggttgtttcagggcaccacaagagtgagaagagaggatgaaaggttcttgaggtcttgcaacatcagttcttccgcttttctattagtcaaaacaacttataaagccagcccagattcgggggcgtgggggtaggaacagggtaagtagattctacttcttgatsggaagaactacaaagaatgcacaagaatgaagggaacccactgaggctgtggaggtacttggtgactagcagcagtgagaaggcattagcctctctacacctgaaggggccagggaagcaggaacgttaccagagccctgtgaacaccagagtgttaggaaagaggccaccccacaggagcctgagggatggaagaactgcatacacctccgtgctgaactgagatggagactgctcatcctcctatcctctgaccacttatcagcactgtccattggccat

SEQ ID NO: 517931 - DNA, 552 bp, Homo sapiens
ttaatttcttcctcttgcttttccaaagcacattgcrtgcaaccctactatggtgtttgacatagcatattgcaaattattgacacccatatctgcacctcattggactgtgtataacatatacaacatatagtccactggctgatactaaggaggtagtcatacctttattgaatgattaaatgaacgaatgaaggaacgagcactcaaacttgccactcatattacagtggacatggtgactaaatatacgaaagtgtgtttgctatttaggcctgtttataatcagcttctaaagagaaacagtttacttatccagtagggtggggaaaagtatacattttagaggttagacactttccttgcaagaagagtctctgtggaacagcttgaattatttgaaatccagccacagtctgaaatacaaaccatatgcagttcaagtttgtggcatgcagttgagtgacatttttacctgagattaaaaaaagtagagactaccaataaaaaacatcaaatgagatttttgctcctgcatttagacattccgtc

SEQ ID NO: 517932 - DNA, 552 bp, Homo sapiens
ttaatttcttcctcttgcttttccaaagcacattgcgtgcaaccctactatggtgtttgacatagcatattgcaaattattgacacccatatctgcacctcattggactgtgtataacatatacaacatatagtccactggctgatactaaggaggtagtcatacctttattgaatgattaaatgaacgaatgaaggaacgagcactcaaacttgccactcatattacagtggacatggtgactaaatatacgaaagtgtgtttgctatttaggcctgtttataatcagcttctaaagagaaacagtttacttatccagtagggtggggaaaagtatacattttagaggttagacaytttccttgcaagaagagtctctgtggaacagcttgaattatttgaaatccagccacagtctgaaatacaaaccatatgcagttcaagtttgtggcatgcagttgagtgacatttttacctgagattaaaaaaagtagagactaccaataaaaaacatcaaatgagatttttgctcctgcatttagacattccgtc

SEQ ID NO: 517933 - DNA, 476 bp, Homo sapiens
aacagcacactcttggattagctctccctccttcctgttttactcttctcaagggcccctcccctgttccctggattcacttcccaaaataaaatacttgcttttctcttgcaaatttaagttccttatagatggtggatattagacctttgtcagattcatagtttgcaaatattttctcctattctgcaggttgtttactctgttgatagtctcttttgctgtacagaagctcttaagtttaattagatcctgcttgtcaatttttgcttttgttgcaattgtttttggtgtctttgtcatgaaaccttgcccattcctatggcaggatggcattgcctaggttgtcttccaaggtttttatagttttgggttttacatttaagtctttaatccatcttgagctgatttttgtatataatgtaaggaagggatccattttcaarcttctgcatatggctagccagttatcctag

SEQ ID NO: 517934 - DNA, 607 bp, Homo sapiens
ggtatgtggtgggatgtatttgacacaaggtctctaatgacaaagccataatctttctactacaaagtgaacattaccatacttctcccataccacagtacttggctaatatagcagcccctaacagaattatttatgtaataactatacaaattagacaaataattatacaaaaaaactccattccccagctcttcagtgaaattcttttatagaattaaacttaattttgaggtaattttagattcacatgcagttgtaagaacaatacaaagagatcagatataccctttacccrgcataccccaatggtaacatcttgcaaaactattgtagtacaatattgtcactacattattgacattgatacagtcaaaatacaaacatttccatcaccacaaggatcccccatgctgaccttttgtagccacatccaccttccttcctataccacttaacctctggcaactactaagctgttctctatttgtataatctatcattttaaaaatgttaagtgaatagactcatacaacaggcaaactttggggactggctttttaaacttaacctaattctctggtgattcatctaggttcctgtagat

SEQ ID NO: 517935 - DNA, 544 bp, Homo sapiens
aagtaaagtcacaagaatggtgaggggaatccaaaatgtatcctgatagaaaaattcaaagaaactgaataatgcatttaacatagaaaagagaaaaaaatttaacacataatgttaatacttaaaagtttaaaaggctttacatagaagactatgccttctcttataaaaaagtggagtatgatttccctcacattaaattcagtgcaaatttagtgacttgcttcttatgagttgatggagcaggaagtgacacggaatgacttccacagtgaggttattcaaggtgatagagatttcctgattgtmtgtttggacaattaatcttggaacccagccaccatttcatgaaaaaaacaagcttagttcaacaaggagagtccacctgtaaatgtctggcctccagccccagctaaggtccagtcaacaaccagcaacaaccaccagatgttgtaactgcccaatgggctctcctggcccactgcccagaaaataccaatttatcaagacaagggaattgcaatagagaaagagttttatttca

SEQ ID NO: 517936 - DNA, 611 bp, Homo sapiens
tctcaatactaccttaatctagattttttgctctaaaaacagtaaaaaaaagaataatattattttaaaacacattaccagtaaaaaaaaaatagaccaatattattttaaaacacaacattacaaaatgagttggtaatattgctagatggatcattaaacataaagacatactgttttgggccctccttgtttttactgataaactaaggcttagagatgctcatttaacgggaaagaacagttaacaaaccaaggaactgagaatggagccaaggtaatttgcttctaaaaccagtacattttttcactattccacactgatagcttctatttagatcataaaccagtgttttcaaaatataaacccagatccaccagtattccctggatgcttttcacaacttacctacaggcccacctcttgacattctgattctgtagttatgagaagagacactagcatctgtgttttaacaacaaaacacccaaaggatctgatgcacatggaactttgagaacactgctgratacacagcccattcccacgctgctataaggacatactcgaggctgggtaatttataaaggagagaggtttaatggactca

SEQ ID NO: 517937 - DNA, 591 bp, Homo sapiens
tgtcttgactagcagccagatgaaatgtctaaaggaaccaaacctctgtctctctggcgtctttgaggagtgcaagactccaataaggaatatattttaaagtcaaatcacattaaaagttgcttggtgagctcagagatcaccactgctgtgaatactgtagcaaggagatgatctacagccaatgtaatgtgagcaataacttcttcagttttatttttcttcatagaaaacgaagaccctttttctatcaggggcactattagtcttccaggtatcaccagggtttaaaatctaggggtcatttttgaatcttccattgccttccagccaatcattcactaagttctttccatttatcttcatctccgagactttccatttccactgtctagttaattctcttatctcttcacacctgcattactgcaacagcctctgagctggtccttttgcctttgatctcttatctcttcaattaatcctgtaggctgctgccagattaatctccctgaagttacrccttaaataatttccctgttagaaatctacagttcttccacattatcattccttttaaaccctaacttt

SEQ ID NO: 517938 - DNA, 626 bp, Homo sapiens
tatagaactgacttggggcagccagacatcaaaccgggtgaataagacaggtaagtcttattcacttacctgaataaggkttagggttaggaaaatagtaacccttagtaaaaggaaaataaaagtattttccttttacactttttttttttaagtaaaagcactccacaagtagatttcaaccaaaagtgagagaagggcaacacaacgaaattcagaacaagatgttattctggtaaacttttgggaggaaattattaaggttattaaggtaaacttttgggagaaagtgactcttaaaagtaaatttaaagtcttttgaggaatagtattattttaccaaaggtatagtctcttaagtacaaaaaaaatactttagatgtcagcaaaagagaaaggtttttaacaaacgtactatagtttaaacattacctatcatcaccgttcatcaaaatcatattgaaatccagtttcagtatagaaaagttttaactgttatttcataaaacaatctgctagtaagttttttaaaaaaatttaatatataacatttcaatcataaaatggaattaaatacaagtatttacaaatcttagttgcctgagcaacagaagtgattctagaac

SEQ ID NO: 517939 - DNA, 626 bp, Homo sapiens
tatagaactgacttggggcagccagacatcaaaccgggtgaataagacaggtaagtcttattcacttacctgaataagggttagggttaggaaaatagtaacccttagtaaaaggaaaataaaagtattttccttttacactttttttttttaagtaaaagcactccacaagtagatttcaaccaaaagtgagagaagggcaacacaacgaaattcagaacaagatgttattctggtaaacttttgggaggaaattattaaggttattaaggtaaacttttgggagaaagtgactcttaaaagtaaatttaaagtcttttgaggaatagtattattttaccaaaggtatagtctcttaagtacaaaaaaaatactttagawgtcagcaaaagagaaaggtttttaacaaacgtactatagtttaaacattacctatcatcaccgttcatcaaaatcatattgaaatccagtttcagtatagaaaagttttaactgttatttcataaaacaatctgctagtaagttttttaaaaaaatttaatatataacatttcaatcataaaatggaattaaatacaagtatttacaaatcttagttgcctgagcaacagaagtgattctagaac

SEQ ID NO: 517940 - DNA, 626 bp, Homo sapiens
tatagaactgacttggggcagccagacatcaaaccgggtgaataagacaggtaagtcttattcacttacctgaataagggttagggttaggaaaatagtaacccttagtaaaaggaaaataaaagtattttccttttacactttttttttttaagtaaaagcactccacaagtagatttcaaccaaaagtgagagaagggcaacacaacgaaattcagaacaagatgttattctggtaaacttttgggaggaaattattaaggttattaaggtaaacttttgggagaaagtgactcttaaaagtaaatttaaagtcttttgaggaatagtattattttaccaaaggtatagtctcttaagtacaaaaaaaatactttagatgtcagcaaaagagaaaggtttttaacaaacgtactatagtttaaacattacctatcatcaccgttcatcaaaatcatattgaaatccagtttcagtatagaaaagttttaactgttatttcataaaacaatctgctagtaagttttttwaaaaaatttaatatataacatttcaatcataaaatggaattaaatacaagtatttacaaatcttagttgcctgagcaacagaagtgattctagaac

SEQ ID NO: 517941 - DNA, 520 bp, Homo sapiens
gctgcagatgaacatcatgatgtggtcagggtagatgggtcccaaagaaactaacacttctcagtgctgagctcggatggcctccactgaccaaacacggagcttgagaggaagtcaagaggtatcttggaattccatcatgctgaccctgtcattcttgaaggaaaatgatgcataatttctgaataattcagaaagaacttagcaatctttccaggtagttcttaaataacaatcactgtgtatcaaatttctgaattaacttttctgaattcacgggtttctaaaactggccttaagcaaaagtctgaaacctaggctgggaaccatgtaacccaggccaagaaggtactttaaagtgtyttagagttgtttttcaacttagggggaaacaacagattccattaaatcccataaaggatttttttgtgtgtgaaaaagggcctgatgtaatctaggttagactcaggaggctttaacatgttttgtcttacgggtaaatggtggctattttcacaga

SEQ ID NO: 517942 - DNA, 504 bp, Homo sapiens
ttacaaacctaggtgcacctgctttatatattcaattaatgaggctttgttattattccaaaaggatggaagcttctcctcacgaggatatttacagcatgacagctccaacgtaatttcaaaacactgggcccagatgtagttgtaatcttgcattccacctaaacacaagcatatttaatttttgttagggtctaaaattggagtggagccaagtatcacgtgcctcggggacaaatgaatcagacagctacatgtaaacaggaaaaaatgaatttgacatattagcttgtaaaatcagggcttgacattctattacccaggcgtgactagacaatcctaaatattcccatatgggtaactggatcagagctgaytgaagttcaactgtgcatcaaaattaagtgacgggtgaaggaagggtccttttttgtttttattttttgaaatcctacattacaaaaatgattctttgaatttcatttctttcttaaattacatttt

SEQ ID NO: 517943 - DNA, 605 bp, Homo sapiens
ttgagttacagagaagcacaggaatcacgtatttccatgagaatgcatggtgcatatgaagcttatcatgtatgtattggtggataacagacttaaaatcatcacattgtagatttttttttttttaagacagggtcttgctatgttgctaaggctggcttccaactcctgagaaacttcatatcattatcacttttctagatatatatttctaatatatattaagtaaaagcatgactattaaaatgttaaaagctgtcatatccacctaaattagcttgcagtatcaataaggcttgggaaactgaaggcctgtgagagaacttgctttataatccctccccaggagagagagtcattatttttcttatttaaaaaaagtaatttaaatgtcagccttatcataggaagatctgcttagactacatcaaattctccctatcattttaggttcaaggaatctgcttcagaagaacagaygttgttgaggggttagtaaatgagaactcaggggcagcaggtgagaaaatcaggagagtgctgcaggcacattcatgtagacactgtgcaagaaaagatttcatggagcctcagaagaatttcca

SEQ ID NO: 517944 - DNA, 471 bp, Homo sapiens
agtcaggacttaactccttttactgcagtttcggaacgtgtctgaacttgaccagctcaagaggaaaagctgagtcaacctgcccactgaaccggcccaatcccgcccagactacgcgcagcgttcacactagtgacccgwcaggcacctgcgatcatccggacctcccgcgccgaagcggccccgcagcccccggcccccgtgacctttaccctgaactcccgcggagacctccgaaccacccccacccccaccgccgcgagagccgtccgaaatcccgccctcctccctggcggcgactgcctagccccagtccaacaaaacctccgcaaagccacgtgccccatgccccgcgccccgcgccccgagcccccagccacgaaccgcacaaaggctgcgaacgggcagaggctgggaaccagcgatagaggggacaccgtcagagcccagacccaaaagtgaccgctcgct

SEQ ID NO: 517945 - DNA, 642 bp, Homo sapiens
taatggtgtaaaacaacaattattttattaagctcgcagattccatgggtcaggaagtcagacaaggcgtggtgggtaatgaattgtctctagtccacagtatctggaacttcagcttggaagacacatggctagcagtgacttgaacagtgggagctgggagcatctggaagcttctttttttttttttttttttttttcggagtcttgctctgtcacccaggctggagtgcaatggcacgatctaggctcactgcaacctctgcctcctgggttcaagcaattctcctgcctcagcctcccaagtagctgggattacaggcacccaccaccatgcccagctaatttttgtattttcagtaaagacagggtttcaccatgttggtcaagccggtcttgaactactgacctcaggtaatccacccacctcttaaccatctctttggtgcctgggctggcatacctggaatgctaggctcaactgaaacctacatgttgrtcaagctggtcttgaactactgacctcaggtaatccacccacctcttaaccatctctttggtgcctgggctgggatacctggaatgctaggctcaactgaaacctacatgtgggctcttcttgtagcttgggcttctcacaac

SEQ ID NO: 517946 - DNA, 558 bp, Homo sapiens
ccggggcttcaggtattgcaagcttgaccctggaaagatgtatccaactgtctaataaccagtacttcaaccacagaaggtgtggccaacaccactgaaaaaggtcccttccatttgggttgtagttgagtgggtgacccctctttctatgtcttaaatatattatctcctggcctgaccttggcttgctggttagttcctggtgtaggaggagtctttaagttccaaactcctgtaatgcctgctgaaattgccccaggttaactaggtatcttattaacccagccatttctggatcagttatgagatcattagttaaaaatggcctcccatataacaagcacttatgggctaatacttcttgctctcagttatgaattcttaagagkcctatattcggtaagttagcccaagtttgatgtttcctgacatagctaacactcattttagcttgactcgccccttccactttcctggaggactgaggcctctgagctgaatgtaaatagcatttgacactgagagcctcagtaataccttaagttatctgggagaaaa

SEQ ID NO: 517947 - DNA, 558 bp, Homo sapiens
ccggggcttcaggtattgcaagcttgaccctggaaagatgtatccaactgtctaataaccagtacttcaaccacagaaggtgtggccaacaccactgaaaaaggtcccttccatttgggttgtagttgagtgggtgacccctctttctatgtcttaaatatattatctcctggcctgaccttggcttgctggttagttcctggtgtaggaggagtctttaagttccaaactcctgtaatgcctgctgaaattgccccaggttaactaggtatcttattaacccagccatttctggatcagttatgagatcattagttaaaaatggcctcccatataacaagcacttatgggctaatacttcttgctctcagttatgaattcttaagagtcctatattcggtaagytagcccaagtttgatgtttcctgacatagctaacactcattttagcttgactcgccccttccactttcctggaggactgaggcctctgagctgaatgtaaatagcatttgacactgagagcctcagtaataccttaagttatctgggagaaaa

SEQ ID NO: 517948 - DNA, 643 bp, Homo sapiens
gtaagtcagcagtcctcaccccaggcacttaggtactctttttgaagtgaggtctcaccctctacggctggaggactttcaaataactatgccatcaactaatctgccttaactgaggtagaattcttcttctacaagcagtttataaggtcatctagtggggaagasattcaaactttttctaaaactgctcctcctacgtgcaacctacctccaactcccacaagcagcatctatgcagtcaaaacacagtgagctgttggtaactgcacggattgtagaaagtttgttcagactacagcatgaatttggctggtgggctcttgtagcagggagatggtgagagttcccgtggttttgcacactcagtttaatgttgatctacctcccactgtcttgaactccagcatctggccaaacatctagagaacagacttcagtggagtaggggtctgagcgtggggaggggaagcaagatttcaagggctgagggtgaaactgctgtcacgtgctcagccatcctgcctcacacaccttcccaggaaccgaggctgcaggttccattgggtgggttcgtctacttttgtgtccttcctgcagaaatagttctggctttctgagctcctttcaggcatgcatgcca

SEQ ID NO: 517949 - DNA, 600 bp, Homo sapiens
gtgtacatcctgatctggtctgaatgatccagacacacccccagatgcactgcagttgactttctaagatatcccgaggtagttgatgggtgcttccagggattgaagtctctcccagagtggtaaaaatacccttggttctggtactccagatacaagattccacttggtctcttactttctcaaaccctctcaaagggaggccctgatgctgtctaccctcttgtctgctactgtcttgctgtccagaaggttctggggcttgatacctctggaaacagagagaaggaagcagggttgggcagatgggtgagctgttcatatagacttgatgaaagccttggccaacccaacaaggtgtcctgaagatagaatgacctaagctgtcctgagtagaggtaagaacactggacctctgtcctgttgattagtctctggctggaacagtgtcaggaaatggsgtaacctaggaggcagctcttttcaggggctgaccaatgagggctgtctgctagtaagtgaagacatcagaatgaaggggataggaggggtctgagtgagtcactgcatctattgcagttgacaagcatagagtttccc

SEQ ID NO: 517950 - DNA, 553 bp, Homo sapiens
agataacccatctatttttttgtctcctatttctcatatgggagtcagatacaagttcacagtttatcccatactgtggggtcttatatgaaattctccaggtagttttcttaaagttcccttttcttgtcctggagtaaaaaatattatctccaccctgctccttaggggaggtaaaacttctaggataaatctctaaaaataaatatattctccttagttcttcttttctgacccttacatatccttgatgaggtgagtggtattaagagtcatctattatattattagttaattatattagttaattattagttaataatattaatagttaataactaatagttaattcttggacagctactttgggatttttgtggcacaatctatgtgaaaaccaccttgttatctgtgataatgcacattaacagcttcccctcttcatgctccccggttkttgttccctttgccaagtgactttgaagatgccctcaccaacaaggcagagtctatttcctcagccctgaagctgggctggccgcatgatctgctt

SEQ ID NO: 517951 - DNA, 652 bp, Homo sapiens
gttgggccatgtgatctgtcagccacatcgataatttaaaggacaacagtccactgtttgacaagatacctgtgtggacaagccaacaagaatgagttggttcttctgttaccaccttcttttgtgttatataaatattttaagtgtaacttttaattcctctgttgttatttttactatattttwaaaattattttcttagtgattgttttgggattataatataatcttaatttgtttaatctacttcagattaatagtaattcaattctagtaaaatataaaaagcttgctccaatatagctccattttatccccctccttgatactcagttctctgaaatctgctcgttatacaatgcaaaaatatatataacacaatcacaaagttgttaaaatatactgaacatttctgtgattcaggctgtatgctaagcacttatgtgcaatatcgtctaatcttaaaaacaaacaaaaacaaaatcataaggtgatgctataattaccgtcatcttaggcataaaaaataaagtgtagaaatgtttgagtaatttgctcaaaaatgcactgctagcaagtgatagaaatggaattctaagtcatgacttttaacaaacttggtaacaaacgaaactatttcaggccagattaa

SEQ ID NO: 517952 - DNA, 652 bp, Homo sapiens
gttgggccatgtgatctgtcagccacatcgataatttaaaggacaacagtccactgtttgacaagatacctgtgtggacaagccaacaagaatgagttggttcttctgttaccaccttcttttgtgttatataaatattttaagtgtaacttttaattcctctgttgttatttttactatattttaaaaattattttcttagtgattgttttgggattataatataatcttaatttgtttaatctacttcagattaatagtaattcaattctagtaaaatataaaaagcttgctccaatatagctccattttatccccctccttkatactcagttctctgaaatctgctcgttatacaatgcaaaaatatatataacacaatcacaaagttgttaaaatatactgaacatttctgtgattcaggctgtatgctaagcacttatgtgcaatatcgtctaatcttaaaaacaaacaaaaacaaaatcataaggtgatgctataattaccgtcatcttaggcataaaaaataaagtgtagaaatgtttgagtaatttgctcaaaaatgcactgctagcaagtgatagaaatggaattctaagtcatgacttttaacaaacttggtaacaaacgaaactatttcaggccagattaa

SEQ ID NO: 517953 - DNA, 613 bp, Homo sapiens
gcgatgcggttctgcagctcctccacccgccgcggctcctgcagcccatgccggtctgcgggaagggtacaggattagctgtacatctgagaaccaggcccccaaagccccagcctcccccaggcccctaaaactgctgcccctgaccacccctcatgctctgctggcacttcacaaaagcgcattcacatgttggccattagtaagcatcgtcacaagtctgagaagcagtaaccctcattatcctcatactccaagtgagaacccgaggcccaggaggctaatgacttgcccagggtcacaaacrggaaataaaatcctaacctacgttttctggctagatcattgggtttttaaaatctagactgttctgagaaacccagcctcagaactcagcactccctcagcccagagtacctctgattgtgttctatatcgttgggtcccctgtgcaatttaagtgaaaaaatgaacgagggtggattctttcctttaaaaaacagagaaatctgaaaacctctgcattcaacaccagattccatcctgcagaactacatttacataaagtccaaaacaggcacaaccaatctgatctgcactgtcagaagtcaca

SEQ ID NO: 517954 - DNA, 456 bp, Homo sapiens
ctggtagaggaaggtgtcaaactctcctgtgtagccgtccatgaaggtgctgaagctgggcagggcagtgggggcagcgggggctgcctcggggctggccaggtccatggtgggcttgatgaactcaggrgtcagggggtcgcttgccaggtggtcacggggtcccggactcggtgctggtgtcccatattgggcttggatacagggcatctctggagagagaggagaccccagggagggaaaggagagtcagtgggacaagcctatagccttgtctcaaagtatttgggccccagagcagcaaggtggcaggaatcccagcctaaagatgagacagaggcaccgggaccagagcacccaggaatcctgacccctggcctgagtaccatctcgacctaggtgccacaaagcccctgggcagcggcccagcatgagtgggctccatcagaaggccag

SEQ ID NO: 517955 - DNA, 554 bp, Homo sapiens
ctggtagaggaaggtgtcaaactctcctgtgtagccgtccatgaaggtgctgaagctgggcagggcagtgggggcagcgggggctgcctcggggctggccaggtccatggtgggcttgatgaactcaggggtcasggggtcgcttgccaggtggtcacggggtcccggactcggtgctggtgtcccatattgggcttggatacagggcatctctggagagagaggagaccccagggagggaaaggagagtcagtgggacaagcctatagccttgtctcaaagtatttgggccccagagcagcaaggtggcaggaatcccagcctaaagatgagacagaggcaccgggaccagagcacccaggaatcctgacccctggcctgagtaccatctcgacctaggtgccacaaagcccctgggcagcggcccagcatgagtgggctccatcagaaggccagccacaccctagtcagcctgggaaccctaggggaggcatacagccagcatttctctgctagaacagggggaagctgtgttcctccagccccctgcccct

SEQ ID NO: 517956 - DNA, 554 bp, Homo sapiens
ctggtagaggaaggtgtcaaactctcctgtgtagccgtccatgaaggtgctgaagctgggcagggcagtgggggcagcgggggctgcctcggggctggccaggtccatggtgggcttgatgaactcaggggtcagggggtcgcttgccaggtggtcacggggtcccggactcggtgctggtgtcccatattgggcttggatacagggcatctctggagagagaggagaccccagggagggaaaggagagtcagtgggacaagcctatagccttgtctcaaagtatttgggccccagagcagcaaggtggcaggaatcccagcctaaagatgagacagaggcaccgggaccagagcacccaggaatcctgacccctggcctgagtaccatctcgacctaggtgccacaaagcccctgggcagcggcccagcatgagtgggctccatcagaaggccagccacaccctagtcagcctgggaaccctaggggaggcatacagccagcatttctctgctrgaacagggggaagctgtgttcctccagccccctgcccct

SEQ ID NO: 517957 - DNA, 663 bp, Homo sapiens
gaacaagtgcgttatctgtggcttgaccagtctgtgctcaatctcagccttgctagctctttttttgttttttgtttttgttttgttttgtttttgagatggtgctgtcgcccaggctagagtgaagtggtgcgatctcggctcactgcaagctccgcctcccaggttcatgccattctcctgcctcagcctcctgagtagctgggacgacaggtgcctgccaccacacccagctaattttttgtatttttagtagagacggggtttcaccgtgttaaccaggatagtctcgatctcctgacctcgtgatccacccgccttggcctcccaaagtgctgggattacaggcgtgagccaccgccctcggcccagccttgctagctctttgagagttgaaccagcctcaagctcaggcaccctcctctcctcctcacaacttggcatttgtaaaaagtrgcacagaccatcctgtgggttaggcccacccataagcccaaggaaaactgagtgtggtgaggagctgtccaggtccctggtctgaatctcagcatctagcctccagatctgggcctgcagcccaggccccacctccccaagctgctgcaggttatggaggctgcagtcctgctgccccaaagcctggaggaggataaggaactacag

SEQ ID NO: 517958 - DNA, 522 bp, Homo sapiens
tgtcatcccctactcccaccagcccgtgtcacctaggcccagagagccctccagcctatcctgccaagaaaataaggcttccccagtccccacactcacactaccccaacctctaaagaaatcagatcccgcacactgaacagcacctcggctgccacctccccagggcttcccctccatccccctaaccacatccgctttgggcagctccacccccacctctgccccccaaccccacctgctggaggggtgtacaaaggacaatagcagagcacttaccactctggatggaccaacaggccttggccaaccacattatcccgtctgccttcagggcccagcagaaggagccaggctgcctgggaggggcagggcctggcctctgtccatggtggaggsctacagagggagagtcgatgtgagtgaagagaaaccagccagcaggcacattccctggagacagcatgcccaggacacgcaggaatgggagcagtggcaggacctaggccacaagagggggac

SEQ ID NO: 517959 - DNA, 605 bp, Homo sapiens
tgggaggattgcttgagcctaggaattcgagactgcagtgagccatgatcacgctactgtactccagcatgggtgacagagcaaaaccctgtctccaaaaaaaaataaktttttttgtagagatggggtgtcactgtgttgcccaggctggtcttgaactaaaggctggtcttgaattactggcatgagcctgaaggcatctgctctggggttagaacacgggggagctgtgtgtctgactttcattccataaatatttgcagagcccttcactgtgctgggtactgtgtgctcattgcagggggttgcccagtgtcaggtgaaagctgtctctcattgtcccgccaaacccagaaagggcaagttcataagtggtttcctagtcacccttaagagcagcagcagcactcagccctgtgtcctccaggtgtccatgagaggcaggtggagcagagtggtgaagagcatgggctttggagctggggtctgccacccagcaagtgtgtgaccttgggctagcggctccactcaaaattgcaataataatcttgcttacctcaaagggtgcgtgcactgcaaggactgaataagtcaaatatgcccag

SEQ ID NO: 517960 - DNA, 526 bp, Homo sapiens
cattgcagcctcagcctccctggctcaagtgatcctcccacttttgcctcccaagtagctgggactacaggtgtatgccaccatgcctggctaatttttgtatgttttgtagagacggggtttcactctgttgcccaggctggtctcaaactcctgagctcaagcaatccacccacctcagcctcccaaaatgttggattacaggtgtgggccaccacaccggccgtctctggagtayattaggggcctgtttcccctgtgccttggccatgggctcagaactgcaggacccacaggcacacaaggagggtgcaaagtcatgggcagggtctgggcacaggcagggtcttcagggaatgctgctgcaggcgtttggaggggagttctgcccccacatctgagcaccaaggagagaggtggagtgtgtgtgcatgtatgcgtccctcctgtcattggacaggcaatctgtggtcaggcagatggggcaactcactcactttccactgctcttttagaaaatgtccca

SEQ ID NO: 517961 - DNA, 613 bp, Homo sapiens
gcgatgcggttctgcagctcctccacccgccgcggctcctgcagcccatgccggtctgcgggaagggtacaggattagctgtacatctgagaaccaggcccccaaagccccagcctcccccaggcccctaaaactgctgcccctgaccacccctcatgctctgctggcayttcacaaaagcgcattcacatgttggccattagtaagcatcgtcacaagtctgagaagcagtaaccctcattatcctcatactccaagtgagaacccgaggcccaggaggctaatgacttgcccagggtcacaaacgggaaataaaatcctaacctacgttttctggctagatcattgggtttttaaaatctagactgttctgagaaacccagcctcagaactcagcactccctcagcccagagtacctctgattgtgttctatatcgttgggtcccctgtgcaatttaagtgaaaaaatgaacgagggtggattctttcctttaaaaaacagagaaatctgaaaacctctgcattcaacaccagattccatcctgcagaactacatttacataaagtccaaaacaggcacaaccaatctgatctgcactgtcagaagtcaca

SEQ ID NO: 517962 - DNA, 236 bp, Homo sapiens
ctgccccctccaatggagatcctcttggagccccccaggccatacagactgcggctgccaaagccagctcctccacatgcrccacccaggccaccactgcccctggagcgggacacggagatgctgctgaagccagagcggctgaccccagggagcctggctgagctggcactgaaaccccggcggctgctgctgtggctcctgatggtggtggatgtgctggccatggttccagg

SEQ ID NO: 517963 - DNA, 236 bp, Homo sapiens
ctgccccctccaatggagatcctcttggagccccccaggccatacagactgcggctgccaaagccagctcctccacatgcgccacccaggccaccactgcccctggagcgggacacggagatgctgctgaagccagagcggctgaccccagggagcctggctgagytggcactgaaaccccggcggctgctgctgtggctcctgatggtggtggatgtgctggccatggttccagg

SEQ ID NO: 517964 - DNA, 563 bp, Homo sapiens
gagtcctctctttaattgctaaccatcctgcccattatagctacactcaggagttctcatctgacaagtcagttgtcctgatcttctcttgcagtgtccctgaatggcaagtgatgtaccttctgatgcagtctgcattcctgcactgctttctctgctctctttgccttcttttgttctgttgaataaagcatattgagaatgtgaacatgttgtgttagattgtattgctgaccacttcctggtttagaaacattcgcaccccacaaatggtttcttatctttggggaactgctgctctccccactgaccagtcatcatggaggatgagtcgggagctcyccctccacagcctactccatcagtcaacattatgtgattctgtcggacactccggtgacaatcaccaactactcagccctcaccacttgggaatttttccacaaatggagtcttttataaagcatcagaacaaaaagggaagctaattcctggaatctggatcagcataatctgataactaagattcatttatattttttatttttcagccccatcatttg

SEQ ID NO: 517965 - DNA, 585 bp, Homo sapiens
  misc_feature (1)...(585): n = A,T,C or G
tgcaattcagagaggtaaagacacttgcccagggctacctaggtaatcaggagtgagtcaggacccaggactccaaagtctgagctgcaaatcccaacaccagcccccgccgtgtggagtccagtgtggagacaggggaagcaaaacgggccttgtcctgggctgggtctctaggcacccagtcaggctcaggaggacagggcagcccagaagcagctccacggagtcctgggccttcctgcttggtggccagggccagaacagggttgtcctcacaatgtgaggtgatgcaggagacctttcaatgtggcaccagagctgatgrgcaggtgggcacccctgaaggccctggtcttcacagagtttggaagttctactccctccctcctctccaagttntaagttctactccatggcctggagtagacagatgctctgtccttgggagctgaagctctcccacctaattcacagacagagggggctggttatccctggaagggtaaggcccagagtgatagcatgttctgtgggacatggatgctgtctacatgaacaaagtggggctggaggccaaagtggatg

SEQ ID NO: 517966 - DNA, 585 bp, Homo sapiens
  misc_feature (1)...(585): n = A,T,C or G
tgcaattcagagaggtaaagacacttgcccagggctacctaggtaatcaggagtgagtcaggacccaggactccaaagtctgagctgcaaatcccaacaccagcccccgccgtgtggagtccagtgtggagacaggggaagcaaaacgggccttgtcctgggctgggtctctaggcacccagtcaggctcaggaggacagggcagcccagaagcagctccacggagtcctgggccttcctgcttggtggccagggccagaacagggttgtcctcacaatgtgaggtgatgcaggagacctttcaatgtggcaccagagctgatgggcaggtgggcacccctgaaggccctggtcttcacagagtttggaagttctactccctccctcctctccaagttntaagttctactccatggcctggagtagacagatgctctgtccttgggarctgaagctctcccacctaattcacagacagagggggctggttatccctggaagggtaaggcccagagtgatagcatgttctgtgggacatggatgctgtctacatgaacaaagtggggctggaggccaaagtggatg

SEQ ID NO: 517967 - DNA, 584 bp, Homo sapiens
ggagggtgaggagatccggtgaggacaggggctccagggtcccttcasgttcctactcagagctggactgaaatattccaggcagagaatgttcaaactgggaaagactctagaaatcatggactccaaccatgtccccattttgcagatagggaaactgacatcagagaggggaaggggcttgcccaagagcacagccagttaatggctcacctaaaatgtaccagtctctgggctggccaccaatgctcttctccctcctgcacggcccctcaggctggaatctggatctcattccaaggccactactttaccctcttgactgaaaggatgtttctgcaatcagcttcagtgggttcttaaagctggaatcattcagaaaattagttaaaggccatttgatttgggatgtgcaaagaatcctatcaacctagatagcctggtgttcaggaccagggaatagaaatgagcggcacaagttctgtccttgcaaaggaagacaagacagacatacatcagtcctccagagcctggggttagtggcccagggaagctgtcacagaaggaggctgccttctcaacag

SEQ ID NO: 517968 - DNA, 338 bp, Homo sapiens
gcacttgcactgattttcattatgatactaataattaatggattaataactcaatcagaattattagtacacatcccctatccatgtgattttaaagtcaatttagcatattgtgctatgtgtactgtggccattgaccttttaagagactgcctcctcttggcatttaaaatatttaatttaattacataagtaatgctcgctgctgccaatacagaaaataagaaaacaaaagcattcagagccactcaactcagagatagctgtcgccagcattgtggtttgacaggcaccaccacrggcactgtgggttccttgaaagggcacagtcgtaaggc

SEQ ID NO: 517969 - DNA, 486 bp, Homo sapiens
aatcttttctcttgcatgaccaaatgtcagtttagtaatttccccttacagagaacccagaactaactctcctgtttccttcttattggagttaacaatttactttctctgtgtaaaccctgggtttgacattattttcacttccattgcttctccccttccctgtggttcaggaatgaaatagaaaggcttttttttgaatgaatttctcggtcattgtcttccccaattaacttcaggccagcagatgttaaattaagtcctgactgtgtgccagatcctcttggaacggagccagctagagggtgtggagtatgtgggaacatctctgygctttgccctcggatgacaggggctccagatgctgcctcagcatggaagggtggtgtgggtgtggagctgggctcctcacttgctctgagagattgtatattcccagagtcccccaactattcatatgtccagattgaaagactgacggaggct

SEQ ID NO: 517970 - DNA, 564 bp, Homo sapiens
tcatgattgttttacagaaaggtatgtcaacttacatgtccaccagcagtgtatgacagtaccacccccttcctgtatcctcaccagcactggtcatagaatttttaaaatctttgcccgttttattaaaaaatatattatattatatttaaatttgcatttctttgattactagttattgctttttggcctgtaaatatttcttctgtgaattacctgatcagctcttttgtccatctttctatcagggattagtggctttctattgggatttaggagttttctcactgagcatcatttagtttagcttaacttatatttgttgcatgcccaactatgtcaggttcggcaacgttaactgtgggtcttgcctttccttagagatgattgtcttccttatttycctgctcctcagactccatctctgttgctgtaattatgctgacctgagaattctttgtccctaacaacaaatattctgtgttgctaccaagagctggaggtcaacaatcccagcatccaaagctggtggtcagtagcaggttatgccctgttaactaatca

SEQ ID NO: 517971 - DNA, 466 bp, Homo sapiens
cacacccatagaccaggccctggcagagggcacagaagggctgtctgctttagaccatggcaacttgttccctgggctggacgcactgccatggcaacttgttccctgggctggacgcactgcctcacaaaaccagccctgcccacacctttatccaagcccctccaagtaccccatttgagcagccatctgtttcctgacaggaccaggctgtgacagggttgctgcgtgtgcagtgtgagtatgctgcatctgtgtcagggcgtatgtgtgtgcagtgcatcaatgtgaataaagcatgtgcgtgtgtgtgtgtgtgagagtgtgaattgcagaaagggagagagtgagtccagacaacgaagctacttggtccattgttcccagtccccatgctctgttyccacctgctctccctccatccaggaaattcctcgtgtgaacaaagcctcccgatggaatgaat

SEQ ID NO: 517972 - DNA, 647 bp, Homo sapiens
ctgggtttaaattccaattctcacttttatattttctgaccttggataagttaacttatctggtctttgtcttagaccattatcagtatcatgagaattaaatgagataatatatatggaaaagcacagcacacccaggtgtcctaaataccttcattttaaaaattccaagcctactaaagaaagctgtaagccagacacatagcaagtttaaamagatgtttgttttaccttcctagggcaggggatggtgtgagttcccagacagaacatgacagcagagcccaggttgagcaagagagggtgggaaacagaaatgtttccagcaatttttctttctttcttttttttttttttttttaatcatgaagattcagtgtgtcctacaagtgaatgtttgagtcattctgaattaaactgggagaatatgatgattatctctagtttggtgtgcctaatctatcttttcttttggggaactcctactgcattcccttggctcttgacggttgtcagttacagcactccatttcactcctctctttcccctcagagaacagagatgaccacatgaccaggaatgttagtaaacattttctcctctacgtggatgaaaacctgccttcagtagaagagattgagacagg

SEQ ID NO: 517973 - DNA, 541 bp, Homo sapiens
agaaaggttaaaagataggagtcattttgccaagagagaacagtaaagcaaatcagaaaatattgatttaatagcagggacctatgttcaggtggatctggctagaagtcagatacaggaggacatccatttgtggggagagctgccacttctctctcatacttctgatttagcatcaagcttcatgttaatacaagaattaaaagagcaagctaaaatggtgtcaaggaagcctgttgtacacaaaacagcattatgtctatcatttttaaatcamtacaaaaattgaaaagaagaatgaagagcaaaagcagccttttatcaatttacttaagggcaaacacttgaaaatcactggaaaatcaggtgaatccattctgggtagcaaattgggaactctatttttttcttaggatacctctatcactggctgatttgcaaagctaaatggactgttctgcaattataaaaccagtacaacattaaatgttatcattccaggagcagaatttctgtcttaataatccaagactgctccagc

SEQ ID NO: 517974 - DNA, 622 bp, Homo sapiens
acagcttctgttgtccatagcccagttgatggtatataaagtactgacgactttaaaggtactactctgcttcctaagtttttaccttcctttcccccactacaatatcctctccaaagtgatccctaaagtactccggctcttttcattgcctctcccccaaaggaaactcagttgttcatatctgttaaacccactaacttcttccattttaacttaaaaaaaaattcccctctgttgcctttaaaagtgtttccttaggaagatctgcattttaaacacttatctgcacgttgttctactaaaaaaatatactagaaaggaccgagagtcaacgattctgaaggagtttgtatcagggtctcttctccctacctcgtcaagtttaaacacacccaacgcctcgattccttgcttccgacccgagttgctgctttacatatccctgtacatttgaggtgttattcgttgatatttcaatatattttaaaataattttccatttctgttttgttaaatttttgaatacgttcttttgtatctcgtgtcatttctgcctctggtaaygttgtccttggtatccttggaactcatttcctttctcaacacacaatattccctg

SEQ ID NO: 517975 - DNA, 677 bp, Homo sapiens
ctataatgatgaatgaaacaagagcatgtcatcagatttaaccttgatctctgattttggtacttactcgctgatttagttttggaacagaaaagaggaatatgactgaagggaactttytgagcacctactgtatatgcttttaactgtattcacatttctctcaatcttatacatattgaatttattttaaagaagaaattttaaagaagaaactcttgtgcttttgatttaataagataacatttaagggaatgattttaattcaggtgtgtcagagtctgttctttttgtactttaccatatttcctccatttgacttctttcagccttaatgccagtctcaaatttgatgaaaaggttctatgtgaaagcactgagcatagtccacggggtataataggtattcagtaaatgttttctttttttctcagagggtttttggaaattgtgggtcacttgtagactttcaaacactagaaaacacagtttgttttctgtgcttttcatttaggtttggtaaaagacagggttggagttcttcctttttctgtggttaatatgagaactgtatattgatatctataaaataaggacatttttcaaaaccaaaaatacataatgagaagaatggccatgttgaacctttttttcgggtcttaatgtttggcttaaga

SEQ ID NO: 517976 - DNA, 634 bp, Homo sapiens
tttcagacaccttaaatttgttcacgttttttctcttaatgttgtgaataatttttcccaattccctttttattctccagctttaaaacaatgacagtacaggttgagcgtccaaatccaaaaatctgaaatccacaatgctccaaaatctgaaactttaagcacctacgtgatgcttaaaggaaacactcattrgagcataccagattttggattagggatgctcagtctctaagtattatgcaaacattctaaaatccaaaaaaatccaaaatctgaaacacttgtgttcccaagcatttcacataagggatactcaatgatgaaaagtttaattaagaccaataaacaaataaaaaataggatccgcctcattagtcattagggaaacacagctctaaagcatgatgagataccactttacacccactaggatggcagtatataaaaagaaaataacaggtgttggtgaggatgtggagaaagtggaaccctcatacatgcctgatgggaatgtaaaatggtacggctgctttggaatgcagtttggcagttcctcaaaaagttaaacagttaacatgtgacccagcagttctactaattagatataaatccaggagaattgcaaacataa

SEQ ID NO: 517977 - DNA, 553 bp, Homo sapiens
ggtggtcctgctaaattatatgcagtggatgaagaaacaatgatatccctgaagagggatgtttttgtcctcttttgacatgctaggcacgttctagatcatttctgggaactgagacacamtccaccagccatctagatacccaccaaacacatcataccttatacatggtcagtggtccatgctttactgattggtaactccaacaaagagctaccagttagggatgaaggcaggggaagttttgcacaatctaggtagtcgctggctttggatttgaaaaagaaaatcctcagctcaactaagcaattttcactttgaagttaaatacaagttgctgaccagcttttgctgaagagttggagtgtatgtgtgcaggcgcagatacaaataataacaaaacagtgacttttgtatgtaatactatggtttcaaggagatctctgtgcctctggtagaacttcttactctactcagtcacctgaatggatgcaactattcattcaatcatttattcatttaataaatgtttatttgggaccaattatgggcc

SEQ ID NO: 517978 - DNA, 553 bp, Homo sapiens
ggtggtcctgctaaattatatgcagtggatgaagaaacaatgatatccctgaagagggatgtttttgtcctcttttgacatgctaggcacgttctagatcatttctgggaactgagacacactccaccagccatctagatacccaccaaacacatcataccttatacatggtcagtggtccatgctttactgattggtawctccaacaaagagctaccagttagggatgaaggcaggggaagttttgcacaatctaggtagtcgctggctttggatttgaaaaagaaaatcctcagctcaactaagcaattttcactttgaagttaaatacaagttgctgaccagcttttgctgaagagttggagtgtatgtgtgcaggcgcagatacaaataataacaaaacagtgacttttgtatgtaatactatggtttcaaggagatctctgtgcctctggtagaacttcttactctactcagtcacctgaatggatgcaactattcattcaatcatttattcatttaataaatgtttatttgggaccaattatgggcc

SEQ ID NO: 517979 - DNA, 553 bp, Homo sapiens
ggtggtcctgctaaattatatgcagtggatgaagaaacaatgatatccctgaagagggatgtttttgtcctcttttgacatgctaggcacgttctagatcatttctgggaactgagacacactccaccagccatctagatacccaccaaacacatcataccttatacatggtcagtggtccatgctttactgattggtaactccaacaaagagctaccagttagggatgaaggcaggggaagttttgcacaatctaggtagtcgctggctttggatttgaaaaagaaaatcctcagctcaactaagcaattttcactttgaagttaaatacaagttgctgaccagcttttgctgaagagttggagtgtatgtgtgcaggcrcagatacaaataataacaaaacagtgacttttgtatgtaatactatggtttcaaggagatctctgtgcctctggtagaacttcttactctactcagtcacctgaatggatgcaactattcattcaatcatttattcatttaataaatgtttatttgggaccaattatgggcc

SEQ ID NO: 517980 - DNA, 553 bp, Homo sapiens
ggtggtcctgctaaattatatgcagtggatgaagaaacaatgatatccctgaagagggatgtttttgtcctcttttgacatgctaggcacgttctagatcatttctgggaactgagacacactccaccagccatctagatacccaccaaacacatcataccttatacatggtcagtggtccatgctttactgattggtaactccaacaaagagctaccagttagggatgaaggcaggggaagttttgcacaatctaggtagtcgctggctttggatttgaaaaagaaaatcctcagctcaactaagcaattttcactttgaagttaaatacaagttgctgaccagcttttgctgaagagttggagtgtatgtgtgcaggcgcagatacaaataataacaaaacagtgactttkgtatgtaatactatggtttcaaggagatctctgtgcctctggtagaacttcttactctactcagtcacctgaatggatgcaactattcattcaatcatttattcatttaataaatgtttatttgggaccaattatgggcc

SEQ ID NO: 517981 - DNA, 627 bp, Homo sapiens
tgccagcaggtactctttccccagagtcctataactgaagcagggcagaatactgcttcatactcttcctctgcccatgttctccctccccccatctgaatgtttctaagtcactcccctttaaagtttagccttgagatgagcaggaggaaaaataaaaaccctggcatcagaccttcttttcctctcccgttgtttctattttttctctccaaatccctcaggtagaaagtgatagtattctctttccatgtccataccttcttctactttagagtaagaaatctcaatgctggacttccagtttcagctctgacatgtaaaaaagtttagaattcatcacttccatcctttccgtaaggaaaaactgagaaaactaaaagtcagtcacttttcttgactcatctgcgaagtaagatgacaaagtaaaccaatatcccataatatggggaaacaggtagatccagggagacagagctgagatcagcttagctggaacagaagctgctgggaccatgaactggtaggaacagtaaaatggtaatattgattaattgtttgaggctgagtgtgggcattataataygggagcaggaaactcctgggggctgcagtctgaggaagcac

SEQ ID NO: 517982 - DNA, 711 bp, Homo sapiens
taaccatgatgctggctgggtgaggtgagggctaggcaagactagcatcagccagagcttttgagcacggtccaacacccagaggccctttgttcatcacagggtgttgtggtgggggaggtgttaggaatggaaagtggaagtgaggtctgacccctaatttcaggattagggagggaggtagcwccattttaccattactaaaacagtcttcctaaccttctataggtttgagctatttgatggctgcatatttcatccctctcttttcaagcctgcaagcagagtaggaattctccattctgagctgggatttcatgcttacctttatagctccttgcagccattgctgccactggctttgaatctctcagtttccatctcttcaaatacctgtatctttagcccctttaagatgctaataatttatttatgaagcattattcaagcatagatccatctgctccatgatgttcactcattaataataataacaatagctaacacaaatacctatatgcatcttatttaattctcataacaaacttccttgtgaggtaagtatagtattactatctccatatttcaaacaaggaagctgagatacaaagaggcaagataatgagtgcaaagtcactcagttgtagagagttgaagaaattgatagagccatttcactaagtctacttgaaagcaccattaagctgctga

SEQ ID NO: 517983 - DNA, 479 bp, Homo sapiens
ttcaatatgctcagggcttatttggaggctcccagccagggaactcaatattaagctggcttccaggatctagaaaaagcagctactattgcagtaaaccacagaggggaggcccctttttttccatccacttaagcaatggtgggtctttgggaacaatactggtgctgcctataattggctggtctaaagcaaaataaaactgaaaacaaaagatcctaatacaaagatakgaagtgaattaatccctttatagagattatttcattttgcccactcctgtggttgggtcattttatcattcccattttatatcagtaagatatatagttttttctatgtcaaacaaagccatggttttcagaacttgttacagaagccagatctgtttgaccccagaacctgagctatgttccccctattaataagacccagcctccaggcagggctgtactctagtttggaaaagtgctgcctgc

SEQ ID NO: 517984 - DNA, 596 bp, Homo sapiens
gtgcccacccagtttgaggttgggtccgcctctcccagtcagatgttaacagacacactgaggaataatgctttgcatccttcaatccgatcaagttgagaattaatatkaaccatcacagtgaccatcgccaaaaatcaccatgctgattttggatcccaaggtatacctgagaagtattggggaaacatcaaaaccagacacagattaaaataagaaagaaagacaactttgacatttttttgagtgctagacattcttctgtgaagttcctgtgtactaactcatttagtcatcagaacatgactattaggtaggtactatcattatccttcccatttcacagatgaagcaacggatgcacagagagattcaggaacttgcccaaggacctggttagagtgacagaaccatgatttgaatgcagatagactaggcctaccacactacaccacattcctatctccttaaccagacagtgatctccaggaaacttgaattagggttcctcatcttttcatcttctctaggtctggccctgacctgtgatcactgggaattcaataaaggctcgcttcaacttgaattgacttctt

SEQ ID NO: 517985 - DNA, 596 bp, Homo sapiens
gtgcccacccagtttgaggttgggtccgcctctcccagtcagatgttaacagacacactgaggaataatgctttgcatccttcaatccgatcaagttgagaattaatattaaccatcacagtgaccatcgccaaaaatcaccatgctgattttggatcccaaggtatacctgagaagtattggggaaacatcaaaaccagacacagattaaaataagaaagaaagacaacttygacatttttttgagtgctagacattcttctgtgaagttcctgtgtactaactcatttagtcatcagaacatgactattaggtaggtactatcattatccttcccatttcacagatgaagcaacggatgcacagagagattcaggaacttgcccaaggacctggttagagtgacagaaccatgatttgaatgcagatagactaggcctaccacactacaccacattcctatctccttaaccagacagtgatctccaggaaacttgaattagggttcctcatcttttcatcttctctaggtctggccctgacctgtgatcactgggaattcaataaaggctcgcttcaacttgaattgacttctt

SEQ ID NO: 517986 - DNA, 596 bp, Homo sapiens
gtgcccacccagtttgaggttgggtccgcctctcccagtcagatgttaacagacacactgaggaataatgctttgcatccttcaatccgatcaagttgagaattaatattaaccatcacagtgaccatcgccaaaaatcaccatgctgattttggatcccaaggtatacctgagaagtattggggaaacatcaaaaccagacacagattaaaataagaaagaaagacaactttgacatttttttgagtgctagacattcttctgtgaagttcctgtgtactaactcatttagtcatcagaacatgactattaggtaggtactatcattatccttcccatttcacagatgaagcaacggatgcacagagagattcaggaacttgcccaaggacctggttagagtgacagaaccrtgatttgaatgcagatagactaggcctaccacactacaccacattcctatctccttaaccagacagtgatctccaggaaacttgaattagggttcctcatcttttcatcttctctaggtctggccctgacctgtgatcactgggaattcaataaaggctcgcttcaacttgaattgacttctt

SEQ ID NO: 517987 - DNA, 322 bp, Homo sapiens
catgcatactcacacgtgcacaaagacattcttacacacacatacacacacaaacacatacacacgcacacacacctgctctatgcatttgtttctctacaggatccaaataatgaagatagcttccttttttgttgttttgtttttgtttttgtttttrttttgttttgctttttagagttagggtctggctctgtcacccaggctggagtgcagtggcacaatcacggctcactgcagcctggaactcccaggttcaagcgattctcccacctcagcctcccaagtagctgggactacgggcacatgccaccatgaccag

SEQ ID NO: 517988 - DNA, 456 bp, Homo sapiens
agtggtagaatcatgggttggggatgggggcagttctgctttggaaaaatgctgatgtccaggccctacctgagactgattaaatcagaatcactaaatatggggctaggaatcagtatattcttttgaagttccctcagggcttctgatgtgcatctggggttaataggaacacactgcaaggttgcatgggtctgcttagggatggaacctaagccatgaagtcaggtggatgcagcacattaagaatgagtaaactcagcctctgtgctatgtggtgtcgcattttcgaaagctggttgttatcagcaggaayatgctcccaggggctcattgtttctcggcacaatctctgctttaggcccctctgtttcttgaaaagtcttgtcaaggttcccagtctgaagacaaatatgtggtcctctgaaggcttttcacttaatagactactaccca

SEQ ID NO: 517989 - DNA, 652 bp, Homo sapiens
ttcttggctgggaaatctcctttaatacccgtgtcttagtcctatttactttagtgatactgagtaaggaaatgaaatagatttaaatctttatcttaaggataactttaatgagtgacagtcaattccacatggcctgacgggtacagatctgccacctttgcttgactaaactcccatccaattaaatgcatatttaaatgtaagtagtaggcagggtggagtcagtggaatttaaatagaaaccaacagatataaaccaagttttctgtgatacaatggctttaagcagtaaatggctacctgaaggtgtgggatagccatttgaatatygtcaaaggattactagcaggcttgtatcatggattagagaagggaaacccttcttttcagtggaaatgtagtctagccaatgaggctttttggaaaagcatctccctcagagagagggggcaaaaagcaatgagattccattgagccattcaatcatccaactacaatctcttgagcttaagcaaaaattcaatatataagcaatacatgtcagagtagtgactagagggcttccctgactatcaatgctttggaggaattctccaagggacctggagtcctagcaagctgtttcttgtttggtggtactgacagaata

SEQ ID NO: 517990 - DNA, 560 bp, Homo sapiens
agctaattatcttgagtgctaagcatctaccacgcattttttttatgcaatctttagaactgcactgggaagtctgtttctattgctgatttggatgtggagaaattgaggcttagtgatgttctcctgtttacacagccaataggtatagggatttaaattcagacccatctaactgcacagcgtgaatgcttaatcatcttgttaaattgcttttacacttttatgagttggttgaaaaaatatttaatgattgacatttactaaaaatccaatatgcccttcaataaatttgtattttgtcaattacacattgaaagacacatggaaaacwgcagaactctcaaaaagaagtgaggtctaattgccctctgcttgaatcacaggctggtcctgtgagtgctttgagcaacagaatgacactgtgtggtttccaaggctagggcataagaagccttgctgcctctctctgccttttaaaaatacgtccgttttgggtgctatcttttgcaacctagccactctgagaagccccatgtacatagtaatttcacataaag

SEQ ID NO: 517991 - DNA, 488 bp, Homo sapiens
accacaaaagcaattatagtcaacaacctgatacttcactttccttggtttaattgaaacacaaagacttttgttagcagctctttcctagggagtttacattgagtgctcccttactgatggaagaagtggcatagctctattctcttgcctctgctagtagttrgggctacacctagagtaaaagaaaaatcaattgtaattatccaatgagttcagagtgatctgataacaaattcagaaatcatttgcacttcaaaaaaaatagcatcccagctttccacagaaaagcctcctaactgccttggactccgaatactttacctaaaggctaaataatcatgaatatcatattagtatattataagctgtcactacactctttcttatttattttttctcttttctgtttttcacgttcatcattgcaggggacagtgtctggtttattatattcttattgttcagcttttggttataaaacatga

SEQ ID NO: 517992 - DNA, 551 bp, Homo sapiens
cacactgcttaaacaaattatttgaaagtcagttaagtgaatttggggggcatcataaggccaaaagatgatgcaggtccccttatttataaaatcatcatgttctcttttactaatccttcttawattggttccagtaacagcagagaaagctcaactttcttagatgtattcatttattcatttaaaaagcatttcttaagtgtctactatgtagcaggaaccaatagctgctgggaatttgaagattatacataatcccaacctctttagagcggacagaagatataacatggcacagatgatttccgatttgtgtttaacattaccactatgaaacgctctcaaagaaaagtcaaaaggacactaggcatttagacacgagcaattcagaaacactaatttggctttatcagatataaaaaatatataattatgtgaaagtctaatattatttcaagtgactaagacatccaaagtgacacattacgtcattccatccatttattactcacagaaagtaatcagagaattctattccttgttttgca

SEQ ID NO: 517993 - DNA, 567 bp, Homo sapiens
ccttaattatggtctcttttcaaaataattagagttatttgctaatcacttcatgttaaaaagcaccccatgttgatctctaccctttaccttgctttagttttgtttctttgtttgttgtagtattcattagaatctgacactgttttgtgcacagtatgtgtgtgtgtatatattattcatactgtcacaatccaaagaaaattccacccaagtaaagcacatgcttttcctccccacaagatcaatccatagtcttcagaaatatgcctgcacrcagtaggttctcaaaacttttttgtgggataaaaaattaatcttccatttatgtggcactttatactttgtggaacagtttcacctatatgtgaacagtttcaccagtatgaaacatcacaactttaaaactgaaactgaggagagaaaataatctgctaacatgatgtaaccattgagatgcagaaatgaagctcactcttaactcttttattgttgttagggtttctaattaaaagcagtgctcttgctactatactttgtgatttaaaagagattgaatatttggaa

SEQ ID NO: 517994 - DNA, 567 bp, Homo sapiens
ccttaattatggtctcttttcaaaataattagagttatttgctaatcacttcatgttaaaaagcaccccatgttgatctctaccctttaccttgctttagttttgtttctttgtttgttgtagtattcattagaatctgacactgttttgtgcacagtatgtgtgtgtgtatatattattcatactgtcacaatccaaagaaaattccacccaagtaaagcacatgcttttcctccccacaagatcaatccatagtcttcagaaatatgcctgcacacagtaggttctcaaaacttttttgtgggataaaaaattaatcttccatttatgtggcactttatactttgtggaacagtttcacctatatgtgaacagtttcaccagtatgaawcatcacaactttaaaactgaaactgaggagagaaaataatctgctaacatgatgtaaccattgagatgcagaaatgaagctcactcttaactcttttattgttgttagggtttctaattaaaagcagtgctcttgctactatactttgtgatttaaaagagattgaatatttggaa

SEQ ID NO: 517995 - DNA, 567 bp, Homo sapiens
ccttaattatggtctcttttcaaaataattagagttatttgctaatcacttcatgttaaaaagcaccccatgttgatctctaccctttaccttgctttagttttgtttctttgtttgttgtagtattcattagaatctgacactgttttgtgcacagtatgtgtgtgtgtatatattattcatactgtcacaatccaaagaaaattccacccaagtaaagcacatgcttttcctccccacaagatcaatccatagtcttcagaaatatgcctgcacacagtaggttctcaaaacttttttgtgggataaaaaattaatcttccatttatgtggcactttatactttgtggaacagtttcacctatatgtgaacagtttcaccagtatgaaacatcacaactttaaaactgaaactgaggagagaaaataatctgctaacaygatgtaaccattgagatgcagaaatgaagctcactcttaactcttttattgttgttagggtttctaattaaaagcagtgctcttgctactatactttgtgatttaaaagagattgaatatttggaa

SEQ ID NO: 517996 - DNA, 606 bp, Homo sapiens
gatacatgcacatgtatgttcattgcagcactgttcacagtagaaaagttatggaatcaacctaaattcccatcagtgataaactggataaagaaaatgtggtacttatacagcaagggataactatgcagctataaaaargaacgagatcatgtcctttgcagaaacatggatagagttggaagccatcatcttcagcaaactaaaacaggaacagaaaatcaaacacctcatgttctcacttataagtaggagctgaatgatgacaacacatggacacatggtggggaacaacacacagtggggcctgttggtggtaggggtccggggagggagagtatcaggaagaatagctaatggatgctgggcttaatacctaggtgatggaatgaccagtgtagcaaaccactaaggcacacatttactcatgtagcaaacctgcaaatactgtacaagtacccctgaacttaaaataaaagttgaagaaaaaaaattgaagacaataaagaagaaacaaaaaagaaaatgggacagtagaaatcaaaaggtatgataatagaatagagtctcagcatgtcagcattcacaataaaaccaaatttatca

SEQ ID NO: 517997 - DNA, 606 bp, Homo sapiens
gatacatgcacatgtatgttcattgcagcactgttcacagtagaaaagttatggaatcaacctaaattcccatcagtgataaactggataaagaaaatgtggtacttatacagcaagggataactatgcagctataaaaaagaacgagatcatgtcctttgcagaaacatggatagagttggaagccatyatcttcagcaaactaaaacaggaacagaaaatcaaacacctcatgttctcacttataagtaggagctgaatgatgacaacacatggacacatggtggggaacaacacacagtggggcctgttggtggtaggggtccggggagggagagtatcaggaagaatagctaatggatgctgggcttaatacctaggtgatggaatgaccagtgtagcaaaccactaaggcacacatttactcatgtagcaaacctgcaaatactgtacaagtacccctgaacttaaaataaaagttgaagaaaaaaaattgaagacaataaagaagaaacaaaaaagaaaatgggacagtagaaatcaaaaggtatgataatagaatagagtctcagcatgtcagcattcacaataaaaccaaatttatca

SEQ ID NO: 517998 - DNA, 606 bp, Homo sapiens
gatacatgcacatgtatgttcattgcagcactgttcacagtagaaaagttatggaatcaacctaaattcccatcagtgataaactggataaagaaaatgtggtacttatacagcaagggataactatgcagctataaaaaagaacgagatcatgtcctttgcagaaacatggatagagttggaagccatcatcttcagcaaactaaaacaggaacagaaaatcaaacacctcatgttctcacttataagtaggagctgaatgatgacaacacatggacacatggtggggaacaacacacagtggggcctgttggtggtaggggtccggggagggagagtatcaggaagaatagctratggatgctgggcttaatacctaggtgatggaatgaccagtgtagcaaaccactaaggcacacatttactcatgtagcaaacctgcaaatactgtacaagtacccctgaacttaaaataaaagttgaagaaaaaaaattgaagacaataaagaagaaacaaaaaagaaaatgggacagtagaaatcaaaaggtatgataatagaatagagtctcagcatgtcagcattcacaataaaaccaaatttatca

SEQ ID NO: 517999 - DNA, 497 bp, Homo sapiens
agaggggcttctggccaattttggtcaggagtattctcccttacagactaagagtatatattggttttagggtgacagggcccatcacaagcttggaatgtttctgtgtgggggaaattttatggtgtggttggaatgtctctgggcggaggggaggttatctcagggctagcatgtctgtggttggggaggggtttggaatgtttctggtcagagatgttattgtggtttatggttatgctgaccttagccattaggttgataccctttgaatttaggcatttttgatcaaggtaaattttaaaatgacagtgcttgtccaagatggtgataytcctgctctgtcactctcatgcaactttaaccattttataatattttcttactcttatacacaaaacaatcatttaatgtatcaaaaattgccatgatttacccatactgattcaactgtatttttcaggaggcctaataattgctaggcatactggagtagc

SEQ ID NO: 518000 - DNA, 574 bp, Homo sapiens
tcttgttagaaataacacatctatcttaccgtgttgcatgaagattaaattaagttgtgtagagcacttcacacaatactagtacatagtatgtcctaaataatgactaatatccttttgattttgctgtctttctaaattactctacactaggaagatctctgattgggctaatgcttagagttgcaagtttgaaatagaaaacagtttgttttggctatatattccctaatattagaaaaaaacattgaggggaactttctgtattaagtgaatgtgaaatgttgatatagttgattattatctggcaaaataacctaaactgaggtgatacataaaaagacaaggagaatacctgactaaatgtacaaagataaggaagaaagaaaggaaactattatgttaccttttcaaatgaccactatgtactgggcactgtggtttctatctcagcttggcactgacaggccrttggcctttctcccatagacctctcttccatcctttactcatgcaatgtataccttcaaatgtgcctacttctgtatccttctttgtttcagagaaagaagta

SEQ ID NO: 518001 - DNA, 615 bp, Homo sapiens
gaggtttataatatccatacattcactttaaaaggcagtaattcaagagaaacagtgtgatttatttttgtgttaattttaatttataccttagggaagcttacttaacattggaagaaaacttataatgaagacctactacatgaattcttttaatgcctgctgcaagtaaatgtctactatattagatacaattgagttgcacttacttttatcaaaacacctccacgtacgttgtaagagaggattcttatagcctttgataactataaggcaactgaaatgtcacataaagaacctaataactgtgatctaccaaattagcttaggttgctttctaacagcaaggaaattgccttgaagtaggaagttatgacatctcaggagaaatactatctcccaggagaaaaaaatgaatctaatatgtctgttttttttaatcaacamttgtaaaatgttctaagtcgtttcaaaatattgactcatttaatcttcaccacaactttatgaggtacatattagtatcattgttattattattgttaatttaaagatgaggagactaaggcagagaaaactagaaatataattgtctaagatctcacagccactaaa

SEQ ID NO: 518002 - DNA, 592 bp, Homo sapiens
aaatacagctgtgttttttatttcttattgagtttttattgagtttttattgagttcccacatttggaatgtttacaggacatgtatgatctccatcatctgtacctcactgataacaacttggaccacatccctctgccactcccagaaaatctacgagcccttcacctccaggtaggagtctaccagtaaggtgcgcccaagggcttcagagaaagcaaagccaaaaaggacatcaggacacaagaatttgtctgtaatggcatgttgacacactgtgataacttttcttctttttctcttttctcatttattctctctctttatctgagtacaaagctatctttatacattcatagctctatctattctaattgaattctgataactttactctttttcttattttccaaggcaaaatgcatccttttggtacacaaatcttctttagaaaaaaaaccactgaaagtttcacstgttgaagaaaatgaaaagattagaagtggaaaagaaaagggagaaataaaaatctaacttgacatttagctgtcaggggaaaaaaaaaacatcagtttcagcctgtgattttagg

SEQ ID NO: 518003 - DNA, 592 bp, Homo sapiens
aaatacagctgtgttttttatttcttattgagtttttattgagtttttattgagttcccacatttggaatgtttacaggacatgtatgatctccatcatctgtacctcactgataacaacttggaccacatccctctgccactcccagaaaatctacgagcccttcacctccaggtaggagtctaccagtaaggtgcgcccaagggcttcagagaaagcaaagccaaaaaggacatcaggacacaagaatttgtctgtaatggcatgttgacacactgtgataacttttcttctttttctcttttctcatttattctctctctttatctgagtacaaagctatctttatacattcatagctctatctattctaattgaattctgataactttactctttttcttattttccaaggcaaaatgcatccttttggtacacaaatcttctttagaaaaaaaaccactgaaagtttcacgtgttgaagaaaatgaaaagattagaagtggaaaagaaaagggagaaataaaaatctaacttgacatttagctgtcaggggaaaaaaaaaacatcartttcagcctgtgattttagg

SEQ ID NO: 518004 - DNA, 589 bp, Homo sapiens
agagtaaaatgtaaatgtaaataggtgcatttaacttggaaatattttaaaaataattttactgttaatattaatmtttgaatggataattttcaaaataaaatttcttgtaatgaaacatttatatgactcgtatctattccttcaattacagttttttctaatatgaaatataagtagaattacatttttaaatcagatatcttacattttgtatattatttacatgtagctatatatatcacctcttttatctgtagatatgcagagacaataatacttaaggtggcaaataatacttaaggtggattacttttcctttttctcaaaataattatagttcttgaatttttacttttacttacaacttttattttaggattgagaggaggtacgtgtgcaagtttgttacatgagtaagttgtatattgctggggtttggtatacaaatttcatcacccacctaatgagcagagtacccaataggtagtttttcaatccttacccccttcccaagctccaccctcaagtaggccccagtgtctattatttccttctttatgttcatgtgtactcattgtttagctcc

SEQ ID NO: 518005 - DNA, 589 bp, Homo sapiens
agagtaaaatgtaaatgtaaataggtgcatttaacttggaaatattttaaaaataattttactgttaatattaatctttgaatggataattttcaaaataaaatttcttgtaatgaaacatttatatgactcgtatctattccttcaattacagttttttctaatatgaaatataagtagaattacatttttaaatcagatatcttacattttgtatattatttacatgtagctatatatatcacctcttttatctgtagatatgcagagacaataatacttaaggtggcaaataatacttaaggtggattacttttcctttttctcaaaataattatagttcttgaatttttacttttacttacaacttttattttaggattgagaggaggtacgtgtgcaagtttgttacatgagtaagttgtatattgctggggtttggtatacaaatttcatcacccacctaatgagcagagtacccaataggtagtttttcartccttacccccttcccaagctccaccctcaagtaggccccagtgtctattatttccttctttatgttcatgtgtactcattgtttagctcc

SEQ ID NO: 518006 - DNA, 445 bp, Homo sapiens
gctcccaggctcaggttactctttttcttccagcttatatatgccctaatgcctctcatacccgtacttcaacctactgagccttcagtatttttctcccaattgtctgtcgcctcctgatctcattatttttttcactatccaacttcaacttcatagttcactagccccattctatcaccctcaacttcacttgtctgtttacccatgcattgcataaaaatttaaaacctttgacawggatgagttcaccatttatttttctcagttttttattcataaaatggtctgatctggtggagaaagtctatgcaattgtgtgtatcagagtccctcctaataaaaaaattccaacctatcatttattgggtattttctatgtgtcagatgatgaaaagttttacatctattctctcttaattctcacagcaactgtgtaagatag

SEQ ID NO: 518007 - DNA, 438 bp, Homo sapiens
ccatgggtcaggtgctcttcaagggactttacatatttcaactcatttaatcctcacggtatggtagatgccattacctgtctccattttacagataagagaacactgaggcatacataatttaaaggttctgcccaggatatgaagccagtaagtggcaaagctgggatttgaactcagcaactttagcttccatgttagtgttctttaccactgcatgatgttactctacaatgaaaataatcccytatgatttaaactcttcagtgactttcaattattcctaaggactagaatctttaaattcggcgtggaatattcttcccttctaccttgtgctgctaagtacttttagtcttttatatgtttccttaatcattatttctttagggaatccttctctcaaatcactattattaattccttcgcagcatgcag

SEQ ID NO: 518008 - DNA, 608 bp, Homo sapiens
aaattatccctatcagtgcatttttgagtactttttgcatgccagctttatacgctcaatactaartagttctcacccattctgtgagttaggtattatttatcatcaccactttacagacatgcaaatagctctccaaatccagagggcaaataaacagcatagctgggcttttaatctggggctggtgagatctaagattcgtttactttccactacatagcctgggatacagaatttgtcctttatgctcacgtttgggaatctagacgttggcaatgaatacagtggaagggatcttcccactagaccacagacttccagatattttgggattcctgctgggtgactaaggggaaatcacccagcaatcacttttggattcaacatgtggcaaagtttcttttagcagtgctggcagtcacgcatattcatcaaccttctgcacacgcatctcccaacagatctggtccttcgaggctgtggcttcagaggccactcttacaagcttaaagacttgcctaaggtcaaccatttgccaggcaaggaagcaccggggcaaattgctaacactttccctatcgctcaaccaagtcaaagcatggcag

SEQ ID NO: 518009 - DNA, 680 bp, Homo sapiens
ttgctctgccatgaattaaatgggtgcacctggacaagtttctcaccatcagaatccttaagtctcccaaccaataccataggcataataacaataacaatacccacctcagagttgttaggggaatttaaataaaataatcaacataaaagcccctggaagttcctggatgctattaagtattcaataaatctcaactcttacaatcaccctccttttgcgtgcccagcacaaccccactaggttaggtggctctcctctcctggcccctctaaggctctctggtgattgctttgtctgcctcccaacccaacagtcagctccccaacggcaaggactgagtcttattcccatatgatgggaaatgactaataaaacaatgagcagtaatagagtggtgaacctatgtaataagaaatgactatatatattagtaagagctatatactactgaatgtggtataggttaagtaccctgcatctgaaatgcttgggaccagaaggatttaggattttttcagattttgaagtatttgctgtatcagtcgagcttcccaaatccaaaactccaaartgctccaatgagcatttcgtttatgtgtcgtgtcagcactcaaaaagttacagattttggagcatttcggattttggattttcaaatttgggatgcccaatctata

SEQ ID NO: 518010 - DNA, 539 bp, Homo sapiens
gcatttttcatgtaccacctcatcttctaattaaagttacttttcttcaaatactagtattcaacattcaaaaattgtttaagctatcccattacttttctgcattttmttgctacattatgggctaaacagccttagtgggatttcttggaacttaagaactgtttacaacattgtttctatgggaaaatctatcccaaattcaaaacaactaagttacaaaagtagatctggaaatacaacacatgcataaatggttttaatttatctcatttgttaattcatccaatcattcattcatgtattaaatatagactgctcagtgttaagcactgtctcccacttgtttgattctcatttaaattctgaaggcaaatatcctctcctttgataatctgtgagaaactacataagaggaatttttatgtcaacatgaacatttaaaaatgtttcattaaagagtatatatctgttcctattaaactattatgcaggtggattttagaaatccaccccacttgtctctgaaatccctggtc

SEQ ID NO: 518011 - DNA, 548 bp, Homo sapiens
cctgggctcaagccagccccctgcctcagcctccctagtagctrggactacaggtgtgcaccaccatgcctaattttggtaatttgttttcttttttaagatatggggtctcactgtgtagcctaagctggtcttgaactcctgggctcaagcagtcctcttgccttggcctcccaaagtgctgagattacaggcatgagccaccacgtatggcctaagatagattcttattttttttaaataattactggagaaatttgagtattttttaagttatatgagtatatgccatagaatctttgggcagaattattaatatataatcattttaagtgcttaatgtagaataactttagctgttattatagttttttctaacacatttcttaaagcatattgtttcaagataacttctttctattcagtagtaaatactaacatctggactaaatttttaatgcttcttagagtatgtaacgtgttcttgctgtaactctgtagttgctatctaaaaatagttcaagttatcaaaaattgcattataaaaa

SEQ ID NO: 518012 - DNA, 548 bp, Homo sapiens
cctgggctcaagccagccccctgcctcagcctccctagtagctaggactacaggtgtgcaccaccatgcctaattttggtaatttgttttcttttttaagatatggggtctcactgtgtagcctaagctggtcttgaactcctgggctcaagcagtcctcttgccttggcctcccaaagtgctgagattacaggcatgagccaccacgtatggcctaagatagattcttattttttttaaataattactggagaaatttgagtattttttaagttatatgagtatatgccatagaatctttgggcagaattattaatatataatcattttaagtgcttaatgtagaataactttagctgttattatagttttttctaacacatttcttaaagcatattgtttcaagataacttctttctattcagtagtaaatactaacatctggactaaatttttaatgcttcttagagtatgtaacgtgttcttgctstaactctgtagttgctatctaaaaatagttcaagttatcaaaaattgcattataaaaa

SEQ ID NO: 518013 - DNA, 199 bp, Homo sapiens
ctgtcacgcaaaactatgaaattagcttaaacctctttttagagcacgtgttcaccaagattttaattcttcctttagggttactttgtctctcagttaccttcttgagattgcacayacatcaatgaagttctcttaagaattatcatcttcaatccccaactccctttctcttatgtgaagactcattgagttactg

SEQ ID NO: 518014 - DNA, 588 bp, Homo sapiens
ctgaaaggcagctgtcacgcaaaactatgaaattagcttaaacctctttttagagcacgtgttcaccaagattttaattcttcctttagggttactttgtctctcagttaccttcttgagattgcacacacatcaatgaagttctcttaagaattatcatcttcaatccccaactccctttctcttatgtgaagactcawtgagttactgacttataacctctaacactataaataatccactcaaagtcttctacctaaaaccattccttattttctgatattacccatttcttagatgtttctctaggataattataattaatgtagtaagatctgtggcacttcacagtttgccaagtgctttctaaatgtactcacttaatccttacaggctgtggaaaaggtaattccctctattttacaggtaaggaaaaaggaccgaagaactcactaccatgtcgtatcaacaaagcaagttggtggcaaaccggacctccgaaataggtcttccaactccacacggcatgctcgtcccattctattatgctcttttctaagaagggaatgtctacagttctgtcccaaa

SEQ ID NO: 518015 - DNA, 588 bp, Homo sapiens
ctgaaaggcagctgtcacgcaaaactatgaaattagcttaaacctctttttagagcacgtgttcaccaagattttaattcttcctttagggttactttgtctctcagttaccttcttgagattgcacacacatcaatgaagttctcttaagaattatcatcttcaatccccaactccctttctcttatgtgaagactcattgagttactgacttataacctctaacactataaataatccactcaaagtcttctacctaaaaccattccttattttctgatattacccatttcttagatgtttctctaggataattataattaatgtagtaagatctgtggcacttcacagtttgccaagtgctttctaaatgtactcacttaatccttacaggctgtggaaaaggtaattccctctattttayaggtaaggaaaaaggaccgaagaactcactaccatgtcgtatcaacaaagcaagttggtggcaaaccggacctccgaaataggtcttccaactccacacggcatgctcgtcccattctattatgctcttttctaagaagggaatgtctacagttctgtcccaaa

SEQ ID NO: 518016 - DNA, 549 bp, Homo sapiens
tgtcatgacagccactgaggccattctgtgtcctggcattcaccccatgaggcgtgtccatgaycacccccattttacagatgagaaagtggacactcaaggaggggagggacttgcctcatctcccacagctaccagatggcagggccaggactcgaacccaggtcccacctcaaagcccattctcttaaccattgccatcagtcagggttctccaggaacacagaaccaatagatttatttgaaggacttggcccgtgtctgcggggggctggcaggcctgaaatctgttgctggcagctccggggagtgaattctgcagccttgaggcagaattccttctctgggaaaccggtttttgctcttacggccttccactgatgtaggaggcccacccatattttcagggtaatctccttcactcaaagccaactgattgtggcattaaccacatctacaaagcacctgcattcacagcagcgcctagattagtgtttgactcagcctagccaagccaacacgtacaactacctacctcggcatctcacc

SEQ ID NO: 518017 - DNA, 549 bp, Homo sapiens
tgtcatgacagccactgaggccattctgtgtcctggcattcaccccatgaggcgtgtccatgaccacccccattttacagatgagaaagtggacactcaaggaggggagggacttgcctcatctcccacagctaccagatggcagggccaggactcgaacccaggtcccacctcaaagcccattctcttaaccattgccatcagtcagggttctccaggaacacagaaccaayagatttatttgaaggacttggcccgtgtctgcggggggctggcaggcctgaaatctgttgctggcagctccggggagtgaattctgcagccttgaggcagaattccttctctgggaaaccggtttttgctcttacggccttccactgatgtaggaggcccacccatattttcagggtaatctccttcactcaaagccaactgattgtggcattaaccacatctacaaagcacctgcattcacagcagcgcctagattagtgtttgactcagcctagccaagccaacacgtacaactacctacctcggcatctcacc

SEQ ID NO: 518018 - DNA, 493 bp, Homo sapiens
ggaattccaaggccaagtcctgcaggactggttgggtctggggatctatggcatccaagacagtgacactctcatcctctcgaagaagaaaggagaggctctgtttccagccagttagttttctctgggagacttctctgtacatttctgccatgtactccagaactcatcctgtcaatcactctgtcccattgtctactgggaaggtcccaggtcttcaccagttttacaatgagttatcccaggccagacgtggtagctcacacctgtaatcccagaactttgggaggccgaggtgggaggagcgcttgagccgaggagttcaagaccagcctgggtatcayagggagaccccgtctctacaaaataaaaaaataattcactgggtgtggttgtgcacatttgtagtctcaggcactcaagaagctgaggcagaagaatcacttgagcccaggaggctgaagctgcagtgagctgtgatcacactgctaca

SEQ ID NO: 518019 - DNA, 532 bp, Homo sapiens
tgtgcttcagatgactcaaattcttctgctctgcacatgtccttgaatggccatgaaagcactaatagtgttgatcttggggttatgaataaattttagcaagtaggaaaacttacaaataccaatttctcaaataatgggaatcaactatatacatagtyatctgagacatctctctgctcgagaccatttttcacctcaaaatagtggccagttgttaggacagagtcaggaaagcctgctcagttactgtgagatctctgttccactgtagtcttcattctatttctgcagactccaaacagtcttataataaaagttaccttcctcatttccctttgttttataggttcccatgggtgaatttggtgttacagcaagatttgaaactgtctgacctgataggggtgaaaagaatctggctggactgtccacctctcactgtgggggcagctcctggcttagaagttctagaccaggtccaaaggctgttgacagagaacccacatcttatcacaggagattccaagga

SEQ ID NO: 518020 - DNA, 617 bp, Homo sapiens
catttatatgttgatggaccattttattttttttcttctgtgatatatttgttcatatctttttcctaatgacttgttataatggtatttttccaattgattcataattctgcctggtttgtgttttggaaagcagattgataactgctttaaaagttaggttgaaaatgcacataccttcaagagcaattctactctgaggtgtatacctcagagtgtgtaactggaggtatgcatgttaatgttcaaaagcagcatttttttaaacagcaacaaaataggaatgatccaaatgtctatcaggaaaagaatggactttaaaagagaatgacattattcaacggagtactagacagcagtgaaaataaatgaattgcaactatgtcttagctatgtagttgtgcaacaaactacaccaaaacttagtgacttaaagcaacccgttatttttctagtattctttgggtgggctgkgctgttcatctgctattatgtctgggctcactcatgaggctacatgtggctgtcaggtcagtggggactgaattcagctgccatagctggtatggctggacctctcttcccacatgcttaggtttcttcacagcatagtggcc

SEQ ID NO: 518021 - DNA, 670 bp, Homo sapiens
cccagcctattttgctcttatgttctatttgctccatcattttttgctcctctttctttcatgcctttttatattaactgaacaatattcagcgttccattttaattcctttattggcattttagaagartatcttcatataatgtggtggttctctagggattataataaacatcctgggcttatcgcagtccacttagtgttaatagtcagcgttttcatgtaacataaggaaaagttgcggcaaaattgttgcgtttagtctcctgtcagagctattaatttagaatattttacacacattatcaatagtacacttaattttttattcaaagcatcagttgtttgttataaaactaaaaaaaaaagccttagtttttcacgtttatgcacatgccattcctagagcttctccttgcttcctgtagctcagaatttccgtctgttgttatctttctttagcctaaaaaatttccgtttgcatttcttgtatcttggtctgctaatgacaattgtttgaagctttcttttatctgaataaatctttcttttctcaagaattactttatctagttatagaatttggagttgacagttttcttttgaagatgtagtttcattgctttttaaagtgtcatttctgatgacaggtcatctgtctatttgtttc

SEQ ID NO: 518022 - DNA, 614 bp, Homo sapiens
tgccttatctaccaaatgtccctcccttcctcacaccctgacactcaggaatagggtagatggtgtgtccaggcagtgtcaggccacctcactttctcctttgagacgggcccagagggcctttggggtgagtgtggagctgggaacctggagcctgaggccaactgtctctccctgtgtcttggaggaaaggccacgtcccaaaaaaaaaccccagggcctgacttctgggcacacatgcagggagggagggtctatgagctgagggggacattgyaatgagactttgaaccccgttgctccggggcctggtcagtggaccatggtcagagatgacctggtcatcaggacctggtcatttgggacctgatcagcaggggcctggttagtggcggcctcctcagtaaaggcctcatcagtggggacctggtgacctagtcactggaagcctggtcagtggggggacctagtcagtggtggctttattagtggggcctgatctgttggaacataaacaatgaaaaactggttggtggggcatacacaatatatcacgggcctggtcagtgtggggccttagtggcttggagcctggtcagtgagggcctggtcag

SEQ ID NO: 518023 - DNA, 339 bp, Homo sapiens
acacacatgtcagttcaggggatagaggacatggactctgggccctgttgacccaagcagactcccatggtggtgggttgtgtcaccccasaatgtcactgttgctgagtccccatcgcctctgtgttgtggagcagttagagacacacagcagtgtctgtgagtagctctgcgtgaaggaccattttctagatgagaggcacatctcaacacagctcactgatcagattcaggtgagtgggacctgctcttttctcttccttctggcttgggaaaagtcactatcaggtggatggttttggtctctgggcagctactgagggtaatccctgaacactc

SEQ ID NO: 518024 - DNA, 339 bp, Homo sapiens
acacacatgtcagttcaggggatagaggacatggactctgggccctgttgacccaagcagactcccatggtggtgggttgtgtcaccccagaatgtcactgttgctgagtccccatcgcctctgtgttgtggagcagttagagacacacagcagtgtctgtgagtagctctgcgtgaaggaccattttctagatgagaggcacatctcaacacagctcactgatcagattcaggtgagtgggacctgctcttttctcttcctyctggcttgggaaaagtcactatcaggtggatggttttggtctctgggcagctactgagggtaatccctgaacactc

SEQ ID NO: 518025 - DNA, 318 bp, Homo sapiens
ctgatggagtggaggcctgaggaaaagcagatggcactggggctccacytccagggcagaataactgatttaccctgactggcagggagtgacgttggtggctggtccactggctcctggcacacccttgcagaggtgggtggttgctctttgagccagcttggctttgcctggcatgcacacctctcagtgcaacaaatgtgctgcaaatggagccacatagaggaaatgagcagcaggctcagaactggggtgtgtgccgcctttggggctccagtccaagcatcggggcttctacagcactgtgggcttctcggg

SEQ ID NO: 518026 - DNA, 324 bp, Homo sapiens
aaaagcagatggcactggggctccacctccagggcagaataactgatttaccctgactggcagggagtgacsttggtggctggtccactggctcctggcacacccttgcagaggtgggtggttgctctttgagccagcttggctttgcctggcatgcacacctctcagtgcaacaaatgtgctgcaaatggagccacatagaggaaatgagcagcaggctcagaactggggtgtgtgccgcctttggggctccagtccaagcatcggggcttctacagcactgtgggcttctcgggtgccaagaggcagaccacagccatcttg

SEQ ID NO: 518027 - DNA, 324 bp, Homo sapiens
aaaagcagatggcactggggctccacctccagggcagaataactgatttaccctgactggcagggagtgacgttggtggctgstccactggctcctggcacacccttgcagaggtgggtggttgctctttgagccagcttggctttgcctggcatgcacacctctcagtgcaacaaatgtgctgcaaatggagccacatagaggaaatgagcagcaggctcagaactggggtgtgtgccgcctttggggctccagtccaagcatcggggcttctacagcactgtgggcttctcgggtgccaagaggcagaccacagccatcttg

SEQ ID NO: 518028 - DNA, 318 bp, Homo sapiens
ctgatggagtggaggcctgaggaaaagcagatggcactggggctccacctccagggcagaataactgatttaccctgactggcagggagtgacgttggtggctggtccactggctcctggcacaccmttgcagaggtgggtggttgctctttgagccagcttggctttgcctggcatgcacacctctcagtgcaacaaatgtgctgcaaatggagccacatagaggaaatgagcagcaggctcagaactggggtgtgtgccgcctttggggctccagtccaagcatcggggcttctacagcactgtgggcttctcggg

SEQ ID NO: 518029 - DNA, 319 bp, Homo sapiens
cagatggcactggggctccacctccagggcagaataactgatttaccctgactggcagggagtgacgttggtggctggtccactggctcctggcacacccttgcagaggtgggtggttgctctttgagccagcttggctttgcctggcatgcacacctctcagtgcaacaaatgtgctgcaaatggagccacakagaggaaatgagcagcaggctcagaactggggtgtgtgccgcctttggggctccagtccaagcatcggggcttctacagcactgtgggcttctcgggtgccaagaggcagaccacagccatcttg

SEQ ID NO: 518030 - DNA, 455 bp, Homo sapiens
acccggtctcagaatacagataaaagtaaagaaatctcagctcagagcagtctgtttgtcactatgcagcctttgcaaccccatagctgcgtgattgggtttgtgttgctggagrtgaggagacccgtgcccaggtgttgttgcctgtctaatcagtttattttaaaatatattaatgaaatttatttcatcatactttatggcctcatacctgagtgttttttttgaattctcctttgaatagcttgtaactattcaaacctcttattggttctataattaattctttttctaattagctttttaaaaatcagaattgatattagaccaatcagttattaatgaggagatgaaattgagttgtttgtacactttatctaagatagtgttatattggctaactcaaatcagtagttcagcaaatgcagagtcagagcttcttcagcgtggaactc

SEQ ID NO: 518031 - DNA, 556 bp, Homo sapiens
aaatggccatctcctgtacctgccagttgctgacccaagaaaaactggctattttcaaggaataatgatgaaaaawtagcaactattaaaacagccactattgttatatgaataaatagaaaaaaaagagagaaaacaaatgacggataatgagcacttattaaaacctatgagtaggaagtagatgcatattattaccaaataattctttgtgaaacaaaaaagaaaaggaaaacttcaaaatgcaaagaaaaactcaattgaacattagaaaatatactgatttattacatgatgtcagaaggaacaggaaccatatgcatataaaaccaatacccattattaatttttatcaaatcttactccactgggataggaagtaatttttttcacctttacacaagcattctttaagacatgctcctgtgtggttcatggatacgtttttctcatttcagctgtccagatcattgatgaccttattgaaaggagccatgaaagtcatgatagatttttctggaaaattgtaatcaccaacagcaacacatcaactcag

SEQ ID NO: 518032 - DNA, 556 bp, Homo sapiens
aaatggccatctcctgtacctgccagttgctgacccaagaaaaactggctattttcaaggaataatgatgaaaaattagcaactaytaaaacagccactattgttatatgaataaatagaaaaaaaagagagaaaacaaatgacggataatgagcacttattaaaacctatgagtaggaagtagatgcatattattaccaaataattctttgtgaaacaaaaaagaaaaggaaaacttcaaaatgcaaagaaaaactcaattgaacattagaaaatatactgatttattacatgatgtcagaaggaacaggaaccatatgcatataaaaccaatacccattattaatttttatcaaatcttactccactgggataggaagtaatttttttcacctttacacaagcattctttaagacatgctcctgtgtggttcatggatacgtttttctcatttcagctgtccagatcattgatgaccttattgaaaggagccatgaaagtcatgatagatttttctggaaaattgtaatcaccaacagcaacacatcaactcag

SEQ ID NO: 518033 - DNA, 556 bp, Homo sapiens
aaatggccatctcctgtacctgccagttgctgacccaagaaaaactggctattttcaaggaataatgatgaaaaattagcaactattaaaacagccactattgttatatgaataaatagaaaaaaaagagagaaaacaaatgacggataatgagcacttattaaaacctatgagtaggaagtagatgcatattattaccaaataattctttgtgaaayaaaaaagaaaaggaaaacttcaaaatgcaaagaaaaactcaattgaacattagaaaatatactgatttattacatgatgtcagaaggaacaggaaccatatgcatataaaaccaatacccattattaatttttatcaaatcttactccactgggataggaagtaatttttttcacctttacacaagcattctttaagacatgctcctgtgtggttcatggatacgtttttctcatttcagctgtccagatcattgatgaccttattgaaaggagccatgaaagtcatgatagatttttctggaaaattgtaatcaccaacagcaacacatcaactcag

SEQ ID NO: 518034 - DNA, 311 bp, Homo sapiens
ttcccattaatattgggaaaatcaacmctataaaacagaaagccatagacattatttaatatttggttttgggaggtatttttagtgacactgcatacagttgtacctaataattgctaaattagagacgtaaaagtaaaacaaaggcacattgtgtttgagtaggaaatctatagacatctagctggttttcccatccagccacaaaattctaaatataatcatggaacctgcactcaaatttatgttaaataccaacctcaatgaaatcactctttcttctcattctctttgttatttatatgttgctt

SEQ ID NO: 518035 - DNA, 311 bp, Homo sapiens
ttcccattaatattgggaaaatcaacactataaaacagaaagccatagacattatttaatatttggttttgggaggtatttttagtgacactgcatacagttgtacctaataattgctaaattagagacgtaaaagtaaaacaaaggcacattgtgtttgagtaggaaatctatagacatctagctggttttcccatccagccacaaaattctaaatataatcatggwacctgcactcaaatttatgttaaataccaacctcaatgaaatcactctttcttctcattctctttgttatttatatgttgctt

SEQ ID NO: 518036 - DNA, 531 bp, Homo sapiens
gttacagttctcagcagtgaggtccagaaacaactggactggttacagtgctcagcatttgccttatttgaacacagctgaacactcagyagtgtgtgagtggcagaagtttggctgttgggattggccaggactcagctatagttacaggtgcatactccaaagttaggttatcagtctttctacctattaagttaggttgcagtttgtccacagggactcaaatctagaagtacagagtccttcccaggccatatttagttcactgtaacagttcctattatgacctaactgacagttctttttctctgaattttcctttcttctcaacagcttgtccaaatgttccattggtccctgttcatcccgccctgcagctctccttgactgattctgccctttgtggtttgcagtcctgtttctctacagcttggaccccttcaatctttccatcataggtttaactctctgttgaattcttatttgtagctacgcaaatgttaccttaagctaaaaaaattcaaagtgaaa

SEQ ID NO: 518037 - DNA, 531 bp, Homo sapiens
gttacagttctcagcagtgaggtccagaaacaactggactggttacagtgctcagcatttgccttatttgaacacagctgaacactcagcagtgtgtgagtggcagaagtttggctgttgggattggccaggactcagctatagttacaggtgcatactccaaagttaggttatcagtctttctacctattaagttaggttgcagtttgtccacagggactcaaatctagaagtacagagtccttcccaggccatatttagttcactgtaacagttcctattatgacctmactgacagttctttttctctgaattttcctttcttctcaacagcttgtccaaatgttccattggtccctgttcatcccgccctgcagctctccttgactgattctgccctttgtggtttgcagtcctgtttctctacagcttggaccccttcaatctttccatcataggtttaactctctgttgaattcttatttgtagctacgcaaatgttaccttaagctaaaaaaattcaaagtgaaa

SEQ ID NO: 518038 - DNA, 531 bp, Homo sapiens
gttacagttctcagcagtgaggtccagaaacaactggactggttacagtgctcagcatttgccttatttgaacacagctgaacactcagcagtgtgtgagtggcagaagtttggctgttgggattggccaggactcagctatagttacaggtgcatactccaaagttaggttatcagtctttctacctattaagttaggttgcagtttgtccacagggactcaaatctagaagtacagagtccttcccaggccatatttagttcactgtaacagttcctattatgacctaactgacagttctttttctctgaattttcctttcttctcaacagcttgtccaaatgttccattggtccctgttcatcccgccctgcagctckccttgactgattctgccctttgtggtttgcagtcctgtttctctacagcttggaccccttcaatctttccatcataggtttaactctctgttgaattcttatttgtagctacgcaaatgttaccttaagctaaaaaaattcaaagtgaaa

SEQ ID NO: 518039 - DNA, 619 bp, Homo sapiens
attacagatcaccacaacagattcaataataaaaatcttaaaatactgtgagaatgaccgaaatgtgacacagagacgtgaagtgagcacgtgctgtaggaacaatggtgccagtgagacctgcttattgcagggtggccrcaaaccttcaatacgtaaaacacatggtcacaaaacacaataaagcaaagtgcagtgaaacaagatgtgtctgtcttttgatagactctgacaatctctacctttgaattggtacattcataccattaacattcaaagtgattattgatatcattggattaatatctactacatttgttactgttttctattcattctcctcagtcttcattcttttgtctaccactctttttctgccttttgcagttttcattgatgattttagatgactccattttccctgtctttcttagtacgtacttctctttttaaaacttttttttaactagttgccacagaatttgcaatatacatttacaaccaattcaagtccactttcaaataacactatccaactatcccacaaataagactacctgcttaacaaacaaaacacctaattcctcagtaacatttacaaccaattcaagtccacttt

SEQ ID NO: 518040 - DNA, 619 bp, Homo sapiens
attacagatcaccacaacagattcaataataaaaatcttaaaatactgtgagaatgaccgaaatgtgacacagagacgtgaagtgagcacgtgctgtaggaacaatggtgccagtgagacctgcttattgcagggtggccgcaaaccttcaatacgtaaaacacatggtcacaaaacacaataaagcaaagtgcagtgaaacaagatgtgtctgtcttttgatagactctgacaatctctayctttgaattggtacattcataccattaacattcaaagtgattattgatatcattggattaatatctactacatttgttactgttttctattcattctcctcagtcttcattcttttgtctaccactctttttctgccttttgcagttttcattgatgattttagatgactccattttccctgtctttcttagtacgtacttctctttttaaaacttttttttaactagttgccacagaatttgcaatatacatttacaaccaattcaagtccactttcaaataacactatccaactatcccacaaataagactacctgcttaacaaacaaaacacctaattcctcagtaacatttacaaccaattcaagtccacttt

SEQ ID NO: 518041 - DNA, 619 bp, Homo sapiens
attacagatcaccacaacagattcaataataaaaatcttaaaatactgtgagaatgaccgaaatgtgacacagagacgtgaagtgagcacgtgctgtaggaacaatggtgccagtgagacctgcttattgcagggtggccgcaaaccttcaatacgtaaaacacatggtcacaaaacacaataaagcaaagtgcagtgaaacaagatgtgtctgtcttttgatagactctgacaatctctacctttgaattggtacattcataccattaacattcaaagtgattattgatatcattggattaatatctactayatttgttactgttttctattcattctcctcagtcttcattcttttgtctaccactctttttctgccttttgcagttttcattgatgattttagatgactccattttccctgtctttcttagtacgtacttctctttttaaaacttttttttaactagttgccacagaatttgcaatatacatttacaaccaattcaagtccactttcaaataacactatccaactatcccacaaataagactacctgcttaacaaacaaaacacctaattcctcagtaacatttacaaccaattcaagtccacttt

SEQ ID NO: 518042 - DNA, 619 bp, Homo sapiens
attacagatcaccacaacagattcaataataaaaatcttaaaatactgtgagaatgaccgaaatgtgacacagagacgtgaagtgagcacgtgctgtaggaacaatggtgccagtgagacctgcttattgcagggtggccgcaaaccttcaatacgtaaaacacatggtcacaaaacacaataaagcaaagtgcagtgaaacaagatgtgtctgtcttttgatagactctgacaatctctacctttgaattggtacattcataccattaacattcaaagtgattattgatatcattggattaatatctactacatttgttactgttttctattcattctcctcagtcttcattcttttgtctaccactctttttctgccttttgcagttttcattgatgattttagatgactmcattttccctgtctttcttagtacgtacttctctttttaaaacttttttttaactagttgccacagaatttgcaatatacatttacaaccaattcaagtccactttcaaataacactatccaactatcccacaaataagactacctgcttaacaaacaaaacacctaattcctcagtaacatttacaaccaattcaagtccacttt

SEQ ID NO: 518043 - DNA, 604 bp, Homo sapiens
tccctaccatccttccattccattccttgtattagtgttactcatttcaattgtatataagcatacataatatatctgtatttgttattgtctatgatcttcttggtyagatcaattaagaataaatacataggtttttattgtaccacaattctttctttaatgctctttttaaaaaaatgttgatccaggtttcagttatatatcttttgtttccctaaagaatttaatttaacatttcttgcaagacaggtctcctggcaacaagtttcttgaatttttatttttctgaggaaggccttaattctccttcacttttgaagggtggtttcagtgggtacagaaacttaggttggtgggttttttctgtcaacattttgaatttttcatttcactgtcttcttactttcacagtttctgaaatgttgaatgcagttcttatctttgtgtctctgtaggtaaggtgttttctgccccacctctggtttctttcagagttttcctttatcttttatttcatatagtttgaaaattatatgtccaagtgtaggttgttggtatttattctgcctggtgttctcagagcttcctggatctttggttt

SEQ ID NO: 518044 - DNA, 604 bp, Homo sapiens
tccctaccatccttccattccattccttgtattagtgttactcatttcaattgtatataagcatacataatatatctgtatttgttattgtctatgatcttcttggtcagatcaattaagaataaatacataggtttttattgtaccacaattctttctttaatgytctttttaaaaaaatgttgatccaggtttcagttatatatcttttgtttccctaaagaatttaatttaacatttcttgcaagacaggtctcctggcaacaagtttcttgaatttttatttttctgaggaaggccttaattctccttcacttttgaagggtggtttcagtgggtacagaaacttaggttggtgggttttttctgtcaacattttgaatttttcatttcactgtcttcttactttcacagtttctgaaatgttgaatgcagttcttatctttgtgtctctgtaggtaaggtgttttctgccccacctctggtttctttcagagttttcctttatcttttatttcatatagtttgaaaattatatgtccaagtgtaggttgttggtatttattctgcctggtgttctcagagcttcctggatctttggttt

SEQ ID NO: 518045 - DNA, 604 bp, Homo sapiens
tccctaccatccttccattccattccttgtattagtgttactcatttcaattgtatataagcatacataatatatctgtatttgttattgtctatgatcttcttggtcagatcaattaagaataaatacataggtttttattgtaccacaattctttctttaatgctctttttaaaaaaatgttgatccaggtttcagttatatatcttttgtttccctaaagaatttmatttaacatttcttgcaagacaggtctcctggcaacaagtttcttgaatttttatttttctgaggaaggccttaattctccttcacttttgaagggtggtttcagtgggtacagaaacttaggttggtgggttttttctgtcaacattttgaatttttcatttcactgtcttcttactttcacagtttctgaaatgttgaatgcagttcttatctttgtgtctctgtaggtaaggtgttttctgccccacctctggtttctttcagagttttcctttatcttttatttcatatagtttgaaaattatatgtccaagtgtaggttgttggtatttattctgcctggtgttctcagagcttcctggatctttggttt

SEQ ID NO: 518046 - DNA, 596 bp, Homo sapiens
agagatgttctttctaagccaaaggaaaattgagtacaggaagccctgaactcatactgtagcagtacattctatcagggaggaagaacgggtcattcctgtcagctccagattggaaaatcccaaggaagaactcaggaacctctgcttagattatgtgttcatccttccacaaacactgcagctaggaggatggctgcatgacccccctgccttgggcctgagactggtcaatgcacagggcttgtcactgagggacaggactggccctggatgaaataagcagtgctccactgccaagcagcaaaatgaaatgactgacagaaagttttagttatctcctgtggtaaacaaaataagaatccccccaaagatgtacacatctcaatacccagaacttgtgaatgtgttacattacatggcaaagaggtattaaggttgaagatgggattaatgttgctaatcagttgattttaaaatcgggagattatcctggattccaggctgacctgacctgatgtagtyaaagggtctttaagagtgaagagcagctactcagggggctgaggtgggaggatcccttgagcccagggagt

SEQ ID NO: 518047 - DNA, 576 bp, Homo sapiens
tgatagagacatgtccacccgtccaaccacccatccagtgagcattggttgaacagattgtgttgaatgcaacaatggaataatgtcaccaggtttatgggtgatgatggtggcagattttcatgatagagaggtcaccccagagggaaaaacagtctctggattacagacacattttcatttgctggggaaaagctgccccaggaagcttctcagtgtagctgaccctgcccccaactgctcttcttacagcattttagtatgcctgttagttagcagaatgatgtacattttaccccataggtcctttttaattcctcatttgcctcccrcccttcctccttcagagtctctaatgttcattatcccactctatatcccttagcttacccattgcttagctccacttatgggcgagaacatgtggtatttggttttccattcctgagttacttcacttagaataattgcctccagctccatccatccaagttgctgcaaagtacattattttgttcttttttatggctgagtagtatcccatggcatatatatgccacatttattttatttagt

SEQ ID NO: 518048 - DNA, 624 bp, Homo sapiens
caaatgttacagggtatgttggcagaaaataaaccccaaaaatttcatgaaaccttaataatttgacttgagattaccctttcaatgatgtcagaatttgtcctacttctttggaggttatagctttgtgtattactatttttartcattgtactctgtatcaattaaagcaaacctagcaatagtaacagataaacttgtactaccagtcagcccactaaagtgtctttagagtccaattggctgctggaatatgagaggctctgctccacacagtcacttagggatcgaggcttctcccttccagtgactgtggaagcccctaatatctcaaaggcagtctggcttcgttgcaccttgggccaatagatgaagaaagagtattagaaatattgcatgggaggatattagggacacacttggaactccacataggaatgtgccagatagttcattaacagggaccaaatcataaatcacatactctgctcgctgcaatagaggccaggaaatttacctgtatgtccaggaagaaagggaatcagatattgtggacatatagcaagccctaacatacactcattacattttgatagtcctcttcaattgcaaatccagcttcca

SEQ ID NO: 518049 - DNA, 607 bp, Homo sapiens
gtgtgctgaagacagctcagggtactgcatgcaaaggtggtttctcaatgaagtgggtaaagcacttctgccctgaaaatggcttcaggaagaaaacagttagaggtcacctctatttgtctgctccaattaagctcaaagtaaaaacacaaatagaagagttggatgcccactgacaaattaaactgttaaacatacccataactttacatttcagtgtagtatatagctagtgaaggaacattttggtgggaagcaataaggccttttaactaatcttacatttggcatggatattaatcagactaacagaaagtcatggaagtttcatccgctctcttttcctgatcactgggcagcacaggttataaccactcttgttttctagctgatcgcttttcaacaaacaggatctatggcctgcgatatgtaaactgaagtgggggttgggaaagaacatagattatagcgtctagaaattcagttcgctggacatctgcagagatctgtgcatcatgctgatattcacatttccaccccacsgttttgggaagtaagagaggaatccacgcatccaggctttcagagatctttatgctgggcttct

SEQ ID NO: 518050 - DNA, 611 bp, Homo sapiens
tctgctcctaacaagaagttttttctacaatggaagttcmatccaacatatagatttagcatccctcatctaaaaattcaaaaccctttgagtgccatggtggaaaattccacacctgacctcatgtgctggtcagtcaaagctttgtttcgtgcagagaattattatttttttcccttcctatcttcaatgtacagaattactaaaaatatcatataaaattaccttcgggctatgtgtataagagatatatatgaaacataaattaatttcatgtttagacttgggttccatccccaagttatctcattttgtatatgcaaatattccaaaatctggaaaaatacaaaatatgaaacactctggtcacaagcatttcagataaaggacactaaacctgcatcactttgccaactttgaccctttctttctattaccaaacaccacctcatgaaccaaaagaatttccactgcccttgaatttccttgaggagatttataaaacaatgtgccttttatatacttgtctaaatgttaaaagcataaagtaactggttgtaaagatgaaaacaagtcaatactacactaccctgtgctcccaaagcaccttg

SEQ ID NO: 518051 - DNA, 612 bp, Homo sapiens
actcaataaattttagccatgattattgaaagggagtatttcttattcattgtgtatgccagctctgagagcaaggcctgggacatagtacgtatgyagtgaatgctcactgatgcacgtaccaaactgatcacagtgtcttttttttttttctttctttccttccttccttctttcttcctttcttccttcttttttcctttcttcctttcttccttcttttctcctttcttctttccttccttccttcctttctctctctctctctttctttctttcagagtctcactctgtcacccaggctggagtgcagtggcacgatctcggctcactgcaacctccgtctcccaggctcaagcaattctcctgcctcagcctcctgagtagctgggactacaagtgcgcactgcaccaccacacccagctaatttttgtatttttagtagagacggggtttcaccatgttggtcaggctggtctcaaactcccgaccttgtgatccgcccgcctcagcctcccaaagtgttgggattacaggtgtgatccaccatgcctggcctgatcacagagtatctatctgatgatacatggggtttctccaggccccacccc

SEQ ID NO: 518052 - DNA, 612 bp, Homo sapiens
actcaataaattttagccatgattattgaaagggagtatttcttattcattgtgtatgccagctctgagagcaaggcctgggacatagtacgtatgcagtgaatgctcactgatgcacktaccaaactgatcacagtgtcttttttttttttctttctttccttccttccttctttcttcctttcttccttcttttttcctttcttcctttcttccttcttttctcctttcttctttccttccttccttcctttctctctctctctctttctttctttcagagtctcactctgtcacccaggctggagtgcagtggcacgatctcggctcactgcaacctccgtctcccaggctcaagcaattctcctgcctcagcctcctgagtagctgggactacaagtgcgcactgcaccaccacacccagctaatttttgtatttttagtagagacggggtttcaccatgttggtcaggctggtctcaaactcccgaccttgtgatccgcccgcctcagcctcccaaagtgttgggattacaggtgtgatccaccatgcctggcctgatcacagagtatctatctgatgatacatggggtttctccaggccccacccc

SEQ ID NO: 518053 - DNA, 612 bp, Homo sapiens
actcaataaattttagccatgattattgaaagggagtatttcttattcattgtgtatgccagctctgagagcaaggcctgggacatagtacgtatgcagtgaatgctcactgatgcacgtaccaaactgatcacagtgtcttttttttttttctttctttccttccttccttctttcttcctttcttccttcttttttcctttcttcctttcttccttcttttctcctttcttctttccttccttccttcctttctctctctctctctttctttctttcagagtctcrctctgtcacccaggctggagtgcagtggcacgatctcggctcactgcaacctccgtctcccaggctcaagcaattctcctgcctcagcctcctgagtagctgggactacaagtgcgcactgcaccaccacacccagctaatttttgtatttttagtagagacggggtttcaccatgttggtcaggctggtctcaaactcccgaccttgtgatccgcccgcctcagcctcccaaagtgttgggattacaggtgtgatccaccatgcctggcctgatcacagagtatctatctgatgatacatggggtttctccaggccccacccc

SEQ ID NO: 518054 - DNA, 547 bp, Homo sapiens
tttgtctttctgtgtctggcttatttcactcagcgtaatgtcctccagttccatccatgttgttgcaaatgataggatttcatgctttttatggttgaataatagttcattgtgtatatgcgccacattttcccgatccattcatctgttgttggatgcttaggtggattccatatcttggctattgtgaataatgcygcagtaaacatgggagtgcagatatctgcaaggactacttttgcctaacatcattactccactctgtctggtatataaccttcgatatgtgatcgctgaatgaataaacaaagagatgaatgctctccaaaatctgccttagctccagccttcttcattgtttctggagctttagggcaggtaagaaggttccaggtgtgtctccagtacttctgagacatcagccttatctctgggactcccaagatcctaagtccacaaatccacctggtaggcaacagctcagaggcagcaggagctgggagggcaggaaggcaagcggtgtacttgccaatcccctaccaagctg

SEQ ID NO: 518055 - DNA, 312 bp, Homo sapiens
ttgcctaacatcattactccactctgtctggtatataaccttcgatatgtgatcgctgaatgaataaacaaagagatgaatgctctccaaaatctgccttagctccagccttcttcattgtttctggagctttagggcaggtaagaaggttccaggtgtgtctccagtacttctgagacatcagccttatctctgggactcccaagatcctaagtccacaaatccacctggtaggcaacagytcagaggcagcaggagctgggagggcaggaaggcaagcggtgtacttgccaatcccctaccaagctggta

SEQ ID NO: 518056 - DNA, 613 bp, Homo sapiens
tcccattcatgaggcttctgccctcatgacccagcacctcccaacagcctcatctcctaacagcagtatcttgggtattaggatttcaacatatgaatttgcaagaagcataaacattccatccagggatggaattgtatggaggatgttgaggatgcatggaggggaggaagaatgaaaatcttgggatcactgatgctaacagtcagccactggaatggtcctctggactttgtatatggtggcttccaaatctgtcatccatgtccattgatccattgatggacacttaggttgattccatgtcttggctgatatgaataatacaatgaacataggagtrcaaatatctctttgacttactgattttatttcctttgggtatataattcagaagcgggattgctggatcaaatggttctatttttagttttttgaggaacctccatactgttttccatagtggctgcaccaatttacattcccaccaacagtgtaaaagagttcccttttctccacaccctggccaacattcacgatctttttttgataatagcctttctaacaggtgtgaggtgataaatcactgtggttttcatttgcatttccctga

SEQ ID NO: 518057 - DNA, 613 bp, Homo sapiens
tcccattcatgaggcttctgccctcatgacccagcacctcccaacagcctcatctcctaacagcagtatcttgggtattaggatttcaacatatgaatttgcaagaagcataaacattccatccagggatggaattgtatggaggatgttgaggatgcatggaggggaggaagaatgaaaatcttgggatcactgatgctaacagtcagccactggaatggtcctctggactttgtatatggtggcttccaaatctgtcatccatgtccattgatccattgatggacacttaggttgattccatgtcttggctgatatgaataatacaatgaacataggagtgcaaatatctctttgacttactgattttatttcctttgggtatataattcagaagcgggrttgctggatcaaatggttctatttttagttttttgaggaacctccatactgttttccatagtggctgcaccaatttacattcccaccaacagtgtaaaagagttcccttttctccacaccctggccaacattcacgatctttttttgataatagcctttctaacaggtgtgaggtgataaatcactgtggttttcatttgcatttccctga

SEQ ID NO: 518058 - DNA, 613 bp, Homo sapiens
tcccattcatgaggcttctgccctcatgacccagcacctcccaacagcctcatctcctaacagcagtatcttgggtattaggatttcaacatatgaatttgcaagaagcataaacattccatccagggatggaattgtatggaggatgttgaggatgcatggaggggaggaagaatgaaaatcttgggatcactgatgctaacagtcagccactggaatggtcctctggactttgtatatggtggcttccaaatctgtcatccatgtccattgatccattgatggacacttaggttgattccatgtcttggctgatatgaataatacaatgaacataggagtgcaaatatctctttgacttactgattttatttcctttgggtatataattcagaagcgggattgctggatcaaatggttctatttttagttttttgaggaacctccayactgttttccatagtggctgcaccaatttacattcccaccaacagtgtaaaagagttcccttttctccacaccctggccaacattcacgatctttttttgataatagcctttctaacaggtgtgaggtgataaatcactgtggttttcatttgcatttccctga

SEQ ID NO: 518059 - DNA, 613 bp, Homo sapiens
tcccattcatgaggcttctgccctcatgacccagcacctcccaacagcctcatctcctaacagcagtatcttgggtattaggatttcaacatatgaatttgcaagaagcataaacattccatccagggatggaattgtatggaggatgttgaggatgcatggaggggaggaagaatgaaaatcttgggatcactgatgctaacagtcagccactggaatggtcctctggactttgtatatggtggcttccaaatctgtcatccatgtccattgatccattgatggacacttaggttgattccatgtcttggctgatatgaataatacaatgaacataggagtgcaaatatctctttgacttactgattttatttcctttgggtatataattcagaagcgggattgctggatcaaatggttctatttttagttttttgaggaacctccatactgttttccatagtggctgcaccaatttacattcccaccaacagtgtaaaagagttcccttttctccacaccctggccaacattcaygatctttttttgataatagcctttctaacaggtgtgaggtgataaatcactgtggttttcatttgcatttccctga

SEQ ID NO: 518060 - DNA, 544 bp, Homo sapiens
agatgccacgagtgctgaatctgggatccatcacagccttgccgtccggaaagcaaataaccccaaatgagaagattggatttagtgtggtctggagatatttactacaaaggcctaagccctggctccctctctcccttgggctttgcatggggaaaattctagtgtccccagatgcattccttctaaagaaaattttccccaaatggaaatagattcatcatttttgctgattataaaattaatgtgtgactgctgcaaaaaaaaaaaaatrcagtcaatacagagaaataggaggaagagaataaaaagcactcaatctcaccagccagagcaactattgttagtctgatgtgttatcttttcagagctttcctctgtgcatatgcacacatacatgtacgatacatatcctccctccctctctctctcccacacacaccctcacacccacacactctctctgatcctcttgtgacatctgtattcttctcttccactcctaagatcagcgcctgtgctctccatgtagactaagcatggc

SEQ ID NO: 518061 - DNA, 612 bp, Homo sapiens
tgtgtgtctcagttttctcatctttaaaataacaatcattataccaacttacaaggttgatatgaggattatgtaatttatgtgaaattcttagcacaatattcggctaataattaagctaataatgaatgttaccgattataatttgtacaatacaaccaagaaatgttttgtttccctgcccatctctacctgttcttacttctgtttgttttcttttttttttttttttgagacagagtctcgctctgtcacccaggctagaatgcaatggcaggatgtcagctcactgcaacctccgcctcctaggttcaagtgtttctcctgcctcagcctcctgagtagctgggattacagatgcccgccaccacgcccagctaatttttgtatttttagtagagatggggtttcaccatgttggtcaggcaggtcttgaactcctgacctcaggtgatctgcctgcctcggcctcccaaagtgctgggattacaggcatgagccaccacgcccagcctacytctgtttgttttcatggccttcaggtctctttataacttagccctattctccacattagcccctatcctgcttcacttcaacatacactgacag

SEQ ID NO: 518062 - DNA, 624 bp, Homo sapiens
ttcgaggatttagatatgaatttaattacaaaacctatttttcacctaggtatttatttaacgtgagtaagtgaatgtgtatggacatgtatttacaaccaatatataacattaatttatgtgtaacatttatatgtgtatgcatatgaatatataattggtcatatttagattttaaatccttaataggtagagactacattatacatattataagtatttaatatgtgtgtgatagagaaacaagtaagtcacagagatggctgagaacagtaacctctgatactcaaatagatagagcataaatattttcacacctgtgtatttccaaaggmacctttatttctactaactgtcatttcgtgagttctacttcatcttcgtaaaatatatagttggcctataatatagatgtatatttttaaaacttgtaagtattacaaccccacagaaatcattataactgtctaatattttttctaaaaatagggcctactgtattttatattttaataaaacagatatttttcaacttttctctctgctagtccttatccccataatgcctaataaaaactggcatttagatacagattgtacattatgcagaagataacagatgag

SEQ ID NO: 518063 - DNA, 626 bp, Homo sapiens
tgtaagcaattgaaacacaatggccatatgtgtacttaaacataactaaacatagaaaaggtagagtgtaaatacaagattctaatcttttgggactaccrtcatatatgtggttcattggtgctggaaacacagttatgcagcacgtgacttgactgtgtgtataaagaaataaaatatatgtatatgcatactatatatacatatataggtgcacacatatgtatatatacatatatagtctgtaaatccatatataaaacatacataagcacaaatatatgtacaatttcaagaggtttatgaaaactctaaagcccatatcataggtttttggttaagaatccctaacctagaataatggcactctctttgttgattctataatacatgtatattatagatattaaatgataagaaattactacttaatgaagtgatacttaaccttactgagtattctgatacatcttactctgttccatactagtctgttccattttattatattctatactatgctgttctggtttttaaaaaacaaacaaagctagtttaatcaactactgtatactgtcagatttcatgctccaagattggaaaacactgctgtagagtatgacagc

SEQ ID NO: 518064 - DNA, 590 bp, Homo sapiens
tgcttcaggacttgtactacagaaggcaagataatgctatagctgttagtaacctaagggagacagcccttagtggggaaagtgtagagaacaatagtgctacagaaacaggagaaatcaaagycctcagacctccccctgcttgcctagagacgtctggtgcactttcaaggagatatcatcccctacaaagctgttcctggtgtttattttaagtagactaatttgcatttgcataaaaatgaatggtagatgaggaaaacatgagatctgcacagtgctacagttctttgaaataaaagaatcttgatactgcttgtaaggaaaagtggttccttagcaaaaaacgtaaattaagtagaaaaagaaagtgtaattcaacagcaaatttatgcatttacttatattgaccctgtttccaaaatgatttgagatgacttcaaaaggaattaaggatttttttcaagttaatttggaattaagtgcattagtgatcaaacacttagaatcatagaagagtagtttcagtggtaactctggtgtgcacaagaataatggactgctgggtccaaggtccttagactcaaaca

SEQ ID NO: 518065 - DNA, 695 bp, Homo sapiens
gaacactatgcttgcctaaaatttttgatggataggtttgttttatcctcgggatgtattgtctgagactgacatcatctagcctctggggctccttaaaattttgccatgtattctggagcactgattacctatttgatccttgtgtttgttcaacgcttatggcctggcatgaaatacagagaatggggagtaaaacgaataattaaattttccctgaagaacattaacaatgcaatttccagaaattggaggggttagaagcactgagaaacttttgatttgtcacacattctagataatctaaatatgaaaattagaacataaaaagcaatatcgtatttttctatacagaagarctgcaagaagtaaagggtaatttgctgcatttgtagtgggagcaaaaaggtatgtaatgaaaaccttcttttagaagctccaaagtagagaatgggtgtagccaattgccaacagggaacacaaaattgattgtggcttgtcaaattggaggcatataatgcatgatgtagtagcgactgcacaagtctccctcattgtaaaacctgatcacactcctcatgtaatctatatttaaatcttttgggaatcatgacacaaatatgcccacccccaattgttaaattgtcaacttacactgagcatactctagctgtcagactgatccgtgggcgcca

SEQ ID NO: 518066 - DNA, 524 bp, Homo sapiens
aattctttggaattcatgtaaaagaaatatggattttgaaaattttgagaaaaaaataaaacattataactctatgattacagagatatgatctgcatgaaatcctagtagaattaacaaagaatgagtgttaataagagaactgaacaagtttgctaaacatgaggtcaactttctcaattcttcagcattcatttaagtaagtaatgccaaccaaaacaaaaaataatgtaatataaaacaatagcaacaaaattttaaaagtatttagaaattaaccttggaaagaaatctataaacctttataatagaaattttaaaattgtaataaaggaaattaaggaagacctaaataaatgtggaaatctattatgtctttatttaaaaatataaaagtttttattccaaaataaaygtataagttcaatgtaatttcaataaagattcagtagtacctttgaggaactgaacgtatatacgtatatacaaaatacacagatacaaaaatatctgtgaaaaagtca

SEQ ID NO: 518067 - DNA, 558 bp, Homo sapiens
ctgcctatctcttgtcccatacctagagagaacaagttttggttactgctttcttttttctatgacatttggcttttcaagttgccatttgcttcatgtctaattgtgggattattataaatttttgaataatcatcattgcactttaaaaaattatttaaacatagttatcttcagttctttgaccatatttataatggtagctttgtcatttttgttggctaaatcctacctctggtccccctcagagacagttgacaaatkctttttttctgtctttgggccataactcccatttttcttacttatctgataagttttcttgaaaacaagatgatttaaatactatattgtggcaacactggatcctgacattttccctttgaggagttttgtttttgcttttgttttcttgtttttctttcatccttattctatctttttccttctttctgttttcctcttttactttttttctttatttttttcttttggtatcttacctctctggactaaagctgtggcatctgcagtccctatcattcttgtggtgtattt

SEQ ID NO: 518068 - DNA, 558 bp, Homo sapiens
ctgcctatctcttgtcccatacctagagagaacaagttttggttactgctttcttttttctatgacatttggcttttcaagttgccatttgcttcatgtctaattgtgggattattataaatttttgaataatcatcattgcactttaaaaaattatttaaacatagttatcttcagttctttgaccatatttataatggtagctttgtcatttttgttggctaaatcctacctctggtccccctcagagacagttgacaaatgctttttttctgtctttgggccatamctcccatttttcttacttatctgataagttttcttgaaaacaagatgatttaaatactatattgtggcaacactggatcctgacattttccctttgaggagttttgtttttgcttttgttttcttgtttttctttcatccttattctatctttttccttctttctgttttcctcttttactttttttctttatttttttcttttggtatcttacctctctggactaaagctgtggcatctgcagtccctatcattcttgtggtgtattt

SEQ ID NO: 518069 - DNA, 533 bp, Homo sapiens
ttccagaaatgttagcagggacacatggcagagcagggaaaactggagagaactcttgatgataaaaagcagtccaggatcaaaatgtctgctgtctgtcatatgcctgaaaaaagtggragttgatgaaaggaaagccagatagaaatagatgctggaggttaattctctcataatcatatgtgcagatctctaagcactttccaaaacacatttgctgaaaggattaacctaattctgttcccagtcaggctatatgtgggctgtatggtaaactatgtagcccacactgatcccatcaatgaggtttagagacttgtctcctcttcttgtttgaaaattagactatattactcttctccttttctgaactccctttctcattcatgtgctttttgtattatgtgctcgttttagggattctcctaacattaaatgttacttttttaaaagagaaaaactgtgtgctttctttgactttgctctagcagctaatatagcattgaagaaagagtttttgctcaatgaatatg

SEQ ID NO: 518070 - DNA, 644 bp, Homo sapiens
ttcacattctcagttatgatatctgatagcctcaaattaaaaagttgaattgtgaaatgagatgacagagcaatcaacctcataaacagcttgctgctgagtaatccaaatttttaattggtcaaacaaagtagcacttagtgttggaaaatatggaagacagtctataattagaacagttaacataatgatgattcttatatagcagcgacacatcaatatttaaccacaaggaaagaaaacaattttaaactggtgamtgaagggataatcctttgggaattctttagggttttttttttaaatagttcctttatgacatagttggcaaatataatattgttaatattgcagaaattaaagcagagaagataaagagcagtgtcttttgatttttgcatcgttttctaagagaggaaaataaatattgggaaagtacaagtttttaaaaaatgtattagtccagttgtttttgaagatattcactgtggttgaaaaactagattttaactaaaaagagatgcattacatttaaattctgttatcctgtattgtggtttctaaaaccttgcaaatatattgaagattgtgattagttctttcaattccactggagaaggagcagaaggactccaaataaatca

SEQ ID NO: 518071 - DNA, 637 bp, Homo sapiens
gtatgagaccagaataggcagaaaatgcaagggcagcaaagagacaggttatttaagtataaaggcaacgtgtgattttataatgcaaaaatgcatctaaataatataaagtaattttctttaataaacaaagtctgaaataagccctcactaaaatattttagagatatattgctatgctttaacgtaatgcactgaacataatttaagctattttaataatccaaggaattcattttaaaatattatttactctattttattattttcattcccatagtaaatattgaaatagtgttacaccttttaaactaaatggcctgagatgacctagataygtaggcctttaaaatttttgtactaattttgtccagttttatgtgccgctattaactgacagctacttgttctttcttctatctttgggaactcgcacacatttttttggtcctcccccacctcctaatgtatatctaattatattatttaatctttctaatctcttacagactatgaaatcaaatatatcatatatttgttataaattttcaatagtagaaaaaataatgatttaaataagagataaaatggctcctttttcagaatcagcaatagtatgacaggtatatgaaaaggt

SEQ ID NO: 518072 - DNA, 637 bp, Homo sapiens
gtatgagaccagaataggcagaaaatgcaagggcagcaaagagacaggttatttaagtataaaggcaacgtgtgattttataatgcaaaaatgcatctaaataatataaagtaattttctttaataaacaaagtctgaaataagccctcactaaaatattttagagatatattgctatgctttaacgtaatgcactgaacataatttaagctattttaataatccaaggaattcattttaaaatattatttactctattttattattttcattcccatagtaaatattgaaatagtgttacaccttttaaactaaatggcctgagatgacctagatacgtaggcctttaaaatttttgtactaattttgtccagttttatgtgccgctattaactgacagctacttgttctttcttctatctttgggaactcgcmcacatttttttggtcctcccccacctcctaatgtatatctaattatattatttaatctttctaatctcttacagactatgaaatcaaatatatcatatatttgttataaattttcaatagtagaaaaaataatgatttaaataagagataaaatggctcctttttcagaatcagcaatagtatgacaggtatatgaaaaggt

SEQ ID NO: 518073 - DNA, 598 bp, Homo sapiens
agtgcttgggacaggacgccagtgcccacaatataaatatatatgtatcttatatagtaaacatatgtatatatatgtacgcacgtgtatatatayagatggtctctgacttgtaatggcttaacttataatatttcaactttatgatggtgcaaaaccattgcaatttcaacaaaatatacagtgttcaataaattacacgggaattcaatactttattctaacataggctttgtgttagatgatttcacccaattacaggctaatgtaagtatcctgaacatgtttaaggtaggctagcctaaactataatgtgcaataggttaggtgtattaaatgcattttcaactgataaactcattgtaaggtgaaaatattgtaagtcaaaaaagtatttaatacacctagcctaccaaatatcatagcttagctttttaaatctttttaaaaagatgttcatatgcaccagctcatttaaaccttaaaactgccattctgtgagatggccaaggagccattattacttccattttatagctgagaaaactcatggagttgaagtgaattgcccagagtcctaatctaaacctagtaagca

SEQ ID NO: 518074 - DNA, 519 bp, Homo sapiens
tcaaatctactactatgaggcaaataagcttaattaaataaaagggacaattacacaactgctttagagcattaaatgaagcttccaccttgataatttttataaaatgagcttccttagtcacagcatattatatagcattataatatccaagttataatcatgtattgccatggttataaaatattaaaaatcaggccgggcgaggtggctcacgcctgtaattctagcactttgggaggccgaagtgggtggattacctgaggttgggagttcaagaccagcctggccaacatggtgaaacctcatctctactaaatatacaaaaaattagccgagtgcartgctgtgcacctgtaatccccgctactctggaggctgaggcaggagaatcgcttgtgcctgggaggcagaggttgcggtgagctgagatcacgccactgcactccagcctgggctacagagtgagacttcatctcaaaaaacaaaaaagcaaaaaattaaaaatctatataacac

SEQ ID NO: 518075 - DNA, 658 bp, Homo sapiens
ctgtgtgaccttggacaagttacttgtcttctcaatttgtgtccacatttgtaaaatgggtaatggcaatagtgtctcttatattattgtctcttatagtgtctcatgttattaggcagagtacctaatatgagagcataggagatgatagctgttggggcattattaataatagcttgtttgcctcctttgaaagtaggctatgtttgtgatttcttagaaggttattagaaatctagtcttttgaatgtggagttgtagtttatagtcaaaagagacctcagccttttaaccaactttctgtgtaaacatgaaaattccgggctggatttgttccactgtgaattttagctcacacttgcccaactggattctcagtcagtataatttaaaaatagggtttggtttttcttctccaaacacccttaaggttacaaaaaaaagcaggatctgcttcctgccctcaaggagtttatagcctagtaaattgaaattgggagaagtacttgcccttggagatgatgaaacttgagttagggktcttgaaggcaaaatcgtaggtaaggcctggagctggagcttggtaattgacagtgtttatggggttgggggcaaggtggcaggaaaatgtgagcacaggcgtcaaagtccttgtgtg

SEQ ID NO: 518076 - DNA, 623 bp, Homo sapiens
gtacttgcccttggagatgatgaaacttgagttagggttcttgaaggyaaaatcgtaggtaaggcctggagctggagcttggtaattgacagtgtttatggggttgggggcaaggtggcaggaaaatgtgagcacaggcgtcaaagtccttgtgtgcctgggaagtgaaaggaggaggggcagctcctggtggatggccagggtgtggctagatggaggaggagggctcccaattgtggtgggaagaatgctgcacagtgggaagggcatctgctggaagccctacccatgtcagggaatgtctgggcctcagatttttattttctagaatgaagatacttaccccccaattgctgagatatttgaataaaagtatatgtgaaggattttgtaattatagaatgtcctacaaatatgagtagttcgtttgctacttttttggcgaagaaaaatattgggatgcatgaataatatctacctaaggtacctaaggttgtattcatcccatttattgaatgccaaggatataccagctactgctccagatgttgtattcagggaacagaagaagagtccctgtgcccatggagctaacagcattctaggggaggaaagatgggaca

SEQ ID NO: 518077 - DNA, 568 bp, Homo sapiens
tgtgtctataatgctaagagacacacagaggagaattcagcctcttcattctgccggagtcaggtgggcccatgcttgccatttgaggctttcaccacagtggtcactatgccttcaggaatgtgatttcagccacacagacctaaacccatgtgtgagttacgaacagactctgtaccctatgtttatgtttattcaacaggacagagagtcactgtgattgcctactttgaaatggttcagagccagtcactgcctttcctacaggcatataccaaatctacattcaccacaaaaactgggcttgtgaaaggtaggcatacattaatattctttcaaccacaagcagtgagaaagatgaccttataaaggaggaaggaataaatcataacgcattctaaactgaactggattctgaacagtgacaattgttctccatcctggaggataaaatttttactataagccagtatgttctttaaaagctggcaaactaatttttaactcatgatttacttayaatgcttattaatattgctgatttattaaaatgacatactcaagacca

SEQ ID NO: 518078 - DNA, 555 bp, Homo sapiens
tttgtgattattataagtgagactttgtgacattgatctatattttcaacacccatctttggcatggactggctgatcctcctttagagatgggcactgctaagcctattctgcagatgaataaattgaggcagaaaacagcactccaggggcatagagaaagttgtggtgaaatttaggtwcgaggtcaaagttgtgcctaactgagagggaaagtgaggggcaatgacaaaaattgctcagccttggcttgctctgacactatttaagctgtaccttttttcttcctctggctaaccaggacaaggcatccaggaccacaatgcagggagcctcatcaggcacttgtgctaaacaggcactccctgtacctgaccccctgtgtcctattcagctacaagggatgaaatggaaactaatcgcttttctgagaccatgagaacaagcagtcagcttgcaagatgttatccccttctaattataggtccacaagcggtgaatgcttgccatgggaagctactattctttcccaaatgcaggtgtcccttcttgaac

SEQ ID NO: 518079 - DNA, 537 bp, Homo sapiens
gctgctcactctcacctgaaccatcttttctgctgtgtcaacaagaggcaagatccttgtcagaaacccaagagttcttggtaactccctattcttcaccttgcatatccagtcaatcaccagttcttgtttatagtcccgttacatccaaagtcattttcaaatcttttcctttctctccaaattgcccctcttccagttaagacctccaccatgtccctccagaacttctaagagtgtcctggttgatcttccacctccggcttttcctccatgccttcacacaccctatgcccacatgttggcaattgccagaataacctataaaaattcatgtcattttggcaatttcctaccactttcaaatgttaagtccgggctccttgtgatggcttatggtgtcttccatgaygtggctcaagcccatcccttcaaccctactctttagctacaaacatgttgtttcttatatgtttctgtagatgttgtccctctgtctagaatgccctccatcaacctattcattctaacattcca

SEQ ID NO: 518080 - DNA, 648 bp, Homo sapiens
gcatacattagatgactcaagtttttctacagaaaaagaaggtacagaattaaagattccagattgggcttacctttactaacaccatcctgactcactgttaccaaaatgccagactatactcttcacagagaggagttttccattacatcttttctcatgtgttctgttacattcaagttatggtaaatgcaccacgcttggctctgtataattaatttcacaagatggatgtcaagactataaaacaatcactaggttctgatttgtagcctaagatgggctytagctctcctgcatgtgcagctttgatagaaagaaagaggaaggaaaggaagaagatattaaggatgctgacttaaggctgatttctattagagttctatttcaagttcattatttcaacgactgaatagactctcacaaataatgatttagttctctgctttcttgtagattaaactagataattgatatagaggcagtaaatatgcataattaaacatactttgtttatagaggtagagtctaaatcaagttctaaggtttgatctacaaaaagacagtcaatgtgtcggcttaaagaagggagaaagagagcacataatcacctatccaaaggtgcacataaacttagccaagccgcaa

SEQ ID NO: 518081 - DNA, 671 bp, Homo sapiens
gtcatattagacaacaatgtagtgtgatcacaaacatggtcaggagttacagtgctgaaatgtccactttggggctgaaaggtgacacagattctctgcaagatgatggatccagtgcatagtgttttatgtgagaaaggacaggcagcttccctctgtatctcagatgagggaaaggatttaagacattgctatgtgatctggagaggtagatgatgataagttcccttcctcaaaataagtggacatacagcctttcagaggatagagaatgtttcttctgtaaattgggtgagtcaaagaattgttaccaggattcacaataagytgtcaggtttgtggcctatgtctcccatgtggagtttaaatcactatgggccatttcttagttagtttcctaaattataattcgtgggtcagacaagaggtaaggtattaaagggccttaatcaaggattcagcagtggtgttttaaaaagggtgtgcatgtgttgtgtgcaggtggggggatttgtaacaagtgacaaagataactaatcttcctctcttgaaattagatataatagaatctaatatttgtttctgttatgtagacatattcttcaaagactaaatttaataaagatgaaaggagtctctcacttttaattattttacataaaagatactac

SEQ ID NO: 518082 - DNA, 608 bp, Homo sapiens
gatacaaagctttatcaaaggaaataagcagtgagactactctatcaaaagtagtaggtacttgattacatttgaatatggttcaaactgatctctaagtaattgacttggagttccttttgaaaactatgaaagcattttgttgactctattatactcttcttaatttttttttctgtcttattatccagtgaacctactggcacaaataatgttttcagtctggattttcttttttagtttttgttgtttcagttatgaaaaactcagatagaaatgaaagatataattcaaaattgctcaaaccatatggtttccaaatgttgctgcataatggaatcacctggggattcttaaaacatagtgatgtctggctcccaccccaacattctgatcaaattgcaatgggctgagagctgggcattgagactttcaaaagcactstatgtgattcccatgtgcagcacagtttgggaaccactggctcaaacactgagaaaaactaataacatgaaagttcaaggtaaagaaaatctaaggaattagttcagagaccattttttcatgaagaacaccaggtttttacacctctggaattcttagaatgc

SEQ ID NO: 518083 - DNA, 608 bp, Homo sapiens
gatacaaagctttatcaaaggaaataagcagtgagactactctatcaaaagtagtaggtacttgattacatttgaatatggttcaaactgatctctaagtaattgacttggagttccttttgaaaactatgaaagcattttgttgactctattatactcttcttaatttttttttctgtcttattatccagtgaacctactggcacaaataatgttttcagtctggattttcttttttagtttttgttgtttcagttatgaaaaactcagatagaaatgaaagatataattcaaaattgctcaaaccatatggtttccaaatgttgctgcataatggaatcacctggggattcttaaaacatagtgatgtctggctcccaccccaacattctgatcaaattgcaatgggctgagagctgggcattgagactttcaaaagcactctatgtgattcccatgtgcagcacagtttgggaaccactggctcaaacactgagaaaaactaatracatgaaagttcaaggtaaagaaaatctaaggaattagttcagagaccattttttcatgaagaacaccaggtttttacacctctggaattcttagaatgc

SEQ ID NO: 518084 - DNA, 683 bp, Homo sapiens
attttggggattaaatagaataatgcgtgtaacaacatgaagtccctggaatattataagcatgcccataaatgttagctgtgaatatgatagcagtaataatcctccctataacctttttacagattagcaaactgaggcttggagaagtggaaaacttgcctaagattaaacagcattaaaggaacagaggctgggcttgcaactcagctctgggactccaaagtctgccctttccaactacatcgtcttgctgatcgcgagctcagttgatggtaaagacctgtggtaggtgctatttgggatgtggttttgatcaagagacgccctgatcttgtacacaattacctgtgataagagccatgtgtgagagttccacctgagtggagactaaatggcacgctgctggagtactgagcagagaggaatcacrtgactgtgagctcagatcatttctgggtagtctcaaacctttggctgagtgcctaaatcttcatttcacctcttgctgtgaaactcttgtttttctttaaacccaagagtccaactccatgtgtaatacaatatcatgtaaatgagggtaaccttggaaggcaggctgcttgtcatactatagtggctttgttgctgtaatgaaaaccacatgcttcatggtacttttagactagttaatattagcagat

SEQ ID NO: 518085 - DNA, 625 bp, Homo sapiens
tgctttttctggttatttcaagagaattcacaatttctaccaagccataagcttttttcaggagagtggagaactggaagaaaatggccagcactttcctctcggctctctggtttccacatggaatttgtcattgttttcccsagtcattgtgaaaggaagacgtggttgacccagggacttgctttcaaagagtaatggaataaatagcaaggtgaaaaaagtatgaaaaatgacttgactttgtcctggggcgaagagaaaagagtagaaaataagaaagagggaggaaaaggggcatgcctaaccaccttgctgagatcttgaaatttgctggaatgatatggttatgattacgattatgattatgagtgttttgagaaagggaggatcatttctttccattcttgagtcctctttggagtcatttgaatctctaaatttgcttctcagagaaagttttatatttcttggggaagatcttaaattactttctttcccaactaaattgggtccctctttctctacccaacattaaatatccaatgtccctgtgactggaagagtcccttctctctctgtagaaagaaactggggcagacagagaactttgcctcccaatcta

SEQ ID NO: 518086 - DNA, 539 bp, Homo sapiens
tgcgggaacaggagaacctccaaatagtcagcaggtgttcactagagagtgttacatgccagtttggtaacagtggttgaaaatacccaagtcaaagccagtgagggctatgggctcacggcaagacccaaggggscatgtctgtagcagtccttgcccctgtgaactcttgaatctgatcttttgggctgggttccaggacaggaccccatattgaggagaaactgctgggagtggaatcaaaattaatcaggaccaggaacaacagcactggaggaaagagaagatccagatgaaaggaaaggcatactttccaaagcagcatcccaccatgtctcccatgtactgtttacagtgtcaccttgacacctttcccattgagtgatgaggtctatatcctctccctttgaatctgcgctgaattttgggactcgactcacagaggatggcaaaagtgttttatgtcactttcaaggccacatcataaaaatgccatgcactgccgctttgcccttttggaatactctatcttggaaacc

SEQ ID NO: 518087 - DNA, 625 bp, Homo sapiens
ggaggccattatcttaagcaaaataacacaggatcagaacatcaaatactgttatgttctcacttataagtggaagcagaacattgggtacacatggacataaggatggaaacgggggaggagaaagggaaaggagcaaaggtcaaaaaactgttgggtactatcctcatacctggctgatgagatcaatcataccccaaacctgagcatcacatgatatgcccacgtaacaagcttgcacatgcactccctgaatctaaaataaaagttaaaattataaaaatagattaactaaaataaagccaaagctagtaacacagaaataggtcttcaactgaaaacagacctagtaattagttccagcaaaccctactaactgcatgaccttgtgcaacttaacctctctagactkgttttctgatctataaaatgaggggattgcacaatatgatagcttatgtgtttggaagctctaaaattctataattatctgattacataatcctcagacatgtaaatatcttgaatatcaaaatttcctaggaaattaagatagcattgtaaagaactgtttttttataattatgtgttatttggtacatgttggtaatggttctcaagttgc

SEQ ID NO: 518088 - DNA, 571 bp, Homo sapiens
gcaaatcacatttcaaagattctgaaaactaagtgatggtatagtcaatggcctaatgacctcagcagccagatgcccaaggctacaggccagaaattgctgcatagtttcaagatgacaaaacagatagaagcaaataaagcgacaggaccctggtttaactgtatttactgtcacctacataggtatccaattcagtcctactcaggtttttgtatatttaaagaaatgcttactttagggattaaaaataagagaacaaattgactatttctatcctgaacactaaagatagaataygtacttgttctcagctagcagtcaagagtaggtaatacaataaatcaaagactttcaccgacagttgaataatcactgaataacaataactttaattagtaaattaatgacataggattatatagcataattcaaacagaattaagcaaagttctagtcaaagggagagggtgtaaaaaaataagaggttagccctgctctcaagaagcttataataaagagtggaacacaaggacatgcacaagtaaatacagagcaatatttgctataa

SEQ ID NO: 518089 - DNA, 687 bp, Homo sapiens
ttgggtggtgtctggtgaagttaggctttgaaggggagtcctctaaactagtggttttcaatttggctgctcactggaatcactgggggaggtgtaaaaacacaccgatgccgtatctgtctcctagagtcgctggtttaattggtctggcatttgattgaacattgggatacattctctaggtgattccattttttcaatcaaggttgagaatcgctgatctatgtgagaccaaaaagttgagtcggaatgaggcaggtaaggcstagggattagaagagcattcagagaaaggaaagagtatataaggctcagagccaatgcgcttctattctgctgtgcagtactgagcacttttatgtgacagcattgttcttggaactgagaatagagtggagaataaaatcgctgccctcatggagttacattctagtgggcaacacagaataagcaaataactagcatcatctgtggttgtactgcgaaccaagaaagaagggtgaagaatggagaggcaggaaaggcccttttagacggagtggtttaagtcgcagcatgtgagcagggacctgaagtagaggaaggagcagggaaagagcctgtgcatgtttagcagagaagcgccacaagctcagggcacagcaggtgcaaaggccaggaggtggcagcatacaccattcctgaaac

SEQ ID NO: 518090 - DNA, 687 bp, Homo sapiens
ttgggtggtgtctggtgaagttaggctttgaaggggagtcctctaaactagtggttttcaatttggctgctcactggaatcactgggggaggtgtaaaaacacaccgatgccgtatctgtctcctagagtcgctggtttaattggtctggcatttgattgaacattgggatacattctctaggtgattccattttttcaatcaaggttgagaatcgctgatctatgtgagaccaaaaagttgagtcggaatgaggcaggtaaggcctagggattagaagagcattcagagaaaggaaagagtatataaggctcagagccaatgygcttctattctgctgtgcagtactgagcacttttatgtgacagcattgttcttggaactgagaatagagtggagaataaaatcgctgccctcatggagttacattctagtgggcaacacagaataagcaaataactagcatcatctgtggttgtactgcgaaccaagaaagaagggtgaagaatggagaggcaggaaaggcccttttagacggagtggtttaagtcgcagcatgtgagcagggacctgaagtagaggaaggagcagggaaagagcctgtgcatgtttagcagagaagcgccacaagctcagggcacagcaggtgcaaaggccaggaggtggcagcatacaccattcctgaaac

SEQ ID NO: 518091 - DNA, 625 bp, Homo sapiens
ctcactggaatcactgggggaggtgtaaaaacacaccgatgccgtatctgtctcctagagtcgctggtttaattggtctggcatttgattgaacattgggatacattctctaggtgattccattttttcaatcaaggttgagaatcgctgatctatgtgagaccaaaaagttgagtcggaatgaggcaggtaaggcctagggattagaagagcattcagagaaaggaaagagtatataaggctcagagccaatgcgcttctattctgctgtgcagtactgagcacttttatgtgacagcattgttcttggaactgagaatagagtggagaataaaatcgctgccctcatggagttacattctagtgggcaacacagaataagcaaataactagcatcatctgtggttgtactgcgaaccaagaaagaagggtgaagaatggagaggcaggaaaggcccttttagacggagtggtttaagtmgcagcatgtgagcagggacctgaagtagaggaaggagcagggaaagagcctgtgcatgtttagcagagaagcgccacaagctcagggcacagcaggtgcaaaggccaggaggtggcagcatacaccattcctgaaacaaatcca

SEQ ID NO: 518092 - DNA, 557 bp, Homo sapiens
tgtgactataagaaagatcctgacctctctgtgccaatatcccaatatccaaaatgggaatggtcatcatgcctacctagtagggttattaaaagaattaagcaamataatgctcatgaagcacttagcatagtgcctgacatacagcaaggacctaataaatgctgggggagatgtagtatttagatactagtgaatcagtatcagattatatagacaagattttccagttacatagcagaccttgaaaaaatattctcatgatctccacttgattttttacaaacaaacaaaaacaaacaaacaaacaaacaaaaaaacaattgaaattgtctagagctaaagaggacagtttttccaatggaacataggcagagggcaaactttggtctttatttagctgaagttgtcaaatatccaaagattaggtgttggaggtgccctgaattcacttcatgagggcaatcccaagagtcactcgatgtcacagagtaaaaacagcccatcacattagcagttctttatctttggggagaaatttctctcttcaaggttct

SEQ ID NO: 518093 - DNA, 557 bp, Homo sapiens
tgtgactataagaaagatcctgacctctctgtgccaatatcccaatatccaaaatgggaatggtcatcatgcctacctagtagggttattaaaagaattaagcaacataatgctcatgaagcrcttagcatagtgcctgacatacagcaaggacctaataaatgctgggggagatgtagtatttagatactagtgaatcagtatcagattatatagacaagattttccagttacatagcagaccttgaaaaaatattctcatgatctccacttgattttttacaaacaaacaaaaacaaacaaacaaacaaacaaaaaaacaattgaaattgtctagagctaaagaggacagtttttccaatggaacataggcagagggcaaactttggtctttatttagctgaagttgtcaaatatccaaagattaggtgttggaggtgccctgaattcacttcatgagggcaatcccaagagtcactcgatgtcacagagtaaaaacagcccatcacattagcagttctttatctttggggagaaatttctctcttcaaggttct

SEQ ID NO: 518094 - DNA, 641 bp, Homo sapiens
gctgtaaacttagagatgtgcaagagagtagatttccaaacttctttaggtagttcagaagcaaaaatgtttgaaacccattgttcttgagccttgctactcaaagtragactccagtggcatccctgagaacttgttataaatagatatagcaggcctcccctcaaccttgttgaatcagaatcattcaaatacaattcccaagtggcccatatcccattaaggtttaagaagctctgtaagattccttcacctagtatctgaaagttaacctattatatctctaaactttgacatttctttcacttgttttcctgtccttgttaatggcatcagcatccagttaatcctgagtagaaaccccaggtcgtgtttaacgcttcctcttcacttactccttcctcactcctcacatccaatcagcaaagaaagaagcccaatcaagttgatattttccattagttactatgtgcagggcaataaggatagaaagttaaataaaatatattccaagcttaatttaaataattgtcttctaattccaatgccctctgtggtggacagactctgttaaaaagtaaacagaggagcaataaagttttaaagggtttatttgagcaaataaggatttatgaattggg

SEQ ID NO: 518095 - DNA, 641 bp, Homo sapiens
gctgtaaacttagagatgtgcaagagagtagatttccaaacttctttaggtagttcagaagcaaaaatgtttgaaacccattgttcttgagccttgctactcaaagtgagactccagtggcatccctgagaacttgttataaatagatatagcaggcctcccctcaaccttgttgaatcagaatcattcaaatacaattcccaagtggcccatatcccattaaggtttaagaagctctgtaagattccttcacctagtatctgaaagttaacctattatatctctaamctttgacatttctttcacttgttttcctgtccttgttaatggcatcagcatccagttaatcctgagtagaaaccccaggtcgtgtttaacgcttcctcttcacttactccttcctcactcctcacatccaatcagcaaagaaagaagcccaatcaagttgatattttccattagttactatgtgcagggcaataaggatagaaagttaaataaaatatattccaagcttaatttaaataattgtcttctaattccaatgccctctgtggtggacagactctgttaaaaagtaaacagaggagcaataaagttttaaagggtttatttgagcaaataaggatttatgaattggg

SEQ ID NO: 518096 - DNA, 641 bp, Homo sapiens
gctgtaaacttagagatgtgcaagagagtagatttccaaacttctttaggtagttcagaagcaaaaatgtttgaaacccattgttcttgagccttgctactcaaagtgagactccagtggcatccctgagaacttgttataaatagatatagcaggcctcccctcaaccttgttgaatcagaatcattcaaatacaattcccaagtggcccatatcccattaaggtttaagaagctctgtaagattccttcacctagtatctgaaagttaacctattatatctctaaactttgacatttctttcacttgttttcctgtccttgttaatggcatcagcatccagttaatcctgagtagaaaccccaggtcgtgtttaaygcttcctcttcacttactccttcctcactcctcacatccaatcagcaaagaaagaagcccaatcaagttgatattttccattagttactatgtgcagggcaataaggatagaaagttaaataaaatatattccaagcttaatttaaataattgtcttctaattccaatgccctctgtggtggacagactctgttaaaaagtaaacagaggagcaataaagttttaaagggtttatttgagcaaataaggatttatgaattggg

SEQ ID NO: 518097 - DNA, 641 bp, Homo sapiens
gctgtaaacttagagatgtgcaagagagtagatttccaaacttctttaggtagttcagaagcaaaaatgtttgaaacccattgttcttgagccttgctactcaaagtgagactccagtggcatccctgagaacttgttataaatagatatagcaggcctcccctcaaccttgttgaatcagaatcattcaaatacaattcccaagtggcccatatcccattaaggtttaagaagctctgtaagattccttcacctagtatctgaaagttaacctattatatctctaaactttgacatttctttcacttgttttcctgtccttgttaatggcatcagcatccagttaatcctgagtagaaaccccaggtcgtgtttaacgcttcctcttcacttactccttcctcactcctcacatccaatcagcaaagaaagaagcccaatcaagttgatattttccattagttactatgtgcagggmaataaggatagaaagttaaataaaatatattccaagcttaatttaaataattgtcttctaattccaatgccctctgtggtggacagactctgttaaaaagtaaacagaggagcaataaagttttaaagggtttatttgagcaaataaggatttatgaattggg

SEQ ID NO: 518098 - DNA, 560 bp, Homo sapiens
atagaaagttaaataaaatatattccaagcttaatttaaataattgtcttctaattccaatgccctctgtggtggacagactctgttaaaaagtaaacagaggagcaataaagttttaaagggtttatttgagcaaayaaggatttatgaattgggtagctccaaaccagaagtggtttaggggatccgctgaaggaactcaaggaggaggctttatacgacaaatgcagaagtaaagcaaagaaaatatttgactggttatagttatacggttgccttacttggtctatcctgttcgaaagtctctatttacaaaagtttgttcactgctcctgattggttgagcttaagttctgcctttctttaatacagacatttacaagaaagagctcaaattatgtttcacttacgtttgcaatgtaatcagagttaagggcactggctttgtctgctcagagattcttcaggcctggtgaagaacctactttaacaacggtaagctgaccccaactagtctccacatgctatggtaatctttttgtgtaatcttctccccttga

SEQ ID NO: 518099 - DNA, 560 bp, Homo sapiens
atagaaagttaaataaaatatattccaagcttaatttaaataattgtcttctaattccaatgccctctgtggtggacagactctgttaaaaagtaaacagaggagcaataaagttttaaagggtttatttgagcaaataaggatttatgaattgggtagctccaaaccagaagtggtttaggggatccgctgaaggaactcaaggaggaggctttatacgacaaatgcagaagkaaagcaaagaaaatatttgactggttatagttatacggttgccttacttggtctatcctgttcgaaagtctctatttacaaaagtttgttcactgctcctgattggttgagcttaagttctgcctttctttaatacagacatttacaagaaagagctcaaattatgtttcacttacgtttgcaatgtaatcagagttaagggcactggctttgtctgctcagagattcttcaggcctggtgaagaacctactttaacaacggtaagctgaccccaactagtctccacatgctatggtaatctttttgtgtaatcttctccccttga

SEQ ID NO: 518100 - DNA, 560 bp, Homo sapiens
atagaaagttaaataaaatatattccaagcttaatttaaataattgtcttctaattccaatgccctctgtggtggacagactctgttaaaaagtaaacagaggagcaataaagttttaaagggtttatttgagcaaataaggatttatgaattgggtagctccaaaccagaagtggtttaggggatccgctgaaggaactcaaggaggaggctttatacgacaaatgcagaagtaaagcaaagaaaatatttgactggttatagttatacggttgccttacttggtctatcctgttcgaaagtctctatttacaaaagtttgttcactgctcctgattggttgagcttaagttctgcstttctttaatacagacatttacaagaaagagctcaaattatgtttcacttacgtttgcaatgtaatcagagttaagggcactggctttgtctgctcagagattcttcaggcctggtgaagaacctactttaacaacggtaagctgaccccaactagtctccacatgctatggtaatctttttgtgtaatcttctccccttga

SEQ ID NO: 518101 - DNA, 564 bp, Homo sapiens
caaatattccctcccttgacatcacatgactccttctgtttcctttgcatattttattcagtcatcattaatsagcactgattaattgcctatatgtgccaggcaccaaactagacacgagcacctttacaaagtttgaattctaagtcctttttagggcagtttatggtctagtgagtagatgtgatggtgtctaataagtacagttagggtgacgttgcaaggtatttaaaagttcaagaagaaatgaatgtaaaggcagcaaagacttcctaaaaaggtaagatgtggcgtgttggagaataagacagagtttgctggaagagagagaggagcggtattctaggaggcgggggtggtaatgtgatggcagggaggtggaaaacaggggggcgtatatgaagatctgctcatagttactgtggttggggtgaaggaaactgaaggaggctggtgctttggagttgacagtgggcaaaagaaaagtggcgtgaaataaagtcagagagacagataaaaatatgggccacctaaattaccctttaaagaaagccttgcacccca

SEQ ID NO: 518102 - DNA, 438 bp, Homo sapiens
tgcaggatttactgggtgtgagaccaagggtaagtcaggcaaatcattgaatttctctgactctcatttcctgagctataaaatragataataatagtagctactttataggtagtcactatacaacttgtgtgtgcatcacaaaaatacagcattagttcgtcaatgacaagtgatgttttatattattcatattattttctttccattagagacacttcagtacttcagtgaggacagctcaccccatgtgaggaaacctgagtgaactggcactataatttctaaatcattccagtgatagcttaaaatctgtggtgaattagtgactaaggaagctgccctgtccagctctgagaacaaggctgtattcatttccctgcactgctgaaacaaagcaccaaaaactaggtggctgaaactacagaaatgtgttat

SEQ ID NO: 518103 - DNA, 438 bp, Homo sapiens
tgcaggatttactgggtgtgagaccaagggtaagtcaggcaaatcattgaatttctctgactctcatttcctgagctataaaataagataataatagtagctactttataggtastcactatacaacttgtgtgtgcatcacaaaaatacagcattagttcgtcaatgacaagtgatgttttatattattcatattattttctttccattagagacacttcagtacttcagtgaggacagctcaccccatgtgaggaaacctgagtgaactggcactataatttctaaatcattccagtgatagcttaaaatctgtggtgaattagtgactaaggaagctgccctgtccagctctgagaacaaggctgtattcatttccctgcactgctgaaacaaagcaccaaaaactaggtggctgaaactacagaaatgtgttat

SEQ ID NO: 518104 - DNA, 554 bp, Homo sapiens
aattttcagttaataataataacaacaataatagcaaatatttgtttagccttatgggccagatactgtgctaagagctttatatgtgttgctatttaatatgcacatgtacactgaaaaaattatgccttccatcattgtacttctatctaaatatttctgttatttctcagtgtaagtttcacctacttaatcttatttcccatcattctcttctaagaactctgcatttgggaaaactgtttgctggatggtagttttcagggtttttttttttttttttaacttttaattttcaaactttatgtcctcgtttagaactcctcttccctctcctttctatatccctacctatcttttaaggcttagctcagaccttcatcttgaagctgtctaaactttatagccaaaakggctcccggtccttgttctaagcactagtatggtagataaatagcatacttgtttgttaaataagcacagtgttgctttttagatttgaatggactgtaagattttattctagtagctgctgactgtgtagttgttcctcg

SEQ ID NO: 518105 - DNA, 625 bp, Homo sapiens
agctgctaagtgttgggggataggagaagcacacaaatgactatactgtgaggttgagctatattaattgtggaaagccaaatgaagataagaaaacaaattaaaccacttttaaccctcttaagagccatatgaaatatttatacatgagaaaaagcctcaggcagatcaaaaatatttttcaagatcatataccaagtatattgtagggtacagattcaaattcaagactgactccaaactcagtctctcccaaagaagaggcaaatcacctctggttggctagttrgatgggagtttggaggctggtggagagaaaccaggaacagtttcttagggaagcagttatttcaggtaaaacttggaaagatatacacagttttgaaaagctgagatggcaaagaaggagaacatttccaggaggaacagcaaaaagcacagaagcaagaaatcaggatcaacatttggagaatggtgagtagatcaagtagcacaaactctttacaaataaagatagattggatgcacattctggaagtcaaatattggggttaataagttactgtaatagttcagggaagagcctaaactagaatctcagacatgaaaaaggagaaaaggagaa

SEQ ID NO: 518106 - DNA, 540 bp, Homo sapiens
ccatgtctatggttcctcaccaagtgtaatcacagaggcaagaacacaataggcgtgaaaaactatttttgaatgaatgaatggagatgtttattgtattgtaagaaatgtgtccaaacgccctttttaaagtccgtgttaatagtcattgtgttcatatttyacaaatgaaggttaaagtattctgaaagctaatcagcaaaatgtcctagctctgaatgctgaagatagtttagtgcctttctgggtttttttggtatgtttctttaaagatagaggcagtacagatgcttagcaaaatcaaccttgttattgtttttgtttttggttttgaaaatgataatagattttgtctcaacaacttttgtttgtttgttaaaggcttatttagtgtctccctctttgtaaccctctttttcatcctgtttccataatgcacatggagctcatagattaccttaatttttatttaaatgtaagactgaaagctatggtgtaagtctctgcctacatcatggaaattgatccagaggaaaatgg

SEQ ID NO: 518107 - DNA, 596 bp, Homo sapiens
ttctctgctttgtagaagttataaatgttgtggaaacaaagaataaaatatatactttcttgcattctgctagcctgactggttgtaacagctcagtattttctctcataaataaatacagatccatagagatcctcaatttttatagatgttcaggatttttttaaaaatcctctcaaacactaattcgattattttggttgctattacccagtgtaatcttgcagtggcaggaagtatagtgagactaatgggaataggtctttaatggaaasgatgttggaccactaaagtcacctccattttgggggatgtttcttagtgaagttgctgacatgaaataaaacaattatctagactcctcagaaagatgatataaaggcctacataattctgcaggtgtgaaataactatgaaatgtaatctccatctgagatgacagccaagttttgaacataaagttcattcattctacaaatgtttcttgtgatcctaaccattacacacactattatacatgggagtttcaaaagaataaaacaattaaacaaggtctttgttctcaagaacttataatttagtggcaatgataagca

SEQ ID NO: 518108 - DNA, 569 bp, Homo sapiens
accttctgagtgtttttaatctgtttcagaagacaacactttgcactcaaaacaaattaagaatgttgcaacatatgaggccataacaactattttacgggttcttggctcccagcagcttgcccctaacacggtaactgtgtctttcctgagatttcagagtagtgtaataatgaaagaagaacaagcttacttgcaagatattaggaattgttgacttcatgatgcttgctggcatcttaagaacagacatgcaatgtctcaagccagcgttcaacacactaacttaggcaacagccgtataaggcaatatmtcttttccatattcatgatccctccctcctaccctggtttgggtgcttcccagcactataagaaccaacaatcataagccaaagtatatctggagagtgggagaagcagtcctgcaaatgcagccttttcacacgcttcaccccccgtttatgattggcttcaggaaaatctgtgttgtatggcatctgatcaagtatggtcaaggtctgcctatgcatcatctattcagcatgtaacacagttagctgggtaga

SEQ ID NO: 518109 - DNA, 641 bp, Homo sapiens
gaattatgtgcttaaagaggttgaattatgacagaaaagaactagaaagaagacgggaagcaagccaacatgaaataaaaggtaatatatctttctttcatatgaaatgcctttattctggggtttttagctttcacttttactaacctaaaatgttatatgtgttacaatggtcagtaagtagcataagtatttggctagaattgttactgttttttttccattcttttctaattaaaatacagaaacaggtatctccatattatagggtgaatatcccatttggggagtaatcttgagtttttgaattgagayttatttatgtgaacctattaattatacattctgcttatactaaagatgtctccatgtagatatttttgtcagacttttaatggaacattctcagtatgattcagagaaacatggtatatcatttttatggcagttcatctttggtttatatcattttaattttattccagtgccccagcaattttatttttgtaacactgtatagttaaagaaattatatggtgattttatgcaggaatgatataaggattttcccctataaaccaaactagttcattaataattttagctggtaatattatcaggaacagtgtaaattgctgcag

SEQ ID NO: 518110 - DNA, 524 bp, Homo sapiens
catcccgctgtttacttctttcacttggtctctcattatctccctaagtacacttgcctcccgcaagctttgctctgcggaataactcacagtcctttggtggtctaacttctgaacctttatacatgctgcaatttctatttggcatgttatttataccctcaacactcccttttccccagaagaaataccttttagtgaatagaatatattcgataaatacttattgaatgactgtcctttgaatatcattcttggaataagaaaatgttgtaaaggaatcataatggtaacatatagcttttatcttcctggagtcctctatttttttctctctggttcattttgggattacattctgtgatttgctacttattttttttaggcccctgatctttatcawgggagcctaaaatcatgttagaagtatgcattaactagtcagcaaacatttcccaagcacagaatgtcagggactggactgttggtcctgctgatacaaatgactctcaggcacacagact

SEQ ID NO: 518111 - DNA, 602 bp, Homo sapiens
tctcacttctataaacacatggaaatgcttcagcgtagaaaatatacagaactatgtatcttttgttttcagcaaatttcctccttatacttctttcatttatagggtcaaacaggtgttatatgcatggcaagggcttaacctctatctatctmcttgtttatctaactatgtatctatctgtgtttacataaataaatgaaattctcatatttgttccttgtaggaagtgcctactaacaaagacaaccactcaaattgatttctgaacacagaaaccttttagatcctttagtttggaattttcaatactgtaaaacataggggctttcaaaacctacactcccacatttacacaataaaaacatactaaatggagttgtaaattcgtagttctcatgctgagaaaattgaaaatgaagcacagatggctagtgtccacataagatgacatctcacacattccccacaagcaggattttcgggtctgacagtacaaaagaaagcagtgtggtcacatggccacctcaacattagaacttcatggcactgaattttactctcacattctgtcaggaacaaaatgctgttacaagtggaag

SEQ ID NO: 518112 - DNA, 538 bp, Homo sapiens
ctaatcactggaagcatcgaaatgttctcagttaccgttcagacactgggaccagaagggaagtagtgccatctggacatgttgcccgatccagccaaacagcaggagcctgggtccctgtttctccccttcagggttttctttgacactctacgccacgcatgcactcgaccagatgccccagggagcctagtgagtcgcatctatggagtcatcctgagacagtggtctgaccctgttttcaagagggtgrtctggcaattggatccctcgctcccactggcaagaatggtattgtatgagattgaatcagtagatcgttgtcccactgattttttggtggttcaaaactgtttacacaggaagaggggctggcaaaaaaaaatccttgactgtgcctgtcacaccttaggagtggtcttgccctcaataattccaagtcctcgaaggcctcacaaaagtaaagatgcctgagtgatagccaagaaaactttgagggcaagaaggctgccttgctcatgcccaaccactaggcgga

SEQ ID NO: 518113 - DNA, 527 bp, Homo sapiens
tgaaaaatatgcagcattgttgtaaaaactatgtctctacaattaacttgacattggaaaaaattttaagttacagctctatatcttcatctctgacaaaatggatagtatcctgagtcattctggattctgtactaaagtgttctttaaggaaatccctcccatctcatcttcttttggttttctgtatgtctttgccagttttcccatcatggtagtaaaatggaacaatttgaaaacattactatcttaccttttattattctctttaaaaagagatttttttcttacaaaccacaactcatattttaaataccctgtaatamatttcattaggctgactgatttaaaacactttatctgataaagttatattttatcaacttctcatttcaaaaatccctacttaaaagatgtctttattatgatagcctgagtatgtataatgctatatgttagtgaattgttcaaatgtgtgtttaatacctttttgtaaagagtttatattctgatgttataaaatatca

SEQ ID NO: 518114 - DNA, 272 bp, Homo sapiens
aagtgattggagagttatgaacagaaaagttacatgatcagactcaamaggatcactctggcctttctagtgggatttttattagggaactagtcagaagtttcaaaatgaaagcgttctaatatttaaaaatagcttttgtacaactcatagaatacacttctgaaaatgttacgtgctccttaggttattagtgcatatttacttgcttttttactatgtgaagcaaaaactaattgtaaatgtaaatttatttcttcccttttaatgtc

SEQ ID NO: 518115 - DNA, 540 bp, Homo sapiens
cttacaccttattcccttctgtgtccaaactgaatgctacaataaaagaagaactattttcagcatttcctgtacaacatagtgttctggaaaaataagggaatatctgaacagkgtaggaggcagcagaaactgaccttgacattgacggaactacatatttgactacgaagggctgtttcatgtcacttaacagtactgttcactgccccttctattcagttctctatgtgagctgctagtagctgctaggatatgcctgtgtcagggcaaagaagaatccaggctttccttgcctgccagaggtaattatacatgttgttttaaatggtcttggattataaaattatccgtcttcattttattatagccagagctaagtaaataaataataaagaaacattaaagcccattttagttttaaaaatagacttagatagatctagaaacacgctttgtattttttcttgcactgaatgaaaaatgcctgtattttgcttttactttattctttcacatcagacagggaaatttagcata

SEQ ID NO: 518116 - DNA, 540 bp, Homo sapiens
cttacaccttattcccttctgtgtccaaactgaatgctacaataaaagaagaactattttcagcatttcctgtacaacatagtgttctggaaaaataagggaatatctgaacagtgtaggaggcagcagaaactgacyttgacattgacggaactacatatttgactacgaagggctgtttcatgtcacttaacagtactgttcactgccccttctattcagttctctatgtgagctgctagtagctgctaggatatgcctgtgtcagggcaaagaagaatccaggctttccttgcctgccagaggtaattatacatgttgttttaaatggtcttggattataaaattatccgtcttcattttattatagccagagctaagtaaataaataataaagaaacattaaagcccattttagttttaaaaatagacttagatagatctagaaacacgctttgtattttttcttgcactgaatgaaaaatgcctgtattttgcttttactttattctttcacatcagacagggaaatttagcata

SEQ ID NO: 518117 - DNA, 535 bp, Homo sapiens
cttacaccttattcccttctgtgtccaaactgaatgctacaataaaagaagaactattttcagcatttcctgtacaacatagtgttctggaaaaataagggaatatctgaacagtgtaggaggcagcagaaactgaccttracattgacggaactacatatttgactacgaagggctgtttcatgtcacttaacagtactgttcactgccccttctattcagttctctatgtgagctgctagtagctgctaggatatgcctgtgtcagggcaaagaagaatccaggctttccttgcctgccagaggtaattatacatgttgttttaaatggtcttggattataaaattatccgtcttcattttattatagccagagctaagtaaataaataataaagaaacattaaagcccattttagttttaaaaatagacttagatagatctagaaacacgctttgtattttttcttgcactgaatgaaaaatgcctgtattttgcttttactttattctttcacatcagacagggaaattta

SEQ ID NO: 518118 - DNA, 540 bp, Homo sapiens
cttacaccttattcccttctgtgtccaaactgaatgctacaataaaagaagaactattttcagcatttcctgtacaacatagtgttctggaaaaataagggaatatctgaacagtgtaggaggcagcagaaactgaccttgacattgacggaactacatatttgactacgaagggctgtttcatgtcacttaacagtactgttcactgccccttctattcagttctctatgtgagctgctagtagctgctaggatatgcctgtgtcagggcaaagaagaatccaggctttccttgcctgccagaggtaattayacatgttgttttaaatggtcttggattataaaattatccgtcttcattttattatagccagagctaagtaaataaataataaagaaacattaaagcccattttagttttaaaaatagacttagatagatctagaaacacgctttgtattttttcttgcactgaatgaaaaatgcctgtattttgcttttactttattctttcacatcagacagggaaatttagcata

SEQ ID NO: 518119 - DNA, 633 bp, Homo sapiens
tgtctcgttctgtgacagaatttctcttcactcagaattccaaagaagcattataaattgaagccactcattaagcaaacattaattgagtcccttatcaaatgtggcttgtagccgttctggtccctacatacaaaggggaacttggtgccatgcagccattacttttaccactagtaatatgaattagttaaaatagagtctctggagctagcatgtctcaatttcaaatcttgtttctatccctgcctccctggtgtttttaaatacatcatttaatttctytgtgcatctatgtcctctagggaaaataatgataacattttatctcgtggggtgaggtcatgtatgtaagatacataaaataattcctagcatatgagacactaaaatgatacctattattataatctggtaggggattttttcctatctacagctttgggtgggaaagcctgggggggaccgtggcagcctgccgagccaacgtgaagagtggtgccatcatgtctgctttatctgacactgagatccagagagaaattggaatcagcaatccactgcatcgcttaaaacttcgattagcaatccaggagatggtttccctaacaagtccttcagctcctccaacat

SEQ ID NO: 518120 - DNA, 633 bp, Homo sapiens
tgtctcgttctgtgacagaatttctcttcactcagaattccaaagaagcattataaattgaagccactcattaagcaaacattaattgagtcccttatcaaatgtggcttgtagccgttctggtccctacatacaaaggggaacttggtgccatgcagccattacttttaccactagtaatatgaattagttaaaatagagtctctggagctagcatgtctcaatttcaaatcttgtttctatccctgcctccctggtgtttttaaatacatcatttaatttctttgtgcatctatstcctctagggaaaataatgataacattttatctcgtggggtgaggtcatgtatgtaagatacataaaataattcctagcatatgagacactaaaatgatacctattattataatctggtaggggattttttcctatctacagctttgggtgggaaagcctgggggggaccgtggcagcctgccgagccaacgtgaagagtggtgccatcatgtctgctttatctgacactgagatccagagagaaattggaatcagcaatccactgcatcgcttaaaacttcgattagcaatccaggagatggtttccctaacaagtccttcagctcctccaacat

SEQ ID NO: 518121 - DNA, 665 bp, Homo sapiens
aaaatgtgaataataaaatgaactactctggaaggtaamgagcagtaataaattcttcccatcattctaaagtgatatcaatatgtgataaattatggtagagcccatggtagaaggaacacattctgagtactttagaagatggatgcctttaatttttttggattactttagatatgatgggtttggcagttaattccttgggtatatgtatgtgtaggttatgtgtgtaatactaagcaagtaattcccaaacttttcactaaccaaatactattttcctgccctttcgtacatatatattttgtattcaaaagattgtgttaactccaaacttgcttttatgaatgttaataagtgcatccctccattaaaaataaccactttcagaacttgtggtaatcaggtaatagctaatattctggctgttacaacttgagacacagaaaacaaatttagcatttttgtcaatcattgcaggctagttgtgagaaagttcgtggttttgatgaaatagtcagcagagtatagtcatcttcctccctgtgttttggggcttctaacatccaggaacagcagactgaacaacttgaaaaactattgccaaatttagctttaaatgcaggttctctaggcaagtgtagctcttaggaaattagagcatg

SEQ ID NO: 518122 - DNA, 609 bp, Homo sapiens
cattgtatgacaaactagggtggggtagagtgtgcatgtactcaagaaacattatgattccaagttaaaacatgaagtgataaataacatttctttttccagagactggatctccaattactgcgtcatgtgttggattaggcaattctaaaacacctccaccagggcaagcaggaaaaagcgtcccaggatacaatggtaaggaatgaccctgataatacgtaaagttaataaatttggcattttcttgcatctagtgtgtattatgttgcatgaaacaaactaggggcttaattagaatctggttgaatgaatgccttgtattaaaaatgaatgccttaatttttgctatcaaaagtatgttgtggatttccaggatatgttctaaatgactgtcataaccacaaaaataatatcattaataaggtatgttaggaatatgggtgtgaaattactatgaaggaaacacctgctgggagcccagtactttatatatgtcttttcatttcatgctgaagtatatttaattcagagctatcattactattttagagatgagttaaccaactggttaacagamtaaataattttcttgagataacactgctg

SEQ ID NO: 518123 - DNA, 556 bp, Homo sapiens
cagcctaatgacaccgcttgttttgccaaatttccctgtaagctgcacaggagcagacactgggaactcagagttctcaagcaactgctatggggaaagaaaaacaagggtcaccatcacagaagaagaaacaaatttatgatattctaaagcacctctgtaaactatgtgatctaaaggcagcatcagggagtggccacaacaggcagacaagtctagcaagtgggaccacaaacagggcagatgctccrgagaatatgtttacttttgaaccttctgttcagtgacatcattggtccatgcaaggcccctcccttatttacttataaattaatctattacacaaattaatttccatttatttccatcaccacctccattctcctttcaccacagggaatcatttaaatgtgtttagtgtggctcttttttatttgtatatgtttttgcaaaacataagatgtaatgatttatgtgcatggatttttaacttacataaatggttatgttaaacatcttgttctgttttctacttattccactaagcattagtgtg

SEQ ID NO: 518124 - DNA, 641 bp, Homo sapiens
cagcctaatgacaccgcttgttttgccaaatttccctgtaagctgcacaggagcagacactgggaactcagagttctcaagcaactgctatggggaaagaaaaacaagggtcaccatcacagaagaagaaacaaatttatgatattctaaagcacctctgtaaactatgtgatctaaaggcagcatcagggagtggccacaacaggcagacaagtctagcaagtgggaccacaaacagggcagatgctccggagaatatgtttacttttgaaccttctgttcagtgacatcattggtccatgcaaggcccctcccttatttacttataaattaatctattacacaaattaatttccatttatttccatcaccacctccattctcctttcaccacagggaatcatttaaatgtgtttagtgtggctcttttttatttgtatatgtttttgcaaaacataagatgtaatgatttatgtgcatggatttttaacttacataaatggttatgttaaacatcttgttctgttttctacttattccactaagcattagtgtggctctatgttgctatgttccatattgttggatgtataactaacccattgttcctaatckctgcttaatacccaattgtgtgcccc

SEQ ID NO: 518125 - DNA, 621 bp, Homo sapiens
atttgccttctaaactccttcctctcagacatacaacttgttttttgtcttttggaggatgaacggagaaacaatctcccaggggttgaatctatgtgaaccaaaagagggcgtacaaaatagactttgccctccagctagttgaggtgatatgtacatccatgacatatatgctgccctcaatgcagccagtatttctttcatattgcaaccaggcttactaagtctttactgagtgcctactgtgctcatgactctaccagrcattaggcaagacacatacacagtgtgtcttcatgtgaatatctaggtgggatactcacaattgagccatccaatcctagttttctccaatgaatccctcggtgccttcatacaacaccaaccgccccttctctaaagctctattgcacctcacactgagctcggctcagcacagtgcccaatacagagttggtgcataacaaatacgaaagactgtgttaaactacatatgaccatgaatatgccgtatatataaatccatatatcaggagagagctttcctgaccacccaatctaaaatggtagcctctcctccttgccttactcttatttgtcttcatcttactgagtgacttt

SEQ ID NO: 518126 - DNA, 641 bp, Homo sapiens
tatatctggaaacaaatctgccacataatgtttttttttttttttttttttttttttttgacagtgctttgacgatagttgccctctatatacttagcttaaaagatcaagaccgacgtgtcccaaatctccctccaaggtgagagttcagttcaattttctggcctaaaattcctttggagagaaggatttttgcagccctctttcattaatcatttcattctttttctccagcaatatcacaagctcacaggagccrgctctgctgcccacagcctcctcctcaggtaaaggcttcacattcctcaccctcaaacccggtttcaagtgaactgttaacagaagaaaccagcctttcaggttaaccttcttgcttcccctcccccctgcccaatgccttgcagcacctaatacatccctggtaaccacaccggcctccttacaagtacctgaaattactttctgtgaaatcctgccgtgtcaggagacttattgctgccccatccggggaatgaaagaagtctcttcaagtcctgtgcaaagacaatctgaggagaaggaattccatcagaggcgatggtcaggtaaatgatgttcaaagagaaacaactagagctttgaacttgaggttgtttttcttg

SEQ ID NO: 518127 - DNA, 590 bp, Homo sapiens
agcatttgtgaagctgtgttttaaaagttccttttctctcctttccttatccctttttagctaatagaagtcctaatctgttcactattagcccctcttccagactgcattcctttctcagtgcaaatctgcactggttttcctaaaccagccaaggaatgtcctcctttgcttagaggattccaaagaatggttgtaattgtagacttttatactgattgtgaagctgcggttcatattagaagagctgtgacctactagccagatgggaatgcagagctagagagttcttacatacatttccagatgtcagtcctagatattgtgactttgaactttagagagagatcatctgtctgcatttcargtcacaccaactcaaatttatccttgcaattggctatacaattcactaccaagtcttactaaaatgtaaattgaatataacaagtgagaaaagtcctgtacaacccttcctgctaccaccaggcataacacagaacttcatttacaaaaagtcttcaaatattgcttgttggtttgaagaaaatatattgtcttaaaataacaagcttctggagaacttctca

SEQ ID NO: 518128 - DNA, 612 bp, Homo sapiens
ccactcaaacgccagtcatcttgccacccccctggaccaatccgtgtcctcccatctggggataggttgttcttaccctcagcagcctctgtgtcacagccctgggtaaagaaaaagatatttagttatcaaagacctttgcggaaagcctcggagcagcctgcctctggcaggsacctagagagaatgcacagtggagtcctgtccaggagatggcagtgttgagacgcgtataggacatcgcgaggtcccagtgttcttggcttagacaatcttttaattaaaaaccctccaaatccaaggtcctcattcaaccaaaagctaaaatgtcagaaatatacagtgaggttctggatgatggaggaaacaccgtaagcttatgcagcctcagctagactacccaaagggattgtgaatgagctctccgagaaatatctgctaattaagcattaactaatgttcttttcttctgtcttctccccttttctttcttttatttcctcttctggatctagagagtgccagaaagagtaaaggctatcaaaaattgtggtaaaactccacatgaaaaaagttgtcgggtgtaaaatgtatacctatattttaagtctg

SEQ ID NO: 518129 - DNA, 629 bp, Homo sapiens
atgactgtttaataagctgtgccaaggaacactatggcatggttgccacttcagagcaggagagcactggtctgtaggcattctgttctgtccctcactgtcagggtcctggacttcactgctgcgactcctacttgtcactgcaaagaaacaggtgcgtcagagccttccttccaggctgtttttcctaaactcacagctagcagcatgaagctgatgagtgggccatgtgtaaggcagagtgactagggaagtgtcatgtgctgggggtaggaggtgtgytgctgacctcattttctcatctgtgaaaggagcagcctggggtcagcgttgtcaaagggtggggggtaaacacctgttggaaactttgtccctgatatctatctaccctacatcctgcatagcttctcctcactttcagtctgtgtggttgcagtgaagttcattcccagagccgggaggataggtgacccagctcaatcaaccaaagtacagcattcagtccttgcatcagtaattgcatcagtggtggacatgtggcctatcccaattcaagcagagtggatctcagcacttcagggatgctcactcttctccatgaggtttgaacctgcaagatacatcgccaa

SEQ ID NO: 518130 - DNA, 519 bp, Homo sapiens
acttcactgctgcgactcctacttgtcactgcaaagaaacaggtgcgtcagagccttccttccaggctgtttttcctaaactcacagctagcagcatgaagctgatgagtgggccatgtgtaaggcagagtgactagggaagtgtcatgtgctgggggtaggaggtgtgttgctgacctcattttctcatctgtgaaaggagcagcctggggtcagcgytgtcaaagggtggggggtaaacacctgttggaaactttgtccctgatatctatctaccctacatcctgcatagcttctcctcactttcagtctgtgtggttgcagtgaagttcattcccagagccgggaggataggtgacccagctcaatcaaccaaagtacagcattcagtccttgcatcagtaattgcatcagtggtggacatgtggcctatcccaattcaagcagagtggatctcagcacttcagggatgctcactcttctccatgaggtttgaacctgcaagatacatcgccaaca

SEQ ID NO: 518131 - DNA, 617 bp, Homo sapiens
atgattctggatcccgtccaccaattcacccacagacttcatgttctcagcagcacagtgatgtgacaggaagcatcatagaaatgagatttcatttaatggcctgagaagctaaggttagaattggggttccgaactgaaatacttccaaggcccagcagataagtgagtaaagtgggtcccttagccttggtgtcagggagacaatccaggatggtgggccatagagcaaaccatggagtgcataccctgagcaagggkgtagccacccgacaggtggagtcactcagctccacccaagtgttgtcattcaagactgtgggctcagtgttgtcgaaacggcacattttaaaaaagagcagcttgaaatgcagattttagatttcctcatttttaaatgctggcaattgttcaaaaacaagatggacaaacagaaaaataaaccaaaacactgtgaaggacaaatagcacattgtgtgaaaacacaatggagcccacaagatgcaaccctggtgccgagatctgcggaaagtgaagagaattgagaaggaagttgctgggaggactagaaaatctctattaatcagaatccagagcactccactgagagcacaatc

SEQ ID NO: 518132 - DNA, 617 bp, Homo sapiens
atgattctggatcccgtccaccaattcacccacagacttcatgttctcagcagcacagtgatgtgacaggaagcatcatagaaatgagatttcatttaatggcctgagaagctaaggttagaattggggttccgaactgaaatacttccaaggcccagcagataagtgagtaaagtgggtcccttagccttggtgtcagggagacaatccaggatggtgggccatagagcaaaccatggagtgcataccctgagcaagggtgtagccacccgacaggtggagtcactcagctccacccaagtgttgtcattcaagamtgtgggctcagtgttgtcgaaacggcacattttaaaaaagagcagcttgaaatgcagattttagatttcctcatttttaaatgctggcaattgttcaaaaacaagatggacaaacagaaaaataaaccaaaacactgtgaaggacaaatagcacattgtgtgaaaacacaatggagcccacaagatgcaaccctggtgccgagatctgcggaaagtgaagagaattgagaaggaagttgctgggaggactagaaaatctctattaatcagaatccagagcactccactgagagcacaatc

SEQ ID NO: 518133 - DNA, 543 bp, Homo sapiens
ctgctggaaataggatttaagtggaaattcctccctctcagtgaataacaaataagatgcgtattttcctgattatggactttacgtcttacattttccaactctcttgatatcctcattttgcasagtttcggtagagaatcattctcttgaatagtaatctaatctagttgtgatttgggtttgctttggtattgacatttcctagagagctccaacagatacagataaaagctgagctgctgcggttaaatctggggatgtggtgatgggggccctgtatccctcgagactgtccctgagacctgtagctctagaatctagtcctcatgacctcagacgttcctccaaaagtaaactgtgtgtgaacttgtgctcccttgagaagctgcctttaggaagggtttcaattcttttaatattttatcaagtttagtcctcttctacattttttttttaagttttgcaaattttcatggagttttttaaagctttcattgttatttctctgttaacaactaccactatgaaaacttgattttc

SEQ ID NO: 518134 - DNA, 595 bp, Homo sapiens
gctgagatcgtgccattgcattccagcctaggtaacaagagagaaactccgtctcaaaaaaaaaaaaaagttctgagaagggcaaataaagctaaggcattagcccagatgagaaaataataaagccttgaagaaacaatatcacgtgtacaccaattggaagatattaaaggggtattaatattgcagaatttagttgctggatgtgggggtgagccccaggtttctattctgaacaaccaggtgggtgatattgccattcactgggataggaaatataaaaagaataggttgttaatggtggttaakgtgaaggtgctaagagctcctttttcagatgtggagtttgagtgtttatagctgcctaggaggcaattgtatctggaattcagagacagaccagcactggtgatgtagatcaataaaaaattaggatatgggtgaagatttaaaggcatgggggtggataagatcatccaaaaagtgtaggcaattgacccttgaacaacatgggtttgaactgccggttcacttacatgtggattttttacatataagtaaaaagtagaaaatacagtattcaagggatgtgaaa

SEQ ID NO: 518135 - DNA, 595 bp, Homo sapiens
gctgagatcgtgccattgcattccagcctaggtaacaagagagaaactccgtctcaaaaaaaaaaaaaagttctgagaagggcaaataaagctaaggcattagcccagatgagaaaataataaagccttgaagaaacaatatcacgtgtacaccaattggaagatattaaaggggtattaatattgcagaatttagttgctggatgtgggggtgagccccaggtttctattctgaacaaccaggtgggtgatattgccattcactgggataggaaatataaaaagaataggttgttaatggtggttaaggtgaaggtgctaagagctcctttttcagatgtggagtttgagtgtttatagctgcctaggaggcaaytgtatctggaattcagagacagaccagcactggtgatgtagatcaataaaaaattaggatatgggtgaagatttaaaggcatgggggtggataagatcatccaaaaagtgtaggcaattgacccttgaacaacatgggtttgaactgccggttcacttacatgtggattttttacatataagtaaaaagtagaaaatacagtattcaagggatgtgaaa

SEQ ID NO: 518136 - DNA, 577 bp, Homo sapiens
atagagatggggtttcaccatgttggccaggctggttttgaactcctgatctcaagtgaccaacccacctgggcctcccaaagtgctaggattgcaggtgtgagccaccgtgcctggccacactgaggagttttagaaatatgtgctaagcattgaagaaagagtaggcattctccaggtgtttatgtgtatatttgtatgcagacacagaagaggttagggtggaccaggcaaagggaacagcgtatataaaaatataaaggtgggtgaaaagaaagtggcctttttagagaactaagaggtttggtatggctggaacagaargtaagatgatcaggtagcaagaaatggagagctttgataccttgggatgggaaatcacctgttgaatttaaatcagtgaatatttatggaatggagtacttctcagtgccagtgctcttctattcattcacatgtattagctcgtttaatcctcacaccaactctatggaataaggaagagagagttaaaaatatttaccaactggcgtggactggtcctcattggcagccatcctagcaggagggatgccag

SEQ ID NO: 518137 - DNA, 468 bp, Homo sapiens
cccaaagcacccacctgctccaggtgagaggggtgggaccaggggaggggaccctggccagsaggtgagatcctggaggaagagaagggcaggccctctgccatgtcattcacagccacctgcaaacaactggtgctcaataaatggtgggtgagcattggttggatggaagggaaggctggaaatggcagcggctcaagtgttaacgggatggccagtccccctgtcctccagcaagctggatgcggctgagacacacattggctgggaggggggtggaccacctggggcctgggggtgtttagattggggaagatgaaggatgcgtccgggaactccagcctgggtggctgacgggggtcagtggcctgtttgggcgcctgcccagagcagcccacgcctgcctccccggggcagatggggatacactaggcagggtcaggggcaggctgctcaggggtgctttcc

SEQ ID NO: 518138 - DNA, 418 bp, Homo sapiens
cctactagtaaatttgagttgctgacatctaagctgtaagaacacattgtcttattgctgaaagtattataggatggaccccaaattctgaagtcactgggatttggaatctcctaatgccttctaacctctcattcaggcctgtgatcttggacccagccgaacccacaggtgacgtgggtggaggggaccgttggtgttggcatcttctggcaaaagaagcaaaggaatggttatcctctccctgcttcaaggatgggactgsaaacccaataccaccttggaaagtgccggtaaaagtcatctaaaggaggcgttgtctggaaatagccctgtaacaggcttgaatcaaagaacttctcctactgtagcaacctgaaattaactcagacacaaataaaggaaacccagctcacag

SEQ ID NO: 518139 - DNA, 521 bp, Homo sapiens
ctggggcctgaggacatgacaggcagcgtctcagcaaggccggggcacagactcgtaggcctccggttcagaacagccgtggtggcccagcctgtgcccgggtgtgcacacttcagagccctgcacagacgcckctgcaggattttgctttttaacattgtttgctccccaaactatcaaataatccagattcagaccctgaccttgggccgactcagcagtggcctctggtggaccggctcctgctgctcctccttggtcaccctgacctctggccactgtcccacccggctctaggggcacccagtgggctgagaccttcggcagctcaggctatgctgttgggcagagcgggtctccagggtgcctcacccagggctacgcaggaggcctttccagcagttccactgaggctctggacagggatgctacccacacaccaccctgggacgccaggggttttcgacacgacgatcggtcagaatctgcagtgttctcttcagtcaaaattgctcactgcg

SEQ ID NO: 518140 - DNA, 643 bp, Homo sapiens
agacagcagagacgagttctagtcccaggaacacatccgggcatgagggcatgagcctgggccagacctcatcttagcatttgcttcgttagtgtgaccctgggcaactcacccaggtcctcggagcctcagtgccccaggtgatgagaaggatagtgcccactgtgcaaacgactgctcaatgtgccaggccccggcacaggagctggctctcatctcccgccccggcccaggcctgcggctgtgcgagccacagaagctgcggcagaggggcatcatctcctgccagcacccctccttgctgggaaactgctggaaggctcctgttgggacctatggggctgggcggggcactgaggggccccggcagaggcttcrgcacaacctgcccctcacctgggcagctccctcagtaggaggctggcgaggcaggcacagcatggggaagaaccccctagtgtcctctggctgcggggttagggtgagggttagccttctcccttgtgtctgaaaaattctgaggccgtgtacagagtcagcaaggagtccagttccaggataaagtcctctgtgtgaactctcaggctcgaactttcaggcaatgaacagggctctacctcgccggcctcacagggcagctgct

SEQ ID NO: 518141 - DNA, 441 bp, Homo sapiens
tactcctgaaagatgccattagatggaatttggatgctctggggccatggccttccatgttctgggaggctcgtggattcctgtggatcgtccccccgamcctgaggctcctggagctgacagagcccagcaggcccatcctccatctctgacgtcacaggcatctgagggcagggccatgcactacgagtccatgatgtaccaggcgggggagccagtggctattctaggaaaattccatctccagagcatgaaaagacagataaagatcagtgtaactcacctgtgctgagtaacatggtgggtcacggtggggctctggaaccaggatgtcttgacctgagtcctgaattggccccttcccagctccgtcacttgccgtgagtcctccaaccaccatgggcatcgcggcttcatttgtaaagtggggcaagagtgtgc

SEQ ID NO: 518142 - DNA, 441 bp, Homo sapiens
tactcctgaaagatgccattagatggaatttggatgctctggggccatggccttccatgttctgggaggctcgtggattcctgtggatcgtccccccgacccygaggctcctggagctgacagagcccagcaggcccatcctccatctctgacgtcacaggcatctgagggcagggccatgcactacgagtccatgatgtaccaggcgggggagccagtggctattctaggaaaattccatctccagagcatgaaaagacagataaagatcagtgtaactcacctgtgctgagtaacatggtgggtcacggtggggctctggaaccaggatgtcttgacctgagtcctgaattggccccttcccagctccgtcacttgccgtgagtcctccaaccaccatgggcatcgcggcttcatttgtaaagtggggcaagagtgtgc

SEQ ID NO: 518143 - DNA, 441 bp, Homo sapiens
tactcctgaaagatgccattagatggaatttggatgctctggggccatggccttccatgttctgggaggctcgtggattcctgtggatcgtccccccgaccctgaggctcctggagctgacagagcccagcaggcccatcctccatctctgacgtcacaggcatctgagggcagggccatgcactacgagtccatgatgtaccaggcgggggagccagtggcyattctaggaaaattccatctccagagcatgaaaagacagataaagatcagtgtaactcacctgtgctgagtaacatggtgggtcacggtggggctctggaaccaggatgtcttgacctgagtcctgaattggccccttcccagctccgtcacttgccgtgagtcctccaaccaccatgggcatcgcggcttcatttgtaaagtggggcaagagtgtgc

SEQ ID NO: 518144 - DNA, 441 bp, Homo sapiens
tactcctgaaagatgccattagatggaatttggatgctctggggccatggccttccatgttctgggaggctcgtggattcctgtggatcgtccccccgaccctgaggctcctggagctgacagagcccagcaggcccatcctccatctctgacgtcacaggcatctgagggcagggccatgcactacgagtccatgatgtaccaggcgggggagccagtggctattctagraaaattccatctccagagcatgaaaagacagataaagatcagtgtaactcacctgtgctgagtaacatggtgggtcacggtggggctctggaaccaggatgtcttgacctgagtcctgaattggccccttcccagctccgtcacttgccgtgagtcctccaaccaccatgggcatcgcggcttcatttgtaaagtggggcaagagtgtgc

SEQ ID NO: 518145 - DNA, 557 bp, Homo sapiens
ttgcttatagctcaagtctgaccatccagttttccagccttcaggctccccctcctggaatccccactcccttggtccctcctgtctagtttgtgctgactcaaagctggccctcttggacctccagtctgttttggggaaatagctggattctggcaccagtggccctcttggctctgaggcagaggtgagggccctggtgcctactagaaacatttcgggcagccagcaggctctcatgaggggagggcttcatgccaaggtcttctttcagcctcatgtcatctatgtcagcgtgcagagatgccgaggctggccacttggcgaggactatgaggtcttctagcgagggctcagagcttcactctgcctatttgaaagcagcatgatgtgtgttttatgggggagggggtgrtgctgggaggaagctttatgtaattcttggctggagctcaggtaattgttttaatgaaatggaatgcagcttattcagaattcgcttggcagaaacagccatgttctgttctgttttcttgttggggagagcagggcacaca

SEQ ID NO: 518146 - DNA, 542 bp, Homo sapiens
tgttttgaatcgtagaactctgggtgagctggagcaaggggggtggaaccctccagggagctccagggagcttcaggccgattctcttctggatcccggtctgtgtgtattgttttgaatgagccttggagactttggcctcttctaaaacataaaaaccctactgaggccaggcgcggtggctcatgyctgtaatcccagccttgggaggctgaggcaggtggaacacctgaggcctgaagttgggagttcgagaccagcttgaccaacatggagaaaccccatctctactaaaatacaaaattagctgggcgtggtggcgcatgcttgtaatcccagctactcgggaggctgaggcaggagaattccttgaacctgggaggcggaggttgcggtgagccaagatcaggccactgcactccagcctgggtgacagagcgagattccgtctcaaaaacaacaacaacaacaaaaaaaaaccctattgaaagcaggctatgaaatgggtgtaatgcctgccttccacattgttgggagactga

SEQ ID NO: 518147 - DNA, 653 bp, Homo sapiens
gaaattaataaaattaataaaggggctttccagggaacaagagggctaatgactctagctctgtgggaaagactaaccgccaggtctcattgcaggtggaatgtaagaaagctcagccaaaggaggtgatgtcgccaacgggctcagcccgggggaggtctcgagtcatgccctacggaatggacgccttcatgctgggcatcggcatgctgggtatgcgcgagcctgcgcctgcggcttctttctgccagaactgctcccaggrctagcaggggctgtgtgggtgttgcacctcccctgtggtctgccctcctcctgtctgagtcattgagcaggagtggggacaagggatctgtcgggtctggcagtcctacccaaggtggggtggtttggttggggggtgctgccctctggtggtagccagcagaaaggtccaaccatattcattggtcctgtcaatctgtccattctctcgtccatccatccctccatctgtccattcctctatccattcatccatccagtacacagttattgagcaactctatatgccagacattatgccaggaactgcaacaatgactttctttacaatctggcagggaaaacaagtaagaagataaaatagatttcagatgcagaagtgtagggtg

SEQ ID NO: 518148 - DNA, 406 bp, Homo sapiens
ctttgcaggacccaaccaaaacagcaatctctctccctggctttgaagccattcccaagttcaaagggtcaccaagcrgatgcatctggaggcccctgcattcgtggtgtgggaagctcagtgcacaagccaacaggaagaagggcactgctgatcctcccaggagtccagtccaaaagctggcatcgcagccccacagtgctcccaatgacgcaagtgccaagaaaggagtccagggatggcccttctgaagtctctgcctcctaactctgccagagcattcgccattggaacatcgacactaacccacccaggactgactccagaggccctgagtgtcaggcataacagtgcccacccactcagggtggcctgcacctggccccacaatccaccctcttcctgc

SEQ ID NO: 518149 - DNA, 507 bp, Homo sapiens
tgtgctggcaccctgatcttgaactttcagcctccaaaactgtgaaaaaataatttctgttgtttataagtcactcggtctacagtattttgttgtagcagcctgaactagacaccaagtttaattgctgtggggtgagagtcaagggaagaaggaagccagggaggaaatgggggtttaggaatgatttacatgaggaaatccctggcagggacctgagtgttcgagtgcaccagcactcaactctgaagcttcagttctctttagaactctgcatagcartgggaaacttgcccattcaatgggtgcctcgcatttccagaccacacagctttgaaaaagaaaggttttagacctttggagaagtggacaagcgtatgccctggggttggtctaagttgttagcagtttcacttagccgtttcataaccaggccttggcataagcctccccaggttcaaatctcagtttccttacttattagctgtatgacctggagtaattcaa

SEQ ID NO: 518150 - DNA, 606 bp, Homo sapiens
tcatgggctgctccctcatttcctcgacctgctccccgtccctccagggccgccccccacttcacagactagcaccccccttcagggataacccctcggagcccacccctttcatttcacaagtcagatgcaaaagctagagatgagcgtgtgatgaccacacccccatttcaaagacaagtttcccagtctgcctgctcttctgaccccccacttcaaatctggtcaccccgtttcaaggacccatcactcattttctctcactgacctccccgctctgtggaccagcccctcaattcacagaccagtccgtctaccatggtatctaagtctagaacggtaatttgggagtyctgattctctccccacccctagattctggtgaaatgccaggggaatgaggtggaaggtgggcccaaggtatgaccatccctgaacgtgtcctggctagcagagtcccctccaccctctctgcgtcaggccctgctggaagccacgcaggtgaaagaggacaggatgcccagaacagagttttactgttttcctgttattggagccccaaggctactcttttcagtccagtcttgatctggtgttaggggaaag

SEQ ID NO: 518151 - DNA, 663 bp, Homo sapiens
aaatttatagctctctgagcagaaaaatatcaacacagcgtgttctgcccttccctgtgtgttctctccactttgttctttggggtggctgcttggtggcttttcttattactgtttagatgctggtttggcccagagttcgctctgttcaagttctggccggagtttcctggacagagttcccacaacactgagatgcactctgactgtgtkttctaacccgattgcttgctcttcctctgttcatgttctcagtgtacttggtgggggctttgaccacaactgtggtctaatcatgatcatgtgcgcttcatgggagacaggcactgtactcagcactttacgagctgtatcacaacctttcagaaagggaggtgttttcgctccactttatacatgtggaaacctgagctcagggaagtttagtggtagtgctgggatttgaacccaggctcatccaattccagatccggttatcttaatcatcataaggtggtaggtgctggtgactaaccagggggatgagccttgggggctgctgagtaattgatagttacctttaacaatctctgccctaggggcccatcccaggaaatggcaaagggtgtgtccagtgcaagactgggtagctttgccttcccatcctctagcagggggaacagc

SEQ ID NO: 518152 - DNA, 664 bp, Homo sapiens
gctggatgttcgtcatattgaaaagtatgtagaccaaggtaaaagtggaacaagagaattactttggtcctgggcacagaaaaacaagaccatcggtgaccttttacaggtcctccaggagatgggacatcgtcgagctattcatttaattacaaactatggtaaatgctgattcttataatgtggctyttaatctgtaataggaactgtaatttgtaaattcgaatattgcattttatccaagacattgactcatgctctgtgtcagtgtttccttacctgtggcttttatctggaagggactttccagcttcacattttcttgtgacactttcttcccttatcacctaacttatacaacatatttctttctatcactttatagttttgtttttttaacttacttttacttacaaactacacttttaaaaatgtttcatttttagcagttaatagaatcagctctctgtcaaaaactctgaaactctttgagtcataaacagttggaatcacaatatttgagatacagatcatgctattctttgttttactatatattacaagttaaaaatataattgtattttcccccatatttaatattttatattgtacctacctccagaataatctggggatgtttcttttatcttcactgctgttttt

SEQ ID NO: 518153 - DNA, 600 bp, Homo sapiens
tggaggtgtgtgtatgaaaacgtaggtcttcctcatgaatagcatttcattcagtgcagcggactgggtgtagggaagatggtgagaagaggatgctggaaagatattaagtctgtgggtgatttttaagtaggagactgaaagatttgtgttgttaaaatatgacttagattctaggttagatagtggattggaagttggcagaagaattgggggaaagatggcaagagctagctggaggcaggctgggcrtggtggctcatgcctgtaatcccagcactttgggaggctgaggtgggcggatcacttgaggtcaggagttcgagaccagactggccaacatggtgaaaccctgtctctaccaagaaatacaaaaaaaaaattaaaaaaaaaatagctgggtgtggtggtgcctgcctgtagttccagctactcgagaggctgaggtgagaggattgcttgaacccaggaggcagaggttgcagtgagccaagatcatgccactgcatttcagtgtgggcaacagagtaagaccctatcaaaaacaaaacaaaacaaaacaaaacaaaacaaaacaaaacaaaaccaccagactggagg

SEQ ID NO: 518154 - DNA, 600 bp, Homo sapiens
tggaggtgtgtgtatgaaaacgtaggtcttcctcatgaatagcatttcattcagtgcagcggactgggtgtagggaagatggtgagaagaggatgctggaaagatattaagtctgtgggtgatttttaagtaggagactgaaagatttgtgttgttaaaatatgacttagattctaggttagatagtggattggaagttggcagaagaattgggggaaagatggcaagagctagctggaggcaggctgggcgtggtggctcatgcctgtaatcccagcactttgggaggctgaggtgggcggatcacttgaggtcaggagttcgagaccagactggccaacatggtgaaaccctgtctctaccaagaaatacaaaaaaaaaattaaaaaaaaaatagctgggtgtggtggtgcctgcctgtagttccagctactcgagaggctgaggtgagaggattgcttgaacccaggaggcagaggttgcagtgagccaagatcaygccactgcatttcagtgtgggcaacagagtaagaccctatcaaaaacaaaacaaaacaaaacaaaacaaaacaaaacaaaacaaaaccaccagactggagg

SEQ ID NO: 518155 - DNA, 505 bp, Homo sapiens
gctgcagtagtgccagcccttggcaaaactgtgaagcttgttttggggcattgctcacagttctgcaagcggtgtgtttgttgcacaatcccagagggtccattgtcttgtagycatagggcaatctgtgtgttaataccaaatttttccagcagatggcagtaaagggtcttgaggaaggagtgacttctaaaatcttatcaggttgcagtttggactagactagagggccatcggccttccctttcacggttctctgttttacggatggcggtgtttgaggaaagggaagattttaattgcttaaacgaattccctgcaaagtgttagcagatgaggtttaaatatcatctatattagggctgttagggatttactagccaccaagatataaaagagagaactttaatggtgaaatttcatgcactgagacaaagagaaaaaattgctttttcctttctttcctttttttcttcacacccaccttccttccaagacaatgctt

SEQ ID NO: 518156 - DNA, 549 bp, Homo sapiens
aaaagaccagagattcaatcccaggttagttgttcaaatctgtttaccacaccatggggtctgcatcattttgtctgaacaaggcacycagaacatttgctgaagtgattttagaaggtatcagatctgctaaccttctgatgtatataatctaaaaccctactgatttaaaaatttgtagcaaaagattgggtggcatgggtccataggtacaacaccagcaaactttctccaaggtatctccatgttccataccttggtaacctctaaagtatccgtttttctgtttgatcagtaatacttaaaaataagcacatgttcttttctcctctctgagcaagagagtagagcaccaggccgtggctctgtctatctgatgtccactatctactgccttccaaaagattagtctctctgaattattttaagttgcaggagaaccaaccaggtatacaccgactgtgaaatacactacctcaatttcctttcaatccactgcttttcatttcatagatatagttggaatcataataggtgtagggatcttgt

SEQ ID NO: 518157 - DNA, 645 bp, Homo sapiens
tgatatagaaagctctaatattgactacaagacattttctctctttatttcaaggggaacatggaaatagtgtacccaaaggtgrtcataagtaattaggatttctctaccatctcccacaggacccactgagttggctttaccctgcagttgaattattgcctcctgaacaccatgtttcactttaattattcggcattaattcagaacctcaggtttttcacatactggagaaataagaatgaattaggcatgttttatgccatcaacggagtttcttgtaatcacttcgggggataaaatgatcaggggttcctatttcctagactttcctgccacaaagcaggaatatcccatcacacaatgtgtcaactagatatgaaattgaaagtctagcaattctcaacattgccctagggagacaatccaccaaaggccagactgcagcagcatagtcaccatttgctgtgctaaatatcattaactactatgatatcactctgaaaatcatctatgctttcaagtttttatgcagtcatctcacagctatgtattctaactcatttataatgatagtgtatcattaactgattgtttagaagccccctggtaaaaaatattttctcctcctaaaaatttgttagg

SEQ ID NO: 518158 - DNA, 625 bp, Homo sapiens
ttcaaacagagccagcttagactaggaaaaataaagatcactcttttaatacatgtcctgcagggcctgcgttggcaatctctcccatacatggcctcaaatgccatctaaatttcactaacttccaaatgtataccttctagccagaccatgtccctgatctctagagcaatctacatattgtcaactcaacttcatcatgtagatgttttaaaaccagtcccaactcaataaatccccaactataataattccatgatttctgtcttcaytctatttctgtccatccacaagaaagaaaaagatcttatccacttaattgtgttacagcttttttctatctcaacaaattttattcatttattcagttatataaactaaaaattcagaaataattcttgagaactcccttctcttcttcccatataccaaatctattagcaaatcttataaattttctccttgtcaataaccttcacgttctattttctctcctgataccaccaaagccattcactatcatctcttgaaagtactgcctctccagttctctggcctcccagagctcttaggaaaaggcacagtcctgccttctccagcattgtcatatgctatctatcctttg

SEQ ID NO: 518159 - DNA, 625 bp, Homo sapiens
ttcaaacagagccagcttagactaggaaaaataaagatcactcttttaatacatgtcctgcagggcctgcgttggcaatctctcccatacatggcctcaaatgccatctaaatttcactaacttccaaatgtataccttctagccagaccatgtccctgatctctagagcaatctacatattgtcaactcaacttcatcatgtagatgttttaaaaccagtcccaactcaataaatccccaactataataattccatgatttctgtcttcactctatttctgtccatccacaagaaagaaaaagatcttatccacttaattgtgttacagcttttttctatctcaacaaattttattcatttattcagttatataaactaaaaattcrgaaataattcttgagaactcccttctcttcttcccatataccaaatctattagcaaatcttataaattttctccttgtcaataaccttcacgttctattttctctcctgataccaccaaagccattcactatcatctcttgaaagtactgcctctccagttctctggcctcccagagctcttaggaaaaggcacagtcctgccttctccagcattgtcatatgctatctatcctttg

SEQ ID NO: 518160 - DNA, 625 bp, Homo sapiens
ttcaaacagagccagcttagactaggaaaaataaagatcactcttttaatacatgtcctgcagggcctgcgttggcaatctctcccatacatggcctcaaatgccatctaaatttcactaacttccaaatgtataccttctagccagaccatgtccctgatctctagagcaatctacatattgtcaactcaacttcatcatgtagatgttttaaaaccagtcccaactcaataaatccccaactataataattccatgatttctgtcttcactctatttctgtccatccacaagaaagaaaaagatcttatccacttaattgtgttacagcttttttctatctcaacaaattttattcatttattcagttatataaactaaaaattcagaaataattcttgagaactcccttctcttcttcccatataccaaatctattascaaatcttataaattttctccttgtcaataaccttcacgttctattttctctcctgataccaccaaagccattcactatcatctcttgaaagtactgcctctccagttctctggcctcccagagctcttaggaaaaggcacagtcctgccttctccagcattgtcatatgctatctatcctttg

SEQ ID NO: 518161 - DNA, 625 bp, Homo sapiens
ttcaaacagagccagcttagactaggaaaaataaagatcactcttttaatacatgtcctgcagggcctgcgttggcaatctctcccatacatggcctcaaatgccatctaaatttcactaacttccaaatgtataccttctagccagaccatgtccctgatctctagagcaatctacatattgtcaactcaacttcatcatgtagatgttttaaaaccagtcccaactcaataaatccccaactataataattccatgatttctgtcttcactctatttctgtccatccacaagaaagaaaaagatcttatccacttaattgtgttacagcttttttctatctcaacaaattttattcatttattcagttatataaactaaaaattcagaaataattcttgagaactcccttctcttcttcccatataccaaatctattagcaaatcttataaattttctccttgtcaataaccttcacrttctattttctctcctgataccaccaaagccattcactatcatctcttgaaagtactgcctctccagttctctggcctcccagagctcttaggaaaaggcacagtcctgccttctccagcattgtcatatgctatctatcctttg

SEQ ID NO: 518162 - DNA, 616 bp, Homo sapiens
tttttttttccccccccccagaataatgaaatcagtacgtattttcccctcttttttccttttcttctttcttttgtttctttcatcttttctgtcagtaaaaaatactcaatgagattttcatacttggtttagataaaatgaaaatttttacttttttagtggttgtccccatcagaatcaaacatagtgagcaggaaraaagccctgtttttttctacttagatactgtgcctagttttaacattttgatttgactgaatgaggaacaatgttatctgctgaagaataatattaacacaaaacacaatagaacttgtcacaagacgcatgacaaacataacatgtagtctagagctttaattaacatatttgttaaacgctaattctgtgagtagattaccaacaaagaaaagacttctcccagcacagatagtgcagctaagtttgccttcctttaagagagtctgacagttatatgagtaagctctgtaattctgctgggaaccaactcccattcttctgccatccaggctttcaaaatcagaatggaggagaaaagcagtagcttttattgctctacaattgattctaaggcagaagctgtacatggatg

SEQ ID NO: 518163 - DNA, 564 bp, Homo sapiens
ctctatgacattattttacttgattttggactccgacaaatctatcaaaatatttggtcaatttaagttactgcatgcagttcattaagtccatctctctaagacaattgttaggtctcataaatattgattctcgcagatacaagatctttcaatcatagctagcattctgtggttgtatggacaagacagtagtaaactgaattttatcttcactctttaatgttcagtgttctttacaaaacaaatatccaatgtacctattcattgcattttcaaagcgtaataactaagaagattctagatatgggtgtctagtcaattctaccttggaatcaccataggattgcactgcacataaatcttctgcaagatatgtatccagttattgctggctcccccctttttyttcaatatacatgcagcctattaagtttttgatgtggctttcaatagatggtggaacggaagataggaatagtttctcagttattacattgccagtaaaataattggttcatgactctgtgtgtgtggtcaattgcagtgtttctaatctctctc

SEQ ID NO: 518164 - DNA, 639 bp, Homo sapiens
tttacaaagacttgcaaaatagtgagccaattatactatcactggattaagcctaatgatcaasctaagtgacagattggacaaaaagatttcaaaggtccttggattctgtgaaatactcattaataataataggagttaccaacatctgagaacaaattgttgtatccatcctgcttccttccattcatggtagaagagcaatgtcataagagaagcagaccctttggcagaaaagataccatatggagactagagatgcctgttttcaaattctttattggattgggcagggtcttctagtatgaatacacatgaataaaattatgataaggagaaaaataaattatgtattaagtacatatgtcaggttctgtgatcaacatctattatttcctttaattcccccataaaataaaccccacaaaaaccctatgactttggcattcttattatttagctaaacgatcaggctcagagaaattgagaacaaacaaggtcactcaaaatccgctgtctttccatcatatcaagccttgccttaggcgcttcctactcccgtacctctcacttgactcctagtcatgttgatatttctcctaatatcagactacttggactttattttttctgctgatc

SEQ ID NO: 518165 - DNA, 574 bp, Homo sapiens
gaatgtaaccagaacaggtcagctagttgtctagagtagacctcagggtgcttctggctttgtgaattcactgtactccttaatctaactctcagcctgtgggtttggaaccatgttttttgggaatgatgagagtgactgtttctcatgctggacacatgttaactgcatttgtagacagtgatatataaaaccagaaaatcagttgatttcattataataaggagtaaattggccaggatcttggacacacgttctgtggccaatactttctttctttgtagacatgtgtcttaagagaccacattataatcataaagttcctgrtgaatattgaattagaacagaaagaaattaataattctatgggtattgaggacatctgttaaattagcatgcaacattcatctctaaaacatacacatgatacaccgatgaagcaagtcaaatccttgggcatttaagaattttagtgggtacggtcgatgctgttggtttttaatatgtatttttttttaccttgtctcatatgtgcttgggttcctgacaatttgctttctgattgtctcattac

SEQ ID NO: 518166 - DNA, 642 bp, Homo sapiens
attctgacaaggaaacatggaatgtaggtagctaaaataatagagaggtgcattaagtattttcattgaaaaaatttacaacttgaggattggcaaaagccagataagtggcaataagacaaactaaaatatttctatttagacatcaataagtgacttctgtaaatgtttctgatataactgacatattcctggagctggaactattttcatagaatttaaaatgttttaaaattagaatgcttacgttatgtgaaagacatggaggaacaaagtaactcagaataaaaattttaaaagggttaaagatagaagtgcrggcaataaagtagattctaaatccccccccaggctgccagtgtagcagtctgaaaactgctcttctgagaatttctttcgagcttcatgcattccagttgaattctgccaacaggagggacttgcatgagattagaaggtgagaacaagaaagataacagaagcattggtaagagtgtgggctccttagatcctgctcaaagcaagggttctgacaacattagcaatgagggcagattcataagctctggataaaaccactttatcccttttgcttctccagcccatccttcactttgataaccaattcctcatattaaaccc

SEQ ID NO: 518167 - DNA, 635 bp, Homo sapiens
tcacataacgcctgttattcctaggaagcgtaaatcatgcctcatttttccctcctgacctgggcaagggagttaagacttggaattctgacagaattcagtcrtgggctaaaggcttccccagggagatatgaactcccaggtgcttctacctcagggcttgctatggattgaattgtgtcctcccagaattcacatattgcagccctaacccctaatgtgatgatacttggattggggcatttaggaggtaattagggtgaaatgagttcctgaaagtagagccctgatgagaggattagtggccttataaggagagatggaagacagtgtttctttctctctctctctctgtctctctctgtctgttttcttctctctctcccctctctcccccaacccatgtcaggacagagagaaggtggccatctacaagccaggaagggttcttcctcggaaactaatcatgctagcaccttgagctgggactttcagcctccaaaactgtgaaaaatttaatttctgttgtttaagccacccagcctatggtgttttgttatggcagtccaagctgactaagtcagtgtttcacatggcacagtggttccagtacccaaggcatcatccaaatggag

SEQ ID NO: 518168 - DNA, 602 bp, Homo sapiens
gcaggaagtccaattaagaagctgttggcattcatccaggtgagagatgataacggcttgaatcatagtaataatcgtggacgtggtgagaaataaacagatgctggttatattctgaaggcaaaatacagggtatttgttggcagattggatatgtagtgagagagaaagaaaaggagttaggctgggcgcggtggctcatccctgtaatcccagcactttgggaggctgaggccaggagttcgagaccagcctggccatcgtggcaaaaccctgtctctattaatactgaaaatataaaaattaggtgagcatggtrgcgcatgcctgttatctcagccactcaggaggctgaggcacgagaatcgcatgaacctaggagacggaggttgcagtgagctgagatcgtgccactgcactccagcctgagtgacagagtactctgtcgcaagaaaaaaaaaaaaggacttatagtttggtgctatataaaaagcaccaaaattcagtgctttttatatagtagcagtttagttactgtttgagaaaatttttggcttgaccccctggaaggatggggctacactttgataagaaagtgaagc

SEQ ID NO: 518169 - DNA, 497 bp, Homo sapiens
accactgcacctatctggaaagagagtcaccataccctttccaaatggcacactaaaacccaataacaggtgaaagtctgtctctatgaaagatattttaggaagtttggaagagacaactgttctaccagatgcacagacatcaatgcagggaccaatacagacagactattcaatgaaatcaggaaaacaattcacaatataaacaagaaattcaacaaagagatataaataaaaagaaccaaacaaaaacgctgtagctgaagaattcaataaatgaaatttaaagaaatacattagagagcttcagcagcacactttgatcaaaaagaaagaatctctgaatatgaaggtaagttatttgaaatttgtcattggagaaagaaaaggaaataagaatgaaaaagaaygaagaaagcctacaagacttatgagacaacattaagcaaacaaaactttctattatgggagtttcagaagaagaagggaaaaggtgt

SEQ ID NO: 518170 - DNA, 568 bp, Homo sapiens
gactttatttcagtttggtcttttggatacaaaagtgctgcctctgcagcccactctccaccctccaagcctctgcttgtgtattctgttcatgtgttaattctgaacagcatgtcaggactacctgctcagatgccagccttacctggttctctgatcatagtgtcacactgtagcaataagtcatccactgatttcacagccttgcctatttatttgattcttccagatcctagccaaattaaacactaatcttacctcagtcmtatctgttcacctgtcatccacaagccaatacttaaacttcggcaaaaagcacagtataaaacacatgcaaaagtgacaggaaatttcaagagaaaaacattttaatatagaagatttttccacttcatttattaatctcagtgtactctgcatacatttcctagagtatgagtctcagaacacattgtactacaatttcatccagatttttattacagcagtcaacattttctcttgagtaactttaaaaagagaatcaaacacatcctgccttcagacaaaaacaaaacaacagcagcag

SEQ ID NO: 518171 - DNA, 568 bp, Homo sapiens
gactttatttcagtttggtcttttggatacaaaagtgctgcctctgcagcccactctccaccctccaagcctctgcttgtgtattctgttcatgtgttaattctgaacagcatgtcaggactacctgctcagatgccagccttacctggttctctgatcatagtgtcacactgtagcaataagtcatccactgatttcacagccttgcctatttatttgattcttccagatcctagccaaattaaacactaatcttacctcagtcctatctgttcacctgtcatccacaagccaatacttaaacttcggcaaaaagcacagtataaaacacatgcaaaastgacaggaaatttcaagagaaaaacattttaatatagaagatttttccacttcatttattaatctcagtgtactctgcatacatttcctagagtatgagtctcagaacacattgtactacaatttcatccagatttttattacagcagtcaacattttctcttgagtaactttaaaaagagaatcaaacacatcctgccttcagacaaaaacaaaacaacagcagcag

SEQ ID NO: 518172 - DNA, 548 bp, Homo sapiens
tggaattaataatagactggcagccttcttgacgcttagctgtttgctttacttaaatcaaagattttaaaaaagatgtttataataccttacagttgtgtagtgtagtgcttcaacatatacaatgtgcttttgtataattatttggcttttatagaaaactatgaaaggtaactaaaatagtttattttggaggaaagtgtggattacagaggagcagggttcccatgttaagtgtccttcccctttacaaaactaagtcatgacctgagcctttttttagggtgtcctatgaagttttgttagaatagcaacgggcctcattttttccatttgcccatctatcctgtttgccctaactaaaatacagagaccatgcaaccttatarcttgatggaaaatttttacaagatctttttataccaatgtttttacaaaatgcttggtatctttgtttttaataattttaaactcgtgttattgatccttatgtaataacagttttgtactcaaaccaagcttgcctttaatcttgtctgtctccagct

SEQ ID NO: 518173 - DNA, 607 bp, Homo sapiens
gggacatagaatgaggctgtaaccaaggaatacatgttggtgacttccatgactagtaagagtttggcagtgaggcaaggctaakggggggtttggcagttttcttatcacttgattctttttgccttggaaagttgcatcggtattccaactacactgactatttctttttctctacttcttagtaatgtgttcttcccttagtcctatgtgtttggtttaatgtaattaagactaatacaaacaaatttgctaataggattactagtagcaagcacactataaatatgcttagcctaaatgaatcacaatcattccctggtgcacgcaacattccttattcaacattccttattcaaattcatttactctatcttaataaaatcccaataggaactagaaactctaggccttttaaacagagtcagataacctcaaatgctagagaggaagaataaatagaaatttggaccttcttttatctagacagccaggtcaaactggccctgtgcaggaccaccatttatttcttggttttgtaaactgaatcctgtgattacagtggaaatccagctctgttcaagaatttttttcaaaggcatgtcca

SEQ ID NO: 518174 - DNA, 607 bp, Homo sapiens
gggacatagaatgaggctgtaaccaaggaatacatgttggtgacttccatgactagtaagagtttggcagtgaggcaaggctaagggggggtttggcagttttcttatcacttgattctttttgccttggaaagttgcatcggtattccaactacactgactatttctttttctctacttcttagtaatgtgttcttcccttagtcctatgtgtttggtttaatgtaattaagactaatacaaacmaatttgctaataggattactagtagcaagcacactataaatatgcttagcctaaatgaatcacaatcattccctggtgcacgcaacattccttattcaacattccttattcaaattcatttactctatcttaataaaatcccaataggaactagaaactctaggccttttaaacagagtcagataacctcaaatgctagagaggaagaataaatagaaatttggaccttcttttatctagacagccaggtcaaactggccctgtgcaggaccaccatttatttcttggttttgtaaactgaatcctgtgattacagtggaaatccagctctgttcaagaatttttttcaaaggcatgtcca

SEQ ID NO: 518175 - DNA, 664 bp, Homo sapiens
ggtatgtttttattgctcagtgaattaaaaggtttatataggattacattgttaagattcttggagaaaaacatataaacaccaaatgaaaactttscactcttttctttatcttttgcagcaaagcggttaatattccagaaatgaaaatcatttaaattttgcataatttttataatttcaggggttaagcatctgaaaggccagaatgaatcagcattccctgaagaagaagaaggcaccaatgaaagagaggagcagcgggaccattaattactggtctgcagcaagaaggcttcttggaaataactgaactattaacttttctgagtataccatggaattccactgcttgacttccagaagcatcctccatctctgcaccccacactcatacagtagctatgcacatcctggaagtctccttgactgaactttagaactaagtacacattgttccacatcacttataattaaagaataagcatttattttacagtgattcttctttttaactatgtaaaaatttgcatacatgtgactgttctaactttaatactgccagagcttaatccttgatgtcctactgataaggtttgcattctaacaacacatgtaaataacatcactttaagagtaaaaaataaatagtaaacacatttag

SEQ ID NO: 518176 - DNA, 664 bp, Homo sapiens
ggtatgtttttattgctcagtgaattaaaaggtttatataggattacattgttaagattcttggagaaaaacatataaacaccaaatgaaaactttgcactcttttctttatcttttgcagcaaagcggttaatattccagaaatgaaaatcatttaaattttgcataatttttataatttcaggggttaagcatctgaaaggccagaatgaatcagcrttccctgaagaagaagaaggcaccaatgaaagagaggagcagcgggaccattaattactggtctgcagcaagaaggcttcttggaaataactgaactattaacttttctgagtataccatggaattccactgcttgacttccagaagcatcctccatctctgcaccccacactcatacagtagctatgcacatcctggaagtctccttgactgaactttagaactaagtacacattgttccacatcacttataattaaagaataagcatttattttacagtgattcttctttttaactatgtaaaaatttgcatacatgtgactgttctaactttaatactgccagagcttaatccttgatgtcctactgataaggtttgcattctaacaacacatgtaaataacatcactttaagagtaaaaaataaatagtaaacacatttag

SEQ ID NO: 518177 - DNA, 625 bp, Homo sapiens
caagtttaaagtgtgagtatattttaggtttatttaaagaaaaatttagtaaaagtggtaccccaatcaaaaaagtaatatataattgaacgaaagtttggaagcactagttttttgtttttttgaggaaatgataattttattgggattgctagctaaccactttggctctgtagggacaatgcacccatttcaacagatgcatatttaaatatggaaagataaaatggcatgatgtgtgagatttacttttaaatacgtaagccaaaacagacataaagtaagcaagaaaaaaaagaaaaaatattgttagataaatcaagtaggtgaagtgttcaagaaactaggtcagtggtactgtgagatgtcctacattctggagttgtctctgttttttcctggcactatttatttatttattttagtttattattatactctaagttctgggatacctgtgcagaacgtacaggtttgttacakaggtatacaggtgccatggtggtttgctgcacccatcaacctgtcatctacattaggtatttctcctaatgctatccctcctctagccccccgccttgacaggcccctgtgtgtgatgctcccctccctgtgcccatatgtt

SEQ ID NO: 518178 - DNA, 625 bp, Homo sapiens
caagtttaaagtgtgagtatattttaggtttatttaaagaaaaatttagtaaaagtggtaccccaatcaaaaaagtaatatataattgaacgaaagtttggaagcactagttttttgtttttttgaggaaatgataattttattgggattgctagctaaccactttggctctgtagggacaatgcacccatttcaacagatgcatatttaaatatggaaagataaaatggcatgatgtgtgagatttacttttaaatacgtaagccaaaacagacataaagtaagcaagaaaaaaaagaaaaaatattgttagataaatcaagtaggtgaagtgttcaagaaactaggtcagtggtactgtgagatgtcctacattctggagttgtctctgttttttcctggcactatttatttatttattttagtttattattatactctaagttctgggatacctgtgcagaacgtacaggtttgttacataggtatacasgtgccatggtggtttgctgcacccatcaacctgtcatctacattaggtatttctcctaatgctatccctcctctagccccccgccttgacaggcccctgtgtgtgatgctcccctccctgtgcccatatgtt

SEQ ID NO: 518179 - DNA, 625 bp, Homo sapiens
caagtttaaagtgtgagtatattttaggtttatttaaagaaaaatttagtaaaagtggtaccccaatcaaaaaagtaatatataattgaacgaaagtttggaagcactagttttttgtttttttgaggaaatgataattttattgggattgctagctaaccactttggctctgtagggacaatgcacccatttcaacagatgcatatttaaatatggaaagataaaatggcatgatgtgtgagatttacttttaaatacgtaagccaaaacagacataaagtaagcaagaaaaaaaagaaaaaatattgttagataaatcaagtaggtgaagtgttcaagaaactaggtcagtggtactgtgagatgtcctacattctggagttgtctctgttttttcctggcactatttatttatttattttagtttattattatactctaagttctgggatacctgtgcagaacgtacaggtttgttacataggtatacaggtgccatggtggtttgctgcacccatcwacctgtcatctacattaggtatttctcctaatgctatccctcctctagccccccgccttgacaggcccctgtgtgtgatgctcccctccctgtgcccatatgtt

SEQ ID NO: 518180 - DNA, 574 bp, Homo sapiens
tctttgacctgaaatagtagtgctgtgcagagcaggcctgtgggccaaatttgccatgtagctggtctttgcatgctctctccccaccagctaagaatagtttacacttttaaatggttgtgaaggagaaaaggaagagaaaggagaaggatcagaagaaacagaaggaggaggagaagaaaatgatgaaggaggaggagaaaggaaaggagaagagggggaggaggagcagcaggatgagggtggtataatggtatgtggcttccaaagcctaaaatatttactatctgaccctttacagaaaaattttgctgacctctgatgtagacaaggagaaattgtttttaagaaraggagcaatatttccaaagaattcattagggagatttagcataacaactgtatacagaaaagactaagtaaaaagagctggaaagagaagccaaatgttcaacacaggtaaagtggtaaagacttaaagaatgcaacgctctttgattagaaagaagaaatgagtctataatccttatagaaattatacgctttaaattgacccaagcacaatgccatggca

SEQ ID NO: 518181 - DNA, 662 bp, Homo sapiens
gttatggcacattgtgatggcaaccctagcaaactaatacatccatagcgttgaattgtgtatgggaaatccccatcctccccaataccattgtgatataccctcagttggatttaaaacacagctactgcgtttctcctgctgccaatgaaacattcagcttcttggaagcacctgctatcagactatatcaaatcttcctttcctttatgctgtcatctaccaacttcatgatcatatcaaattctctggagattatagcacttccctaaatttctttataccagttctcctaaaatcattcttgaagacttcagtctccaccaagatgacccattccctctcccgtcactataaagcttccttacctagacccccacacctttgcccttctctcttctgtggtactcatctgacaaacctacaattgtgataaaaatccacctctctgtaattacagaatgcctgaaccccaatggagaagcacaactgacaaaagcctaaaactatgctgacggatgtcacayaaaatttttgaccacaatttttaagtgggcttcaacatttcctgaaaaatctactctatttccctctttaaatctgtcttaaattgtctcagaatgctattcactcctcaaatcttcaacattcccacaccttcc

SEQ ID NO: 518182 - DNA, 508 bp, Homo sapiens
accatgcagcctcaggacctgcagggctgtagtttctgtgggagtgttgtgagtttggttgtctctgtgtgtgtggctttgtgtgtgtgtgtatgtgtgtgtgtgcatttaagtggagtctgtgcaagtgaattaggctaatgcactgcagcacttttttttgtttcccatccttttggtggcctgtgtgtctttgcttgggctgtargtccctgtgttctttatttttatgtggatcaagaatccacagtgatttgggaggctggctcttacctgccatggtccaaatctcctacacatgcaaaaaaaacagccactctactagaaagaagaggagcacacctcacccaataatgtacatctttgactgtttgacctgtggccaacccagggagagacaccagcagttctgttggcagggccccttgaatttacctgtaattcagttcacaatagagcaagtgtttcccattgtgagggagcactcctcaattatcttgggaattca

SEQ ID NO: 518183 - DNA, 512 bp, Homo sapiens
gctggatggcctgggtagcttatttctctggagagacttagacagtgactcctgatacagagatgctgagactgcattttgtgcctggaggagagaattaccacgtgtgattgagagcatcagtgttcctccagaagagacatttctaaatgctgctagtgtgaaaamcgagcttatgttcacgtagcccctgggggaagaaaaacagtaatatttaacagtacattttaagaactaataaaattatttttaaaatcaaagcaattttaaagcttttacttcattagactccctggcaagaaagtcctgggaagacagaaagtttgtaggatgtcagagggaagtttgggaaaagtagaggaatgtacggcccactcagcctgggtcaccttcgctactgacctcatcttgtctcgactgggtactcctttcaggaagctggtgtctggaaaacttctcaattttagtatcaattattattcagaggttgaaaggcaagcctccacctaaag

SEQ ID NO: 518184 - DNA, 664 bp, Homo sapiens
tggatggcctgggtagcttatttctctggagagacttagacagtgactcctgatacagagatgctgagactgcattttgtgcctggaggagagaattaccacgtgtgattgagagcatcagtgttcctccagaagagacatttctaaatgctgctagtgtgaaaaccgagcttatgttcacgtagcccctgggggaagaaaaacagtaatatttaacagtacattttaagaacyaataaaattatttttaaaatcaaagcaattttaaagcttttacttcattagactccctggcaagaaagtcctgggaagacagaaagtttgtaggatgtcagagggaagtttgggaaaagtagaggaatgtacggcccactcagcctgggtcaccttcgctactgacctcatcttgtctcgactgggtactcctttcaggaagctggtgtctggaaaacttctcaattttagtatcaattattattcagaggttgaaaggcaagcctccacctaaagtgccagtcctggggccttggtgagaccctctgctggggagaaactccacttcacctgggggttcttatttatacaaaatggggaaatgagggggcagccaagcagcagaaaaccaaatcataagcaagaaccaaactcttggggagtttgattc

SEQ ID NO: 518185 - DNA, 664 bp, Homo sapiens
tggatggcctgggtagcttatttctctggagagacttagacagtgactcctgatacagagatgctgagactgcattttgtgcctggaggagagaattaccacgtgtgattgagagcatcagtgttcctccagaagagacatttctaaatgctgctagtgtgaaaaccgagcttatgttcacgtagcccctgggggaagaaaaacagtaatatttaacagtacattttaagaactaataaaattatttttaaaatcaaagcaattttaaagcttttacttcattagactccctggcaagaaagtcctgggaagacagaaagtttgkaggatgtcagagggaagtttgggaaaagtagaggaatgtacggcccactcagcctgggtcaccttcgctactgacctcatcttgtctcgactgggtactcctttcaggaagctggtgtctggaaaacttctcaattttagtatcaattattattcagaggttgaaaggcaagcctccacctaaagtgccagtcctggggccttggtgagaccctctgctggggagaaactccacttcacctgggggttcttatttatacaaaatggggaaatgagggggcagccaagcagcagaaaaccaaatcataagcaagaaccaaactcttggggagtttgattc

SEQ ID NO: 518186 - DNA, 620 bp, Homo sapiens
gatggcctgggtagcttatttctctggagagacttagacagtgactcctgatacagagatgctgagactgcattttgtgcctggaggagagaattaccacgtgtgattgagagcatcagtgttcctccagaagagacatttctaaatgctgctagtgtgaaaaccgagcttatgttcacgtagcccctgggggaagaaaaacagtaatatttaacagtacattttaagaactaataaaattatttttaaaatcaaagcaattttaaagcttttacttcattagactccctggcaagaaagtcctgggaagacagaaagtttgtaggatgtcagagggaagtttgggaaaagtagaggaatgtacggcccactcagcctgggtcaccttcgctactgacctcatcttgtctcgactgggtrctcctttcaggaagctggtgtctggaaaacttctcaattttagtatcaattattattcagaggttgaaaggcaagcctccacctaaagtgccagtcctggggccttggtgagaccctctgctggggagaaactccacttcacctgggggttcttatttatacaaaatggggaaatgagggggcagccaagcagcagaaaa

SEQ ID NO: 518187 - DNA, 514 bp, Homo sapiens
tgacctgtaaagacctcttaaaaattagttaaaaaacaaacaaaacagaaaaggagaaagaagaaacatccactcattaaaaaaaaaaaagaaaaagaaaagaaaagaaaaaaaggcaaaagacattattttacaggtctagtgccctgtgcccctcactgtaatgggggtggatatgggcttcacaggacatgaaattcatcaaacagttgctggttgaaggtgggaaaatcttgcgggaccgacctcaagagcagatcctgtggtgcactgtttcatcctgtagccctggaaagaaaacctggctgtgccgtgctttatgtttgcctgcactggccctgttcagaggcctgagcacgcatggacacctaagtctgcccaaactttccccatcccaatattctctgtggtattgagcatgacaccctgtcttcactgagcatgtgctcatacagttttgtagccaactcttyattttacaacaggaagactgagacctcccaaaaaggcaaag

SEQ ID NO: 518188 - DNA, 394 bp, Homo sapiens
gcaaagcacagagtattagggagggatccagcttcctaggccttgcatgcaccccacccatcaggtttgctttggaaatgagagcccatgagtcctggaaaaccctgtgctctactttctacctgggctttctactcttcaatgttgtcacataggygtgcaggcatgcacacacaaacacatcacacacacacacacacacaggcttctaaattggagatctaaagtggagattctaaagtgaggttagggaagaggaaaccaaagaagtgacaaaaggggaagaaacagtagatgcagctttccatgaggcagaggcatccactcccccagctacatgaccaggagctgacagcatgcgatgaaggatcctccaggttccctgggttcttcc

SEQ ID NO: 518189 - DNA, 499 bp, Homo sapiens
tgtttcaagaggacaggactggggttgtgactcccacttctgtgggcacctggaactaaaatgagctatgccctccacccaccaccccgtgtgatataaagacaggctacgggaaagaaagcctttgttttctccctcataaataggggtactgagaaggaataataccaaggattctagatactcataggtgtctgccgcccttggcttttcattggtaaatcactgtgctttgagactctgggaagaggcttttcagtttctagaggtccttcagagaagagagaggcctagagacttgggcggatgaggacttggaataaagcacaatgtgacaatgcactgggctctggagtgtggggcccagaaaaaatactagttttttgggctgtccttgaggtcctcattcggaagtggaagaaaataatgtcgccgaatgctgttaaaatgtttaatgagtgcacagcacacycaaagaggctgaggaaaataggaatca

SEQ ID NO: 518190 - DNA, 462 bp, Homo sapiens
ggaatccaatgtctttgttggaaacccggtgttatagtaccggcttctgaggcactgagcggtgagctgcgttttwaaataacagagtcactcacaacttagtgttgttgtgagactttgttgggggtgcccaccacataggctgagatgaagcatatacatgtgattccaaatataatgcacagcactggaatatttaatgccagaatacagtatctgattttcttttgatttcaacctcttctgctgtagaatggaaaaataaggccatatatataaaatatatatcttttatgtatacagatatatgaaatatatatcttttatacataaaggtgtatatgtataagtttatatattatatataatatataaatataaattatatatacatagtatatatatttttttgagacacagtctcgctctgtcacccaggctggagtgcagaggcatgatcaa

SEQ ID NO: 518191 - DNA, 535 bp, Homo sapiens
tctttgttggaaacccggtgttatagtaccggcttctgaggcactgagcggtgagctgcgtttttaaataacagagtcactcacaacttagtgttgttgtgagactttgttgggggygcccaccacataggctgagatgaagcatatacatgtgattccaaatataatgcacagcactggaatatttaatgccagaatacagtatctgattttcttttgatttcaacctcttctgctgtagaatggaaaaataaggccatatatataaaatatatatcttttatgtatacagatatatgaaatatatatcttttatacataaaggtgtatatgtataagtttatatattatatataatatataaatataaattatatatacatagtatatatatttttttgagacacagtctcgctctgtcacccaggctggagtgcagaggcatgatcaaggctcaatgtaatctctgcttccttggctcaggtgattcttacacctcagcctcctgagtggctgggattacaggcaagcatca

SEQ ID NO: 518192 - DNA, 310 bp, Homo sapiens
  misc_feature (1)...(310): n = A,T,C or G
gctgcctcaccacccctccctcacaccttaacgttccctcaggccctctcccgctttgtggtacccctnaccgcgagagggccctgagttggaaccggcgatccatggtaaccggagcccaacccagggactgatgggaaggcacttttgtccgtgggggacaggcccaggttctcggatatatttttttttatttcctgccacgggtgcctcacctcccctccctcaaagcttaccttyccctcaatggcttttgtccgctttggtgtacccctagccggcccgagacgctgcgtgggttctaagcagg

SEQ ID NO: 518193 - DNA, 310 bp, Homo sapiens
  misc_feature (1)...(310): n = A,T,C or G
gctgcctcaccacccctccctcacaccttaacgttccctcaggccctctcccgctttgtggtacccctnaccgcgagagggccctgagttggaaccggcgatccatggtaaccggagcccaacccagggactgatgggaaggcacttttgtccgtgggggacaggcccaggttctcggatatatttttttttatttcctgccacgggtgcctcacctcccctccctcaaagcttacctttccctcartggcttttgtccgctttggtgtacccctagccggcccgagacgctgcgtgggttctaagcagg

SEQ ID NO: 518194 - DNA, 579 bp, Homo sapiens
gggcggcattcaggtatgaggtttagacctccctaatcacctctgttcctgtgtaggaatgacaattctsatgattggtgggtgtgcacacagagaacacaatctcacctgtgttctgggccctgtgatgacactgtaccatctgagtgctttacaggatatgcaagagtgcttattttctctgaccttcatagtaagagaagacccataattttgcacattttgtaaagcctggatatgagacaaagtatctctcctattggttggtttaaggtatgaatgtcatcatcacacctacatgctaggccaaaatatatgtgacaatctcacatttgagtagtcagcaagcaggagggtctcatcacctgggtcattgtcagggatatgtcacattctcccctgaggacagggacaaggcaagaaagtcacatccctaggtattctgccagggatatgttcttgttccctcctgaaagcatgacacatgcagcagagtcacctcacctgggttctgggtccagcgatatgtcacaattttccctgtgagcaaggcacaggcaggagaaacacatcacctgt

SEQ ID NO: 518195 - DNA, 526 bp, Homo sapiens
cccatcacctgggtgaacagtgcacagatatgtcacaatgaccccatgtaggyaaagtctagacaagagttacatcacctgggtgttggacccagcaatatgtcacaatggctcatgtgggcaaagcacaggacacagtcatataacaaagtgccaggaccagtgttaggtcaggataccctttatgggcagtgccaagacaggagattagaagtatattaattagatgctggattcaaggatatatcacaatctcatctgtgggctacacccaggcaaaaaagtcaaatcactcaggagctggctagaggtgtacgtcagaatcacacctgcaggaaggtccatggatgagattaacaatccctcataagtgccagttctggatatgagagtgaacgcctcctgtatgttgcatctatgtgcataagtcacaatctcaacggaggaatgggttttttccatgagagccttaatcccttttgaaaactgagttatcttagtggactcacagcctcacaagtgtttt

SEQ ID NO: 518196 - DNA, 526 bp, Homo sapiens
cccatcacctgggtgaacagtgcacagatatgtcacaatgaccccatgtaggtaaagtctagacaagagttacatcacctgggtgttggacccagcaatatgtcacaatggctcatgtgggcaaagcacaggacacagtcatataacaaagtgccaggaccagtgttaggtcaggatacccwttatgggcagtgccaagacaggagattagaagtatattaattagatgctggattcaaggatatatcacaatctcatctgtgggctacacccaggcaaaaaagtcaaatcactcaggagctggctagaggtgtacgtcagaatcacacctgcaggaaggtccatggatgagattaacaatccctcataagtgccagttctggatatgagagtgaacgcctcctgtatgttgcatctatgtgcataagtcacaatctcaacggaggaatgggttttttccatgagagccttaatcccttttgaaaactgagttatcttagtggactcacagcctcacaagtgtttt

SEQ ID NO: 518197 - DNA, 485 bp, Homo sapiens
tgaacaggcaccagacaggacaagagagtcccatcacctgggtgaacagtgcacagatatgtcacaatgaccccatgtaggtaaagtctagacaagagttacatcacctgggtgttggacccagcaatatgtcacaatggctcatgtgggcaaagcacaggacacagtcatataacaaagtgccaggaccagtgttaggtcaggataccctttatgggcagtgccaagacaggagattagaagyatattaattagatgctggattcaaggatatatcacaatctcatctgtgggctacacccaggcaaaaaagtcaaatcactcaggagctggctagaggtgtacgtcagaatcacacctgcaggaaggtccatggatgagattaacaatccctcataagtgccagttctggatatgagagtgaacgcctcctgtatgttgcatctatgtgcataagtcacaatctcaacggaggaatgggtttt

SEQ ID NO: 518198 - DNA, 485 bp, Homo sapiens
tgaacaggcaccagacaggacaagagagtcccatcacctgggtgaacagtgcacagatatgtcacaatgaccccatgtaggtaaagtctagacaagagttacatcacctgggtgttggacccagcaatatgtcacaatggctcatgtgggcaaagcacaggacacagtcatataacaaagtgccaggaccagtgttaggtcaggataccctttatgggcagtgccaagacaggagattagaagtatattaattagatgctggattcaaggatatatcacaatctcatctgtgggctacacccaggcaaaaaagtcaaatcactcaggagctggctagaggtgtacgtcagaatcacacctgcaggaaggtccatggatgagattaayaatccctcataagtgccagttctggatatgagagtgaacgcctcctgtatgttgcatctatgtgcataagtcacaatctcaacggaggaatgggtttt

SEQ ID NO: 518199 - DNA, 526 bp, Homo sapiens
cccatcacctgggtgaacagtgcacagatatgtcacaatgaccccatgtaggtaaagtctagacaagagttacatcacctgggtgttggacccagcaatatgtcacaatggctcatgtgggcaaagcacaggacacagtcatataacaaagtgccaggaccagtgttaggtcaggataccctttatgggcagtgccaagacaggagattagaagtatattaattagatgctggattcaaggatatatcacaatctcatctgtgggctacacccaggcaaaaaagtcaaatcactcaggagctggctagaggtgtacgtcagaatcacacctgcaggaaggtccatggatgagattaacaatccctcataagtgccagttctggatatgagagtgaacgcctcctgtatgttgcatctatgtgcataagtcacaatctcaayggaggaatgggttttttccatgagagccttaatcccttttgaaaactgagttatcttagtggactcacagcctcacaagtgtttt

SEQ ID NO: 518200 - DNA, 610 bp, Homo sapiens
actgggattgtagttctgcggccctgtaatgaaaggtctggtgactttatgaaactacatctcccagcaagccaaaggaggcacacaaagctttgcctcttcatccaggcacacgcactatccctgwtcccggtgcatgatggaaatgtagtccttcagccctgtgaccaaagggctgggagtgtttatgagaccgcatctctcagcaactaaagcaaggcctgcacagccccgccttttcctccagtgacgctcactgttcactaaggagtgttcatgagattacattttccagcaagcccagcgagttatgcacagctctacctcttcttctagcgacgcgcactgtccctgattccgttgtatgctgggattgtggtgctgcagccctgtgacaaaggggctgggagtctttataagactacatctcccagcaagcccaagaggctctcacagccatgcaccaccccctcccgccccacttttccttcagtgacgcgcactgttccctgaacatggtgcatactggaattctcctgttgcgggattcaggaggacgagacagacctcaggttgaaacaggagaatctttattgagtgcactcaggac

SEQ ID NO: 518201 - DNA, 484 bp, Homo sapiens
ttcccggtgcatgatggaaatgtagtccttcagccctgtgaccaaagkgctgggagtgtttatgagaccgcatctctcagcaactaaagcaaggcctgcacagccccgccttttcctccagtgacgctcactgttcactaaggagtgttcatgagattacattttccagcaagcccagcgagttatgcacagctctacctcttcttctagcgacgcgcactgtccctgattccgttgtatgctgggattgtggtgctgcagccctgtgacaaaggggctgggagtctttataagactacatctcccagcaagcccaagaggctctcacagccatgcaccaccccctcccgccccacttttccttcagtgacgcgcactgttccctgaacatggtgcatactggaattctcctgttgcgggattcaggaggacgagacagacctcaggttgaaacaggagaatctttattgagtgcactcaggac

SEQ ID NO: 518202 - DNA, 484 bp, Homo sapiens
ttcccggtgcatgatggaaatgtagtccttcagccctgtgaccaaagggctgggagtgtttatgagaccgcatctctcagcaastaaagcaaggcctgcacagccccgccttttcctccagtgacgctcactgttcactaaggagtgttcatgagattacattttccagcaagcccagcgagttatgcacagctctacctcttcttctagcgacgcgcactgtccctgattccgttgtatgctgggattgtggtgctgcagccctgtgacaaaggggctgggagtctttataagactacatctcccagcaagcccaagaggctctcacagccatgcaccaccccctcccgccccacttttccttcagtgacgcgcactgttccctgaacatggtgcatactggaattctcctgttgcgggattcaggaggacgagacagacctcaggttgaaacaggagaatctttattgagtgcactcaggac

SEQ ID NO: 518203 - DNA, 484 bp, Homo sapiens
ttcccggtgcatgatggaaatgtagtccttcagccctgtgaccaaagggctgggagtgtttatgagaccgcatctctcagcaactaaagcaaggcctgcacagccccgccttttcctccartgacgctcactgttcactaaggagtgttcatgagattacattttccagcaagcccagcgagttatgcacagctctacctcttcttctagcgacgcgcactgtccctgattccgttgtatgctgggattgtggtgctgcagccctgtgacaaaggggctgggagtctttataagactacatctcccagcaagcccaagaggctctcacagccatgcaccaccccctcccgccccacttttccttcagtgacgcgcactgttccctgaacatggtgcatactggaattctcctgttgcgggattcaggaggacgagacagacctcaggttgaaacaggagaatctttattgagtgcactcaggac

SEQ ID NO: 518204 - DNA, 579 bp, Homo sapiens
tctaaacagtgtgcgtttctatatagcaaaatatagtattttattaarctttattatagtatctgtgaaacagttattgaacaatctactctacttcattattactggaagccagaacctcagttgtgttcactttctggattttatataagtgaaattgtacaacatgtatacttttactctactttcttctatgcaactttatatttatgatattaattcatcctattgcagatagctatagtttgtttaaaaaatattttttatattgtggcaaagtatacataaaattaaccattttagctattttaagtgtgcagctcagaaaaattaactacactcacattgttttgcaactattattcccattcatagggaccttctttcaacttccaaaaccaaaatttaatgcacattaaataacagctccctgttactccccctccagctcctaggaaccactcttctacttggatttctagaatttaactactctaagtatctcataagtggaatgatacagtatttgtccttttatgactggctcatgtcactttgcacaatgtccttaaggttcat

SEQ ID NO: 518205 - DNA, 579 bp, Homo sapiens
tctaaacagtgtgcgtttctatatagcaaaatatagtattttattaagctttattatagtatmtgtgaaacagttattgaacaatctactctacttcattattactggaagccagaacctcagttgtgttcactttctggattttatataagtgaaattgtacaacatgtatacttttactctactttcttctatgcaactttatatttatgatattaattcatcctattgcagatagctatagtttgtttaaaaaatattttttatattgtggcaaagtatacataaaattaaccattttagctattttaagtgtgcagctcagaaaaattaactacactcacattgttttgcaactattattcccattcatagggaccttctttcaacttccaaaaccaaaatttaatgcacattaaataacagctccctgttactccccctccagctcctaggaaccactcttctacttggatttctagaatttaactactctaagtatctcataagtggaatgatacagtatttgtccttttatgactggctcatgtcactttgcacaatgtccttaaggttcat

SEQ ID NO: 518206 - DNA, 545 bp, Homo sapiens
aatccttatctcttctacagtggcatagctaaaatcttcattcagttcttctaaacagtgtgcgtttctatatagcaaaatatagtattttattaagctttattatagtatctgtgaaacagttattgaacaatctactctacttcattattactggaagccagaacctcagttgtgttcactttctggattttatataagtgaaattgtacaacatgtatacttttactctactttcttctatgcaactttatatttatgatattaattcatcctattgcagatagctatagtttgtttaaaaaatattttttatattgtggcaaagtatacataaaattaaccattttagctattttaagtgtgcagctcagaaaaattaactacactcacattgttttgcaactattattcycattcatagggaccttctttcaacttccaaaaccaaaatttaatgcacattaaataacagctccctgttactccccctccagctcctaggaaccactcttctacttggatttctagaatttaactactct

SEQ ID NO: 518207 - DNA, 579 bp, Homo sapiens
tctaaacagtgtgcgtttctatatagcaaaatatagtattttattaagctttattatagtatctgtgaaacagttattgaacaatctactctacttcattattactggaagccagaacctcagttgtgttcactttctggattttatataagtgaaattgtacaacatgtatacttttactctactttcttctatgcaactttatatttatgatattaattcatcctattgcagatagctatagtttgtttaaaaaatattttttatattgtggcaaagtatacataaaattaaccattttagctattttaagtgtgcagctcagaaaaattaactacactcacattgttttgcaactattattcccattcatagggaccttctttcaacttccaaaaccaaaatttaatgcacattaaataacagctccctgttactccccctccagctcctaggaaccactcttctacttggatttctagaatttaactactctaagtatctcataagtggaatgatacagtatttgtccttttatgactggctyatgtcactttgcacaatgtccttaaggttcat

SEQ ID NO: 518208 - DNA, 638 bp, Homo sapiens
atgtatgtataaatcacattttatctatttattcattgatgataattcaaacaacacgggtaattcacaaaccttttgggtgatgtgagtaatgctgccatgagcctaggtgtacgtgtattattttgtgtctytgctttcacatcttttgctatatacccagatgtgaaattgtgggatcatatggtgactttaggtgtacattttttagttattatactgttattttatagcagctgcagcattttacatttccaacaacagtgtacaagggttctaattgctccacgtcctcaccaacacttgtgattttctgttttgtttcttttggtagtaactatgctgatgtgtattaagtgatatatcatttggagttatatttgcattttactaatgattagttttgttgagcaccttttcatggacttattagccatttcacataatttttaaagaaatgtctgtttaagtattttgcccatattttaaacaagtagtttgttttattattgctgaattgttctttgtatattctggatagagtcatctttatttttctttcgtttcttgcgttttttgtgtcctgttaaaaaaaatcactgccaaatccagcgttatgacatgttttacctacattt

SEQ ID NO: 518209 - DNA, 638 bp, Homo sapiens
atgtatgtataaatcacattttatctatttattcattgatgataattcaaacaacacgggtaattcacaaaccttttgggtgatgtgagtaatgctgccatgagcctaggtgtacgtgtattattttgtgtctctgctttcacatcttttgctatatacccagatgtgaaattgtgggatcatatggtgactttaggtgtacattttttagttattatactgttattttatagcagctgcagcattttacatttccaacaacagtgtacaagggttctaattgctccacgtcctcaccaacacttgtgattttctgttttgtttcttttggtagtaactatgctgatgtgtattaagtgatatatcatttggagttatatttgcattttactaatgattagttttgttgagcaccttttcatggacttattagccatttcacataatttttaaagaaatgtctgtttaagtattttgcccatattttaaacaagtagtttgttttattattgctgaattgttctttgtatattctggatagagtcmtctttatttttctttcgtttcttgcgttttttgtgtcctgttaaaaaaaatcactgccaaatccagcgttatgacatgttttacctacattt

SEQ ID NO: 518210 - DNA, 638 bp, Homo sapiens
atgtatgtataaatcacattttatctatttattcattgatgataattcaaacaacacgggtaattcacaaaccttttgggtgatgtgagtaatgctgccatgagcctaggtgtacgtgtattattttgtgtctctgctttcacatcttttgctatatacccagatgtgaaattgtgggatcatatggtgactttaggtgtacattttttagttattatactgttattttatagcagctgcagcattttacatttccaacaacagtgtacaagggttctaattgctccacgtcctcaccaacacttgtgattttctgttttgtttcttttggtagtaactatgctgatgtgtattaagtgatatatcatttggagttatatttgcattttactaatgattagttttgttgagcaccttttcatggacttattagccatttcacataatttttaaagaaatgtctgtttaagtattttgcccatattttaaacaagtagtttgttttattattgctgaattgttctttgtatattctggatagagtcatctttatttttctttygtttcttgcgttttttgtgtcctgttaaaaaaaatcactgccaaatccagcgttatgacatgttttacctacattt

SEQ ID NO: 518211 - DNA, 602 bp, Homo sapiens
tcaccaggaacaaaggatatcagttgggtccaagaataatcatgccaaaaagctctaggaggaaaagctcctgggaattaggactgtgataatggtctttgagatcaagaaagaaatggggaaatggggatgctcagggtcaggtacatgcttagcaaaagacccagaaaaccctaagctgtcacctgtgtactttaaactctgcacaagtagaaaatagaggcacaaggagagttgtaactttatgctgattagtaaaggcatgctccaacacacatacatagatcccaggtgaaaaaaaatcagatatttatttttagtgaaggttaaaaaatctggagtcttactttccaattaaggattagtgaaaatatttggggagatttgcattgatcagttcatcctgaggtcaagaaaatcttgwttttaaaatttggagcctccagtaaaggattagcttccacctagaggtgttctttggccttttggactcagagctatcttgacactactactggttacactgatttgaaagtcagctaagagcttgctacagaactcctgacaaactaagtttgacctatagagggctagggcatccc

SEQ ID NO: 518212 - DNA, 667 bp, Homo sapiens
gttgaaattttgtgcctccttctatcctctgaagcaaagctgctgtctctgtggggccccaatttactgagtgtttcctatatgactggtcctggttcatagatgagtcagggaaggtgaaacctcatgatgtccactgggccgctgtggctgtttaacctgtgccagccatacagaacctgacatgagtggttgctcctctcaaaggtcagaactcagggtttgggataatggcacatattctatctgtttggttatctacaatggaaartgtagactgtctgaatatcttttgggctgcaaaccagaaacaaccccagatgctgatctaactgggtcactcatctagaagtccatggtaagtgttttccagagagtgaccacaatcaagctgcagattgaacctaaatctgtgtccaacccagagtctaatactgcaaaccagacttggggttgctggtgaaagttgacctatctgtctcatggttgaagaattcctagaccatacctagcagagtaaccagaagtggacttttagcccacttcttgagatatcagtcaccactgttgacttcttcagcataacagtcatctgactccagccataccatgtgtcccttgaagctaatctgtgccaccttttaggcttttgaggccaattgagctc

SEQ ID NO: 518213 - DNA, 667 bp, Homo sapiens
gttgaaattttgtgcctccttctatcctctgaagcaaagctgctgtctctgtggggccccaatttactgagtgtttcctatatgactggtcctggttcatagatgagtcagggaaggtgaaacctcatgatgtccactgggccgctgtggctgtttaacctgtgccagccatacagaacctgacatgagtggttgctcctctcaaaggtcagaactcagggtttgggataatggcacatattctatctgtttggttatctacaatggaaaatgtagactgtctgaatatcttttgggctgcaaaccrgaaacaaccccagatgctgatctaactgggtcactcatctagaagtccatggtaagtgttttccagagagtgaccacaatcaagctgcagattgaacctaaatctgtgtccaacccagagtctaatactgcaaaccagacttggggttgctggtgaaagttgacctatctgtctcatggttgaagaattcctagaccatacctagcagagtaaccagaagtggacttttagcccacttcttgagatatcagtcaccactgttgacttcttcagcataacagtcatctgactccagccataccatgtgtcccttgaagctaatctgtgccaccttttaggcttttgaggccaattgagctc

SEQ ID NO: 518214 - DNA, 505 bp, Homo sapiens
cagctggttgaaattttgtgcctccttctatcctctgaagcaaagctgctgtctctgtggggccccaatttactgagtgtttcctatatgactggtcctggttcatagatgagtcagggaaggtgaaacctcatgatgtccactgggccgctgtggctgtttaacctgtgccagccatacagaacctgacatgagtggttgctcctctcaaaggtcagaactcagggtttgggataatggcacatattctatctgtttggttatctacaatggaaaatgtagactgtctgaatatcttttgggctgcaaaccagaaacaaccccagatgctgatctaactgggtcactcatctagaagtccatggtaagtgttttccagagagtgaccacaatcaagctgcagattgaacctaaatctgtgtccaacccagagtctaatactgcaaaccagacttggggttgctggtgaaagttgacctatytgtctcatggttgaagaattcct

SEQ ID NO: 518215 - DNA, 496 bp, Homo sapiens
accttgtttttcttaccatctctgggaccyaataaaagtcactgtgtatttgaggcttccccagcctcctagcatacatactggggatgatgctaacatctacttcctagggattgtattagatgtatataagataaaacataaaaatcatgtggtggtacctgtagataatgcacacacttagagatggaagcattaggagaatacgtaggaggtagcatgggccacaactcaaacagtcctgggtctggcagggtgatcttggaaatgtcacttctccactgggcttcattttcattctgctccagtatgaagttgaaattaaatgtagatactgtcctctggcattcatatagtttagctgtgtgttccacccaaacttctctgtgtattataaccgccaggtgttaagggagaaacctgaggggagatgattggattatggggacgggttctcctcatgctgttcttgtgatagtgagttctcatgagatct

SEQ ID NO: 518216 - DNA, 496 bp, Homo sapiens
accttgtttttcttaccatctctgggacctaataaaagtcactgtgtatttgaggcttccccagcctcctagcatacatactggggatgatgctaacatctacttcctagggattgtattagatgtatataagataaaacataaaaatcatgtggtgktacctgtagataatgcacacacttagagatggaagcattaggagaatacgtaggaggtagcatgggccacaactcaaacagtcctgggtctggcagggtgatcttggaaatgtcacttctccactgggcttcattttcattctgctccagtatgaagttgaaattaaatgtagatactgtcctctggcattcatatagtttagctgtgtgttccacccaaacttctctgtgtattataaccgccaggtgttaagggagaaacctgaggggagatgattggattatggggacgggttctcctcatgctgttcttgtgatagtgagttctcatgagatct

SEQ ID NO: 518217 - DNA, 496 bp, Homo sapiens
accttgtttttcttaccatctctgggacctaataaaagtcactgtgtatttgaggcttccccagcctcctagcatacatactggggatgatgctaacatctacttcctagggattgtattagatgtatataagataaaacataaaaatcatgtggtggtacctgtagataatgcacacacttagagatggaagcattaggagaatacgtaggaggtagcatgggccacaactcaaacagkcctgggtctggcagggtgatcttggaaatgtcacttctccactgggcttcattttcattctgctccagtatgaagttgaaattaaatgtagatactgtcctctggcattcatatagtttagctgtgtgttccacccaaacttctctgtgtattataaccgccaggtgttaagggagaaacctgaggggagatgattggattatggggacgggttctcctcatgctgttcttgtgatagtgagttctcatgagatct

SEQ ID NO: 518218 - DNA, 496 bp, Homo sapiens
accttgtttttcttaccatctctgggacctaataaaagtcactgtgtatttgaggcttccccagcctcctagcatacatactggggatgatgctaacatctacttcctagggattgtattagatgtatataagataaaacataaaaatcatgtggtggtacctgtagataatgcacacacttagagatggaagcattaggagaatacgtaggaggtagcatgggccacaactcaaacagtcctgggtctggcagggtgatcttggraatgtcacttctccactgggcttcattttcattctgctccagtatgaagttgaaattaaatgtagatactgtcctctggcattcatatagtttagctgtgtgttccacccaaacttctctgtgtattataaccgccaggtgttaagggagaaacctgaggggagatgattggattatggggacgggttctcctcatgctgttcttgtgatagtgagttctcatgagatct

SEQ ID NO: 518219 - DNA, 511 bp, Homo sapiens
ctgctccagcaaagctcagtgggcaccagaaacagagctggctgtaaccacctccaggccatcactaactctatggcccaatgcaggagmactatggaacaaatcaggtatcttgatttttctgtcctcaagacactggttcttcaaggtcctaggggataaagtagcagaatctgaaggctccaagtacaatgagtgaccttggaatccccctttgccttctatttgcctctaccttttgggttgtgctatttatccatgagatatcctccccttatccagtgaaattagtttctaccactttcaaatgaggaccttaagaacccaacaggagctgggattttccgtggacttcagcctcagagtccaatgctctggaacatttagctccgtctcatcttcatctacccaagatgcctctgaagtcgccatgcctccctctgatttgaaggacctacagagagtgggtgcatttttgcacagtctcagagcaagaatcagggctggaaga

SEQ ID NO: 518220 - DNA, 535 bp, Homo sapiens
ctccagcaaagctcagtgggcaccagaaacagagctggctgtaaccacctccaggccatcactaactctatggcccaatgcaggagaactatggaacaaatcaggtatcttgatttttctgtcctcaagacactggttcttcaaggtcctaggggataaagtagcagaatctgaaggcyccaagtacaatgagtgaccttggaatccccctttgccttctatttgcctctaccttttgggttgtgctatttatccatgagatatcctccccttatccagtgaaattagtttctaccactttcaaatgaggaccttaagaacccaacaggagctgggattttccgtggacttcagcctcagagtccaatgctctggaacatttagctccgtctcatcttcatctacccaagatgcctctgaagtcgccatgcctccctctgatttgaaggacctacagagagtgggtgcatttttgcacagtctcagagcaagaatcagggctggaagacacttatgagtatgtgaaatcgtcgag

SEQ ID NO: 518221 - DNA, 511 bp, Homo sapiens
ctgctccagcaaagctcagtgggcaccagaaacagagctggctgtaaccacctccaggccatcactaactctatggcccaatgcaggagaactatggaacaaatcaggtatcttgatttttctgtcctcaagacactggttcttcaaggtcctaggggataaagtagcagaatctgaaggctccaagtacaatgagtgaccttggaatccccctttgccttctatttgcctctaccttttgggttgtgctatttatccatgagatatcctccccttatccagtgaaattagtttctaccactttcaaatgaggaccttaagaacccaacaggagctgggattttccgtggacttcagcctcagagtccaatgctctggaacatttagctccgtctcatcttcatctacccaagatgcctctgaagtsgccatgcctccctctgatttgaaggacctacagagagtgggtgcatttttgcacagtctcagagcaagaatcagggctggaaga

SEQ ID NO: 518222 - DNA, 535 bp, Homo sapiens
ctccagcaaagctcagtgggcaccagaaacagagctggctgtaaccacctccaggccatcactaactctatggcccaatgcaggagaactatggaacaaatcaggtatcttgatttttctgtcctcaagacactggttcttcaaggtcctaggggataaagtagcagaatctgaaggctccaagtacaatgagtgaccttggaatccccctttgccttctatttgcctctaccttttgggttgtgctatttatccatgagatatcctccccttatccagtgaaattagtttctaccactttcaaatgaggaccttaagaacccaacaggagctgggattttccgtggacttcagcctcagagtccaatgctctggaacatttagctccgtctcatcttcatctacccaagatgcctctgaagtcgccatgcctccctctgatttgaaggacctacagagagtggrtgcatttttgcacagtctcagagcaagaatcagggctggaagacacttatgagtatgtgaaatcgtcgag

SEQ ID NO: 518223 - DNA, 511 bp, Homo sapiens
ctgctccagcaaagctcagtgggcaccagaaacagagctggctgtaaccacctccaggccatcactaactctatggcccaatgcaggagaactatggaacaaatcaggtatcttgatttttctgtcctcaagacactggttcttcaaggtcctaggggataaagtagcagaatctgaaggctccaagtacaatgagtgaccttggaatccccctttgccttctatttgcctctaccttttgggttgtgctatttatccatgagatatcctccccttatccagtgaaattagtttctaccactttcaaatgaggaccttaagaacccaacaggagctgggattttccgtggacttcagcctcagagtccaatgctctggaacatttagctccgtctcatcttcatctacccaagatgcctctgaagtcgccatgcctccctctgatttgaaggacctacagagagtgggtgcatttytgcacagtctcagagcaagaatcagggctggaaga

SEQ ID NO: 518224 - DNA, 573 bp, Homo sapiens
gtgaaatcgtcgaggtcacccagttcaaacagccctatttatgaggaagaaaacaggctttcctgcaggcattctctacattaggctgaggtggagcatagctcattttacttccaggtgccctcagagctggatgcaaaaccccagtcctgtcatcttgaaattgacatggagaggtccccatgtgaacagaaccctggatctgctcattctctgtgcccctgaatgtgaagctacaggctctaacttccaaagcaaacctgataggtgggatggagccaaggcctaggaagctggagctctctctaatgctctggagcctgcccacctcctgagatctggatcagtccctgcctcttttggggcctcattttcccaattgtaatgtaatgagaaattaaatgtaaaattgcataagcatatgctctgtgagaatttggtgtcagagtcctcaatactggatgatatattttggtgggaggggtttgggccccagaggttctcgggactcctgayatatccattgcagtaggtgtagagctcaggagatccagatcttctttcctgagccag

SEQ ID NO: 518225 - DNA, 514 bp, Homo sapiens
agaacacaatgatagttgaagaagaacctgagatcctgtttctctcaatggatgtatgaacttaactgcaattgggtgagcaaagccagttgagtttgtagcacccctcatgagaaaaaagccaacyataaccacatttagaagaaagaaaatttggttacatttgtgcactacagaacagtgcagttagataaaattctgtccattccatgattctccctcgggaaagaaaacagagtgaaacgtgtatgcaaacttctgacttattgatttatacctttaacatttagtgttgaccagaatagagatagagtttaaatgacagcttgggtcgactgagaataaagataaatgtttcttacaacaacagagactgtagtgcctgcaacagtgacaaagagaagagactaaaggctcctaagaggaaagagaggtataccttattaacaagaaaatacatacagtagtccaaagaagacacattttgacaacagattggagaagctcccggaat

SEQ ID NO: 518226 - DNA, 505 bp, Homo sapiens
caatgatagttgaagaagaacctgagatcctgtttctctcaatggatgtatgaacttaactgcaattgggtgagcaaagccagttgagtttgtagcacccctcatgagaaaaaagccaaccataaccacatttagaagaaagaaaatttggttacatttgtgcactacagaacagtgcagttagataaaattctgtccattccatgattctccctcgggaaagaaaacagagtgaaacgtgtatgcaaacttctgacttattgatttatacctttaacatttagtgttgaccagaatagagatagagtttaaatgacagcttgggtcgactgagaataaagataaatrtttcttacaacaacagagactgtagtgcctgcaacagtgacaaagagaagagactaaaggctcctaagaggaaagagaggtataccttattaacaagaaaatacatacagtagtccaaagaagacacattttgacaacagattggagaagctcccgg

SEQ ID NO: 518227 - DNA, 514 bp, Homo sapiens
agaacacaatgatagttgaagaagaacctgagatcctgtttctctcaatggatgtatgaacttaactgcaattgggtgagcaaagccagttgagtttgtagcacccctcatgagaaaaaagccaaccataaccacatttagaagaaagaaaatttggttacatttgtgcactacagaacagtgcagttagataaaattctgtccattccatgattctccctcgggaaagaaaacagagtgaaacgtgtatgcaaacttctgacttattgatttatacctttaacatttagtgttgaccagaatagagatagagtttaaatgacagcttgggtcgactgagaataaagataaatgtttcttacaacaacagagactgtagtgcctgcaacagtgacaaagagaagagactaaaggctcctaagaggaaagagaggtawaccttattaacaagaaaatacatacagtagtccaaagaagacacattttgacaacagattggagaagctcccggaat

SEQ ID NO: 518228 - DNA, 658 bp, Homo sapiens
gggtgttagagcaagatcctgtctctaaaataattaatacataaagataaaataaaatagctagagaaggagcttttgaatattctcaccacaaaaataacaaatgcatgaggcaacaaatatagaagtactgatttttattgttatacaamacatatatataattgtttccccaaaatatgcacaattacatgtgtcaattttaaaaaatgaatgaagactataatgtaaaacctatagctgtaaaattcctagcacaatacagaagggtgaagcttcattacaactggtcgtggcaataatttgggggacgtagcatcaacggatgagacaacaaaagcaagggaatacacatggtactgaatcagtgtatgaaaaatatcccaaacagacaaagcagaacatggaatagatatatgcacattgtagtattactcacaaacatgttacctggaagcaaatgtacccttaaggatgagtagattcagcaaacagggcacgtacaatcactgggatagcattcagccttaaaaataaggaaatcttgaaaagtactacaataaggacaaatcttcaaaacattctgttaagtaaaataagacagtcaaaaaggaaagctgtataattacactcatgtaaaatatttagtcaaactcaa

SEQ ID NO: 518229 - DNA, 658 bp, Homo sapiens
gggtgttagagcaagatcctgtctctaaaataattaatacataaagataaaataaaatagctagagaaggagcttttgaatattctcaccacaaaaataacaaatgcatgaggcaacaaatatagaagtactgatttttattgttatacaacacatatatataattgtttccccaaaatatgcacaattacatgtgtcaattttaaaaaatgaatgaagactataatgtaaaacctatarctgtaaaattcctagcacaatacagaagggtgaagcttcattacaactggtcgtggcaataatttgggggacgtagcatcaacggatgagacaacaaaagcaagggaatacacatggtactgaatcagtgtatgaaaaatatcccaaacagacaaagcagaacatggaatagatatatgcacattgtagtattactcacaaacatgttacctggaagcaaatgtacccttaaggatgagtagattcagcaaacagggcacgtacaatcactgggatagcattcagccttaaaaataaggaaatcttgaaaagtactacaataaggacaaatcttcaaaacattctgttaagtaaaataagacagtcaaaaaggaaagctgtataattacactcatgtaaaatatttagtcaaactcaa

SEQ ID NO: 518230 - DNA, 658 bp, Homo sapiens
gggtgttagagcaagatcctgtctctaaaataattaatacataaagataaaataaaatagctagagaaggagcttttgaatattctcaccacaaaaataacaaatgcatgaggcaacaaatatagaagtactgatttttattgttatacaacacatatatataattgtttccccaaaatatgcacaattacatgtgtcaattttaaaaaatgaatgaagactataatgtaaaacctatagctgtaaaattcctagcacaatacagaagggtgaagcttcattacaactggtcgtggcaataatttgggggacgtagcatcaacggatgagacaacaaaagcaagggaatacacatggtactgaatcagtgtatgaaaaatatcccaaacagacaaagcagaacatggaatagatatatgcacattgtagtattactcacaaacatgttacctggaagcaaatgtacccttaaggatgagtagattcagcaaacarggcacgtacaatcactgggatagcattcagccttaaaaataaggaaatcttgaaaagtactacaataaggacaaatcttcaaaacattctgttaagtaaaataagacagtcaaaaaggaaagctgtataattacactcatgtaaaatatttagtcaaactcaa

SEQ ID NO: 518231 - DNA, 562 bp, Homo sapiens
tgtcccttgcaggcatgcgcttggaatttgaagccattactcccagcaaactaatgcaggaacagaaaaccaaacaccgcctattattattctaacttattagcagaagcagatcaatgagaacacatggacacatcaggaagaacaacacacactggacacctgtttcatggcatgggggaggggaagragagcatcaggaagaatagctgcggatgctgggcttggtacctgggtgatgagatgatctgtgcagtaaaccacagtggtacgcatttatgtatgtaagagacctgcatactctgcacatggacccctaaacttaaaataaaagttgaaaaataaactttatcacatatggacccctgaacttaaaataaaacttgaaaaaaaaatgtgtttctggtggattctctatgttagacccaaactgaggatcttgaagctctcgctgggggaatcggggatgggggcacactggggagccgctgccaaggccaaccaccctccctacaagccacctcccttcccggccagtatggaaaggagaaggggtatgtga

SEQ ID NO: 518232 - DNA, 417 bp, Homo sapiens
aacacacactggacacctgtttcatggcatgggggaggggaaggagagcatcaggaagaatagctgcggatgctgggcttggtacctgggtgatgagatgatctgtgcagtaaaccacagtggtacgcatttatgtatgtaagagacctgcatactctgcacatggacccctaaacttaaaataaaagttgaaaaataaactttatcacatatggacccctgaacttaaaataaaacttgaaaaaaaaatgtgtttctggtggattctctatgttagacccaaactgaggatcttgaagctctcgctgggggaatcggggmtgggggcacactggggagccgctgccaaggccaaccaccctccctacaagccacctcccttcccggccagtatggaaaggagaaggggtatgtgaa

SEQ ID NO: 518233 - DNA, 562 bp, Homo sapiens
tgtcccttgcaggcatgcgcttggaatttgaagccattactcccagcaaactaatgcaggaacagaaaaccaaacaccgcctattattattctaacttattagcagaagcagatcaatgagaacacatggacacatcaggaagaacaacacacactggacacctgtttcatggcatgggggaggggaaggagagcatcaggaagaatagctgcggatgctgggcttggtacctgggtgatgagatgatctgtgcagtaaaccacagtggtacgcatttatgtatgtaagagacctgcatactctgcacatggacccctaaacttaaaataaaagttgaaaaataaactttatcacatatggacccctgaacttaaaataaaacttgaaaaaaaaatgtgtttctggtggattctctatgttagacccaaactgaggatcttgaagctctcgctgggggaatcggggatggggrcacactggggagccgctgccaaggccaaccaccctccctacaagccacctcccttcccggccagtatggaaaggagaaggggtatgtga

SEQ ID NO: 518234 - DNA, 417 bp, Homo sapiens
aacacacactggacacctgtttcatggcatgggggaggggaaggagagcatcaggaagaatagctgcggatgctgggcttggtacctgggtgatgagatgatctgtgcagtaaaccacagtggtacgcatttatgtatgtaagagacctgcatactctgcacatggacccctaaacttaaaataaaagttgaaaaataaactttatcacatatggacccctgaacttaaaataaaacttgaaaaaaaaatgtgtttctggtggattctctatgttagacccaaactgaggatcttgaagctctcgctgggggaatcggggatgggggcacactggggagccgctgccaaggccawccaccctccctacaagccacctcccttcccggccagtatggaaaggagaaggggtatgtgaa

SEQ ID NO: 518235 - DNA, 595 bp, Homo sapiens
gaagacatctttagagggtaagcacttgaccaagtggcaagcttgccaatcatggtcctcgcttcaaaacagaatactgccacatcttactgtagacttggctataactcatttgaccttggtcctgacactgcaacagtctgtggaaaacacaagagaattcatactcacctgagacttagktgacaggcctgcagaacttggttctctctatagtccctgaatcaggcaaaacacaccttctttccttctccagccatggtctggaagaaatcttcacattgatatgatgaaatgctaactaacaatatgaaaaatactaaagtataaatgtcactaaaatggtaaatacatactgaatttcagaatactataaattgttatcatcttaaactagactattaaaatacaagatgttttacataagtctcatgataaccagtaggaaaaaaaaaatagtaaagaaaaagagaaagtaattaaagcatacacaaacaacaaaaattacacattggatatggtgtctcctgcttataattccaacactttgggaggtcaaggtggaagaatcaaatctccttgggtgttgtggtac

SEQ ID NO: 518236 - DNA, 261 bp, Homo sapiens
tctgtggaaaacacaagagaattcatactcacctgagacttaggtgacaggcctgcagaacttggttctctctatagtcmctgaatcaggcaaaacacaccttctttccttctccagccatggtctggaagaaatcttcacattgatatgatgaaatgctaactaacaatatgaaaaatactaaagtataaatgtcactaaaatggtaaatacatactgaatttcagaatactataaattgttatcatcttaaactagact

SEQ ID NO: 518237 - DNA, 261 bp, Homo sapiens
tctgtggaaaacacaagagaattcatactcacctgagacttaggtgacaggcctgcagaacttggttctctctatagtccctgartcaggcaaaacacaccttctttccttctccagccatggtctggaagaaatcttcacattgatatgatgaaatgctaactaacaatatgaaaaatactaaagtataaatgtcactaaaatggtaaatacatactgaatttcagaatactataaattgttatcatcttaaactagact

SEQ ID NO: 518238 - DNA, 572 bp, Homo sapiens
gattcttccaccttggcctccaaaagtgttggaattataagcaggagccactgtatccaatgtgtaatttttgttgtttgtgtatgctttaattactttctctttttctttactatgtttttttttyccccagtggttatcatgagacttatgtaaaacctcttgtattttaatagtctagtttaagatgataacaatttagagtattctgaatttcagtatgtatttaccatttttagtgacatttatactttagtatttttcatattgttagttagcatttcgtcatatcaatgtgaagatttcttccagaccatggctggagaaggaaagaaggtgtgttttgcctgattcagggactatagagagaaccaagttctgcaggcctgtcacctaagtctcagatgagtatgaattctcttgtgtttttcacagatttttgcagtggcaggaccaagttcaaatgagtcatagccaagtctacagtaagatgtggtagtattctgttttgaaccgaggaccatgattggcaagcttgccacttggtcaagtgcttaccctctaaagatgtc

SEQ ID NO: 518239 - DNA, 572 bp, Homo sapiens
gattcttccaccttggcctccaaaagtgttggaattataagcaggagccactgtatccaatgtgtaatttttgttgtttgtgtatgctttaattactttctctttttctttactatgttttttttttccccagtggttatcatgagacttatgtaaaacctcttgtattttaatagtctagtttaagatgataacaatttagagtattctgaatttcagtatgtatttaccatttttagtgacatttatactttagtatttttcatattgttagttagcatttcrtcatatcaatgtgaagatttcttccagaccatggctggagaaggaaagaaggtgtgttttgcctgattcagggactatagagagaaccaagttctgcaggcctgtcacctaagtctcagatgagtatgaattctcttgtgtttttcacagatttttgcagtggcaggaccaagttcaaatgagtcatagccaagtctacagtaagatgtggtagtattctgttttgaaccgaggaccatgattggcaagcttgccacttggtcaagtgcttaccctctaaagatgtc

SEQ ID NO: 518240 - DNA, 572 bp, Homo sapiens
gattcttccaccttggcctccaaaagtgttggaattataagcaggagccactgtatccaatgtgtaatttttgttgtttgtgtatgctttaattactttctctttttctttactatgttttttttttccccagtggttatcatgagacttatgtaaaacctcttgtattttaatagtctagtttaagatgataacaatttagagtattctgaatttcagtatgtatttaccatttttagtgacatttatactttagtatttttcatattgttagttagcatttcgtcatatcaatgtgaagatttcttccagaccatggctggagaaggaaagaaggtgtgttttgcctgattcagggactatagagagaaccaagttctgcaggcctgtcacctaagtctcagatgagtatgaattctcttgtgtttttcacagatttttgcagtggcaggaccaagttcaaatgagtcatagccaagtytacagtaagatgtggtagtattctgttttgaaccgaggaccatgattggcaagcttgccacttggtcaagtgcttaccctctaaagatgtc

SEQ ID NO: 518241 - DNA, 541 bp, Homo sapiens
actctcctttatgtttcactttctcaaatgaatgtcaagctggtgatttttagattcaaaaattctaaaataaattgctcaaatttccacattatgtaagctattaataaaatgtcttgtaggtgctacatatttattaaaatttttggttgtaattttaagctcactgcaggcagaaaggaatcattaacatttatattcttttttttagtctgtatctaaatgatggcatattttaattccagatatttactttatactgcagtaatgctcgtcatattttgcaaaatttatgttgttcttttatttggaaatataaggcttttttagctcctgaaatctatattatagtcatataattttattatgttttgtggtaagaagtgcagcaacatattgagaacataataaaattatcctgtatttttaatgattatttattaaattcctctcattasagcctgttattaatgattgtaatgtattttctgtataattttactgcaatttattaaattctaatgacttaaattgtctgctt

SEQ ID NO: 518242 - DNA, 579 bp, Homo sapiens
ctgtttttttcatcaataatctgttagctttgagcctgatcagtcaaggcataggcctgaaattgagccagggccagtctggaagtcagagtagtgttttctttttccagcttacatttatcttgtagcaattgatttctatctcaacacattaacttataagcagtaagcaarcaccatctatgctaagagatccccctggcatctcctttgctgactgaaatcccctgcagcacttcatgcacagtcaaaggttcaaattccactaatttagatacccaattttcactaaggtcagttccccccgaccattcaattgccaagagggagaactggaggagtttctatcctggaatgtgggaagtccctgagcttccagccgtgatcttgaagctgaaaagtgaatcctccatagtctggtgggtgtagtagccaactctggagcctaggctgttgcttccccatctggccatgaatgctgtatagcctggtgagtacatatacatagatatagatatagatagatagatacatacatacatagatatagatagatagataaaaatatagatatagata

SEQ ID NO: 518243 - DNA, 508 bp, Homo sapiens
tgtagtagccaactctggagcctaggctgttgcttccccatctggccatgaatgctgtatagcctggtgagtacatatacatagatatagatatagatagatagatacatacatacatakatatagatagatagataaaaatatagatatagatatagatatctgcaatgccatttacatgggataaaaaagttgtttacccttaaaggtattgtgtgtgtgtcttttcttctcccatcagcatctcccacacagaacaggaggagacagacaggccttgttacacacctgtttgctgttgtacctctgtttgctctttaggtacaacaaatcatcagcactaatgttaaaatagagatcataagactgacaaaactgactctgtggcaatataataccaaattattgtcacaatttaaggcagtgcaaggcaagtgttaagccatgcatgcaggccagcaatcttgctacatagcatccctatctccacttaagagttaaaactttt

SEQ ID NO: 518244 - DNA, 508 bp, Homo sapiens
tgtagtagccaactctggagcctaggctgttgcttccccatctggccatgaatgctgtatagcctggtgagtacatatacatagatatagatatagatagatagatacatacatacatagatatagatagatagataaaaatatagatatagatatagatatctgcaatrccatttacatgggataaaaaagttgtttacccttaaaggtattgtgtgtgtgtcttttcttctcccatcagcatctcccacacagaacaggaggagacagacaggccttgttacacacctgtttgctgttgtacctctgtttgctctttaggtacaacaaatcatcagcactaatgttaaaatagagatcataagactgacaaaactgactctgtggcaatataataccaaattattgtcacaatttaaggcagtgcaaggcaagtgttaagccatgcatgcaggccagcaatcttgctacatagcatccctatctccacttaagagttaaaactttt

SEQ ID NO: 518245 - DNA, 508 bp, Homo sapiens
tgtagtagccaactctggagcctaggctgttgcttccccatctggccatgaatgctgtatagcctggtgagtacatatacatagatatagatatagatagatagatacatacatacatagatatagatagatagataaaaatatagatatagatatagatatctgcaatgccatttacatgggataaaaaagttgtttacccttaaaggtattgtgtgtgtgtcttttcttctcccatcagcatctcccacacagaacaggaggagacagacaggccttgttacacacctgtttgctgttgtacctctgtttgctctttaggtacaacaaatcatcagcactaatgttaaaatagagatcataagactgacaaaactgactctgtggcaatataataccaaattattgtcacaatttaaggcagtgcaaggcaagtgttaagccatgcatgcaggycagcaatcttgctacatagcatccctatctccacttaagagttaaaactttt

SEQ ID NO: 518246 - DNA, 399 bp, Homo sapiens
ctggaagatatatagaaatttcttaataatatctaaccattttctcaataaccattatatttaacattgatagcttggagggcagggaaggacacagatgacataatcttaaaatttaatttgtttataaggtttttwtttgttcttgtttagttttgcttagtttttggatacaaggtcttgctctggtgcccaggctggagggcagtggtataatcataactcataatttggttgtaacggttctttaaaatatatttttgctgagagtggtagctcagacctgtaatctaaacactttgggtggccaaggtgggatgatcgcttgatcccaggagttcaagacgtgtctgggcaacataagtaggctcagtctctagaaaaatatttaaaaattgt

SEQ ID NO: 518247 - DNA, 596 bp, Homo sapiens
taacaaatgcccgttctcacattccacctgctgggataccagtatgtagccttttgaaaaaaataaaatctttcacctaagagaaggacaagagaaaatgagggtgtcacatctaaagccttcattttctttatgaatcaacagccacttgtcattggaattgtccaaaggtgactgacagcactaatacacttaatgaatcaaacagggaaaatgggcctctcaggtgaggaggaggcacaatggtcacaaaacccaatccattctcagctttgcatggtgctcgcatctcaagaagtggtgttagccatgtgaaccgtgttcactggacaaggccagaggaaagaatatgtagtacaacacaactatggggctgcaaatcaaactggtattgggagcatgcatgaggcttcagtggccgagacactggtggctacccttcggtgtcacttaaacctttgaggtgaaggacgtttattttccccaattggctcagaraaactaatcaacattaatattgagatttgtttttcttttcaaaatttctaagacacagaggactctaacactccaaaagacattcagatattcttgca

SEQ ID NO: 518248 - DNA, 559 bp, Homo sapiens
gtggggtggctacacttgctagctcatgctcacttcctttgaaacaaggtatctggacagaccatattcataagtargacttcgcaaaacctcagacagaagttccagtcagacacagctccctcaggctcacagggtggcaaccgcctccatgttaggctctgacagcaggcaaggaaaggagcacaggcagcaggggacagggagggtccgggactgtagggatccccaaatgccccagagctattctctgtagaagggcacacgcaggtctcactgtgtcagtgcagtggctgaatcatgggtcactgcagcctcaatctcttaggctccagtgatgctttcacctcagcctctcaagtagctgtatggcaaaaagcctcctactttttacttaaaacctggactttaagccaggttgggcctgggaatagtggcagcaaaagcagcagccaaatgtatacacttcagatgtctacactcatgggcacaggcatattccacacttgctggaacacgagacgcctgagaggcacctgtttcccagctactaactgat

SEQ ID NO: 518249 - DNA, 559 bp, Homo sapiens
gtggggtggctacacttgctagctcatgctcacttcctttgaaacaaggtatctggacagaccatattcataagtaagwcttcgcaaaacctcagacagaagttccagtcagacacagctccctcaggctcacagggtggcaaccgcctccatgttaggctctgacagcaggcaaggaaaggagcacaggcagcaggggacagggagggtccgggactgtagggatccccaaatgccccagagctattctctgtagaagggcacacgcaggtctcactgtgtcagtgcagtggctgaatcatgggtcactgcagcctcaatctcttaggctccagtgatgctttcacctcagcctctcaagtagctgtatggcaaaaagcctcctactttttacttaaaacctggactttaagccaggttgggcctgggaatagtggcagcaaaagcagcagccaaatgtatacacttcagatgtctacactcatgggcacaggcatattccacacttgctggaacacgagacgcctgagaggcacctgtttcccagctactaactgat

SEQ ID NO: 518250 - DNA, 546 bp, Homo sapiens
gtggggtggctacacttgctagctcatgctcacttcctttgaaacaaggtatctggacagaccatattcataagtaagacttcgcaaaaccycagacagaagttccagtcagacacagctccctcaggctcacagggtggcaaccgcctccatgttaggctctgacagcaggcaaggaaaggagcacaggcagcaggggacagggagggtccgggactgtagggatccccaaatgccccagagctattctctgtagaagggcacacgcaggtctcactgtgtcagtgcagtggctgaatcatgggtcactgcagcctcaatctcttaggctccagtgatgctttcacctcagcctctcaagtagctgtatggcaaaaagcctcctactttttacttaaaacctggactttaagccaggttgggcctgggaatagtggcagcaaaagcagcagccaaatgtatacacttcagatgtctacactcatgggcacaggcatattccacacttgctggaacacgagacgcctgagaggcacctgtttccca

SEQ ID NO: 518251 - DNA, 562 bp, Homo sapiens
ctgtggggtggctacacttgctagctcatgctcacttcctttgaaacaaggtatctggacagaccatattcataagtaagacttcgcaaaacctcagacagaagttccagtcagacacagctccctcaggctcacagggtggcaaccgcctccatgttaggctctgacagcaggcaaggaaaggagcacaggcagcaggggacagggagggtccgggactgtagggatccccaaatgccccagagctattctctgtagaagggcacacgcaggtctcactgtgtcagtgcagtggctgaatcatgggtcactgcagcctcaatctcttaggctccagtgatgctttcacctcagcctctcaagtagctgtatggcaaaaagcctcytactttttacttaaaacctggactttaagccaggttgggcctgggaatagtggcagcaaaagcagcagccaaatgtatacacttcagatgtctacactcatgggcacaggcatattccacacttgctggaacacgagacgcctgagaggcacctgtttcccagctactaactgatg

SEQ ID NO: 518252 - DNA, 546 bp, Homo sapiens
gtggggtggctacacttgctagctcatgctcacttcctttgaaacaaggtatctggacagaccatattcataagtaagacttcgcaaaacctcagacagaagttccagtcagacacagctccctcaggctcacagggtggcaaccgcctccatgttaggctctgacagcaggcaaggaaaggagcacaggcagcaggggacagggagggtccgggactgtagggatccccaaatgccccagagctattctctgtagaagggcacacgcaggtctcactgtgtcagtgcagtggctgaatcatgggtcactgcagcctcaatctcttaggctccagtgatgctttcacctcagcctctcaagtagctgtatggcaaaaagcctcctactttttacttaaaacctggactttaagccaggttgggcctgggaatagtggcagcaaaagcagcagccaaatgtatacactycagatgtctacactcatgggcacaggcatattccacacttgctggaacacgagacgcctgagaggcacctgtttccca

SEQ ID NO: 518253 - DNA, 526 bp, Homo sapiens
tggcagaacaggctggatactctccttcagcctccccagcagccccgcctgtgctgtcatctgtgctgaagatctccgtggtaagattatgggaaacttttacagcaagttttcctttctcacttccctatcttaataacagcactgataacttttaagccctacttttaagccctagaaagctggaactgcaagacacatgatcttctgccttagaagggccatgtttgggcagtgggctgcccaggtgagagccccatggttgttagtggcagccgggagctggatgggcctggccccatagcctagtgaaaagtgggaccctcttcttccagagcatggaagtctcagaggctggaaaaaggtgcctgagtggcctgccaaaaagcataaggctagaagggctggaaggaaccccaacagtcttcaagstgcctgagagggctgggttcattccagctttctttgctttcatcctgatagcaagaaaacctgctcacacatggcaggcggcgctgaggctgcc

SEQ ID NO: 518254 - DNA, 526 bp, Homo sapiens
tggcagaacaggctggatactctccttcagcctccccagcagccccgcctgtgctgtcatctgtgctgaagatctccgtggtaagattatgggaaacttttacagcaagttttcctttctcacttccctatcttaataacagcactgataacttttaagccctacttttaagccctagaaagctggaactgcaagacacatgatcttctgccttagaagggccatgtttgggcagtgggctgcccaggtgagagccccatggttgttagtggcagccgggagctggatgggcctggccccatagcctagtgaaaagtgggaccctcttcttccagagcatggaagtctcagaggctggaaaaaggtgcctgagtggcctgccaaaaagcataaggctagaagggctggaaggaaccccaacagtcttcaaggtgcctgagagggctgggytcattccagctttctttgctttcatcctgatagcaagaaaacctgctcacacatggcaggcggcgctgaggctgcc

SEQ ID NO: 518255 - DNA, 413 bp, Homo sapiens
cttggtggatgttgacttttttgagaagaacttgggagaataaaacattataaaggcgctggccaggcacggtgtctcatgcctgtattcctggcatattgattggctgaggagatagaattgcttgaggccaggaatttgataccagccttgtcaacatagtgagaccccatttatacaaaaaacttgaagmattgaaaacatttagccaggtgtgatagttccaaactgttgtctcagctatgctggatattgaggcagaggatcacttgagccaggagttctaggctgccgtgaactatgatcacgctactgcactccaaccagggcaactatgcaagatgattcaaaaataaaatcttttattattcttcacccctatagtctctccagaacttgtgcactatgtagca

SEQ ID NO: 518256 - DNA, 413 bp, Homo sapiens
cttggtggatgttgacttttttgagaagaacttgggagaataaaacattataaaggcgctggccaggcacggtgtctcatgcctgtattcctggcatattgattggctgaggagatagaattgcttgaggccaggaatttgataccagccttgtcaacatagtgagaccccatttatacaaaaaacttgaagaattraaaacatttagccaggtgtgatagttccaaactgttgtctcagctatgctggatattgaggcagaggatcacttgagccaggagttctaggctgccgtgaactatgatcacgctactgcactccaaccagggcaactatgcaagatgattcaaaaataaaatcttttattattcttcacccctatagtctctccagaacttgtgcactatgtagca

SEQ ID NO: 518257 - DNA, 485 bp, Homo sapiens
atacttggtggatgttgacttttttgagaagaacttgggagaataaaacattataaaggcgctggccaggcacggtgtctcatgcctgtattcctggcatattgattggctgaggagatagaattgcttgaggccaggaatttgataccagccttgtcaacatagtgagaccccatttatacaaaaaacttgaagaattgaaaacatttagccaggtgtgatagttccaaactgttgtctcagctatgctggayattgaggcagaggatcacttgagccaggagttctaggctgccgtgaactatgatcacgctactgcactccaaccagggcaactatgcaagatgattcaaaaataaaatcttttattattcttcacccctatagtctctccagaacttgtgcactatgtagcagaaagaatcaaactccccaagagtttggttcttgctcatgatttggttttctgctgcttggctgcccca

SEQ ID NO: 518258 - DNA, 431 bp, Homo sapiens
tgatacttggtggatgttgacttttttgagaagaacttgggagaataaaacattataaaggcgctggccaggcacggtgtctcatgcctgtattcctggcatattgattggctgaggagatagaattgcttgaggccaggaatttgataccagccttgtcaacatagtgagaccccatttatacaaaaaacttgaagaattgaaaacatttagccaggtgtgatagttccaaactgttgtctcagctatgctggatattgaggcagaggatcacttgagccaggagttctaggctgccgtgaactatgatcacgctactgcactccaaccagggcaactatgcaagatgwttcaaaaataaaatcttttattattcttcacccctatagtctctccagaacttgtgcactatgtagcagaaagaatcaaac

SEQ ID NO: 518259 - DNA, 588 bp, Homo sapiens
cacacatggtgctatggtctcaatgtttgctctcccaaaattgatattttaaaatcttaattcccatggtgagagtattagagggtgtggatcctgtgggaagtggtgcgatcatgagagtggagacctcatgaatggaattagtgccgttataargggctaaagagagcagagttgtccctttctgctagatgaggacatagtgagaaagagccatctgtgaaacaggaaaaatccctcaccagatgctgaatctgctagtgccttgatcttagacgtgccaacttccagaactatatgaaataaatttctgtttataagctacctagttgatggtattttgttagagcaacccaaatgtactaagacacatagttaaagaacaaaggcagtatagagcccaggaagatatgaggagggagtaaagaagaggttcatccctaacagtcataatcccacttcttatctcaatgaatgttttcttctcttaggtccccacacacatactatttgtggtatcaattcattcacattgggtttactaaattattatttgaagcatgatatattttcaaaaaagaaaaggac

SEQ ID NO: 518260 - DNA, 588 bp, Homo sapiens
cacacatggtgctatggtctcaatgtttgctctcccaaaattgatattttaaaatcttaattcccatggtgagagtattagagggtgtggatcctgtgggaagtggtgcgatcatgagagtggagacctcatgaatggaattagtgccgttataaggggctaaagagagcagagttgtccctttctgctagatgaggacatagtgagaaagagccatctgtgaaacaggaaaaatccctcaccagatgctgaatctgctagtgccttgatcttagacgtgccaacttccagaactatatgaaataaatttctgtttataagctacctagttgatggtattttgttagagcaacccaaatgtactaagacacayagttaaagaacaaaggcagtatagagcccaggaagatatgaggagggagtaaagaagaggttcatccctaacagtcataatcccacttcttatctcaatgaatgttttcttctcttaggtccccacacacatactatttgtggtatcaattcattcacattgggtttactaaattattatttgaagcatgatatattttcaaaaaagaaaaggac

SEQ ID NO: 518261 - DNA, 588 bp, Homo sapiens
cacacatggtgctatggtctcaatgtttgctctcccaaaattgatattttaaaatcttaattcccatggtgagagtattagagggtgtggatcctgtgggaagtggtgcgatcatgagagtggagacctcatgaatggaattagtgccgttataaggggctaaagagagcagagttgtccctttctgctagatgaggacatagtgagaaagagccatctgtgaaacaggaaaaatccctcaccagatgctgaatctgctagtgccttgatcttagacgtgccaacttccagaactatatgaaataaatttctgtttataagctacctagttgatggtattttgttagagcaacccaaatgtactaagacacatagttaaagaacaaaggcagtatagagcccaggaagatatgaggagggagtaaagaagaggttcatccctaacagtcataatcccacttcttatctcaatgaatgttttcttctcttaggtccccacacacatactatttgtggtatcaattcattcwcattgggtttactaaattattatttgaagcatgatatattttcaaaaaagaaaaggac

SEQ ID NO: 518262 - DNA, 352 bp, Homo sapiens
aaacagcattaggctaattcaagagacaaaaccrcacaacctcagccacctctacatacagattatatccctcgtattgtaagttttttgagtaatttgcaacctacctttcaaaatctcctttgaaggaaagaaaagctcaatatttgtttggaggcctgtcattacaagaatgattcttcttttaagactgtgcatgtttctgttgcagtgaagggttcagttaattaaagccttaatttcttgtaaggttttaataataattattcactccatgtgcatatttcttgccttctcctcactcatgtatcaaatcatagacattacttgggcaacatataggataaatctg

SEQ ID NO: 518263 - DNA, 639 bp, Homo sapiens
gggactgggaacaagttaaactctccccatgttagccctttcccattctctccccaagtgttgccaagtttctcttacccaagtactcagctttgtagacattgaggcagttccagtgagacgagtaccctctgataagaaatactcatagtggttcttggcaatggtattcatccattcagaagcctgagatatcatctcctactctggattttcttcccgaagccaactgagaatcaatagtaattactctttccacattcgtgaaagaagaaaatacattaaaacctatcactcttagatgttttaatttaaagagccttctacatttaaattaataacattagattcctgcaaaaaattttatatgacctacragccaaatattgagaatttttgttttgtttcaatacatggtgaaagttatcttccagaaggtttagtaaaagttgaatgaaaaggagagagctgcttgccacttgggaagttctcaaagtgggctgacattgttagttggtggtggcaataaacaaaatgggggtagtctcagtaaacaatattacagaagaatcacttggatttaaggggtaggaggaagaagaagcaagaagaaagtgagaagttttgtccttaaaattt

SEQ ID NO: 518264 - DNA, 601 bp, Homo sapiens
  misc_feature (1)...(601): n = A,T,C or G
tgccctgaactcaaacctacacagacagctccagagccattctccatcagcgccatgctcatcagtaccattcatgttttgttttcttccttgaattctattttgtctttatttttacagtgttgtctgacctatatgtactcattctttgttttaaaccacttagtgccaattcattttacgtttaatggttaacaccgtatagctaaatttttttagagaatttggtagtcttcaataaagatcatatacacacattttaattatggatattttaacttaataatgttactttcctacntattatatatatatatatgtttttttttctttcytccctttggtttttttttttttttttttgagacggagtctcgttctgtcgcccaggctggagggcagtggcgcgatctcggcacagtgcaagtccgcctcctgggttcacgccattctcccgcctcagcctcctgggttgctgggactacaggcacccgccgtacgcccggataattttttgtgtttttttttattatactttaagttttagggtagatgtacacaatgtgcaggttagttacatatgtatacatgtgccatgctg

SEQ ID NO: 518265 - DNA, 594 bp, Homo sapiens
aagggatcaagataggatttggatccagacttgtccaactcctaaaccttcgacttgaacaaaggagctataatagtggtttttttttctggtgtactctacataaacttattaatgcagagttctttttcctttctaaagacagatttgttaaacattgaaagtacatagaatcaaatatatgtaacatatcaatcactatttcattgtatagttaatgttaaccaattctcagcaactgaatcaagaagggatagcatactggttcaaaaatcacaaaaaggttaacggactttgatgcgatttcattcgaattcccattaaaacatcaaaagaagttacaggagtagatcataaaaagtgaagraaactgaaactaaagcaaagtctaataaactaagtgtgattatttgataatggtgtctgggaggaagtaacatgaataaggagacttgggctaggaagtaataaataatacaatctgtgttccaaatcatatcaaagtccaaacagatttcaggaaataggggattgagaaaagaatgtagcaatttcctttttcattcccttcttcttttccctgactcacggacc

SEQ ID NO: 518266 - DNA, 607 bp, Homo sapiens
gcactccagcctgagtcagaccctgtctcaacaaaggaaaaaaaaatgaggggatacaaatataaagattattgaatgtgtaacgttaaagccaaccaaatatggcctgagaaggactccgtacttctatatttgagtccttgtggatgaactgtaaccaagcttaacagatgaaattgaaaacctaacttaatagtatgcacctgtagcaatggctgaatgttggccaatcccagtggccatacttcaaccactcattgactgctgaacgttcagactgtgttcaaataaggcaaacactgagctgaagtcaatctcactgtttctgtacctcacttcygattcctgtatgtcactttaccttttgtgtctataaatttgttctgaccatgcagtacccctggagtcactgaatctgctgtgattctgggggctgcccaatttgcaaatcgttcattgcccaattaaattcctttaagtttatttgggctgaagtttttcttttatcagatggtgtcagaagtgggattcaaactggagcttctagtgacccccaggagtgctgagtgaacacgcaagttacctgcaggacccacttgcatctatt

SEQ ID NO: 518267 - DNA, 640 bp, Homo sapiens
taagtaaaattaatataaacttgacgctagtagcttgaatgggtttattgcttatggtaacacaaagtccggaagcagacaactgcaagttaatgcagcagctaagtaagagtatcagggctctttctaatgtcctgcactgctgtccttaacgtggctctatkgttttttggtccaaagatggccactttaaccccatgtattaagactgtattccaggcagaaataatgagaagagccaaggtgaagatcacatgcaggatcattcttctctgattattgtttggtcacaaagtcaaagcctgtagatatattctcgaactttccgaattcttgcacagactacctttggcatggatatctgatgcagcatcagatatagatgctgcatctatatcatatagatatagatatagaaaataaattttctattagcaagatctgcagagaagcaaaatccttttcttaattaggcaaaatatgttacataatcatatattaaatgtataaggaagataacatttctgtaagtcctacttgaaatatttccaccaactgccataattatgtcactctgttacataaccaccactgttttcaaaagatcagtcaatcaattgatttgctaactaagaaggca

SEQ ID NO: 518268 - DNA, 571 bp, Homo sapiens
gctgaatttatagcaattcgcatacattgtacaaaattcatttatgtaacagtgtactggaaatagaatagtatagtccttaatgtatatttattagtgccaacaaaatatatttctatatcacaaatgcatgaaggaatcagtttgcttgaaatagtgaattttattcttattttctctctgggatacatttcattcctaaatgtcctctcccacatccagaagattactagacaaattctgaattggcttcaaagggagaatctgttgcacagcatcacttgaggggatggtttttmtgctttgcaaaagggacagctatgttacatgtacaagtgtatcaatgtccatccctgtttcctcaaatatattcatggaaagtaacaggaagtcaataaacataagagcaaaattatgggaaatgctgtctctcttagataaaaatattggaatgatgtcctataatttggctaatgtatttacattatacatttatatatgcacatacacctatatagcatatgtacaaattacctatctatttatctatctgataaatcattgtcactct

SEQ ID NO: 518269 - DNA, 624 bp, Homo sapiens
ctctactctggtaatattactgtacttgtacgtcttacaggattggatcttgggagcatgaatttggttagggaaatgacrtttaaaacctggaagcttggaatgtcacctgttattactcaggaactttagaaaattgaaggagtttttatagatataaaattagttgctgtatagtgcaaccctggagaacaattcacataccctctgtgatcccagggagattcctctaattgggactaaatctaattagaatatgagggagatgggatgccttgtcagtattttgtttctaaatttatctctagggagaaagaaggacaaaattaattttattttagatttaatttataagtgggaactcagtgggcttactgatgggagaggtgacatattagaattttatagggtgcagataaattcaaggcattgcatattttcagagctttatttttgagactcatgctctcatttgatgcacttggataaccctgtctggaaaactctatttggcagcggaaattgttataatttggacaggagagattcaataagagtatatgcttttggggaaatttaataatctattttgatagatttgacatgatttcagggcaaaaaaat

SEQ ID NO: 518270 - DNA, 624 bp, Homo sapiens
ctctactctggtaatattactgtacttgtacgtcttacaggattggatcttgggagcatgaatttggttagggaaatgacatttaaaacctggaagcttggaatgtcacctgttattactcaggaactttagaaaattgaagsagtttttatagatataaaattagttgctgtatagtgcaaccctggagaacaattcacataccctctgtgatcccagggagattcctctaattgggactaaatctaattagaatatgagggagatgggatgccttgtcagtattttgtttctaaatttatctctagggagaaagaaggacaaaattaattttattttagatttaatttataagtgggaactcagtgggcttactgatgggagaggtgacatattagaattttatagggtgcagataaattcaaggcattgcatattttcagagctttatttttgagactcatgctctcatttgatgcacttggataaccctgtctggaaaactctatttggcagcggaaattgttataatttggacaggagagattcaataagagtatatgcttttggggaaatttaataatctattttgatagatttgacatgatttcagggcaaaaaaat

SEQ ID NO: 518271 - DNA, 624 bp, Homo sapiens
ctctactctggtaatattactgtacttgtacgtcttacaggattggatcttgggagcatgaatttggttagggaaatgacatttaaaacctggaagcttggaatgtcacctgttattactcaggaactttagaaaattgaaggagtttttatagatataaaattagttgctgtatagtgcaaccctggagaacaattcacataccctctgtgatcccagggagattcctctaattgggactaaatctaattagaatatgagggagatgggatgccttgtcagtattttgtttctaaatttatctctagggagaaagaaggacaaaattaattttattttagatttaatttataagtgggaactcagtgggcttactgatgggagaggtgacatattagaattttatagggtgcagataaattcaaggcattgcatattttcagagctttatttttgagactcatgctctcawttgatgcacttggataaccctgtctggaaaactctatttggcagcggaaattgttataatttggacaggagagattcaataagagtatatgcttttggggaaatttaataatctattttgatagatttgacatgatttcagggcaaaaaaat

SEQ ID NO: 518272 - DNA, 353 bp, Homo sapiens
tgcagtagcatctctgtggtaagaratttaatggaagtgtcattaaggaaaaaaaagcttcttgaggaatgtgatagaagaacagattgagaaatatttctctgtagtagtaaatagaatgaattgattttttaatatatcttgctttgaatctgttatagcaataggtggctgcttgacgatttatgaatacagtatacaggcctactaaaagttcatgtaatcctagccaactactagcccaatatttgaaaattatacagtcagtaatgactaatataggacaaaataaacttaaaaaatccatagccactgcaattagcttcatgattagactagaatcatgaaatggt

SEQ ID NO: 518273 - DNA, 353 bp, Homo sapiens
tgcagtagcatctctgtggtaagagatttaatggaagtgtcattaaggaaaaaaaagcttcttgaggaatgtgatagaagaacagattgagaaatatttctctgtagtagtaaatagaatgaattgattttttaatatatcttgctttgaatctgttatagcaataggtggctgcttgacgatttatgaatacagtatacaggcctactaaaakttcatgtaatcctagccaactactagcccaatatttgaaaattatacagtcagtaatgactaatataggacaaaataaacttaaaaaatccatagccactgcaattagcttcatgattagactagaatcatgaaatggt

SEQ ID NO: 518274 - DNA, 544 bp, Homo sapiens
atccctaacaacaaatgctgccatgtttagtgtgcaaaagagaaagctttcaatgatcagcagaagcaggaaatccattcagagcactctgccacagaaatggttaaagaacaaaaaagcccattagaaatgacagaaattgagaaattttggggtgaaatagtttttggaaaccgtcttctcagaaaacatggattaagaacatactttataattacaaaaacaatgctacctaaaagtaaaaaaaaaaaaaaaaaaawggacacatagatttaaatatttggcctgtcaccggctggtggtataaaagcacatggaaatctttgattattctgagcctcattatcttcatttgtcaaactagggtctacaacacctacaggcataccttgttatcttgcacttcgctttatcgtacttcacaggtattgcattttttacagattgaaggtttgaggctcccctgcgtcggcaagtccgctgctgccatttttccaacagcttggctcactttgtgcttctgtgtcccattttggtaattctc

SEQ ID NO: 518275 - DNA, 647 bp, Homo sapiens
tgtgatatgcagtctcaaaacacaaaacatctggagagatgatatgaacagttcatctttccctatttatatttgaaggctaaggcaatgtttatggaataaagaatttgtttaaatgaatgtctgaacattatgaattccttgttatactttatctggcttcacaattgatgtagtgaaccaagatctctctatacatatactcacatgcatacacatacacataggcttatagtcataaagctatatagtcatatatacatgtatctatatatcaaaaaagagattgttatttttctttatgtacctagggaaatccctgaacctattaaggccactatattcatttctctaaagtctaaaagcagactggaaggatggaatatgagtataacacgaaagtaayatttttcacaaagtcatggctattaagaaccttatagtctttgagtggagtgtataatttgaaattaaagtttcataactgagtatccttctttttagaagaaaaatgttctcataaatctgttacccaaaatgcttttgaaagaaaatttaccattttcttcaactttaaaatcatacttgcaagggaagctctgtgcagagatgtttggcataaatatgaatgacaatatataaaaact

SEQ ID NO: 518276 - DNA, 602 bp, Homo sapiens
accatatgtggtgtcaaacctctgaaatgtattaatttttactttatggcccagtgtatggtctatttttgcaaatgttttatgtgtacttaaaaacaatatttattcctcagttgttgaagggagtggttttctatatatcaatgtttcttaaactatctgcagtaaagaacaagatttttttaaattttaaatttatcatagacaaaaacttcgtaaaatacaataaaaataaattactaacaaatagaatggaaaaagtaaaaaagtataggcttagatttcttattattagatccaaaaacataaaattgctctcattaaatgtctattaaggtttctttcacatattttgttgtggaaaaaataatttgtggatccgcactaatctggtgcgtgaaccaccctttgaacagcattrctctgcatttctgttgagtctgatttggtaattgtgttgtttatatccactagatcctcattaatattttgtcatattctgtcaattcctgaaagaggtgttttaaaatcttctaatctgatcatgggtatgtttataaactcctttcattctgtacgattgtgtatcatataagttccag

SEQ ID NO: 518277 - DNA, 602 bp, Homo sapiens
accatatgtggtgtcaaacctctgaaatgtattaatttttactttatggcccagtgtatggtctatttttgcaaatgttttatgtgtacttaaaaacaatatttattcctcagttgttgaagggagtggttttctatatatcaatgtttcttaaactatctgcagtaaagaacaagatttttttaaattttaaatttatcatagacaaaaacttcgtaaaatacaataaaaataaattactaacaaatagaatggaaaaagtaaaaaagtataggcttagatttcttattattagatccaaaaacataaaattgctctcattaaatgtctattaaggtttctttcacatattttgttgtggaaaaaataatttgtggatccgcactaatctggtgcgtgaaccaccctttgaacagcattactctgcatttctgttgagtctgatttggtaattgtgttgtttatatccactagatcctcattaatattttgtcatattctgtcaattcctgaaagaggtgttytaaaatcttctaatctgatcatgggtatgtttataaactcctttcattctgtacgattgtgtatcatataagttccag

SEQ ID NO: 518278 - DNA, 602 bp, Homo sapiens
accatatgtggtgtcaaacctctgaaatgtattaatttttactttatggcccagtgtatggtctatttttgcaaatgttttatgtgtacttaaaaacaatatttattcctcagttgttgaagggagtggttttctatatatcaatgtttcttaaactatctgcagtaaagaacaagatttttttaaattttaaatttatcatagacaaaaacttcgtaaaatacaataaaaataaattactaacaaatagaatggaaaaagtaaaaaagtataggcttagatttcttattattagatccaaaaacataaaattgctctcattaaatgtctattaaggtttctttcacatattttgttgtggaaaaaataatttgtggatccgcactaatctggtgcgtgaaccaccctttgaacagcattactctgcatttctgttgagtctgatttggtaattgtgttgtttatatccactagatcctcattaatattttgtcatattctgtcaattcctgaaagaggtgttttaaaatcttctaatcygatcatgggtatgtttataaactcctttcattctgtacgattgtgtatcatataagttccag

SEQ ID NO: 518279 - DNA, 637 bp, Homo sapiens
gctcaaacatttgtgacagcawatgaatcctacttaacacatttttcttctgtcattgtttcttcctaactttccttctttcttttcttacttccctccttcattagaattctattaggcaggctcaagacagaagagaaggcagcatgatggtgaccaaggtgcatacaaggaggccattaaagcaagaaagcagttagtacaatcagaagtttaccacatgatatcaaatatactaggagtcagggttctcactcagagatgagaaatacaaaaataaaaatgggaaagctagaataaatcctgtagtttagtaataaaattgaagaagtataaatatatatagtatgtatgtttattatatataatttatatattagtgtaatgtatacacatagtatacattttaacttcttagctttattctagtctctcgctatataatattcatatataatatatgttataaattatataaatatataattatatagtttatatataaatatatatttgttaccatatataatatgtatatttgttactgtccactaagagagactaagagcagtgacatcccagtagcaataaacatgtgtatcatacagctattggtttctatttgatattctccact

SEQ ID NO: 518280 - DNA, 522 bp, Homo sapiens
cgcacgctcagagcacaggctatctccgtctttcatttttcagaacgaggctggggggctctgaggatgtgtgctctcgtgttgaaagccccatgaggtccttcctgacgccgacctctcccagccccgagttccaggggaggacgtgcgaggcgcggcacagaccccaggacgagggcatagggggagggttcccaggtctgttttccttttgttgctgtgtctagtgaggtcacgttatgcacacatattcaatccaattcatttctaaactctggaagttcttaattgggctcttgggaggaagaaagaggaagaggaaaacttggaggccagttgccagccctctggggacacgcagtcccatctcacaggaggagtgaatcggtgttctcacggggttttccgaagccatctgtatttcagagctttgtgatggagcgaagttcttcactcccactcctgggctgatctcctctgggaggcggasgttccagcgtttggagcgagccctggctgcag

SEQ ID NO: 518281 - DNA, 522 bp, Homo sapiens
cgcacgctcagagcacaggctatctccgtctttcatttttcagaacgaggctggggggctctgaggatgtgtgctctcgtgttgaaagccccatgaggtccttcctgacgccgacctctcccagccccgagttccaggggaggacgtgcgaggcgcggcacagaccccaggacgagggcatagggggagggttcccaggtctgttttccttttgttgctgtgtctagtgaggtcacgttatgcacacatattcaatccaattcatttctaaactctggaagttcttaattgggctcttgggaggaagaaagaggaagaggaaaacttggaggccagttgccagccctctggggacacgcagtcccatctcacaggaggagtgaatcggtgttctcacggggttttccgaagccatctgtatttcagagctttgtgatggagcgaagttcttcactcccactcctgggctgatctcctctgggaggcggacsttccagcgtttggagcgagccctggctgcag

SEQ ID NO: 518282 - DNA, 565 bp, Homo sapiens
ccagaccctttcagtcacctgcattgagagacttggtgacctatgtaagtcggcaggcctcagtcttactgttattaataaacagtccagccattggtcataagaaaaatatctaattccataaagcactgactaggtgccagtgattatgacaatagttaggcgccattctcattcacattccacacatgaggagaccaaggctgaggtctaaatcatcttcccaagacccccacagccagtaagtgctgggttcagggttcaaatccactcggtctcactccagagttcaaggtcccattcttgccatcccaattcaccgaattctccatttgtggattctattagcctgmagccagcacttctgaggcctcctaaccctagctgggagggcagccagcccactcagcggggaggtgactggctattattcagggtgtgggtgcagaggtgtctggcatctgaggcattttgttgcttcttttactaaggcagagggagggagaagcaacctgtgataatctcacctcaccagcattgcaacttagcaaaagtcatactctcc

SEQ ID NO: 518283 - DNA, 565 bp, Homo sapiens
ccagaccctttcagtcacctgcattgagagacttggtgacctatgtaagtcggcaggcctcagtcttactgttattaataaacagtccagccattggtcataagaaaaatatctaattccataaagcactgactaggtgccagtgattatgacaatagttaggcgccattctcattcacattccacacatgaggagaccaaggctgaggtctaaatcatcttcccaagacccccacagccagtaagtgctgggttcagggttcaaatccactcggtctcactccagagttcaaggtcccattcttgccatcccaattcaccgaattctccatttgtggattctattagcctgaagccagcacttctgaggcctcctaaccctagctgggagggcagccagcccactcagcggggaggtgactggctattattcagggtgtgggtgcagaggtgtctggcatctgaggcattttgttgcttcttttactraggcagagggagggagaagcaacctgtgataatctcacctcaccagcattgcaacttagcaaaagtcatactctcc

SEQ ID NO: 518284 - DNA, 565 bp, Homo sapiens
ccagaccctttcagtcacctgcattgagagacttggtgacctatgtaagtcggcaggcctcagtcttactgttattaataaacagtccagccattggtcataagaaaaatatctaattccataaagcactgactaggtgccagtgattatgacaatagttaggcgccattctcattcacattccacacatgaggagaccaaggctgaggtctaaatcatcttcccaagacccccacagccagtaagtgctgggttcagggttcaaatccactcggtctcactccagagttcaaggtcccattcttgccatcccaattcaccgaattctccatttgtggattctattagcctgaagccagcacttctgaggcctcctaaccctagctgggagggcagccagcccactcagcggggaggtgactggctattattcagggtgtgggtgcagaggtgtctggcatctgaggcattttgttgcttcttttactaaggcagagggagggagaagcaacmtgtgataatctcacctcaccagcattgcaacttagcaaaagtcatactctcc

SEQ ID NO: 518285 - DNA, 577 bp, Homo sapiens
acaattctactctctgcagaggtcacrgtgagggaatggccagctctgtgtggctgctgtgagacccccccacagagtgtagcccacacctcggagccctgccctgtgcacaacccccacatggctgagcagtgggccgccagtgttaggaaggaccagcggcctgggagggacactgaccgtagtccctgtaaacaggcaaacacaatcccaactccacggtattctcagaaggaggaaatggagaggccagcccatggcctggggctggtgaggcctccatggcactgaagcaggaggtcagacatgttccttcacctgctcatcacatgtgtcttggcagacactcgctgaggatttagcacgtccaaggactggacacggagacgcaggctggccctgtcttcagggagctgtggccagggaaggcagtgaagtggctccggtggcggggggcatggcggggtcagggaggcccaggacgcgccttgtggggaggaggcctggggagctggtggagaagctgggtgtggggtggggggaggtgagggccaggcccacggtgcgggaaggacac

SEQ ID NO: 518286 - DNA, 587 bp, Homo sapiens
cccacaggagtctccaggggttactcaccagccccagggccgagaacctaaacagccaggcagtctaccacatgcttacctggtcaatataaccagagcaactccaggcctagcaagtgaggtctcacttaggcctaacaatgaagttacagcttctcacccatttcctaaggaatcacccaacacacagagcctggggcttcaggaaggatacagatcatttcaccagcacgcgctcttttaactcccttccctttcccaaagggtctgtggccatttgccagagagcctgggcctgggaaggctggygtgaagggtgtcaggaaatctaggacaaagaccagactaattctagcccctgcgaggcaggacaccgcaatgtcctccagtcacagtgggcctccaagcctatgctacattatttctcaggcacccaggtgtgtggttggaatattaaccctcaatactgtgcagaactacctctcagttccccaataggaagaacacctattcaggcatgaagagcaaagtgacgtcttagagctctccctccttacttaaatattaaatcaaaagcaagaccatgg

SEQ ID NO: 518287 - DNA, 486 bp, Homo sapiens
ctgtgcgtcgcgtgggaaagggcaggcgagtgcttcctggcgtggcagaaacgttccccagcttgactggagcacaggtcatgtggttgaacacactgttcaaactcatcaaactgtgcttaatatcagtgtattttgtagtgtaaatttctattcaagtgacgtcaatttttctggtatttcagaaatttgcacaccacaatgactgaacgctgccagtggggattcccgtcaccggcctggccccagtgtatcttcaagaatgactcgtctggcacagcgggagcaggtggtggatacgagggccactttcctccagtctgggattcttactggacaaattaacacagtacaatccctggtttgaggcttgtacctaagaatctaacaaattgctttttctatcccaattaagagaaagcactagaaactattccttttctcagcagagtcatggwgcagactgcagctttgtctcaggctatg

SEQ ID NO: 518288 - DNA, 482 bp, Homo sapiens
ggataggctataatctaatcagactggtgtgcttataagaggaaatttagccacacacagtcacaagggacctgcctgtacaggggaacaccctgtgaaggagaagaagagaatagctaactgcaggccaaggagacaggcctggaatgggtttgttcctcaaggcctttagagggaatcaaccttgccagcaatttaattttgaacctccagcctctagaactgtgagaaaataaatttctgttgtttaggcccgctgatcagtggcattttgttatggcagctctagcagayagcacatcaaataaactggttaatggaaggggaaaaaaattctgctacttataagtttaagtgctctatatcttatagctgcacaaactttctgaaccatacccctaacaaattttaaattaacctaaaaagtcaatttagaattctgtgtcttttataaagttttaacatctttcaagaagaggaaa

SEQ ID NO: 518289 - DNA, 581 bp, Homo sapiens
atcctcaccccacagctatgcagcgggaccctcctgctggcccacgtggctgccagagcccatgctggcactacactccagcatgtcggcgtccctgcgggccacactaccggtgacatggctagcatgaccctccttcctggcagtgacactgctgatgtgaaccccatctctactaaaaatacaaaaattagctgggtgtggtggcgggcgtctgtactgtagtcccagctacgcrggaggctgacacaagagaattgcttgaacccgggaggtggaagatgcagtgagctgagatcatgccactgcactctaacctgggtgacagtgagactctgtcaaaaaaaaaaaaaaaagaaagaaagaaacgaaaagagcagcaaagtttgcaaataatttttcaaaaacttatagcagaaataaatttacctctataatgacataactcactcatttgagttcaccgattattcttaaaagaaaaacaaaaacaacaaggggaggggggcacgctagaataaacttctgttcccgcttccaacaattgtgtgcatccttcaaaacagggctgcgttgttaca

SEQ ID NO: 518290 - DNA, 654 bp, Homo sapiens
ctgaagatagtgtactaaaatcatttcagattattattagtaaaactttctaatatgcaattatgaaaaattaactaaaattaaggtaactatatcagctttttttacaatgatccttattttttaaaataccaactctttctaaaaatcaacttttgctgtctttacctggtagtaacacttttccattccctttcagtgaccctgttttgagcagtgttaacaccttagaaaaacttccagataaatgtcgtgtatcttttggtctactttaacaacaaaacrgactctccttgttatcctatttgctcaaccaatgtacattcttactcctgtgtttatacagtacagtcattagtagtttttacttttctagtcttttggaccattaaactagagtttattatcctccaggtgatgaatcttatttacaaattcattgcagatcatgtgtgggcagcatgattgctgatcctgcctaacgaatacatttagtgtttaattttttttctgttgctattttctaatttgaagtgggtagaccaaaagcaattaattctattccagtttttcagtactttgctgcatgcttcttctgtcactacagatgcttatgactcttaatgtatagctttaaataacactgatattaga

SEQ ID NO: 518291 - DNA, 413 bp, Homo sapiens
ataacaattgttgggaaactttagtatacttaagaatcacctgccagcctgggcaacatagagaaaccccacctatacaaaaaaatacaaaaaatagccaggtgtggtggtgtgcacttgtagtcccagttactcaggaggccgaggtgggaagattgcttgrgtccaggaagtccaggctgcagtgagctgagatcgtggcactgcactccagcctgggcaatggagtgagcccttgtctcaaaaaaagaaagaatgacttggtgaagttgtccaaaatatagatgttcaggcctcctctctgaagtagtgtccagaaactcatatttttaccaagtcactctgttgatctgaagcaagggatatttgcccactgagttacaggataaagcccaagctccttaatgaagtgt

SEQ ID NO: 518292 - DNA, 413 bp, Homo sapiens
ataacaattgttgggaaactttagtatacttaagaatcacctgccagcctgggcaacatagagaaaccccacctatacaaaaaaatacaaaaaatagccaggtgtggtggtgtgcacttgtagtcccagttactcaggaggccgaggtgggaagattgcttgagtccaggaagtccaggctgcagtgagctgagatcgtggcactgcactccagcctgggcaayggagtgagcccttgtctcaaaaaaagaaagaatgacttggtgaagttgtccaaaatatagatgttcaggcctcctctctgaagtagtgtccagaaactcatatttttaccaagtcactctgttgatctgaagcaagggatatttgcccactgagttacaggataaagcccaagctccttaatgaagtgt

SEQ ID NO: 518293 - DNA, 413 bp, Homo sapiens
ataacaattgttgggaaactttagtatacttaagaatcacctgccagcctgggcaacatagagaaaccccacctatacaaaaaaatacaaaaaatagccaggtgtggtggtgtgcacttgtagtcccagttactcaggaggccgaggtgggaagattgcttgagtccaggaagtccaggctgcagtgagctgagatcgtggcactgcactccagcctgggcaatggagtgagcccttgtctcaaaaaaagaaagaatgacttggtgaagttgtccaaaatrtagatgttcaggcctcctctctgaagtagtgtccagaaactcatatttttaccaagtcactctgttgatctgaagcaagggatatttgcccactgagttacaggataaagcccaagctccttaatgaagtgt

SEQ ID NO: 518294 - DNA, 683 bp, Homo sapiens
tttttatgtttgctatatttcctatttccactactttcctgaataagtacatttactctgggttaatttttgaaataattttgaaattattcaaaacattgttgtgtgtatatgcaaagactagggaaaagaagcttggattggtagcaaaaagccaactgtgactttgagcaaattatttgacctctctcaatatatcttttcttattttaaaataaggaggttgaactatatcatttctatgctttctttcattgttagcaatccacgaataatggaacactgcacagaatagtaaacactgggttaagatccagtattggctcgaatccttataactgtgtgatctgaatacagtaatttcttctccctgggccttactttcttcatctgaaaaattacaggattggcctctatcttccttattgtctcttcagactctcatgttttgtagttttcctcagttatggtagaaatctcatccttctcttcttaacatttagtcctgtgctccagggaaagaggagggagttgggagaggcctgatataatcattaattttctmcgtctctctctttgttttgttttaactctctttctccttccccctccccaccttctcctccattttttttttttctagaacactgagaaagtttcctcatagtctacttggcagttgc

SEQ ID NO: 518295 - DNA, 683 bp, Homo sapiens
tttttatgtttgctatatttcctatttccactactttcctgaataagtacatttactctgggttaatttttgaaataattttgaaattattcaaaacattgttgtgtgtatatgcaaagactagggaaaagaagcttggattggtagcaaaaagccaactgtgactttgagcaaattatttgacctctctcaatatatcttttcttattttaaaataaggaggttgaactatatcatttctatgctttctttcattgttagcaatccacgaataatggaacactgcacagaatagtaaacactgggttaagatccagtattggctcgaatccttataactgtgtgatctgaatacagtaatttcttctccctgggccttactttcttcatctgaaaaattacaggattggcctctatcttccttattgtctcttcagactctcatgttttgtagttttcctcagttatggtagaaatctcatccttctcttcttaacatttagtcctgtgctccagggaaagaggagggagttgggagaggcctgatataatcattaattttctacgtctytctctttgttttgttttaactctctttctccttccccctccccaccttctcctccattttttttttttctagaacactgagaaagtttcctcatagtctacttggcagttgc

SEQ ID NO: 518296 - DNA, 377 bp, Homo sapiens
  misc_feature (1)...(377): n = A,T,C or G
atgaatctgccttgcattctctactgcatccttcacagcacagttctatctataaatgcaaatcttaccttctcattcccctggaacaaattctttattggatttcattgtacattaaataaattagaaacycttattgtggaatgagggcacaacaagtctcctgatcctaggcatgaaaactctgcagccccatctgtgttttcattctcctctcttcnccgtaattaccattatcacctcctaagccccaagcagagtcaccacatcttctcccccttctgttttaccttcatttaagttctgagctgagctcagggccagcaaggccactgacagcagaatcaacagcatcttgcaggaggctctggagtcac

SEQ ID NO: 518297 - DNA, 537 bp, Homo sapiens
  misc_feature (1)...(537): n = A,T,C or G
acttccatgaatctgccttgcattctctactgcatccttcacagcacagttctatctataaatgcaaatcttaccttctcattcccctggaacaaattctttattggatttcattgtacattaaataaattagaaactcttattgtggaatgagggcacaacaagtctcctgatcctaggcatgaaaactctgcagccccatctgtgttttcattctcctctcttcnccgtaattaccattatcacctcctaagccccaagcagagtcaccacatcttytcccccttctgttttaccttcatttaagttctgagctgagctcagggccagcaaggccactgacagcagaatcaacagcatcttgcaggaggctctggagtcactcccaactctgtgctgggaggaacgtggcaactccctttataaagaggagaagaacaatggcacctttgagctccacactgggtgggcctcaccacctcagagactggcttctgctttgctcactgcaggtcaggtgtttcctttatttttctt

SEQ ID NO: 518298 - DNA, 537 bp, Homo sapiens
  misc_feature (1)...(537): n = A,T,C or G
acttccatgaatctgccttgcattctctactgcatccttcacagcacagttctatctataaatgcaaatcttaccttctcattcccctggaacaaattctttattggatttcattgtacattaaataaattagaaactcttattgtggaatgagggcacaacaagtctcctgatcctaggcatgaaaactctgcagccccatctgtgttttcattctcctctcttcnccgtaattaccattatcacctcctaagccccaagcagagtcaccacatcttctcccycttctgttttaccttcatttaagttctgagctgagctcagggccagcaaggccactgacagcagaatcaacagcatcttgcaggaggctctggagtcactcccaactctgtgctgggaggaacgtggcaactccctttataaagaggagaagaacaatggcacctttgagctccacactgggtgggcctcaccacctcagagactggcttctgctttgctcactgcaggtcaggtgtttcctttatttttctt

SEQ ID NO: 518299 - DNA, 643 bp, Homo sapiens
gaggagtacagggaagcaagtcacacagcgtgtgatactgagaggtgacaacgtgctagcagtcctcactcgctcttggcacctcctcaggccatggcgtccacgctggctgcgcttgaggagccttcagccaccgctgcactgtgggagccctctctgggctggcggaggcagagccactccttctgcttgcagggaggttggagggagagacgcgagtggaaccaggctgcctgctgcactcacaggccagcgcgagttctgggtgggggtggctcggcaagtcccgcactcagagcggctggcgccaccggccccgggcagtgaggggcttagcaccgggcaagcagttgcggagggtacgccggtcccccagcactgccggcccgccccactgcgcttgaattctcactgggcctcagccgcctccccgcggggcagagcttgggacctgcagcctgccatgcccgagcccctcccctccgcgggctcccgcacagccggagcctccacggcaccaccccctgctccacagcrcctggtaccattgactgcccaagagctgaggagtgcaggctcgcagcgcgggactggcgggcagctcagcctgcagcctgggcacgggatccactaggcaaagcca

SEQ ID NO: 518300 - DNA, 643 bp, Homo sapiens
gaggagtacagggaagcaagtcacacagcgtgtgatactgagaggtgacaacgtgctagcagtcctcactcgctcttggcacctcctcaggccatggcgtccacgctggctgcgcttgaggagccttcagccaccgctgcactgtgggagccctctctgggctggcggaggcagagccactccttctgcttgcagggaggttggagggagagacgcgagtggaaccaggctgcctgctgcactcacaggccagcgcgagttctgggtgggggtggctcggcaagtcccgcactcagagcggctggcgccaccggccccgggcagtgaggggcttagcaccgggcaagcagttgcggagggtacgccggtcccccagcactgccggcccgccccactgcgcttgaattctcactgggcctcagccgcctccccgcggggcagagcttgggacctgcagcctgccatgcccgagcccctcccctccgcgggctcccgcacagccggagcctccacggcaccaccccctgctccacagcacctggtaccattgactgcccaagagctgaggartgcaggctcgcagcgcgggactggcgggcagctcagcctgcagcctgggcacgggatccactaggcaaagcca

SEQ ID NO: 518301 - DNA, 315 bp, Homo sapiens
atctagaaatcaaccttcttctcttctcaggtttccaggataatgccaaaaagcattttttagctacaaagagtaactgttgagtagtaagtgatgaaaacagttgagtggagttgaatgcctgaagattttgtggtgcrtagggcgattgccatctgattggtttgtcatgcctgttaaaggcatgtcttttcatgtgaaagtgagaagcatgagaaaagctaggaaagaaaaaacccttgaggaatccaagtaaagaaagaagaggcgatggggcttagatgcagccacagagattaagcttggggtatgcag

SEQ ID NO: 518302 - DNA, 315 bp, Homo sapiens
atctagaaatcaaccttcttctcttctcaggtttccaggataatgccaaaaagcattttttagctacaaagagtaactgttgagtagtaagtgatgaaaacagttgagtggagttgaatgcctgaagattttgtggtgcgtagggcgattgccatctgattggtttgtcatgcctgttaaaggcatgtcttttcatgtgaaagtgagaagcatgrgaaaagctaggaaagaaaaaacccttgaggaatccaagtaaagaaagaagaggcgatggggcttagatgcagccacagagattaagcttggggtatgcag

SEQ ID NO: 518303 - DNA, 633 bp, Homo sapiens
ataggagtagaacctagacctcaggagggcatattggccacagtccgcaaattttcccctttgctttgtatcaagaacatctcttgccaaacaactattctattcatgacaccttttagtagcaagattgataactcaaacttgagttaattgaaatcgatatctatagtgggaaaggtaggaatttgaatgtagaaggttatgtagaagggctctctttcctcaactcatctttgcttttctctgcatctggcttcaacctttcctcttgcagaccgtctttctttagaaggctggaaagacaacttctagaagtttctgtgctcggtcactcaggtcttcaccacttgagaggaaaaaacgcatttcatacaatgggaggtcactgactgatctatgttggaatgccattccactctgtgaactaattcttgtcacctgagatgtgagatagtatcattgttccatcttgggtcagatgcttatcttttagggggagtgaagaaaaggagggagrgctgtcactaaagaagtaattagatagcggttagactaaaacattagatgtccatcacaggagatttggttaaactcaatgtaaaatcttcatcttccattctcagtcaaattctt

SEQ ID NO: 518304 - DNA, 479 bp, Homo sapiens
atgtggtatcaagggaacctggagattaattgggacttatacctgtgcctggtagtaatgaggtggctccctgcccaccagcacagtgtcagagaagacctgctaaaacagaagatttaaatcagattattatttttgtttattttttaatttttatttttatagatttagaaggtacaagtacagctttgtgacatgyatatattgcatagtggtgaaatctgggcttcagcataaccatcacccaaagagcgtatgttaaatcaggttattcagtaatctgcagaaccgagatgtaatataagacccgagatgtctagatatgatttactcattacacaaagatccaaaaattatgcgttatgcagaatcaggaacatttcactctgaataagaaaaacaatcaatgggtgccagcactgagatgacacagagtttgagaactacctgacaagtatttaaagcggccatcataaaag

SEQ ID NO: 518305 - DNA, 632 bp, Homo sapiens
aactaagatgtggattttctgatgcaggtctagcaaaccactccaggaatgtggacataaggttaaaacaattttatcctcctcaaactgaagcgcaggtacataatagcatattatctattctattttcctacctcaatttccctgtcagccagatacataccgtgcatttgacatcacaggatggatggggtgggcaaacctgtcagttcttgctttaaaatttaattactgaaatattattcaaatactcaaaaccctcatgaaattgtttttgttgatttcttcgtggtgatgctgtttgttttggttatgatttagatttctacaccagggccctggcaactctgaatgagtaagatgcatttgcgtttcatcaatacgaaaagaattacccctggaaccctgagttaaytggcactgtatgtctaacttattccactgacattataatgtgtctttgaatttgtgatacgattgcatcacaatcggtgtctgattatttatagaattatcataaagctgcaaaagtagaaagagggttttacactgcagtgttgtcgataagtgttccaaataacagtgaggtagtttaatcagttatagtatatcaattaagttcaatcaatatt

SEQ ID NO: 518306 - DNA, 643 bp, Homo sapiens
ctgcctggctcttttgcaataacaacctttgattactgaatccctacactcaaactatagtgatatatcagtgtttgagagtgacctctagaaaaaagaaaagtgtttttagaaatgygtacaagtcacccccaaatcctattgcttatcttgggttaaatttgagagtgattctctgtatataaatatgtgaaatattattatctcaacttagcacacgtgaagcaacatttctttcctacagagaggtgtcatggtaagatttcattccgaattcattgtttcatagagctatgatcaggccatttctgcaagcaatgtatgaccccacctgagcaaccacaaataggctctctgtgaaactacaaaggaagttatgtgtggcatccatgttggtttcgtctgtctgtaatgtgaattccagtatttgtttagtatttccagttgtctcctgctagcaatatgtacagtaacgcgtcaggcttgtgacatttgaataaggaaaaacagagttcctgttaagtgaataactttagcttttacaggggattatgatcaaaagtgattttagtacatcttaaatgatatcttatttctacatggaaagaagttatagaatcttcatagagttctatgagaaaaa

SEQ ID NO: 518307 - DNA, 434 bp, Homo sapiens
ttggcccttcacagcctccactagatgggctcattcgaacccaagacccttccaacagtacactgcaaatccatagctccaattcagacatcttccctctgagctcaagactcagatgtccaactgtctcttggatacctgcacttttacatcaccacctccaattcattatgttcaagactggattcatcatctctttcctaaccctcttctgccccctcctcctgaaattcctagctcggagaatgctactcatccaatctttgttgtcactcaaggacaatggtccttaaccttcactgcrtattagaatcacttggagagtcttagaaatcctaatgtccaagaccaattaaattagaatctcagggtggtgagacccaaacatctaaatttattaacaatccctgagtgattccaaagggcggccaagc

SEQ ID NO: 518308 - DNA, 616 bp, Homo sapiens
gctggtcgtggagcagtcagaacacgtatgacgttgatcaattaagtttgccatcttatgtgggtgtggttagtgcacccccaaaacaatttcagtagtaacatcaacgattactgatcacgattcaccataatagatataaaaataatgacaaatttgaaatattgaggaattttcaaaacgagacacagacccaaagtgagcacatgctgctggaaaaatgtccatagacatgctcaacacaggattgccacaaaccttcagtttgtaaacaatgcarttttcacaaagtgcaatacagcaaagtgcaatttaatgagatgagcctgtaatgagcctctttaaagcaggaactgtcttcctcatctttgtcaccagtgcctggtgcatggtagcctctgaaaaaataattgttcattgaatgaagcacagtagagcaagggagagtgattttgctcgggaggaaaacaaataccactcaagaagatggaaagatacagatgagggttttctaaggcggattattaaactggcaagatggaactctggagagatggagttctttccagaaagtagaagataaagcctcaaagtaattaaaatagggaatatcagt

SEQ ID NO: 518309 - DNA, 597 bp, Homo sapiens
ttcttatacctttgcaaagccaaattcacagatttttttttttaatgttgtgccttagcttttttggattgcaaaaacatactcttcataatatggttgacattacctattttgaatttatcactctctcttacagttgaaaaatttgtggaaagcgtattttaatgatgaaaataaataacagtaaatttcctcatctgctttaacctcatcttttgccccttcctgttttaaaaagtcttaacttaatttgtcctaaaggctaccttttctaccttggccttaccgccgtctcggcttacttatttctctgcccttatctcccaagatttcaacatatgatctttctgccaaaactccatttcaattacttctctggtaaccacagaccagaggtcaccaactggttgaatttagtctgcagactctttttttgtgtgtgtgtgtgtttgattcgttggtcagtttgggctcacataatggtttttgaaattgttgaatgataygccattagttaaaaatctggtgatttcccgttgtcttgcttctctggaagaacctgaagacctgacaatagagactcacattctcatagaa

SEQ ID NO: 518310 - DNA, 566 bp, Homo sapiens
gctgtatctcttaaactcgttgcaaaactttacttctatcactaccaaaatgagtcaatttcccagtaaatgtgttgactgcaatatgctattaatgtggaaacatatcctgttgcctcatttagtatctacgaagataccactgtcaaagccataaatttacagtgactattcctttttcatatccatggatgtgacttcatttcctggcttaatggataattccttggaagacctatagtgatttttaaataagcaaaattttacatttagacctgataggtgatttccttttctaagtggttagtggggagggatatgagaaaacctttaatagataatccagagagtgtggcacacaaacacgtacctctcttcttgccactactgggcccttgtctgaatcagaagattcagtacctttctaactgtaccaacctgaaacaaagtaaggtttccagktggtgacaagaaatcaaaggaaatcaaatctgcaatgcaaggaatgcacttgtaggataaacaagtactttattaccgtttacctcaggctggtagaaatagca

SEQ ID NO: 518311 - DNA, 588 bp, Homo sapiens
agggactttaagggcgcaaataaattattcatccacttaaacaataataaaagcaaaatctccaaagcctgactattctgttcccctcaaagacttggtgaggattaaatgagagaattcatgtgaacaaagttttgttagtagcaatggtaacaatattatttataagcataataggtacaaatggtaaggagaagctgtttcatgatagtgaaagcaaactatgggtggttatgaaaccrgagtaggaaaggtctgagagttaaatagaggaattaggatttgttcactagacaacagaaagatactgacattttcaaggacggcatcatatgggaaatgcttttctctaaaactagtatgagggcaataagaccaatgaaaaggactggagtgtgaagtggaggcttgctaggaagccagtgcaatgatgagaaggcctggaaacaatgtaagaatggcaatggaaagcaatcaaacaaaacatgtttctttccctaaaaaaagaggcagcactttactaattttttttctaattataaatgttcaaagaagaaaactcagaaaataaaaatagtacagagaaaa

SEQ ID NO: 518312 - DNA, 478 bp, Homo sapiens
tcttatttctgcaataatttacaacaactatgttaagttaccctaacttgtacttacttagtcaaatgatagttaagttaaaattgtatttatcccaagcaaaactgaaatagaatttcaatggaaatataattaatatggagtaaagacttgtccagttattttatagaatmatttcttagaagtagaattactgagttgaagatttgcacagtctttaaggcttttaacctgttttgaccatttttctcatggaggccgtacccatttcccatccaggtgtgtacatgggcctgtttctctatacccttagagagatactggggcagatgcctctctctatgcatagctgcctccttgatttcagattagcgatagttataatcccagaggctccaaactccatcagtgaccaactcaagtttcctccgtgaggaggagattccagcacatgcgctggttcaaagtcagccctcag

SEQ ID NO: 518313 - DNA, 581 bp, Homo sapiens
gaggacgtttgctctatttttttctttcccatttcccatgcagatgtcttctgtgtcttctctttcatccactggagggttgccattgcatctcttggcctctatttctaccctactatctttcttagtaacatggaaattattctgctattctcacaagatgctggtttccagaaaacccaacggactaggctgggacaaaagatgctctatcacgctgtctcaggttcatctgcaaagacacacataggacccagccacctctatccctggattacatcaccaaagtccatttcagttccacttgggatctacccaggaaaggaaatacccacattgtctgcacttggatttcctgaacttatctctccttcctttggaggtatgtcaaagaagtctgaccaaaatagatttttarggtttaaaaccgggatgggctgtggtaagccatgatcgcaccactgcaccccagcttgggcaatagagcaagaccccatctcaaaacaaaatgaaacaaagcaaagcaaagcaaaacaaacaaactagagaagaaaggttcttgattgtatggagctttgcag

SEQ ID NO: 518314 - DNA, 556 bp, Homo sapiens
tgcaagccacaaaccttttatgagatggaatgttyaggaagacctagggtgaagaggagacagaagtaagaacagtgaagaatgtacagcctctggtacacagagttatgacaaacatttaacatggtccaacacctaaccagactgacataaattgtcatcacaataaagccttcttttcctcagttcctagtattcaatgcaacaaaaatttacaaggtatgacaaaaggtaacggaaacatagtctgaagagaaaaaaaactcatcggaacaagactcgaatatgtaacacatgttggagtaatcagacagatagtatcaaataactatgatgaatgcattaaggactctaagagaaaatgtggacaacaaacagaaatagatgcgtcgtataagcagaaagaaggaaataaataagcagaagaaaatgctagaaatcaaaaacactatagcagaaatgaacaatttctggactggtcttgccagcagagttcatatgaccaaggaaaaaatcattgagcttgaaaataagtcaagaaatatcaaaaattaat

SEQ ID NO: 518315 - DNA, 556 bp, Homo sapiens
tgcaagccacaaaccttttatgagatggaatgttcaggaagacctagggtgaagaggagacagaagtaagaacagtgaagaatgtacagcctctggtacacagagttaygacaaacatttaacatggtccaacacctaaccagactgacataaattgtcatcacaataaagccttcttttcctcagttcctagtattcaatgcaacaaaaatttacaaggtatgacaaaaggtaacggaaacatagtctgaagagaaaaaaaactcatcggaacaagactcgaatatgtaacacatgttggagtaatcagacagatagtatcaaataactatgatgaatgcattaaggactctaagagaaaatgtggacaacaaacagaaatagatgcgtcgtataagcagaaagaaggaaataaataagcagaagaaaatgctagaaatcaaaaacactatagcagaaatgaacaatttctggactggtcttgccagcagagttcatatgaccaaggaaaaaatcattgagcttgaaaataagtcaagaaatatcaaaaattaat

SEQ ID NO: 518316 - DNA, 522 bp, Homo sapiens
agaggatccgacagggcgggctatttgtaggcattaagatgcaacccctatgactgggggagatggtggcctgagtatgattttccagggcagtgaaagggagatgtgcctataaaagcttagctctggggagcarccctgggctttcagattttcccaagaccagagacacaggtatgttttatctctaagcaaggcaagtgatacaatctacaaagacattggcacaaaagttgaaggcattttaatttttagcatcaaagaataaaataaaacaaagcgaagagcacatgaaaagaatagtcaccttttctttggaaatgaagctgatgagaatatcagaaggaacatgcattgctcagtaagttgttttcctgcaaaggttcctaatcatctcaacaaatcatagttctattaatttgaaattgatgtaaagttggaggaagaatcaggtctaggaatacgtgtgtgtgtgttcactttttcttataaatgcctccagaaagatacagctcagcagga

SEQ ID NO: 518317 - DNA, 640 bp, Homo sapiens
aacaaaggttcatcatatattgtattcttgagaaatgctgagagagtaaagtgttttcaccaccaaaatgaggactatgagaggtaatgaatatgtgaattagctggattgagccattccacaatgtatatatactttagagcatcatagtgtacacagaaaatacaaaccattttatctgtcaattaaaaaataaaaatcattatattaagttcttagtgaaaatcaaagcaacaatcaaaagtaggactattgaagattcagactctttagaaatgaaggcttgagttactctaccagataaggaatcttgactaattgaytttttggctgagagcaagagaagtatggaaatatggaatggatcctaagagaataatggcacatgtatatataagcagaaatgagtgttctgtgcttttgcgtagtttctctttccttgttatgtgtgtttgtttttataaataataatttttattgtcttttcctccttccctttattactttacatacaaattatatgctattgttatacaatttagctttcaggtaacagaatagtcagtgggaccctgactaaatttgaggagtatctaatgcaaccagggatgatgcaatgacttgaggcctgtttttcctc

SEQ ID NO: 518318 - DNA, 640 bp, Homo sapiens
aacaaaggttcatcatatattgtattcttgagaaatgctgagagagtaaagtgttttcaccaccaaaatgaggactatgagaggtaatgaatatgtgaattagctggattgagccattccacaatgtatatatactttagagcatcatagtgtacacagaaaatacaaaccattttatctgtcaattaaaaaataaaaatcattatattaagttcttagtgaaaatcaaagcaacaatcaaaagtaggactattgaagattcagactctttagaaatgaaggcttgagttactctaccagataaggaatcttgactaattgattttttggctgagagcaagagaagtatggaaatatggaatggatcctaagagaataatggcacatgtatatataagcagaaatgagtgttctrtgcttttgcgtagtttctctttccttgttatgtgtgtttgtttttataaataataatttttattgtcttttcctccttccctttattactttacatacaaattatatgctattgttatacaatttagctttcaggtaacagaatagtcagtgggaccctgactaaatttgaggagtatctaatgcaaccagggatgatgcaatgacttgaggcctgtttttcctc

SEQ ID NO: 518319 - DNA, 588 bp, Homo sapiens
atgacattttttattgtaggagacagaaaaatgaactaggtcaaagatcccctaaccaaaagattagggtctattgtaaaatcataacgctttcccttgtagatctttcagcccgttgccaccaccctgcccagctctctgaaatgtgccaagttttccttgtctactcagaaactttgctgacagcaccagcctgctcagctagtgaaaatgcctcctgccaaaaagattaactacactcatttttctttaggtaatttcataaatcattgtgcctattttactttgaaaagctttactattttcttcatagatgataattyagagcctgaaggacactttaggtaactgaatctttttctgtcttcaagacattcagattggaaacaaagtctcgtcagttacaatccattttggcacagagattcctggatatgggactttgaggggtaggtgaggagtgcacctcagaatgaaggaaagaagttgtggagttagaaaaagattcattctgaagccgtctccctctcaacacccaccctcgagctggcttaggaacaagtaccctgcggtgtgcttcttagaggg

SEQ ID NO: 518320 - DNA, 662 bp, Homo sapiens
gcgtctatgtcgctgttttccaaagctccatcatgcccgtcagtgccatttattggatggctgctctatgtctgtattctacactgaaacattgtattattactccccacccctctttattttgaccaaaggagaggtttcaggagctcraagagggtaaataatttgcccaggtcacacagctttaaagaggcataggcagaagaagtaaattttagtttcagcaatgcctgagtctgagctctcctcccaccttcagaaccctctggggtcccttctcccaaatgctgggaacacagcccttctgctggcttggttgattcatctcaattggagaagggagtctgtgaaattatacaacgctcatcttgtgaagcttcaaattttgagtttcacacttgaagttctttaggcacggtaaacttttttggaacaccatgaagcatgaaagcagatgcttttggaaatgaactgttttctatgacatggttttccagacagatctgggaagctcagtcaaagaagaatgaacatctttgaaaatatcaaaaagtctatgttacagggtggatattctccgggctcaaaactattcattgctttctttttttttgagggcatataaaataaaaaacagaaattgcaacagaacttctgttctc

SEQ ID NO: 518321 - DNA, 662 bp, Homo sapiens
gcgtctatgtcgctgttttccaaagctccatcatgcccgtcagtgccatttattggatggctgctctatgtctgtattctacactgaaacattgtattattactccccacccctctttattttgaccaaaggagaggtttcaggagctcaaagagggtaaataatttgcccaggtcacacagctttaaagaggcataggcagaagaagtaaattttagtttcagcaatgcctgagtctgagctctcctcccaccttcagaaccctctggggtcccttctcccaaatgctgggaacacagcccttctgctggcttggttgattcatctcaattggagaagggagtctgtgaaattatacaacgctcawcttgtgaagcttcaaattttgagtttcacacttgaagttctttaggcacggtaaacttttttggaacaccatgaagcatgaaagcagatgcttttggaaatgaactgttttctatgacatggttttccagacagatctgggaagctcagtcaaagaagaatgaacatctttgaaaatatcaaaaagtctatgttacagggtggatattctccgggctcaaaactattcattgctttctttttttttgagggcatataaaataaaaaacagaaattgcaacagaacttctgttctc

SEQ ID NO: 518322 - DNA, 602 bp, Homo sapiens
ggagcaggggcctttttctaacttgtgcaaagagctctggcccagataagctctagaggttccaatagttacagcaaagcatggcttttctagaagasagtatcagtccgggagaggcaagagagaagctgccatttacacacacatttgtatgtctgggtcactgagcacttgagtgggtttacacttggcccagccaaaacctcttcttgcagccaagcttagtcctctccaaattttctcatactactttgagactccctagttgacctggctacttcagtgagaggatggcaattaaaagtgaactcatggctgggcacagtggctcacgcctgtaatcccaacactttgggaggccgaggcaggtggatcacaaggtcaggagttcgagaccagcctggctaacatggtgaaaccctgtctctactaaaataatacaaaaattagctgggcatgatggcttgtgcctgtaatctctgttacttgggaggctgaggcaggagaattgcttgaaccagggaggcggaggttgcagtgagccaagatcatgccactgcactccagcctgggtgacagagtgagactctgtctcaaaaaaa

SEQ ID NO: 518323 - DNA, 602 bp, Homo sapiens
ggagcaggggcctttttctaacttgtgcaaagagctctggcccagataagctctagaggttccaatagttacagcaaagcatggcttttctagaagagagtatcagtccgggagaggcaagagagaagctgccatttacacacacatttgtatgtctgggtcactgagcacttgagtgggtttacacttggcccagccaaaacctcttcttgcagccaagcttagtcctctccaaattttctcatactactttgagactccctagttgacctggctacttcagtgagaggatggcaattaaaagtgaactcatggctgggcacagtggctcacgcctgtaatcccaacactttgggaggcygaggcaggtggatcacaaggtcaggagttcgagaccagcctggctaacatggtgaaaccctgtctctactaaaataatacaaaaattagctgggcatgatggcttgtgcctgtaatctctgttacttgggaggctgaggcaggagaattgcttgaaccagggaggcggaggttgcagtgagccaagatcatgccactgcactccagcctgggtgacagagtgagactctgtctcaaaaaaa

SEQ ID NO: 518324 - DNA, 595 bp, Homo sapiens
tctttcaaactgccttcagctctggtagagtctggccaccaaggattggggtgggttggttgattactccackaatcctaaaatgtaaaggttgcaacaaatagcacttttcacatcttatactgttgtaaggcacacattttagacattgttacatttcaagtagacagcatttgatgaagtgtttgtaagatagcttttagatgcttataaattctgtagccagccataacagatgttggctgggagaaagaatggaattaagtttgtaaaaagaagtggttggaaaaattacaatgaatcatgagaatggatgtgaatcttctgtattagaaattagggttctctctcttgggattctctctcttacctcaaaagtacccagatcatgcttggactaggaggcaagtcatgggtaataattggtaggtcaattctggggaggtaaaatttgcggaatttcctggattactgacattgcctgcgctgtgaaagaaaaagggaaaatggtggtcttgcttgatcagatgttagaacttggaattcacggtggggataaggagatgcacatttttgtgtcaagggcagtggatgg

SEQ ID NO: 518325 - DNA, 665 bp, Homo sapiens
aagtgctgggattacaggccactgtgtccggcctgttccatgaattttgagagtaggaccagttaggaagtgaaggcctagcaaatttatagcaatgcacttagtaattaaaaccatggatcataatattgcaggaaaacactactatattaaaagatcatgccgtatctcatctatttacccaaatcatttaaatattaatatttttagaagcctaagaaaaatatttgcacagccattttaaacaaagaaggcattaagtagtacatacatcgtggtcaacgtttctcaccattttatagctagcttaaaaaatgaacacagaaggaagtcccatcaatcaagttatgactgcaacttcctcaaatacagaaatactgcaaacaaatataacatttttacttcttcaattttaaatcataagtaatgttaacccaaaataagctacatggctgaaaacaaactatctacttaacagatatgcagtagcaagggcccttattyattagttttctgtggctgagaccattttaaaacatgggagaaaacccactattgcaaataatgcattttctaactctgcataatagcatgtgaattataaagatggctctaacaacagaaaaaccaacgaggaatgggatcccatggacacaaggccttaa

SEQ ID NO: 518326 - DNA, 458 bp, Homo sapiens
acttggggctcttcatactaagaatatctaaatggaagtaaaatttatgtaaaatcagactttatcaaaaatagaaatctgagttttagagctatatgacatttaaataactgagcatagcttgaatatggccacatgggcagagcaaccttatctgtttcatctctactttcttaggattcatctgttatgaagtcaagccctttttaaattttagaaaactctgaacctcaactaggactgatgagtgtttttatttaatcctatcttgttctttcaaactgaatatcagcactgcagtgaacagaaactgcattaaacagaaaactgctttagtgttttagactataaaaaccagtcctgagatatagccctttgtttattatttacttcggagttmggtcgtgaaggaaatacctgattttattataacatttggcacaacaacctgatcccaa

SEQ ID NO: 518327 - DNA, 400 bp, Homo sapiens
aaaagaggatatgtagaaaatattcttccacaagtgacacaatattctaagcatggtaattataaatgatagatttgacttatgagagaatattaataaatatcatatttacattaattttttgttactatgattaatatgaaagaaaaagtcatttaataccagtttaatactaaaacaaattattgaaattcctaaataatataatattagcaacttctttaactcctgaggctttaaagtcaacacattgaaacatttaataactccagtgtttgtattctatcatacctctgagaagctgacaactacctgaagccctctgcatactttgaaatgtcagaccactatgcctsatggttcatcatttttattcatttactttttcctgctaaatgcc

SEQ ID NO: 518328 - DNA, 585 bp, Homo sapiens
tctttgttacattctttgtacatatttctgagactgttttacatatatttttattgttttacctatagtctacagttgcttttgcacaaccgtggatcaagaatgatcagaaaaaacaaaaacaaaaagcaaaacaacaataaaaatcattcaaattttaaaaaatacagtataacaattatttayatagcatttacattgtattaggtattataagtaatatagaggcaatttaaagtgcaaggaaggaagtacagaagtcatgtgatgctatgccgttttatttaatgaaattgaggacctgctgattttggtatttgtgggaagttctggaacaaatcccccatggatatcaagagatgactgtatatattttaaaatccacaaggcctgtattgtttatttgtagggtcaattttcagttagtattgttttatatataccaaacacctttttaaaattgtctctcactcctcagtgcaattttgtttttccctctgcttttggttttgtattttgtttctttgcttgtttttcattattactctttcaagtactggttatagtaaagctggttcgtaggtg

SEQ ID NO: 518329 - DNA, 625 bp, Homo sapiens
ctggctacgtaaacccatctggccacatggaacctttgcttctttacccacaagttggtctttttggtaagaagggtaccaggctgacacactgctggactccaactgcaggttcatctgtacctttagctccatggaagcacatagacttaagtttggtactctggaggtttgactgcatctgatatctgtggactgccattacaaaagattggagagacatcctaattcatagaattactgatctgtaataataatcatactactaataaataactgaacattattgagcattygctaagaacctggccacaatgctaaggacttaggtggatagactctgtttattcctgacaacagtcccacgaggtagatactgtcatgacccacattttacagtgaaggaaatggagcaccacagagatgaccagaagcagcatgcaattccagattgtatatttgatgccagtgttgtgctaaaggctttgcttacatgaactcttatcctcataggaatcccttgaggcaggcactatcattgacctcactttacagacaaggaaaagaaggcctacagagtttacgtacctcatccagggtcccccagatagtaagtggtggagcc

SEQ ID NO: 518330 - DNA, 536 bp, Homo sapiens
gattttacctccttctctctctctctttttttttttttttttttggtagtgactgggtttcactgtgttgcccaggctggtctcaaactcctggctcaagcaatcctcctgccttgrcctcccaaagcgctaggatgacaggtgtgagccactgcatccagccttacctcctctatagccaaggaaactgagtctcaagttagtcacttgcccacgttacacagctaataagtgaattcaaactcaggtccggctgactccaaagcctgtgtttaatgcttgccctaccctccctctgtattggaatatggttacccccaaaatggtcctccgaaatgccccaagccatgattatcggccttcctcgagtgttcccacacactcgaggcaggctggtgtagccagtgtgcaggattgctgtagctggtgtgaacttgaactcaaactaaaaactgaagcattggagcccagatccagtcaagcgccatcttatcagcatctctggatccctttgtgggaaggaagggggagcccca

SEQ ID NO: 518331 - DNA, 518 bp, Homo sapiens
tggatggggctctgggagccagtcttcctgacactgcttggtaggatcaaagtgttttgtttaaaggaatattttcagagaattataatgtaaatttaaaaatgggattggcaatcatcatagatttagaatgcaacttaaaattttttttaaaaatctaggctcacctttccttgaatacttctttgatactgatatttccttgattgtggggaagatttttcaaaatcttattctgccttgaggtaatcattatgagcatcaatcatcatcatgtggatatagagcactggcaaggccaatgttagataaaagagagtttctaatgcctcctctagggtgtggttctgttttcaagggacttgccattacatccttgaactgaattttactggacttgaaaaaaatttgcatgcaaattccttattagggttacaatcttgggcaagccactcaatctgtctgtacgtcactttcctsgtctgtaagatggagataatgataattcctacctcata

SEQ ID NO: 518332 - DNA, 333 bp, Homo sapiens
ctgctagacttcagccactggattctttgtgcagatgctgcctcttcaccgttatgtcttccattgaccatgatgctcagccatttcctctcaaaaccatgggggccatcactgttctgtttgggtcctggttttgaaatgactggggaacctcctgtcatcaccttgtgctccttcagattgcagcttgaccccaagaaaagggaagaatttgaataggactgaaaataatactcactactatttattgagctattaytttgcaccaggtcctgtactaggtccttctctttttttgacacgaggtctgttgcccaggctggagtgcagtga

SEQ ID NO: 518333 - DNA, 623 bp, Homo sapiens
atagtttgaaatatttttctagcataaatcagttgttgcttctaaaggaagattttgtctatttactttgaacgccagtcaataactgtggctccttatgaaaactcagcatctatgtctctatgtacttyatggcttacgagagtattttctcatttttccatttttgaatcatgttccattattttatctctatcacttcagaccgtcagtaaattggacccatacatggatcttagagttgatggagtctcttgctaaaaagtggctcacagtggtatcatttgactttcaacagggttccacaagtgtgttctattgagccaatcatactgagagaaacaatctaaataattgtcttcaactgaaacttaccatgatgtttgtttttttttcctcgccccctcatctttcacagttcttcaagtgagtcagctatagaagggttctgtgtatgatcaattctcttaggtcaggttacccaggaaacagagtctgaggcagagatttgcaggcaggaggaggtgtgctggggagtgcccctgaaacaccacctacaagggagtaatgaagtaagattccacagagggaaaaattacattgtgatgtggttggaacaaagg

SEQ ID NO: 518334 - DNA, 493 bp, Homo sapiens
tctctccttcaagtcttcaagtacagtccatattcacttcaagtagagtttgttattaggatacccccaaaataaagcccatcattattacccttcttttcaaattaagttacacatgtatatttatgtttatatacatataaattaaaattaaagataagtcattggtgaaataacaaatctaactaatgattaaaattattactgatgttttccatataatagtttttgagttaacatactttacagaamtcttcatagtagttctggaagaagaactcaaatgccatttcttggtttccaattgaaatttttaaactacctttgatttattctttgggctttttatttctaaaaacacacaaaagaaagttaggtcaaatcatcaataattctgattaccctaaggttttattggttagtgtcataactttaatatgagttaaatgtatttttatgcagtaatttggtaaatcatctcagtagataatag

SEQ ID NO: 518335 - DNA, 493 bp, Homo sapiens
tctctccttcaagtcttcaagtacagtccatattcacttcaagtagagtttgttattaggatacccccaaaataaagcccatcattattacccttcttttcaaattaagttacacatgtatatttatgtttatatacatataaattaaaattaaagataagtcattggtgaaataacaaatctaactaatgattaaaattattactgatgttttccatataatagtttttgagttaacatactttacagaactcttcatagtagttctggaagaagaactcaaatgccawttcttggtttccaattgaaatttttaaactacctttgatttattctttgggctttttatttctaaaaacacacaaaagaaagttaggtcaaatcatcaataattctgattaccctaaggttttattggttagtgtcataactttaatatgagttaaatgtatttttatgcagtaatttggtaaatcatctcagtagataatag

SEQ ID NO: 518336 - DNA, 654 bp, Homo sapiens
agttcataattatagaagagctgagtgctctgagaaaaagaaacatgaaccaagacagctacaaaaatatcatatgttttaaactaggaattcaaagaagtcttcctttaggaagtaagttgaagctgatattcaaggaatgaataatagttragcaggaaaaagcagggcagaggggcttccaaatataagaaagagcatgtgcacagaagcatgatggcgacaagaagaatggctcctatggcaggacctggaggtgggcagtggaaaatgagcctgcaaagataggcagcaatgaggccacacgtggtctttagtcattcattgttaacaatttgggattgtttcctaagactgtaaagtcatagaaatattttgatttggtgatgggaaaaggtacataaaagatcatgctgactgctaagtagggaataaattcgataaaggccagtgtgaatgcagggtacacaataccagaagttctgaaaagagatgatactgttttggacaaaggtggtaatagtaggaatgatgtgaagctgggtgatgacagtgttatgtagtgagtaaaatcagcacttgtaatggattggatgagggttatgttaataaagaatgcatcaaagatgaccctaggtttctgattggctcaac

SEQ ID NO: 518337 - DNA, 562 bp, Homo sapiens
gtcagtaagaacaataatcacttatatgtgcataaggctttacctttttaaaggtgttatatacacttttattcatttcatcctcacagtaataaattaagcagtatggakagacccactttacagatgagaaacagaggctgagatattttccagacacattcatagcaataatactgaaggcaaaaaaaattaggttccaattatagttttcagattcctcattttttcctgacccatgccatttctcaattgtgctaatatcagttcattagagaaggtggctttggagtaagaacttgttttatttagcacacctgaaagggcatctcaataacagtctcttggctagtagcctttttcttattcataatatagagaaagaagctctataatgattagccaatatctgccatgtattccaggcccctgacaatgagcacacgagcattggtgttactatttttgggtacagcatttattaatagattagatattacttggggaaaagggcaatgcttcatcaaaagacaaagtgctagctttgatatctctttgtgca

SEQ ID NO: 518338 - DNA, 662 bp, Homo sapiens
gctgcattgttcatgttaagcaacagtggaagacaatacaaatatctaggaactgatgaaggaatgaataaaatgtggaatctctatacaagaaaatattattaaggaaaaaaacagaaccaaaccaaaccaaaacaaaacaaaataaagaacagaatgaaattttaatatatgctaaaacatgaatgaaacttgaaaacatcattctatattaaagaaacctgacacacacaaaaaatcacatatttatgactgaatttctwtgaaatggccagaatatacaaacttatagagaaagaatgtagattggtagttgtctagggctgagggttgggaggaatagtgagagactgctaatgggtacctagtttgttttgggggtgacattttgaaattaatttgttatgattataacacaactctgagtatactaaaaatcatttaactgtacctttaaatagatgaaccatgtgatataagaattatgtatcaacaaaactgtttaaaatatgtaagttaaaagcagagtttaatcacttttctctgaattgctactctactctttattaagagaagcactctatgaaagaggttattttttgcatgtcaaggagcctgaaaaagccacagtttgaaaggatactctaaaagctctcatccta

SEQ ID NO: 518339 - DNA, 353 bp, Homo sapiens
  misc_feature (1)...(353): n = A,T,C or G
atcctttgactctacatgatccatgtttgaccatgaccttgcaccaatttacatggctggggtaacacatcccattctgtctcaattatgtcaactaggctttactgtgctcatgacctgaagctyccaggttctattcttatttttctgcctttgcatgacacaaaaaatgtcaagaagcctcagatttgcctcttctgctttgctttatcatattaatatgattcatcaaggctttctgctgcttaaatacatagagatagaaataatcctttttccatttatggttntgtgaagtctgtgactaagcaaatttagaaactcagtcatttcagttcacaatttagtcaaac

SEQ ID NO: 518340 - DNA, 555 bp, Homo sapiens
ctgtgtagcctttggtaaatacttaaccttctctcagccttggtttcctcctctgctaaatactgtaatgttagtatctaactcagaggtcattgtggggttaaataccttatgcaaaagtacctgggtccaccctagcatatggtatgtgttcagtaaatacctgttctttttctaacatgctttttttttcaaattcctaacttgaaaaagtttagacagtttagaagtaatagaayagctacacaaaaaagtatccatcaaaatttctctggaggactcaattaagattccccagaatgtagacagcctttgatacggcaacttaaagactgctcagaatttgagtgggagcagtgactctatttcttgcctccttgcttattacacagggaatccccttctccaaacatatatgacttagatctattcatgcagtctatagtcttagatctgtaagtgcagtgtggtatatgcataagaaaaatgaagtgcatgaactttagattcagaaagaatgggtttgaatcctgagtcttgtgcttgttagctatg

SEQ ID NO: 518341 - DNA, 557 bp, Homo sapiens
cctaaataagactactatttgatattcatctcacctcattatatcaaataaggtgagatgaaatagaaggcaaaataggttatgcaccaagaccaaattcaaatggtaacttagtagacaaggaagcttccaagccatcagccaagcaaagaacagcctaagagacatgtaatagagaacattccagatgaatgacagatacaatctgctcattccagtagtgataaycacgtggctgttgatgggggtgcccagatatttggtcagacattattctgaatgtgtctatgagggtgtttctggataagattaacatttgagtggacagactgagtaaaacagattgtcttccctaatgtaggtgccctcatctaatcagttgaagttctaaatagaacaaaaaagccaaccttccttcaagtaagagggaactcctgcttttactgcttgagcagtcttttcctgccttcagactcagactagaactataccatagactgttctgcacctccagctcgctgactgcagatcttgggacttctcaacctccacaagca

SEQ ID NO: 518342 - DNA, 618 bp, Homo sapiens
tgccaatattggctaaagatgcatatctgggcgtcacctgtgtaggggtgagaaattgaggcagaggaacaaatgasctcaggagaaaaaggtgggcatggaaggccgagggcggctagggcgtggaaggaaaagggggagcacagacagcaggaagagcagcccacaaggggtctctgtgcaaatcagaaaaggcacctttctctccaggagatgcagcacatggccagggtatggggcttggctagcagagtgtagtttggatttcagcccctgtcacctcctcatgcagtcaacagcctgcacaatggtatgagaactctgacagcaaagcagccgagagtagagtaggaacattcagagaattgggaggaaaaccaggaagcctagagagctcccagaaatggatgatgaatgccatgtaagagaaatcatttggcaaatgtcgggataaaacagccaaaaaaaaaaaaaagcttttaaacttctgctgaaacctgaactagtaacctggagtgtaagccaggcagaggcagtgatgtcctgtgtaagaagaattaatgcaggaggactgaaatgggccctggatatatctctgcctctaacatatggtgtgac

SEQ ID NO: 518343 - DNA, 618 bp, Homo sapiens
tgccaatattggctaaagatgcatatctgggcgtcacctgtgtaggggtgagaaattgaggcagaggaacaaatgagctcaggagaaaaaggtgggcatggaaggcygagggcggctagggcgtggaaggaaaagggggagcacagacagcaggaagagcagcccacaaggggtctctgtgcaaatcagaaaaggcacctttctctccaggagatgcagcacatggccagggtatggggcttggctagcagagtgtagtttggatttcagcccctgtcacctcctcatgcagtcaacagcctgcacaatggtatgagaactctgacagcaaagcagccgagagtagagtaggaacattcagagaattgggaggaaaaccaggaagcctagagagctcccagaaatggatgatgaatgccatgtaagagaaatcatttggcaaatgtcgggataaaacagccaaaaaaaaaaaaaagcttttaaacttctgctgaaacctgaactagtaacctggagtgtaagccaggcagaggcagtgatgtcctgtgtaagaagaattaatgcaggaggactgaaatgggccctggatatatctctgcctctaacatatggtgtgac

SEQ ID NO: 518344 - DNA, 615 bp, Homo sapiens
caatattggctaaagatgcatatctgggcgtcacctgtgtaggggtgagaaattgaggcagaggaacaaatgagctcaggagaaaaaggtgggcatggaaggccgagggcggctagggcgtggaaggaaaagggggagcacagacagcaggaagarcagcccacaaggggtctctgtgcaaatcagaaaaggcacctttctctccaggagatgcagcacatggccagggtatggggcttggctagcagagtgtagtttggatttcagcccctgtcacctcctcatgcagtcaacagcctgcacaatggtatgagaactctgacagcaaagcagccgagagtagagtaggaacattcagagaattgggaggaaaaccaggaagcctagagagctcccagaaatggatgatgaatgccatgtaagagaaatcatttggcaaatgtcgggataaaacagccaaaaaaaaaaaaaagcttttaaacttctgctgaaacctgaactagtaacctggagtgtaagccaggcagaggcagtgatgtcctgtgtaagaagaattaatgcaggaggactgaaatgggccctggatatatctctgcctctaacatatggtgtgac

SEQ ID NO: 518345 - DNA, 618 bp, Homo sapiens
tgccaatattggctaaagatgcatatctgggcgtcacctgtgtaggggtgagaaattgaggcagaggaacaaatgagctcaggagaaaaaggtgggcatggaaggccgagggcggctagggcgtggaaggaaaagggggagcacagacagcaggaagagcagcccacaaggggtctctgtgcaaatcagaaaaggcacctttctctccaggagatgcagcacatggccagggtatggggcttggctagcagagtgtagtttggatttcagcccctgtcacctcctcatgcagtcaacagcctgcacaatggtaygagaactctgacagcaaagcagccgagagtagagtaggaacattcagagaattgggaggaaaaccaggaagcctagagagctcccagaaatggatgatgaatgccatgtaagagaaatcatttggcaaatgtcgggataaaacagccaaaaaaaaaaaaaagcttttaaacttctgctgaaacctgaactagtaacctggagtgtaagccaggcagaggcagtgatgtcctgtgtaagaagaattaatgcaggaggactgaaatgggccctggatatatctctgcctctaacatatggtgtgac

SEQ ID NO: 518346 - DNA, 619 bp, Homo sapiens
ctgtaagaattctattaattagaaagctcaggaatttaccacttcagatgttcctgaatatcaaacttcactctcccaaggaagctaacctaaatggccaaactaaagaaagtggttatgtatacagtcacatgagggtgttgctaggttctgaaggggggattaaagttggctctcatagtcaaaggattctcataagcaatgccttttcattccctcccagatcatggcagagggaatcagggaagcagtaatggaaccccaattgagtgtcctgattttgtttctagtgaactgggtggaaccctctactcccctagaatactattaataaattttttattctacttgcatttgccttgcaaggagaaaagggaagaaaagaaaggagagaaaggctaaaggaaattcacatgcgattcacaattcttcattcctgccaagaacctgtcactgaagtatgtctggggctgccagggctcacatttactcagcattcatgctctaattatttccacatgtagttcaaggaaaatggttgatcaaaagtttaaaaaaaaaawtcccacacacctaaatcccagtaccttcaaatcaaagaagggagaaagctctaggg

SEQ ID NO: 518347 - DNA, 407 bp, Homo sapiens
ctggggcccttttcagcctgtccacctaatcagtatgtccagtagatggcagctttttgtgtggaacttttttttttaatttattattattatactttaagttttagggtacatgtgcacagtgtgcaggttagttacatatgtatacatgtgccatgctggtgcactgcacccactaactcgtcatctagccttaggtrtatctcccaatgctatccctcccccctccccccaccccacaacagtccccagagtgtgatgttccccttcactttatcttaccttgtgaccgttctgggggtctgctgtttttctcttcccatttttctttgtcttttcttgttctcatttctgggtgtctccaagtctgcttttttttttttttttttttttcttttttgagatgg

SEQ ID NO: 518348 - DNA, 650 bp, Homo sapiens
ctggctgtgccccttgatgtcttctctttgccctcattaaagttttagtctcttatggctacttccaaagaaagctgactctttcaagttcccgacttaaatagtggtaatgaatgtatagctgtaattgaaggcagagaggagtaatgtaatgtctctgcagggaagagacttgtagttccttttttaaatgtgaggagataggctaccctaatacaaatgaaaatctgtggatctgattggctgtgtgttggggtcccccagaccactcccaggtttaacggttcactagggagactcacaggactcagcatatagttgtgctcatggctatgatttattgtagtgaaaagatagcaagtaaaatcagcaaggggaaaaggcatgtagggcaaagaccagcggatatcaggcgcrtacttccaagagtcctctcccagtgaagtcgcacaagatgcactgaatttctccagcaacaaattgggacaccacacgtcaagtgttgtcctccagggaagctcataagcgagtcagtgcccaaagctttttgtgaggctggtcacgtaggcagcttctttttatcatgtgccagaatttcagactccttgaaggaaagcaactgttcagcataaaccatactgttcacacaa

SEQ ID NO: 518349 - DNA, 650 bp, Homo sapiens
ctggctgtgccccttgatgtcttctctttgccctcattaaagttttagtctcttatggctacttccaaagaaagctgactctttcaagttcccgacttaaatagtggtaatgaatgtatagctgtaattgaaggcagagaggagtaatgtaatgtctctgcagggaagagacttgtagttccttttttaaatgtgaggagataggctaccctaatacaaatgaaaatctgtggatctgattggctgtgtgttggggtcccccagaccactcccaggtttaacggttcactagggagactcacaggactcagcatatagttgtgctcatggctatgatttattgtagtgaaaagatagcaagtaaaatcagcaaggggaaaaggcatgtagggcaaagaccagcggatatcaggcgcatacttccaagagtcctctcccagtgaagtcgcacaagatgcactgaatttctccagcaacaaattgggacaccacrcgtcaagtgttgtcctccagggaagctcataagcgagtcagtgcccaaagctttttgtgaggctggtcacgtaggcagcttctttttatcatgtgccagaatttcagactccttgaaggaaagcaactgttcagcataaaccatactgttcacacaa

SEQ ID NO: 518350 - DNA, 575 bp, Homo sapiens
caatgtaagtttggagactcttcagaggagatgggctgagacaggcacttgcttgtgcacagcagctggggctgtgtgggctgtggtgccagggtaaaggagataagaaggctggctcaagtgtcagccctggccatcaggagccacagggattgagatcacacccagatgaaattaggaatggattagattccaaattccaagagcatggaaggctctttctacctgggtctttctttcttcattctgttacgctttcacctaagaaacagtgactacatcactggttatggtgaaagtcagattttggccttaytcaaattctaattcaatttggtttttgaacaattttgatgtaagaaatgccagctgggctggggagcatttcattggttcataacagtctctttgagatatcagacctctcaccaacaggcagctgctgacctaggaggaggcagtctccctttgaagacagcagcatgtaagactctgataatcatcaaaaagtagaaaatgaaacctgttttctcctgttagacactgccagagtgtctgggaagaggggattttgt

SEQ ID NO: 518351 - DNA, 534 bp, Homo sapiens
aaacttcagaggcatgggttgaactgcactcacatatgtacttaaaagaaaccaaaatgaaaggacatgcagacagttattagaaccacatgaaggaatatatggttagttatatgtgctcagcaattacattatagaaaacacaaattaggaattaatggttcacaatgatgtgatgatctttaaaataaagggaaacattgtggcaaggcaaaatgagcatgacagggacctgggtctgaatcctgaatgtgttccctgttagctgtgttagtgttgaacaagttcctgaaacttaaactacatgttcctcatttgtaaaatatatttttcacagggtcagtctgagaattatgagaatatgtwataggtattgataactggtaataatgatacctgacacctacataacactttctatgtgccagaaactatttgaaaaaaaagttacacagcatgggcaacatggcaaaactccatctctaaaaaaggtacaaacatcagccaggcgtgatggtgggcacctatagtccc

SEQ ID NO: 518352 - DNA, 656 bp, Homo sapiens
agctgcagacagtgctgaaaacccccatggggatctgatatagcaaaccctgggcagaggcctgggccatccagggcaaacccagcaggctcataagtgacaagaggatgcaactccaaccaactgggcgctttccacagctttgagaggctgtggtcgtggaggaaagaccatgtggtcagccaggccacactgctctgttccttggctccccgtggctaaagctgccttgcagtggtgagagcacaccttacctttgcagtgtccatcgtaatcaacctggattttggatccagtgaggcaggcatctcgatgcagttcacagtggttgaggtaggtcttgccattactgccacacacaggcctcttgtgaggtttgcattgctgaaacagacccaaaagagaatgtttgtgcagttatggatatcgacacacagacacacacacacacayacatgcacacacacacacagagccattttgtaaggggactctccaccaccagagatggtgcttctaccccatcagggcacaggcagtcacagttctggccaactgaccctgtctcagttgcctatggcccttcatgcctatcctggtccagggtcatctcttctattcagtgaagaaagagacaccctctatagtttcaatgt

SEQ ID NO: 518353 - DNA, 617 bp, Homo sapiens
ataaaaggggtcaaagcatcaggagcagggaaggagtgagaaccaaaagacatcaagaaactgatttgcttgagaaaagcagygattcttcctttcatagctctccatggctgagagagaaaatgcccaagagatcatctatgtgacttagagactgctttttgggacgtcaagagtagcatgaagaacttaagataatgacaagagcctaaatatttaaagtttcaaggtttcaacagaatgtggatgtatttgaactttcaaaaatgtcctgtcacatctttcttcccattacctggagctcctccttttcccaggcattcatatttcttacctcctccccacccgctgcacaaatttgattgcatgaaggataagggggcagcatttctttctgcttctggtcctggttgcccaggttgcatggtatagggaaggaggcagcagaaactctaggccacagaggtgtggctggctgctctagggtggtgagatacaagagactgcaggtgcttggtgcccatatcatggagttaaggagccccaggtcagtgagggaagagtaaagtgaggaagagtagggatgggagagaaaaggttaataacgtgagcaagat

SEQ ID NO: 518354 - DNA, 520 bp, Homo sapiens
ttactcatctgttaagagcaagcaggtaatttttcctgtcccacctcagttgacataatggctatgaagttacttagtaaagtagaaagtggatacacatttaagcattatgatcattttgtgagcctttttcaaaactgcgctcaacgtccttgattttttccccttgtcatcagagcaccacagagaaagcctgcatcctggacacggtccagatgcctctagaggccttgcctccattgttttggaattactctgggtgaataggataacagaaaatattccagcctagaggataatggataaaaacattaaatgagaagagaaatacattagagactttccatcagaacttggaaatgacattgtaaattggtgtgcagttttacaagtaaaaatgctctaatccttggaacgagcaactgacttatagtaaatcttttgagcttccccaaatggcaaagcagtgaaaattttctgcatgctgggggaatmgcattacctgaaacaaacatatagg

SEQ ID NO: 518355 - DNA, 435 bp, Homo sapiens
gtgcaaactgtagtcccagctacacgggaggcagaagtgggaggattgcttgagtccagaaggcaaagattgcagagagccgagatcacgccaattcactccaaccttggcaacaagagmaagaccctgtctcaaaacaaaataaaacaaaacaaaagccacactagttattttttcagaaataacttaagaaagtggttaaacaggtattggaagactgtccaggtaaagtgtgaaaacgtaattgcaagaagcagccaccattcctagggctaggggaaataagggaagaggcagcgtgatctggatctagaagcttagaagagaggccctgctgagctgaagccaggctgggggctctttgtcactgctggtgcctctgaactcagaggagggacccacgtagctgaaactcagatctctgaggagggggga

SEQ ID NO: 518356 - DNA, 626 bp, Homo sapiens
tgttcttaacatgttgcatagaaaacgtcaatgtactttgctaaattcaatattccttatggttaacagattgaaaaccaaaaacgtccttgaagaaaacaccagaaatcagtgctttagatcacaytgagttgtttgctattggtcacccacttggaatgttctgggaacgctaactactttggattggatatattcagaaaagaaacaaatctttgtctggtaagactgttgggtagataactgcttaggaatcaagatatctatgttgcagttccagctttccctgcacagccatgtgattttggataaacctcttcacctctctggattatattcaggtttctaatctagaaaatgaggagatgagctcagtgatctccaaagttgctttcatctcttacatgtataattgatttgcatcattctgatgcttcactacaattctggaaaaacgatggtacaatcatctctccttaagcagtgtgcagaatagcaacagcaaattgtgtcttggaacccaatgaggaagaggtttcaaagaaaatacactggttaagccttaaataataaggcattttagtctcaaaggccagaggataaatgaggggctgggaaaatctgac

SEQ ID NO: 518357 - DNA, 661 bp, Homo sapiens
gtagtgggatattcgatctctctgaatgaccctagagagcctgttgagtgaatcctgttgtgcagcaaagtccacagtgtaacactgctgtgtgctgaatactcacttggaatctggttctcttgcgattttaattaaaacctattgaatctttccctggcaacttgggaatgttaggacaactaaattcctcttcaaagacttaacttcctgccacctgtgaataaatcctacccgcttcttgcaaattgcatrtttaccctatttggaaaggtttaagtctcagccaattaggtcagcttagattgtgctgtccaaccccagccaataggggaaggacacagaaacaggaactgtattagggttaaaaaccccttcccttctttgttcagtgggctcttgtgattgtaacaggtgcaaacagcacccttctgcagaagcaaaagtgcctggctgagaaattttctgtctaagtgcaggtttcttttggctacactgagcacttgtttccaacaaatctgggggctcatctgagatcccactctcctttgggaggggctagcgattatcttgcatggggagatgcgtcccactgccttgttgtggtggcccaagcagcggaggatcaagtcctgcccaaagtgatgactaaatccagact

SEQ ID NO: 518358 - DNA, 661 bp, Homo sapiens
gtagtgggatattcgatctctctgaatgaccctagagagcctgttgagtgaatcctgttgtgcagcaaagtccacagtgtaacactgctgtgtgctgaatactcacttggaatctggttctcttgcgattttaattaaaacctattgaatctttccctggcaacttgggaatgttaggacaactaaattcctcttcaaagacttaacttcctgccacctgtgaataaatcctacccgcttcttgcaaattgcatgtttaccctatttggaaaggtttaagtctcagccaattaggtcagcttagattgtgctgtccaaccccagccaataggggaaggacacagaaacaggaactgtattagggttaaaaaccccttccctyctttgttcagtgggctcttgtgattgtaacaggtgcaaacagcacccttctgcagaagcaaaagtgcctggctgagaaattttctgtctaagtgcaggtttcttttggctacactgagcacttgtttccaacaaatctgggggctcatctgagatcccactctcctttgggaggggctagcgattatcttgcatggggagatgcgtcccactgccttgttgtggtggcccaagcagcggaggatcaagtcctgcccaaagtgatgactaaatccagact

SEQ ID NO: 518359 - DNA, 581 bp, Homo sapiens
gatctgaactcacattcccatacacaaacattgaaaacaaatactttctggactaaaaataaagtacacataaaagtctgtttaagtgaatcatccttccttgggaagctaaaaaygggtgggaggggagcaatctgtaggctgcagatgggatgggtggcagtgtggacagagtctctctttgatcctctgagaattccccagttgaaaatgctgtggggagatgaatccttctctcagaatacaggctgcatctgaccttcctcctttgagtgttagcttctgctcacacactctgtctctctgtctctctctcattctctctctgtctctctgtctctgcctctctctctctctgcctgtaaataacttattctgtaatagaattgtggctgagataggggaggctggaaagtcccagcctggggttacgcaaggaactttattatttccagtaatgttaggagttggctaaatggtctgtgaaagagacttgtcccttttcctcctgccttccatcacatgttcattcatttattcccgcattaatttattgtgtaaacattcactgatagtttctg

SEQ ID NO: 518360 - DNA, 493 bp, Homo sapiens
tgagcaaacacagatttttctgatatattaagcattattatgtcaagtacctgaccctaatcaaccaaggtcatgaacaaactagtccttttaacatttttatgaaagaaactgctgtgtgcttttctctctggactctctcacttggaacacagatgtgacccggctcttccaagacttccctcayggaggcattaggccgatgccctgagctgagtttttggtgatttgctgcctccactaggatcggcgaagaatattttaaaataaatttcaatttgtttgatcctgagaggatgcaatgacttttagctcaaagtgggacagagaggcctattagagatggacacataattttgagggggtaaaaattttagctcattaaacttttcccaaattaaaaagcacagagaggagtggagtggaaagagcttcatctttgtggtaagatagattttagatccaattccaggtctgtcccctgcactgtttg

SEQ ID NO: 518361 - DNA, 638 bp, Homo sapiens
gcgtgtaaaatatggtcagatcttaatgtctgagatcccttcctctgcatcaaaggaagtcagcaccccagaaagtgtctctggtcatctctgcaagtttcccacgagggttttrcaggtgcccacagagctgttggtcgtttggtggcctctcatgctcttctgtttcttattttaattcccacatttctcatcatctatgtgtcagctgttttatagtaatacatacaaagtggtaaacatttgcagagtaactactatgtgctgagtattactccataggtcatatgcatattaagttatttaatttttatagccatcctatgaggtaggaactgttactactctcattttacagacaaggaaaccaaagtccagataggggccaacaaggaagtggtagaaactcttgcctttaaccattttgctatttgcatgttatagtcatgttgtagtgttgactttatctagagagtgagaacacaggccttgacaggagtcacacccagggtcaaaccccagctcagccacttactcatcaggtagctttggcaagctgcttagcttctttgaccctcagtatccttatctgtaaatggagaaaatattagtagtttcctcatcaaattattttgggg

SEQ ID NO: 518362 - DNA, 525 bp, Homo sapiens
ctgacaaccttgagcactgggtgggttggaaaccatccagactttgcataaggagttcattttgggttagttaaaaaaaaaaaaaggcgggaggtgggggaaggagttggcccagatcctgttccacaaattcaggaacaaggagttgagattcccttcagaaactgctggagggtggctctgcaggtccgtttgccaaacactatttgacatctgcttgtttccctgcctgacacaagaagaaccgttaactgtccaggtttttcctctgacaagccaatgattcaatgcagcagttgaaccatgtgaaggttaattccctcttttctctatatcccttttagaaagatctattatttctacagacttcagatttttttaagcttctttgtcttcttcctcttgaatcttactcaccctcactttgggtttagcttattaggctgaggctaagttccrtagcataacaaaaaactacacattcattaaagaattaaatcctcttagttctctaatgtgtttcac

SEQ ID NO: 518363 - DNA, 520 bp, Homo sapiens
acggttttataaagggcatttcccctgtacacgctctcttgcctgctgccatgtaagatgtccctttgctctcccttcctccatcttctgccatgattgtgaggcctccccagccatgtggaactgtgagtccattaaacctctctcctttataaattacccagtctcagttatgtctttattagcagcatgagaacagactaatatagccgcatctctcaaaagcgagaacagacatatgtctgcggtaacatcttttatctgatgccctagcttcattcctgagctgccacagagccactcaaaatgaaattcaaattcaaaccacagtgagataccaccacacwcccaccagtatggctacaataaaaatgcagaaaataccaagtgtgggcgaggatggggaggaactgaaactctcatacactttgaaaaactatttggcagtatcttccaaagctgcatgtgcatatatcatgacccagcattttcacttctgcataccacccaacagaaacac

SEQ ID NO: 518364 - DNA, 562 bp, Homo sapiens
ctgatcaagtcctttccctcagtttaaaccatggactaccgtactgagggcttaggagctgtgctttctgacatagcaggaagatatcgggaaggtagctaaattctactggcagaagcttaaactatgtgagatctaatatcaatatcctgtttacagatcagagccattggcacataattaggcagtgagacaccaattctaggaggtgtgtatacaaggtggaggggtgatccacagaagcctcccctctgtgctctccagagccaagcaagacatgacagggaagtagagggtggtcgtttcggttatacagatgctgcacctcttgaaggagtcagaggcatgtgagattcccagggtcctaagggatctgagttcctttatgccagaaagcttgggctttccaaggtaaggccaatggtakctctcacttatgtggctccggtaaacctaactgctccagccaggagggacaagatggaagctcagcataggaggtggtcaaggaaagaaacctaggacctctgaggttgaactagactagtggtttttgtttttg

SEQ ID NO: 518365 - DNA, 615 bp, Homo sapiens
atcaagtcctttccctcagtttaaaccatggactaccgtactgagggcttaggagctgtgctttctgacatagcaggaagatatcgggaaggtagctaaattctactggcagaagcttaaactatgtgagatctaatatcaatatcctgtttacagatcagagccattggcacataattaggcagtgagacaccaattctaggaggtgtgtatacaaggtggaggggtgatccacagaagcctcccctctgtgctctccagagccaagcaagacatgacagggaagtagagggtggtcgtttcggttatacagatgctgcacctcttgaaggagtcagaggcatgtgagattcccagggtcctaagggatctgagttcctttatgccagaaagcttgggctttccaaggtaaggccaatggtagctctcacttatgtggctccggtaaacctaactgmtccagccaggagggacaagatggaagctcagcataggaggtggtcaaggaaagaaacctaggacctctgaggttgaactagactagtggtttttgtttttgtttttttcaagtaaatttgaatttggcattgagatgggcacaaattagaacagctt

SEQ ID NO: 518366 - DNA, 620 bp, Homo sapiens
gatacagttttagacccacaatgtatatatatatatttttcaaatttccagtatttggcatgtacctgacatacagtcatctcttttcaatagttaacagaatgagtgatattgtctgggccagcagccmccaacgtttttgccaccagggaccagtttcatggaagacaatgtttccatggactggaggtgtggggatggtttcaggatgaaactgttccacctcagatcatcaggcattagattctcataaggagtgtgcagactcaatccctcgcatacacagttcacagtagggtttgtgctccaatgagaatctaatgctgctgctgatctgacagtaggcagagctcaggcagtaatgcttgcttgtccactgttcatctcctcccgtacagctaagttcctaacaggtaccagtgtctgaagcctggggactggcggctgctggtcaaggccacattagtttattgttaagtgcaaggtttctggtaacagaaataaagaattcaattgattcatcatcaagaccaaatatatttactaaagatctaccttaaattcattttttagcaggtagtatggcattgtggttaagaatttacatttgtgaacattta

SEQ ID NO: 518367 - DNA, 605 bp, Homo sapiens
ttgagtgacctctctgtgccaagcattttacatttaattcttaaaacaattttgtgagatgggtaccatyatcttcatttaataggtaagaaaatcttgacctagagaggctaaatgacttgttaaaaggtggaaatgggatacaaaccaaagtttctaagactaacgttcatcctttctccatttccacatgcttgtgcctggttatatatttacattattggtaatgggaaagaagtttatagtataattcacttggaggcatagccaatttattccttccttccttccttccttccttccttccttccttccttccttccttccttttctttctttctttctttgatggagtcacggactgttgcctgggttggagtgcaatggtgcgatctcggctcactgcaagctccgcctcctgggttcaagtgattctcttgcctctgcctcccaagtagccaggattacaggtatccaccgccacacccagctacttttttgtatttttagtagcgacggggtttcactatgttggccaggctggtctcaaattcctgaccttgtgatccgcccaccttggcctcccaaagttcatggattacagg

SEQ ID NO: 518368 - DNA, 605 bp, Homo sapiens
ttgagtgacctctctgtgccaagcattttacatttaattcttaaaacaattttgtgagatgggtaccattatcttcatttaataggtaagaaaatcttgacctagagaggctaaatgacttgttaaaaggtggaaatgggatacaaaccaaagtttctaagactaacgttcatcctttctccatttccacatgcttgtgcctggttatatatttacattattggtaatgggaaagaagtttatagtataattcacttggaggcatagccaatttattccttccttccttccttccttccttccttccttccttccttccttccttccttttctttctttctttctttgatggagtcacggactgtygcctgggttggagtgcaatggtgcgatctcggctcactgcaagctccgcctcctgggttcaagtgattctcttgcctctgcctcccaagtagccaggattacaggtatccaccgccacacccagctacttttttgtatttttagtagcgacggggtttcactatgttggccaggctggtctcaaattcctgaccttgtgatccgcccaccttggcctcccaaagttcatggattacagg

SEQ ID NO: 518369 - DNA, 605 bp, Homo sapiens
ttgagtgacctctctgtgccaagcattttacatttaattcttaaaacaattttgtgagatgggtaccattatcttcatttaataggtaagaaaatcttgacctagagaggctaaatgacttgttaaaaggtggaaatgggatacaaaccaaagtttctaagactaacgttcatcctttctccatttccacatgcttgtgcctggttatatatttacattattggtaatgggaaagaagtttatagtataattcacttggaggcatagccaatttattccttccttccttccttccttccttccttccttccttccttccttccttccttttctttctttctttctttgatggagtcacggactgttgcctgggttggagtgcaatggtgcgatctcrgctcactgcaagctccgcctcctgggttcaagtgattctcttgcctctgcctcccaagtagccaggattacaggtatccaccgccacacccagctacttttttgtatttttagtagcgacggggtttcactatgttggccaggctggtctcaaattcctgaccttgtgatccgcccaccttggcctcccaaagttcatggattacagg

SEQ ID NO: 518370 - DNA, 551 bp, Homo sapiens
ctgctgttgctattataatgcacctcagtttccttatctgtaaagcaaaagagggggcactttaatttatgaaatggaggacaaatatctcaggatttcgtatagatayttgtctgtcaccatatccacagtatcctacccggcttcatttttgccgttcttacttcctacacatatttattattgttaggtacaatcattgacaggctcaacctttattatgatattttaccaataaatacttctctgccctcccccttcccaccaagattaaaaacttgaaacatacaacaaatccacttgtcatatggggtaatgtaggtatgatgggtggttgacctatgggtttaagaaataaaaggcagagttttgtaaacatgtctaaaaactaacatgcccctattcttgattgctatttttttctgccatcactcactctaagagttcagttgttggtagctttcatcctagaaaaggaaaattgttcatactctacttcttaaagattattgcaatttgttaattcccttcattttcccattttccctgat

SEQ ID NO: 518371 - DNA, 604 bp, Homo sapiens
tactctaaacaactctcccataataactaaactaatttcagaggaaatgaaggcacaagaaacatttgcaccaatcagacctgctagtctcaattttcacaacccatattccttctatggctggagttgaaatagttcaaggttagtaactgtgcactttcaatttttatttttattattattttttttaagacagagtctcacactgtcacccaggctggagtgcaggggcgccatcttggctcactgcaacttctatctccctggttcaagggattctcctgcctcagcctaccaagtagctgggattacaggtgcccacctccatgccaggcttatttttgtatttttagcagagatggggttttaacgtgttggccaggctggtctcgaactcctgacctcaagtgatctgcccacctcagcctcccaaaktgctgggattacaagcatgaaccaccgcacctggcccacttttaaattttataagttgcttgtattactcaggattgtttcagaaacaaataacggaaagcctattcaagctggggtttaagccaaggaggaaatttattgatctatttgattgggaagtctaatgggt

SEQ ID NO: 518372 - DNA, 555 bp, Homo sapiens
tgcgaagccgcgtggcttcccaccggtggcgcgagacctccaataggcatctatcgatcacctttcccctaccgctgctggaccccgaaccagccagccggatgcccccgctcgctctctctgactccacgccccaaagcttctaagaaacaaacgcgcgataagtcccctccccccaacacgcacacgcatatactcacacacagtcattcgcacattcgtacacacactagacgcctcaagccttccgagtgccatcgccaccctgggcagagcctcagccaacttgggccccgatccttcggctccggctcgcgcagggcctcccgcagcctccgcccggccccctccccgtcctaggcagcgggtccctgaggccgaacctaggcggaaaagggccccctccctattcactcagcatccacctcgcgcgggcaatacacggcccacaattcccaaacactggtccctgggccgcccagaatcaccagccaaatccgaaattaatcttgaagccccagcccctgtcacyggtgtgtcgggcgcgagtgtgtt

SEQ ID NO: 518373 - DNA, 494 bp, Homo sapiens
agtgactcacattgcctcactacagataagtggggtagaggtttagccacacctttggccctgttaacaccatcttgatgaaagtaggacactgagtcacattgcttcattgcctctgagtaggagtataagctcgacttcccactggacactctgacaccagcaaggggtaaggagaggactgatgcatacctctttgttactacagatgggggcagaagctcactstctgctaaaccccattaataccagggaagcccagggtttgagaaagcagagtgtcaaccagctctacatcctaccacctcattcagcttcatttatgcaggtggaaatagaggggtcagttccctactgagccctactgacatcaaggcccagtggggagctgaggttcaactcccacctgcatcaatgcctggcatcaatgaaatgcttggtgacccaaatttgtactgccttcctaagtctcactaatcctgggtacagaggag

SEQ ID NO: 518374 - DNA, 502 bp, Homo sapiens
caggagaatggccagaacccgggaggcagagcttgcagtgagccgagatcgcgccactgcactccagcctgggygacagagcaagactcggtctcaaaaaacaaaaacgaaacaaaaaaaaaaaactatatgttcaaccaatggacgatgatttaattggaagagaagaccctacagcttatgtttacaatttaaagacaaatacaatcttcagatttctttagaatgcattttttaaaataatataaatttatcttgattactacaacttcatcctcaaaaaccaaattttgtctgcccaagaaaggatatgagcagtgtaaagcaagttcaaaagctctcgaatgaatagagaatcagtcatgctgaaggggcttcacattttattaaatgagttttcaagagacatcagattcttcatcatattctaccacttaggttgagtggattctaaaaaatcatgggaatttcaaggacaaatgcccctttattgtcttctaaa

SEQ ID NO: 518375 - DNA, 519 bp, Homo sapiens
aataacaaagacatcaggaaaatatccatgcacttgaatattaaagaacatgcttttaaatcttacgtaagtcatggaggaacactcaaagaaaatgtaaaaaatacataaaactcagtgaaaataaaaacaaaacatatcaaaatgtggaacattgctaagccatatgagaggaaaatacaaaaaatgtacaactcgagatttatgaaaaagttacataatcaaaattgtgtgatattggcatcaaagtagaccttggattaggtaatggattcttagatatgataccgaaagcctaagcaacaaaagaaaaatatcaagaagttggacttcaagaacgtttactaagcacaagaaaagtttctcaatatcattagtcattaggaaaatgcaaaycaaacccacgatgacataccatttcacacccattaagacggctgaaataaaaaaagaaagaaaaattacaagtgttagtgacgatgtggaaaaactggactccccttacgttgctggtgggaa

SEQ ID NO: 518376 - DNA, 519 bp, Homo sapiens
aataacaaagacatcaggaaaatatccatgcacttgaatattaaagaacatgcttttaaatcttacgtaagtcatggaggaacactcaaagaaaatgtaaaaaatacataaaactcagtgaaaataaaaacaaaacatatcaaaatgtggaacattgctaagccatatgagaggaaaatacaaaaaatgtacaactcgagatttatgaaaaagttacataatcaaaattgtgtgatattggcatcaaagtagaccttggattaggtaatggattcttagatatgataccgaaagcctaagcaacaaaagaaaaatatcaagaagttggacttcaagaacgtttactaagcacaagaaaagtttctcaatatcattagtcattaggaaaatgcaaatcaaacccacgatgacataccatttcacacccattaagacggctgaaataaaaaaagaaagaaaaattacaagtgttagtgaygatgtggaaaaactggactccccttacgttgctggtgggaa

SEQ ID NO: 518377 - DNA, 637 bp, Homo sapiens
ctgtttttactcagggtggagggtccaggtttgagggtggagtttagttgggagccattctgtatcactaggacaacattgataacacagtcccagggctgtgggtgggtatgaggattggggggtttcaggattcaggtttagggatgaacaaagaatgcttgagccttatcacgtaactactgctaactacttggtgctttcctttcctataaatttatatggaacctacataaagaagagggaattaacataaatgataatatactaaatatacctgttggtgattttttttttttgagacagggtcttgctctgtcaccaaggctggagtacagtggcaggatcttggctcackgtaaccttgacctcccaggctcaggtgatcctcccacctcagcctcctgagtagcttgggttagaggcgcatgccaccatgccgggctaattttagtatttttgtagagacagtgtctctgtatattgtccaggctggtctcgaacttcaaggctcacgctatctgcccacctcagcctcccaaagtattgggattacaggtgtgatccatggcgccaggccactactagagactttttatacaacagtatgtcatggaattctatgttagcacatata

SEQ ID NO: 518378 - DNA, 556 bp, Homo sapiens
gtcgtgtgggttcatctgtaatactgagaacagccatgctagtgtggctgagattgatgaatacactacgaaaattatttctgataaaatgcttggaaatttttcttttcaatagaacttaatactgacatagagtatgtggtagaggctttgtttcaagtcttttttgtttcattttatcttattttattttaagttccaggatacgtgtgcaggatgtgcaggtgtgttacacaggtaaacgtgtgccayggtggtttgctgcatctatcaacccatcacctaggtattaagcccagcatgcattagctatttttcctgatgctctcctgatgcccccagccctaccctctcctgacaggtcccagtgtgtgttattcccctccctgtgtccacatgttctcattgttcagctcccacttataagttgagaacatgcggtgtttggttttctgttcctgccttagtttgctgaggataacggcttccagcttcatccatgttcctgcaaaggacatgatcttgttcgtttttatggctgcatagtattccacgg

SEQ ID NO: 518379 - DNA, 594 bp, Homo sapiens
gctgccctaaaccttgataggcacagaaactgcatcccaagaaataactggtgatttttttttttttttacagaattttgcttttgttgctcaggctraagtgcaatggtgcaatctcggctcacggtaacctccacctcccaggttcaagcgattctcctgagtagctgggattacaggtgccctccaccacacctggctaattttttgtattttttagtagagacggggtttcaccatgttggccaggctggtctagaactctgacttcaggtgatccacccacctcagcctcccaaagtgctgtaattgcaggcgtgagccaccgctcctggccactggtgataatttaactagtgttttgtaactacttatcaataataatcaacttaacatcccagaatagtggagttctcattgtttctgtctttatcattggttcaaccaacccaacattttagatgtgtgaattatggtataccacttcttgagacattattccttagttagacaatttgggatggcaagaaacatggaaaaacattactcaaacttgcttaaaaaagagctatgtgtgttggtgaacgtagctga

SEQ ID NO: 518380 - DNA, 594 bp, Homo sapiens
gctgccctaaaccttgataggcacagaaactgcatcccaagaaataactggtgatttttttttttttttacagaattttgcttttgttgctcaggctaaagtgcaatggtgcaatctcggctcacggtaacctccacctcccaggttcaagcgattctcctgagtagctgggattacaggtgccctccaccacacctggctaattttttgtattttttagtagagacggggtttcaccatgttggccaggctggtctagaactctgacttcaggtgatccacccacctcagcctcccaaagtgctgtaattgcaggcgtgagccaccgctcctggccactggtgataatttaactagtgttttgtaactacttatcaataataatcaacttaacatcccagaatagtggagttctcattgtttctgtctttatcattggttcaaccaacccaayattttagatgtgtgaattatggtataccacttcttgagacattattccttagttagacaatttgggatggcaagaaacatggaaaaacattactcaaacttgcttaaaaaagagctatgtgtgttggtgaacgtagctga

SEQ ID NO: 518381 - DNA, 504 bp, Homo sapiens
aataactggaaagtcttattaaaaatctaatgagtttaatttaaaaatacatgcagtaaacaactgtatagtagacatgcttgtccatcttccattatgaaaatttatctctaactatacacagttttatatggatttatcattcctccaagctaaacaaacaaacaaaattgttttgtcttatttttgttagtctattaaataggataggtcaatggacttaacgacaatgggacagaggtctctgttctttgctgtgctagcttccaacacatggcagtttccatcatcaaagtattcaagtgaaaaaggcagtagatgttgcctgctactaagatggtggccacrgacctttctgacccaatcatggaagtgacatctcatcatttttgtagtattccatttattagaaggaagtcattagtcccacccacacacaaagagggaattataacaagggcgtggctattcaggaggtggggttattaggaactctctcagaag

SEQ ID NO: 518382 - DNA, 542 bp, Homo sapiens
cacttatcagttgctcagaaatcaggacattttattttgcgttatatttgaatcatatttgttttctatagttttgtttttccatgagctactcaacatacttattttttcttgtattgaatctcttgcctttattatatcatcattttaaattcccagtcacagttttaattctatcaraccttatctctttccctcaacaacctacctccaaagggatctcgatgtgtatcttctgttctttagcaccagtctggactgcttgtcaggttgagaataaacagagtatggagagctacaggcttttctttggaagtagcaggcatatagcagacaaactaatgcccaaatagagaacatccacagaaagagccttacctctctttgcacagtttctttgcttatttatttagttacttatgagaccaagtctcactctgttgtccaagctgcagtgcagtggcatgatctcggctcactgcaacctctgcctcccaggttcaagcgattatcctgcttcagcctcctgagtagctgggacc

SEQ ID NO: 518383 - DNA, 507 bp, Homo sapiens
cagctgagaccacgaggatgcccactttccagagctgtcgccacccacctgcacctcctgggtccctaaccgcggcttcctcactgctccgagcgggtcagcccttgtaccctgccgttctctgtctgctttatgtttggtgccattgtgtctttgcaaaaacgtcacctcagactcctctgaagtggtgccccccacccccgtcgacgttgcccaccttctttttgtcatccccactctgcaagctgttttagaatgtctttgctctccattttcgtctcccacaagacttgtagctgaagagagcagacactgtgctgtctgtgtgtctctatggggtctggtgcgggaagagctcgatgtgtagaaagtgccccagatgcgtgtgtcaggaatctgartgaggagatgaactgtactcaggagatccagggccaatcccaggcccacgtgttttgcccgcagcggctctgactggctgtccacctgctctggcagggtcacgtg

SEQ ID NO: 518384 - DNA, 418 bp, Homo sapiens
gctttgaacatctgtggacaacaatttgtgtgacgcctgtttccgattctcttgggtttgtcccaggagtgasctttggggtcagatgtccaagttcacagtcacactcgagccgtgacctcggccggggacttgccaggtccagtcctggcctcaagatgccccttcagggtcagcccgcagccaggggtcccagagcaggcaagggcttgaggagggctcccggggctggggcacctgcctttcaggtgaaatatcagagtgttcacccagaccataccaatggcacccgcgcggagtgcagtcaccagggaaccgccctgcggcgatggcccggcggggagagggtgggtgacgtgcgctgcggagcatctgccctggtggaggtgcagccccactcaaaaaggttcaccgtgtg

SEQ ID NO: 518385 - DNA, 314 bp, Homo sapiens
acaacgctgagttctctgcagcatcggctgggatcctatccacagcccaagggcacatggcgctgctgggagaggccagtggccagtgctcctgtgtccaacaggctctacacgctggggaaggcccagagagaaaggagtgtgcctgcaagtacaggatctrtgaccacgaccctgtcaacacacagggttttcccacaggacacgtgttctggaggcagaggttcaggaggtgctgcaggagcttgagtcaggcctggcatttctgtgattctcttggcctttccttgctcattgcctcatagttatgaaat

SEQ ID NO: 518386 - DNA, 314 bp, Homo sapiens
acaacgctgagttctctgcagcatcggctgggatcctatccacagcccaagggcacatggcgctgctgggagaggccagtggccagtgctcctgtgtccaacaggctctacacgctggggaaggcccagagagaaaggagtgtgcctgcaagtacaggatctgtgaccacgacsctgtcaacacacagggttttcccacaggacacgtgttctggaggcagaggttcaggaggtgctgcaggagcttgagtcaggcctggcatttctgtgattctcttggcctttccttgctcattgcctcatagttatgaaat

SEQ ID NO: 518387 - DNA, 417 bp, Homo sapiens
ctctcagccctgggggctgccggtgccaygccagcccctgccccttatttcagccgaatcgcttgattggaatgcattgcatatcccgcccgagcgtgcggcccaaatgaaggtgggccccttggcactgccatctgggaagatggggtcccacagggcagggcacggggcccacagccactcatgcttctgccccatcccttccagagctgctccccccaccaccccgaaccatccgggttgctggagtttctgggctgcaggttcagacagaataggtgaagcagccaagctgccgtctgccccacgagggcccagcacaggtggcgcaggtggtccttttccccactcggcggcacgtggctctgtggcaggtcctgaggcacccacatgccacgtacagacattgggacaagt

SEQ ID NO: 518388 - DNA, 516 bp, Homo sapiens
gtcactagcccaccaccctgcccccggctcccgcccagtaaggctcagactcctcggggctrcatccctgcccggccagggcctcctccagtgtgggtgcctgctactgtgcggcttgatggacctcatgggccgggggcatttgacctcaggggcctgggtgacatcccttaattcgcactggcaccgtctgccttgtgtgcaccctgtcagccacccagggaggcctgttgctgcaggaggtgcacagagcgggcctctggctgagccgaaggtcggcagggagccaggctcatggctgcagcaagccacaccagccagtcctgggacgggtttccccgggctggggcgtgctcctgacttggatgactcaaagtaaagaacctcaccaggggccctggcatgcgaggcctgggggcccagatgtgctggggcgtgtcactacaaggtgcagaattgttccagatccaagttggccagagagggagaccgctgggcttccacgtgagtctgggc

SEQ ID NO: 518389 - DNA, 633 bp, Homo sapiens
agcaggtcactagcccaccaccctgcccccggctcccgcccagtaaggctcagactcctcggggctacatccctgcccggccagggcctcctccagtgtgggtgcctgctactgtgcggcttgatggacctcatgggccgggggcatttgacctcaggggcctgggtgacatcccttaattcgcactggcaccgtctgccttgtgtgcaccctgtcagccacccagggaggcctgttgctgcaggaggtgcacagagcgggcctctggctgagccgaaggtcggcagggagccaggctcatggctgcagcragccacaccagccagtcctgggacgggtttccccgggctggggcgtgctcctgacttggatgactcaaagtaaagaacctcaccaggggccctggcatgcgaggcctgggggcccagatgtgctggggcgtgtcactacaaggtgcagaattgttccagatccaagttggccagagagggagaccgctgggcttccacgtgagtctgggcgctggctgtgcaggggcgtctctgctgggcgctggccagcaggagctctggcctctcacttccctcagctttgtgcaggtttgaaattatttccaagtaaaaaaagtaaata

SEQ ID NO: 518390 - DNA, 518 bp, Homo sapiens
caacggcagccaccctcctccctccctgaccacacggcctcttcccgacggtgacgctcaagctcctaccccacgccctgtgacttgccgacttgcccacctccccacctcccgcccacttccccattttcacacatgagggttctcccatcctcaggcctcagctcagatgtcctttccatggggcctgtgggaagcagccacctgcggccactctccctctcccagggcactggtcacttcctgaaacccgctcctggccctcgcccgtctccctccccaggctggaagttcccaggtcccaggccttgaatttccccaacagcccctgtggccctgcccacaacaggaaaccgcgggaaggcagcagagcccagggtgctcctgtgggatgcctgcctgacakcggggctcaggcagggaccctgataggctgcagcccctcagcagcctgcgtcctctgggcctgggggagccacgggtgtcaggagcctgcgggtggactctggacaggaacc

SEQ ID NO: 518391 - DNA, 564 bp, Homo sapiens
tgccaacggcagccaccctcctccctccctgaccacacggcctcttcccgacggtgacgctcaagctcctaccccacgccctgtgacttgccgacttgcccacctccccacctcccgcccacttccccattttcacacatgagggttctcccatcctcaggcctcagctcagatgtcctttccatggggcctgtgggaagcagccacctgcggccactctccctctcccagggcactggtcacttcctgaaacccgctcctggccctcgcccgtctccctccccaggctggaagttcccaggtcccaggccttgaatttccccaacagcccctgtggccctgcccacaacaggaaaccgcgggaaggcagcagagcccagggtgctcctgtgggatgcctgcctgacatcggggctcaggcagggaccctgatrggctgcagcccctcagcagcctgcgtcctctgggcctgggggagccacgggtgtcaggagcctgcgggtggactctggacaggaacctggaattccctagttcctgggaggcagccaccagatgacagcg

SEQ ID NO: 518392 - DNA, 518 bp, Homo sapiens
caacggcagccaccctcctccctccctgaccacacggcctcttcccgacggtgacgctcaagctcctaccccacgccctgtgacttgccgacttgcccacctccccacctcccgcccacttccccattttcacacatgagggttctcccatcctcaggcctcagctcagatgtcctttccatggggcctgtgggaagcagccacctgcggccactctccctctcccagggcactggtcacttcctgaaacccgctcctggccctcgcccgtctccctccccaggctggaagttcccaggtcccaggccttgaatttccccaacagcccctgtggccctgcccacaacaggaaaccgcgggaaggcagcagagcccagggtgctcctgtgggatgcctgcctgacatcggggctcaggcagggaccctgataggctgcagcccctcagcagcctgcgtcctctgggcctgggggagccackggtgtcaggagcctgcgggtggactctggacaggaacc

SEQ ID NO: 518393 - DNA, 415 bp, Homo sapiens
gagcacacctgcagacacctaggcacatcggcacacacctgggcacacctgcacacacctgggaacctctgcgcacacctgagcacacctgcacacactggagcacacctgcacacacmtgggcatacctgcacacactggaacacacctatgcacacctgcacacacctgcaacgctcatcgtccctatgtgacctggagcaagttatctaacctcttggtgcctgagcttccttatctgtaaggtgatagtgatgatggccccccccccccagagagctgtcatgagaatgaaatgaggtgacgcccttacaggtgtgtaagggcgatacctggcacactgtggggccatctgagggttgctcatcatcccccatcccgggagcttgccaccgtgcccgggtgtgcagcccac

SEQ ID NO: 518394 - DNA, 415 bp, Homo sapiens
gagcacacctgcagacacctaggcacatcggcacacacctgggcacacctgcacacacctgggaacctctgcgcacacctgagcacacctgcacacactggagcacacctgcacacacctgggcatacctgcacacactggaacacacctatgcacacctgcacacacctgcaacgctcatcgtccctatgtgacctggascaagttatctaacctcttggtgcctgagcttccttatctgtaaggtgatagtgatgatggccccccccccccagagagctgtcatgagaatgaaatgaggtgacgcccttacaggtgtgtaagggcgatacctggcacactgtggggccatctgagggttgctcatcatcccccatcccgggagcttgccaccgtgcccgggtgtgcagcccac

SEQ ID NO: 518395 - DNA, 402 bp, Homo sapiens
tgcagctacttcctgactcgcagggtgtggactcagccttgctccaccttctgttcttttaaagaaaagctggggccgggcgcgatggctcacgcctrtaatcccagcactttgggaggccgaggagggcggatcacgaggtcaggagatcaagaccatcctggctaacacggtgaaacccccgtctctactaaaaatacaaataattagccgggcgtagtggcgggcgcctgtagtcccagctactcaggaggttgaggcaggagaatggcgtgaacctgggaggtggagcttacagtgagctgagatcgcgccactgcactccagcctgggcgacagagcgacactccgtctcaaaaaaaaaaaaaatagaaaaaagaaaagccggaagtctggatttgg

SEQ ID NO: 518396 - DNA, 402 bp, Homo sapiens
tgcagctacttcctgactcgcagggtgtggactcagccttgctccaccttctgttcttttaaagaaaagctggggccgggcgcgatggctcacgcctataatcccagcactttgggaggccgaggwgggcggatcacgaggtcaggagatcaagaccatcctggctaacacggtgaaacccccgtctctactaaaaatacaaataattagccgggcgtagtggcgggcgcctgtagtcccagctactcaggaggttgaggcaggagaatggcgtgaacctgggaggtggagcttacagtgagctgagatcgcgccactgcactccagcctgggcgacagagcgacactccgtctcaaaaaaaaaaaaaatagaaaaaagaaaagccggaagtctggatttgg

SEQ ID NO: 518397 - DNA, 402 bp, Homo sapiens
tgcagctacttcctgactcgcagggtgtggactcagccttgctccaccttctgttcttttaaagaaaagctggggccgggcgcgatggctcacgcctataatcccagcactttgggaggccgaggagggcggatcacgaggtcaggagatcragaccatcctggctaacacggtgaaacccccgtctctactaaaaatacaaataattagccgggcgtagtggcgggcgcctgtagtcccagctactcaggaggttgaggcaggagaatggcgtgaacctgggaggtggagcttacagtgagctgagatcgcgccactgcactccagcctgggcgacagagcgacactccgtctcaaaaaaaaaaaaaatagaaaaaagaaaagccggaagtctggatttgg

SEQ ID NO: 518398 - DNA, 613 bp, Homo sapiens
agggagtacagccccttccgctgcattccccggaccgggatcctggcccagtgcctgcccctggtaagtcccgggcgggggctcagcctccaggccctcccttggccgccacagggaagtcgcacagaaacacagcaactggaccgggaccgcggctgtgagaggtgggctctgagcacccaggcacccctgctgggagaggccggcgcttcaccgcccatctcataaggtgggggccgcagagaaggctcctgggctggcactgagcccaccaggccccgcagggcacgggtgcccggtcagagaccgtcagagcctgcggrgccgcggggagggggacccaggaccatcccccgtgggagctggggttggacgtcttcaggccggagagggaacagcctcaccagccctggaggaggagggtcctggcttctcccctccctcccccgacctctgctgtggcttttcctgacgggaaatccatgggacaagccgtgctcggtgcaggctcccgctctgctgagccctggggccaggggagggggccaggtcgccagcggcgcaaacgcggtgggggcgcaagtgcgtgtttgctggagcccagagctcccgt

SEQ ID NO: 518399 - DNA, 572 bp, Homo sapiens
ctgtttggagcctttcttccagtgcaccacctccgcatcttccctccacccccgcccctgccgtggggagccctgccgacggcgtttaactgactgtgtaaggctgggcctcttgccctcccactcctgtccagaacagtgaggacctgttccatccatcagaaaggcctccgcagaagccgcgagccgtgccttcgcgtgtgcacacctgagagctcacgcgtgtctgtgggtactcagggtgcgatgtgtacacagatctgaatgcagrcgcacgtgcccatgagcacgcacgtccagagagacgcacgtctgcttatccacaaggtgcacgcgtgtctggatccgcacaggtgcgcgtctgctcgtggacacgcagaggcgggtggggctgtgcacgtatgcctgtctgcacaggaggctggaaacataaccgcatgtgacttgagggcctgtgtgtgatggtgtcggggtctgcggcgtgcctggtaggcatgtgtgtgtgtttgccaaggttacatgtgcctgtatgttcatgcttatcttggcgtgtctgcatgtttggtgtacag

SEQ ID NO: 518400 - DNA, 492 bp, Homo sapiens
actcccccgcccggtaacccgacacaggcgcaggctctggggattagcacggcggccacgtctgacctccatccagcacgagctcccttctccacgcagaggcaccttcttgggtgctggggccgggatgagactggtctggggcacgactcagcctcatcaagtcctggggacagcacccagcaccaggagctccacaccccccggccakgtggtcctgctcagcctggggtgagggcaggagctgtctcctcactctgctccacaggaccctcagccacaccaggcctctcgcccccatggacccctcgccctgtggggccctgacctcttctctggcagatgagtgcgctggggtccagcgtctgaacctcacttctgctgtgagactgtgaacacctgtgcttgccgagggtctgtgagcctcaggtgcagggagttgctgtctaggcccctctgctgagctccccgggtcacctctgtgtcggtcat

SEQ ID NO: 518401 - DNA, 436 bp, Homo sapiens
gcaagtggattaaacgcttaagtgtgaaaagtgaaactgtaaaaaaaaaaatttaattgaacatttactatgtaccagacacagttctaagcactttcaaagcaacagtgaacacagcacatgctctctgccctcctggggcccccrgaggttggtggggagatatgagccgcggtcatcacaggtaaacacatcactcaaataagtcaaggggaagtggggtgccgggaggggcaggctgcatttacgccttacctaaaatatgcttgccgcagggaaggtgacatttcagcagacttgaaggaactagagatatcgatggaggtttcatcctgaaacccgaaactagaatgcaagaaaatatgttttgtttatttatgaaactgggtagtgttaattacaacacttcatttttagaaagaaacacaatgaatct

SEQ ID NO: 518402 - DNA, 436 bp, Homo sapiens
gcaagtggattaaacgcttaagtgtgaaaagtgaaactgtaaaaaaaaaaatttaattgaacatttactatgtaccagacacagttctaagcactttcaaagcaacagtgaacacagcacatgctctctgccctcctggggcccccggaggttggtggggagatatgagccgcggtcatcacaggtaaacacatcactcaaataagtcaaggggaagtggggtgccgggaggggcaggctgcatttacgccttacctaaaatatgcttgccrcagggaaggtgacatttcagcagacttgaaggaactagagatatcgatggaggtttcatcctgaaacccgaaactagaatgcaagaaaatatgttttgtttatttatgaaactgggtagtgttaattacaacacttcatttttagaaagaaacacaatgaatct

SEQ ID NO: 518403 - DNA, 429 bp, Homo sapiens
cttctgtttcccaaaacattctgtttttagtagtggtatttacatttacaaaatatagtaattctcaatggctaaaaatgtcaaatcctagagaatgttgcattcctacacatgatgttaacatcattctcaaacagttgttggccaaagattcgtttgatgaatccgatttttccaaaataagcgattctgacgattcaaacaattttgatgttagttctgttttagaaataactccaagaacagtttttrtattttattttcacattgaaaatcagtcagatttgcttcaacctcaaaaaccgtgtttatgcaaaattaaatgagtgctggcagcaagctgcactttttttgttgtttttctaaacgggaaaagggttaattggccacagcttaactgactcagtgtcagttaagcgcccttggcaa

SEQ ID NO: 518404 - DNA, 376 bp, Homo sapiens
ccaaaggcgatctaccaatctttaatcaaagactcagtccatgtcagatgcttagagcgacattgatctgagcatgggaaatccacaaaaaatggtaggtgtgtggttacaccgtggaggtcacccacccaacatgagcctcagtcagtaggtgttccctgtcctcctcacacctctggttgggggaaggactaccttggcttaaaaatggaaaaaatgaagyggggtgagaatgacatctgcccaacttgctatttggagagtgttgtaccaagttgtgtaacctctggtattgcattcatcattgcagaagggacgcattccactcctacaggtgaggcaaaggagcccatcgctcttaagactaacttgagtc

SEQ ID NO: 518405 - DNA, 437 bp, Homo sapiens
tggcatttaaatacttttttttttttttgagatggagtcttactctgcagtccaggctgttgcacaatggcacgatatcggtttgctgcaaccgtcacctcctgggctcaagcaattctcctgcctcagcctcccaagtagagtagctgggattacaggagtgcccccaccacgcccagctaatttttgtatttttagtgcagacgggttttcgccacgttggccaagctggtctcaaactcccaacctcaggtgatccgccctcccaaagtkctgggatttggccacttggcctcccaaagtgctgggattacaggcgtgagtcaccgcacctggcccctaaatatatttttgtttgtaaggcccatactctggaaatggctttttgtcgtccaggacctcgtgcctgcaatttaccctaatggccactagatggt

SEQ ID NO: 518406 - DNA, 584 bp, Homo sapiens
cctttgcatctggtgttttggaaaccaagaagtctacaaggtaaattcatatcaagcaaagagttaacttttctactcccaacttggagccaatgtttagaggcatctgaccttggctttcctgtcattaaaagtccctaggactgtcaccctgctgggcttctcaccctcatcggtccactcccaagccctgtccatgaaacaggacttgggaaggtaaagattgccctggctgatgacttcacggacttttgtttttcttttctttttcttcttccccttgctagtacgaagaaggaaaaaagcgaaggaaacctaactatagtagcgttgacctctctgaggtggagtgggaagaccgagatgacgtggtaagtgatttgttttcaggcctcgtggagaaggasctgcattgtacccacttctgtacctgggggcgatcccaggagttggccaagaggcccactgaagggacacctggctaccagagggacgtggagacaaggggcctttgtaccatgtgtggagttttataactcttcagccggtcattcggaccagttgcagacaggccagccacccca

SEQ ID NO: 518407 - DNA, 584 bp, Homo sapiens
cctttgcatctggtgttttggaaaccaagaagtctacaaggtaaattcatatcaagcaaagagttaacttttctactcccaacttggagccaatgtttagaggcatctgaccttggctttcctgtcattaaaagtccctaggactgtcaccctgctgggcttctcaccctcatcggtccactcccaagccctgtccatgaaacaggacttgggaaggtaaagattgccctggctgatgacttcacggacttttgtttttcttttctttttcttcttccccttgctagtacgaagaaggaaaaaagcgaaggaaacctaactatagtagcgttgacctctctgaggtggagtgggaagaccgagatgacgtggtaagtgatttgttttcaggcctcgtggagaaggagctgcattgtacccacttctgtacctgggggcgatcccaggagttggccaagaggcccactgaagggacacctggctaccagagggacgtggagacaaggggcctttgtaccatgtgtggagttttataactcttcagccggtcaktcggaccagttgcagacaggccagccacccca

SEQ ID NO: 518408 - DNA, 602 bp, Homo sapiens
atttttctctgtttcctgcctatgtcatatccagtagcattgcttggtgaactgatatgtaaaccactttctttctctcagtatcatttttactgtctctgaagtgagtagggttaggccaaatccaaaacagcccatggtagcatcaacccacatccctgggcaaggctgcccttggggcattggccacaagtgtgccacatgtttgccacccctgaactagttgcagtgtgttgaaaaaaggacatccctttgggtttgtgtgtacttatctaatttttaaagaagatatagaattataaagagtaatgcagtgaacactgttttttaagttaagaagtgtagatcgttttctttagcaatgaataaacacacacgtacctatatgcacatacacaaatgcatacatacccatccaccccacccatcttttcccattcatcagaatgagaaagtagcggcagtgcctgctattcaaatgtttgttggcaaagcattgtggggaccagttcacttctcacttgcatcattgtttagaaacagttcatgtgagagctccatcatcatscaactttgctctaatcgccctggtattaatggag

SEQ ID NO: 518409 - DNA, 625 bp, Homo sapiens
ctgtcaaaaatctatgattccaacccccccaytcctttagtatactgttacaaaagttgaaatgctaattcattaaggatttcttagcgtcttcttcaggaaactcactaccattctatcaagatatcaggctttctgggaattttcctttccagtctggcccagagcaattagcttggcctgaataaggatggtaattaaaagcagagagcatttacaatctgatgaagaactgagggctaatgctaaagaagcttcatggacctgcatgtttttcctggcctctcccagtatcaaatctctctggagttcacctaaatcatgatgatgtcccaccaaagaatcacattccacacttccccataaaccatatctttagcaagacaaccactgttaggaactcttccatcagacccaagtaatacagtataaacaatatgccttaagcaatcaatctttttcccaacatattgcatttagcaacatgcacagaaaaggagcactgcagaaatgtggttcatcccccaatgtccctgttcttccttcaaatcagtaactgctgcttagatggaggtggcattcataaaagtcagttgcttcagacctaaacttgatcattcagcta

SEQ ID NO: 518410 - DNA, 625 bp, Homo sapiens
ctgtcaaaaatctatgattccaacccccccactcctttagtatactgttacaaaagttgaaatgctaattcattaaggatttcttagcgtcttcttcaggaaactcactaccattctatcaagatatcaggctttctgggaattttcctttccagtctggcccagagcaattagcttggcctgaataaggatggtaattaaaagcagagagcatttacaatctgatgaagaactgagggctaatgctaaagaagcttcatggacctgcatgtttttcctggcctctcccagtatcaaatytctctggagttcacctaaatcatgatgatgtcccaccaaagaatcacattccacacttccccataaaccatatctttagcaagacaaccactgttaggaactcttccatcagacccaagtaatacagtataaacaatatgccttaagcaatcaatctttttcccaacatattgcatttagcaacatgcacagaaaaggagcactgcagaaatgtggttcatcccccaatgtccctgttcttccttcaaatcagtaactgctgcttagatggaggtggcattcataaaagtcagttgcttcagacctaaacttgatcattcagcta

SEQ ID NO: 518411 - DNA, 506 bp, Homo sapiens
tgttctcctcacagtgagtgagtggtcataagatctggttgtttaaaagtgtgtagcagctccccactctctctcttccttctgctccagccacgtaggacgtgcctgcttcccctttgccttctgccatgtggaaggaaaagactgagatgttcactggagtcaggtcatcaaggtcttcaaatgctctgaatttaggctcccctggagggttttaagcccgtggtgrtcctacttaagccagcagtgagcctttagattctctaacttattagttgacaattaaaatagctcaattatttatgaaaacttttcaaattgggtcttcaaatattttccagaggcagacagaaaaagtcatctaatgtggtctcaagatgtccctgcacttataaggtgtgtggacagtgtttcccactggtccctgctattggaataccatgggggtccattgaaccccatgttcctcaaaggaaggctctttccatggaaacaactgctccttt

SEQ ID NO: 518412 - DNA, 477 bp, Homo sapiens
aatgactgcggggccagaagtgaagtgtcacagcatgctccacatgtttttaacacggtttctaaaggctctggaggctattaaatttaatgaacccatctgctatgaaatagaggtcccaacataatcagtttcctccttgccatgtaatgcagatggcattctctgttccacaacccagcaggatggtttatgtttctctttacgtgtgtctctttgttttgacgattggaacttctttgatatgcagcagtgtcttggaaaaatactgtaaattccatttccaagcccaagaacatccttaggatggctttgaccccgtttaattgcttctaggcagtaagaggttatagcttaatcacccaaatgactcctaaatggcctaggtgccattcctagaygggaaactgaaacaaatgtgcaatttatcaaatgcatagtgttttctccaagttggacttagtggaaactgagaag

SEQ ID NO: 518413 - DNA, 642 bp, Homo sapiens
acacagctgctgaggtgcctgtttacattaagattactaaatccatgaacacagaacaaaagtcccgagatagttaagtagtgttcaacacttgggttaacccatctattcgtccaaggccctcaaagtgcaagtgtcccacctaggcagaaacatgaggtttctaccaaatgacttctcrctaggacagatgccaaagcattaccgtgggagaacctgtggggatggtccccagtgagttcccactttagaagttctgatcagttttacttccaccgatgtccaagtacaagccactcaaagctgtcattcttgctgaaattaaactagattttagatttgttaatttttgacatttcataaatcttcatcagaattctttcttctgtgctctgaccttttgactttttcgagggtccacataaaactctgatgaccacaacgtggaagccttaggaaatgatgccccaaaggtcagcagtcagtgaatggtgtctcaaatagaagtgctcagccattcagtgggacttcctaaggaggctctgaataatcacttcagactgagagaatgagaaagtactgggaaatcaataaagaacaacaaggcacaggggaaatggcttaagcatgtatttattcact

SEQ ID NO: 518414 - DNA, 642 bp, Homo sapiens
acacagctgctgaggtgcctgtttacattaagattactaaatccatgaacacagaacaaaagtcccgagatagttaagtagtgttcaacacttgggttaacccatctattcgtccaaggccctcaaagtgcaagtgtcccacctaggcagaaacatgaggtttctaccaaatgacttctcgctaggacagatgccaaagcattaccgtgggagaacctgtggggatggtccccagtgagttcccactttagaagttctgatcagttttacttccaccgatgtccaagtacaagccactcaaagctgtcattcttgctgaaattaaactagattttagatttgttaatttttgacatttcataaatcttcatcagaattctttcttctgtgctctgaccttttgactttttcgagggtccacataaaactctgatgaccacaacgtggaagccttaggaaatgatgccccaaaggtcagcagtcagtgaatggtgtctcaaatagaagtgctcagccattcagtgggwcttcctaaggaggctctgaataatcacttcagactgagagaatgagaaagtactgggaaatcaataaagaacaacaaggcacaggggaaatggcttaagcatgtatttattcact

SEQ ID NO: 518415 - DNA, 576 bp, Homo sapiens
tacacctgtcagcacctctcttagctcccagccttctgcctgttgcttcctccccagggcttctccactgagaaagtggtaaagttgtgggggactcttctgctcacgcacgtgcaaccccactatgcaaccttctcaccaatgggaaatgggagccaatggataaattcttcccttggaaagacagctctgagatacatttcatacagctcctctggccctgctattcaatgaatggactctgtcatcctgagcagtggccaacctgaaaatgcatcttttattgcctctccctctttctccacttggcccccacatccctcactcctgctccatagatcatattctccaataaaaaagaaaacatatayataagctttggctctggcttttctttctggagagccaggcatgcaaaacataatacctgaatgaatggatcaggatgacaaaagtctgtgaatggtgtcacttggtgcatataaagaaccagggcaaggttctctttaaaaaggaaagacctggaaagaatgtataacttgtcatatggaaaagagagtagacatactctgtgtt

SEQ ID NO: 518416 - DNA, 506 bp, Homo sapiens
  misc_feature (1)...(506): n = A,T,C or G
caaaataaaataaaataaaataaaaacctactggctccacgggtcataattgcactggatcgaatattctgtttatgcctggagcaaaacraaaatggagacgacctattttgttctagatgtaaataatttgacatattaanacttcttanaagatgaaaattgacccagtgatattatagactagatagtagcattcacatatttaagattgaaaaataaaacaaaaccttaaattaaactttggatttacctcattcccttttaggctgttctcctaggatgttaagggttgggtttgatcttttctttcctcttaagtgaaccattttagaaatgacagctttaggtgttaagacattattgaccactaacatctgaacttgtatatcagcttatcagttttacagtacagagagcaggaatagaggcacagaactaatgggtttggatggaggaaacgtgggagctggtcaatgctgagaagagagggccttccatggaga

SEQ ID NO: 518417 - DNA, 639 bp, Homo sapiens
tgtccatctggttttctgaagagtgggcagaggatgaagaactgacaagattaaatacaagtttacagcctcgattttactttctattgtgttttttctctggcatcacctggcttaatgagaagtagccatttgatgaggacaggctttattcttgagaagcactctctttccttccaaggttaagtttaaagacaaaatccttcygtttcattcaagttctggcattcacagcctgtgaggtcactttaagacatctcagattttgttgtgacaaagaaaaataacccaggttttgtgcacccaggtacaaacctaatttggtgattcctaaaattttctgtcagctttctgtaggcaggaggttaaaaaaggtagctgtttaatctctgtttaatcctcaaagtatgtgccaaaaaaggatttttcatatgatagtgaaaatagctctttcatgcatattttcaccagcaaaaggtttaagtaggattttgaaatatcttcagtcacccctttacctatctgagttattcttatttcagtgatgccattggcaccttgtcagagatgttcggggacagaggcattctagtaggaaatttaaaactaaaagagagatgagacaactttgttacccag

SEQ ID NO: 518418 - DNA, 639 bp, Homo sapiens
tgtccatctggttttctgaagagtgggcagaggatgaagaactgacaagattaaatacaagtttacagcctcgattttactttctattgtgttttttctctggcatcacctggcttaatgagaagtagccatttgatgaggacaggctttattcttgagaagcactctctttccttccaaggttaagtttaaagacaaaatccttctgtttcattcaagttctggcattcacagcctgtgaggtcactttaagacatctcagattttgttgtgacaaagaaaaataacccaggttttgtgcacccasgtacaaacctaatttggtgattcctaaaattttctgtcagctttctgtaggcaggaggttaaaaaaggtagctgtttaatctctgtttaatcctcaaagtatgtgccaaaaaaggatttttcatatgatagtgaaaatagctctttcatgcatattttcaccagcaaaaggtttaagtaggattttgaaatatcttcagtcacccctttacctatctgagttattcttatttcagtgatgccattggcaccttgtcagagatgttcggggacagaggcattctagtaggaaatttaaaactaaaagagagatgagacaactttgttacccag

SEQ ID NO: 518419 - DNA, 494 bp, Homo sapiens
ttcatttttctgacatccactatgtgcttgacatatacttggcaccacaggaaaataaacaagataagcaaaacaatttttaacttcatagaagagaattaaaggtaaagacaggatcattattattctgattgttgtattagttaatccattttattgtgtctcatttgaggatctaatttaaaaatactgcaaatgtcatcaattcctgattagaaatggtgccctctaagtggacaaactggctttatcaaataactttacactcttatcaaatgtatccacaatcttatcaaattaatctacactcttcgtgtgaggtttttcaactatttgcattatcgttcaaatcggatttatttacaatgcctgcaagaatattaaaaaccctggaaaatgcccagaaatataagtctatatacactatgtttttatctgcattgtatgatttggtcattaaaatttagttgctrcatattcatgaataggaaaat

SEQ ID NO: 518420 - DNA, 609 bp, Homo sapiens
acaggcattaatcattttgatggactacaaagggatgacagagacaagatgtcattatactttggaatttatgcaagcatacttatttttttaaaaaattcytactgagttcttgaaccatagtaagttccacgtaatatcttaatttataaagataatatacatccacatgtacttgactgtgatgtgtctcatttctctagaaaaatacctctatggtactttaaaaattatccatatacttaatctttccatacctttaatcatgaaatatgacatcacactttcatgaatatttaaatttctccctcctactcccaattctaatttagacaaatctctatagcaccatgagaaatataagtaagtaattacaattccatttgtgataacatctgagttatctctaataagtggcaggtataatttatttcagctactagatgttttcatgaaaacatatttgatcagtttttaagtcaattatgtttttcatggctatacattctaatttagagaattagacatatcaagatattctggccttatgacacagtgagagaaattatgagttacactgtagatgacctcctttaataatatttttaa

SEQ ID NO: 518421 - DNA, 521 bp, Homo sapiens
gatggaaaataaagaaagtaagagggagagagagcgctggtggggtggctggggaagacgcatccgccacggtgaccttgtggggcagatctraagaatgcagcgatgcccagcttgggcctttctggggaacaagcagaagggaagcagccaggaggagcagcgtgctcaagcacgccagcgggacacaagcaagcgaagagaagggtggtgggagcgaggccccgaaggggctgggtgacctatagggccaggtctgcaagagcgttagattccacttggggtacaacagaacccgctggagggtttgaacagaggagtggtgtcatcaggactgctttcccagggctgctctggttgtagggcaggcactgctttcaaaacagggctgctctagttgtggggcaggcagcgagagggagctggagtagaggaggctccaggcagtcagggtggtggcttcagccaggggtcagcaatggaggttgggggaggagaggctgaggatcgaccttgaaagg

SEQ ID NO: 518422 - DNA, 521 bp, Homo sapiens
gatggaaaataaagaaagtaagagggagagagagcgctggtggggtggctggggaagacgcatccgccacggtgaccttgtggggcagatctgaagaatgcagcgatgcccagcttgggcctttctggggaacaagcagaagggaagcagccaggaggagcagcgtgctcaagcacgccagcgggacacaagcaagcgaagagaagggtggtgggagcgaggccccgaaggggctgggtgacctatagggccaggtctgcaagagcgttagattccacttggggtacaacagaacccgctggagggtttgaacagaggagtggtgtcatcaggactgctttcccagggctkctctggttgtagggcaggcactgctttcaaaacagggctgctctagttgtggggcaggcagcgagagggagctggagtagaggaggctccaggcagtcagggtggtggcttcagccaggggtcagcaatggaggttgggggaggagaggctgaggatcgaccttgaaagg

SEQ ID NO: 518423 - DNA, 562 bp, Homo sapiens
agttttatttggagaagacagaaataaataatctggtgccgtgatggaaaataaagaaagtaagagggagagagagcgctggtggggtggctggggaagacgcatccgccacggtgaccttgtggggcagatctgaagaatgcagcgatgcccagcttgggcctttctggggaacaagcagaagggaagcagccaggaggagcagcgtgctcaagcacgccagcgggacacaagcaagcgaagagaagggtggtgggagcgaggccccgaaggggctgggtgacctatagggccaggtctgcaagagcgttagattccacttggggtacaacagaacccgctggagggtttgaacagaggagtggtgtcatcaggactgctttcccagggctgctctggttgtagggcaggcactgctttcaaaacagggctgctctagttgtggggcaggcagcgagagggagctggagtagaggaggctccaggcagtcagggtggtggcttcagccaggggtcagcaayggaggttgggggaggagaggctgaggatcgaccttgaaag

SEQ ID NO: 518424 - DNA, 626 bp, Homo sapiens
ggaggtgataccaggttcatggcctggcatttcccagcctgcgaattctgcttcaagtctgcaagtctgcccagtaggtacaagacaaatcatacccaaggacatttgtacagaaacatgagccttgctagatccctcccttgtgcagggtagcttctrtgaaacatatagaccaagcagacttccacatcagtgaatacatttggccatctgaaaatacagagacttaacacatatggagacctgtggcttcctcgggccagcctcagtttgaaagcaagggtgagatctttgtcagacactcacgggacctgtgctgcccataaaggaaggggcccttctctcaggacagcacaagggaaaacacccacagccggaaaagaaggtgtgtctcagcatgacggaggctgtgtgcaaattattccttgtgccaatatcaggagtgtggatctgacaaacaaaaggccatgtcattggcttagtgtctctgtggagtctgtaatggtccttttacttacttgagtcctttctaagatggattttgttcattttccactaagattgcagaagctgcacgtggcgtggcagtttatgaattgggtcccctggcaaggctctgaaagaca

SEQ ID NO: 518425 - DNA, 626 bp, Homo sapiens
ggaggtgataccaggttcatggcctggcatttcccagcctgcgaattctgcttcaagtctgcaagtctgcccagtaggtacaagacaaatcatacccaaggacatttgtacagaaacatgagccttgctagatccctcccttgtgcagggtagcttctatgaaacatatagaccaagcagacttccacatcagtgaatacatttggccatctgaaaatacagagacttaacacatatggagacctgtggcttcctcgggccagcctcagtttgaaagcaagggtgagatctttgtcagacactcacgggacctgtgctgcccataaaggaaggggcccttctctcaggacagcacaagggaaaacacccacagccggaaaagaaggtgtgtctcagcatgacggaggctgtgtgcaaattattccttgtgccaatatcaggagtgtggatctgacaaacaaaaggccatgtcattggcttagtgtctctgtggagtctgtaatggtccttttacttacttgagtcctttctaagatggattttgttcattttccactaagattgcagaagctgcacgtggcgtggcagtttatgaattgggtccccyggcaaggctctgaaagaca

SEQ ID NO: 518426 - DNA, 610 bp, Homo sapiens
gtgtgtgttgtttccctctatgtgtccatgtgttctcatcattcagctcccactcataagtgacaacatgtggtatttggtgttctgttcttgcattagtttgctaagaataatggtctccagcttcatccatgtccctgcaaaggacatgattaaccatttttaagtgcacacttcagtggcattaagtacattcacactgctgtataatcatcaccacgtctggctccagaatgtcttattatcctaaactggaaactctgtaccccttaaaactaactcccattccccgtccccacagcccctggcaactcgccttctacgctctgtctctgtgaatttgaccactctaggtaacctgatataagtggaatcatacaatatttgtccttttgtttctggctgatttcacttagatgaatgtgttcaaggatcatggatagatttaggtttatttaaataaaaactgagaaatgcagtatttcttatacacccaagtctgtgaacttgaattcactgtacacacagagtaatttattaatcttcccctaggkttagcttagactctcatctgacccaagacttctttctctctaatcctccacatcca

SEQ ID NO: 518427 - DNA, 512 bp, Homo sapiens
tgtggcatctgttcaggctcttctttcgtattcactcatcagccaatcagcaagttctgcctcatgggtgcccttcaaattcaactctccccctcacttacagcccatcataaaggatagatgcggtgaagtctggagtggaacaggaggggaggaggagcctgttggactatcctttggtatggctttcatagactttcatcaattgcacgtttttgacacactctattctctgyaacccccgacccacacccagatggcaaatgggctcagcacccctccttctgacctgaccacgctcacttctcctcctttgcccaaactatccatgatcacaatgttctattttatcttttacctctgccatgagagcagcatgtctcatttagaagttgcttttttcagcctgggtcccagaatgaagaggaaatcggaggggaggtcattcctcaaggccacgcacatgagtgaggaataaacctgagctattctaagacagacgtggtgtggaa

SEQ ID NO: 518428 - DNA, 667 bp, Homo sapiens
tgtggcatctgttcaggctcttctttcgtattcactcatcagccaatcagcaagttctgcctcatgggtgcccttcaaattcaactctccccctcacttacagcccatcataaaggatagatgcggtgaagtctggagtggaacaggaggggaggaggagcctgttggactatcctttggtatggctttcatagactttcatcaattgcacgtttttgacacactctattctctgcaacccccgacccacacccagatggcaaatgggctcagcacccctccttctgacctgaccacgctcacttctcctcctttgcccaaactatccaygatcacaatgttctattttatcttttacctctgccatgagagcagcatgtctcatttagaagttgcttttttcagcctgggtcccagaatgaagaggaaatcggaggggaggtcattcctcaaggccacgcacatgagtgaggaataaacctgagctattctaagacagacgtggtgtggaattgcttgttgcaacaacataactcagcctcaccttactgataaagggggtaatatgtacactcttactaatggtgagtttacacatatatttgctcattctgttctcacagcaagcctattgggtaacatttactttctacattctactgataaa

SEQ ID NO: 518429 - DNA, 481 bp, Homo sapiens
ctgggcaccccgttgtgctgctccaggactggccccgtgtcctggccttggggttgagtctcggggttggctgcatgcgttggtgtgatttcagggcatacacacggaacgtgctgcccaggtgctgggcccagggaagccacgtgtctcagccctgaagagttgtcctggcgttgtgcacaacctggctggtggcttggagagcaaacagtacccccgaccccacgggtgtctgcgggcactaggccccacgtgcgggttctctggagtctcccaagctgagcatcaccggacccagacccgtcacagccatgctgagcttacccgtgagtgaccttcccgaggaaggcatggggctttctggggcaggaagcaggggaagaggctctcaaaacagcaggagatgggagcgcgctgtcccgsaactgttgtccgcctccctctgccatccaggtgcccgccaccaggtcccctctgacag

SEQ ID NO: 518430 - DNA, 547 bp, Homo sapiens
gtttgggatctctccttgctcctccattcgtgatcttactttccttttagtcctaaagattcaaacacgtggtgtcagtgttgctctgaagcacagaccgattcccagggtcaggctataaattctttaactaaatccactgacaaatcacccagaaaagcttttaatatgtttgcaggcttagccacaggagcaaagcaaattgttcttgagatcttcaaagcaggcgtgcaggtttcaccagttcttcctcttgccctgggcaggtctgcaagtctgctggaacctggaacacagcagccctcctgcccagccaccccattcctgagcttcctctccatgcaagagtccacttgtaaaacaaacaacgggctgggagttgtgtctccccttcaccaccagtaagtacttcatgcaggtagaaaagccagaggargaaaaggtattgaaacacagtagaaaaaacaaatgaacaaatggaaataatgagttgaactcagaggctcccagcttcaggaatcatttctgacacttggcatttgcctcc

SEQ ID NO: 518431 - DNA, 437 bp, Homo sapiens
ggtctgcaagtctgctggaacctggaacacagcagccctcctgcccagccaccccattcctgagcttcctctccatgcaagagtccacttgtaaaacaaacaacgggctgggagttgtgtctccccttcaccaccagtaagtacttcatgcaggtagaaaagccagaggaggaaaaggtattgaaacacagtagaaaaaacaaatgaacaaatggaaataatgagttgaactcagaggctcccagcttcaggaatcatttctgacacttggcatttgcctcctgcagcagaagcgcgtcttcgttgtttctccctgttcaattcttccacttctcgatcctcaaactcatgcagggatttgaatgtgttgggtggttgrtttcgttgcttattttaattttttaaaaccataactgccttgtgcttaggagcctgat

SEQ ID NO: 518432 - DNA, 270 bp, Homo sapiens
ataaagtagttatatgaaagttcactaatctaagcagggtctaaactaatctttacacctccaaatgctcaaggaaaagtactaaggggaacctactagtgggaatatctgacttatttaacattttctggctgcttggctctgaatcgaatatataaagttrcttcttgtaaccatgtcaatttgagatagtatgtgtacgttcagtctctaaaatgtatccattatcttgagacccctgatttcagaactttgggagcctctctttcc

SEQ ID NO: 518433 - DNA, 591 bp, Homo sapiens
tgattgttcagcgatataaccagctatgcagttgtttttctgcatatatgtttggacacgtgaatacaatgttgtgttttttttwaaaccgagagctttcaccttgaaatcagcatatgtttcatattccagagtccaactgtaaccataaatctgttattgtcatggaaagtgaagtgtgaagagtgtgatatgagaagccgggaggtccaggttcaggtcaccctcgttccctttacttcttcaccccacccactacttattggaattgtggccttgagcacacactcaagccttttacccccaatatatacaaagggcagggagttattcctcacctctgaaattgcagggagggtattagactaggaggccgcctgaggtcccttccattcctgagaatgtgtgataccatcaaagctcacaagtacttgttcaggggactctcagcttgtgtggtctctgatgtttagtgcaagatccttgcccaagtgatcgacatgattttctcaaaaaatccacgtcttaggattttccctggcccttgcactggagagcctctgtttgcctgtctgccctcctctggtttct

SEQ ID NO: 518434 - DNA, 591 bp, Homo sapiens
tgattgttcagcgatataaccagctatgcagttgtttttctgcatatatgtttggacacgtgaatacaatgttgtgtttttttttaaaccgagagctttcaccttgaaatcagcatatgtttcatattccagagtccaactgtaaccataaatctgttattgtcatggaaagtgaagtgtgaagagtgtgatatgagaagccgggaggtccaggttcaggtcaccctcgttccctttacttcttcaccccacccactacttattggaattgtggccttgagcacacactcaagccttttacccccaatatatacaaagggcagggagttattcctcacctctgaaattgcagggagggkattagactaggaggccgcctgaggtcccttccattcctgagaatgtgtgataccatcaaagctcacaagtacttgttcaggggactctcagcttgtgtggtctctgatgtttagtgcaagatccttgcccaagtgatcgacatgattttctcaaaaaatccacgtcttaggattttccctggcccttgcactggagagcctctgtttgcctgtctgccctcctctggtttct

SEQ ID NO: 518435 - DNA, 529 bp, Homo sapiens
tggttgactctgctccctgcagcagatctgggcagtactgcgtgaaggccaccacaccactgcacaccgctcagacctcactgccactctcattgctccttttttgctcttgctacactggctcttggcttcctccaatatcccaaacatgcacctgcctcagagctgtcgctgttcccggcctggaatgctttgttctcggatatctacaggccagctccagggccttgctcaggtctcygctcaaattttatcttatcagaaagacatttgcagaccaccctaggtaaaatggcactgtggtcattcttggtgcctcgtctaactttttccatagaatttattaccacctgacattgtttatatatgtgttatttgtctgcaacatttcacaagaatgtaaatttcaggagggtagaaactttgccctgttttgttcatttgtatctccagggcctagaagagtatctctggctccatagaaggtgagagatacttcttgaataaatgaatgaatagacacctatta

SEQ ID NO: 518436 - DNA, 555 bp, Homo sapiens
gtgccatttttaaaagtggccttttaaaaggccatttgataggattggccttttccgcgccagacatcgtgcggaagacatcgtgccaaagctttccctacctgaaaccacttaactctgaaaaaaggtatgattatctccatttttcagaggaggaaactgaggmtcaataaagtggaatgagtcgtgtgaggtggctgggatgggatttgaactctggtttgctgggctccaaaattccttccacttaggccacatggttttcacaggtcctcagttcctgccagttctcatcctacctgttccttctgtttttaactcaaaaatctcccctattcccgtggagtctaccgcttggactgggaaactatcagaaggatgcagcccccttgagttgctctttgatccctaaagcagattatctgtcaacagcttttatgcaaagagcacccaaggaggattatagacgtgaatcactgaatgagacccagtgtctgctcccagcaccatctgttgatatgcagatcaccggtgatcattgatcaggacaaacca

SEQ ID NO: 518437 - DNA, 495 bp, Homo sapiens
cgccagacatcgtgcggaagacatcgtgccaaagctttccctacctgaaaccacttaactctgaaaaaaggtatgattatctccatttttcagaggaggaaactgaggatcaataaagtggaatgagtcgtgtgaggtggctgggatgggatttgaactctggtttgctgggctccaaaattccttccacttaggccacatggttttcacaggtcctcagttcctgccagttctcatcctacctgttccttctgtttttaactcaaaaatctcccctattcccgtggagtctaccgcttggactgggaaactatcagaaggatgcagcccccttgagttrctctttgatccctaaagcagattatctgtcaacagcttttatgcaaagagcacccaaggaggattatagacgtgaatcactgaatgagacccagtgtctgctcccagcaccatctgttgatatgcagatcaccggtgatcattgatcaggacaaa

SEQ ID NO: 518438 - DNA, 651 bp, Homo sapiens
taaaaccctggaaaaatcgtggtcactcatcaagttggacaagtccaagctgccctggcaggcagtagaggaaggcatgaagaggctgagagaagtggtcctgctggggcagatggattatgtaaggctggaagacccaccagaggactgtgttccataggagtgccccaaagacccaccctttacctgggccactgatccaaagaatgttgatggggatgacagttgccagatttagcaaataaaaatacaggattccagttaactttgaatttcagataaacaatattgtttgtataagtatattctatgaagattttgaattacacttttgaaaatgccrttgtttatctgcaattcaaagttgaacgggcatcttgcattttatctggcaaccttcatggtggctttcccctgcatgactcatggtaggaaagacaggaacaaagctgggcttgttaatatccaccagaatgaaagggctccagagaaatagaggcaaccagagtgctgcttagacatccaaactggaaaaggggaagtcttattgcccctctttgctgatattatgatcctttatctagctaaacctaaagaccacaccaaaaaaaaaacctcttagatttgataaataaattcagtaaagttgca

SEQ ID NO: 518439 - DNA, 572 bp, Homo sapiens
cgagggaacaggaggagggggcagagcagaaggccttgagatgaaaagggacttgacaagggaaggtcctaaaagaagatacttgtggcttcatgaatgggagagagtggcttctttyaaaagttcgtcagtaaaaccaagacagagatgtgagtggcttgaggcagtgaagttctacgtaagactgtggctatgaaaatggagactcagttttggaggcagaattctaagagagccccatgatgtccacgccctagtgtcataccttgaacactcccctcccctttagtgtgggtggacctatgacttgtttctagctgatagaatatggcaaaggtgatgagaagtcattcctatgattttgtccctttctataagacttgtcttagcagactagagtaagactctgatgctgatcttgaagaatagccatggactacctctggagacagctatgtggcaggccactacaggtagcctctggctggcagccaggaataagtgaagacaattatcacatggctgcaaggaagtgaactctgacagcagcctgaatgagcttggaagaggat

SEQ ID NO: 518440 - DNA, 373 bp, Homo sapiens
tttctgctggtgaaatctcaggtctttggagtttcctaaagaccctggtcatggagcccttgacaaagttcctaggctgcaataaagagattacatggagaggaagaaaatttgcagggtagcagaaagacatggatagtaaactgtgtattgattttgctttaacttaccacatcttcggccattcccatgcaaactttttctggagagctcataacatgcaaaggcaacggsacaagtttaatcttccttcatcccccagtggcaggattagaaagccatgaactggccaaagatcagacagaaagaaagggaaggaggcaaagcaaatggcctgagttatccctccctggaccattccagtaccctaact

SEQ ID NO: 518441 - DNA, 412 bp, Homo sapiens
ctgccaccccttggatgtgaagtttgtggccaatgtagagattcatgaaggtgagagcggggagaaggggagcagtcaaagttcgttctgtgtcgctttttggtgtagctgggtattgcagagcaagagaaayaacagaggagaaaatgaaggctggacaaaagctatcagcttggccaaggtagctattagtaggcagaactgggatttgattccagaaactcatggctctggagcttggattccatttgttccacctcatctgagctgtcctttgaggctgtatttagagtcaccattccacactggggtagcaggagggctattgtgcttttgcatacaagttatacctgtgaggatgttaggtctacaaatgtagaaatagcttggacgcaagctgtcgatagaataa

SEQ ID NO: 518442 - DNA, 546 bp, Homo sapiens
ctgggttcaaagacttacagtagagaggacagaggaaactctagggattcctatatatatrtgtgtgtgtgtgtgtgtgtgtgtgtgtgtgtgtatatatatatatataaaatctggaagtagaacctctctactttaaaccaaaatgaatgatttttccttaaaaggcaaactcctcatgacttgcccttcaaaggctttgccctgagccctataaccaggaggatcaaatgccctagtttgccccagtttcaatttacatctgtcatcacagcataattactaacaatgcctccttgcactctcagagtttgccagtttggatgacaaatttcccacagcgactggcctttcagctcaacattgagcatgcacttgggggtaggtgaagagggtaagtgagctgagcacagatgaagcagggctgggattccctcaactcccccagctcctagcacccacctctgtcacaccaggggccaccaggcgcaaaatcaagacctggagccagaatggggagaaaagcagaagagcttcccctgttca

SEQ ID NO: 518443 - DNA, 546 bp, Homo sapiens
ctgggttcaaagacttacagtagagaggacagaggaaactctagggattcctatatatatgtgtgtgtgtgtgtgtgtgtgtgtgtgtgtgtgtrtatatatatatataaaatctggaagtagaacctctctactttaaaccaaaatgaatgatttttccttaaaaggcaaactcctcatgacttgcccttcaaaggctttgccctgagccctataaccaggaggatcaaatgccctagtttgccccagtttcaatttacatctgtcatcacagcataattactaacaatgcctccttgcactctcagagtttgccagtttggatgacaaatttcccacagcgactggcctttcagctcaacattgagcatgcacttgggggtaggtgaagagggtaagtgagctgagcacagatgaagcagggctgggattccctcaactcccccagctcctagcacccacctctgtcacaccaggggccaccaggcgcaaaatcaagacctggagccagaatggggagaaaagcagaagagcttcccctgttca

SEQ ID NO: 518444 - DNA, 436 bp, Homo sapiens
acaccccttcaaagtgcttatttttatccccatattcaaatgaggaagcagaggccacatggcaaatatatggaggagctgggacgagatgtttaagattgtttgcaaaatgcascatccttccaccatcccagttcccatggctttcaagagtttatttccagggtctctgaacaatgaagcagcctcctcacatcttcgctctgactaccaaaacttttaatagaaacctggtaattcccagcaaccacgggctcaaaggcaataatctgttcactaggccccttcccctaatatttcttaagccaccaaaaaatctggtgaagatctccaaagattttcatgatagaaacatgtcctgggcaagcctaagagttacagctacagccttgggtccaggtgccaaggtcagccttgcaaagttctagtcctggct

SEQ ID NO: 518445 - DNA, 436 bp, Homo sapiens
acaccccttcaaagtgcttatttttatccccatattcaaatgaggaagcagaggccacatggcaaatatatggaggagctgggacgagatgtttaagattgtttgcaaaatgcagcatccttccaccatcccagttcccatggctttcaagagtttatttccagggtctctgaacaatgaascagcctcctcacatcttcgctctgactaccaaaacttttaatagaaacctggtaattcccagcaaccacgggctcaaaggcaataatctgttcactaggccccttcccctaatatttcttaagccaccaaaaaatctggtgaagatctccaaagattttcatgatagaaacatgtcctgggcaagcctaagagttacagctacagccttgggtccaggtgccaaggtcagccttgcaaagttctagtcctggct

SEQ ID NO: 518446 - DNA, 557 bp, Homo sapiens
gaggcctcctttgagactatggtgcagcacaacttttttctctgccaaatcctgttttcctcccttcctttccaaaggtgtcgattgacgattatgtcttaacaattcaccttcatgctattctctatctcaggatccacctccaagggaactcaacttacaacagttagtgccacaagtggtcaagaaagcagaggctgggatgggattttagagctggatcatttgctgcccagttgccagtaaagagcctatcactgatagaaggtggagcatagataactcctgacacaaatcacaacatagcagtgctatcgttaaaattttcactgacagtgaattagaattgcatcccggtgatcaatcaggcacagagaaattccaggaaaaattaactccaaagaggtggaactgggtggctactgctaaacttaatgttctagaaaaagatggcaagaagtgagtgtttaattatcaactaaaacttaagtgtaaaatctagaagacattctctgtagcttataaacaagctctcrtcttgtgggggtggcagtaaa

SEQ ID NO: 518447 - DNA, 575 bp, Homo sapiens
ctgacttgtcaggagaacatattaacttaaaaacatgtatagtacaaatcaaatatgggtgcagtttactaaaaatttatgtattagaaatatgaaagaaaaatctttgtgtagttgtgaaactacaatttagaaatgtatcattattagtattattatcactaaaattttaaaagagctacaataaatttctgaaattttatttcctatgaaatatatcaagcaatttatttaaataacccttctattaaaatttcagatggtttacagtggcccaaagcaatggaaaatattagaatttgaatcttacaaagaatcctaraacttatgtattgatacttgaattccattcacacctctttgacaattattcattccacctctgcttgagtacctttagttatgggaaagcggtgattcttgatctggtgtaatgttcttatttgagtagaaacatgctctagtttatacgtgatgctttcaaattatgatgcccacaactaaataaattacttcacatcacctcctttattatgaattgtcattcatattcaccaacatcgccgcaacttttt

SEQ ID NO: 518448 - DNA, 638 bp, Homo sapiens
cagctgcctatatccaatgactgattgatatggggtatatcaatcatcccatatatgggcgtagaaaaaaactcacaaacttagcccaacttgraacaactctgatgggcttcgtcagctccagagctccttcataaaaattccaatcaaatttttaaactctaacatgattaatttttttttaggaaagtgagaaactgtttttattagtaggaactttacatagtatctttgatactatggtaagagttatttaaaaggtttaacttcacctattgattttattatcttatattttggttttatttcactacaaatattatatattgttatatattgactatattttgtgattcagtttgtattcatgagagattcctgcattgttttgtggacaaatatttcactgttgtattggccaaatttttcaaatatgtgccatagatcacaaagatcacaatggtgatctgaatggtgagaggaatgaggtaggtgagttggaaagagggcagaaaagaactagttttattctggttgttatcataaattttttaacactattggctttttaaaataattttctcggaattcttgggtaaatatagaaacaatgtaatttaaaagggaaagaaaaatag

SEQ ID NO: 518449 - DNA, 476 bp, Homo sapiens
tgtgtttttaatcttttgggattcaaattttgaataattaaaacagaaaagaagtgggggatcttaacaggggtgagccaggggtttgcttttgtagggtgagcaagtttttgtaagaaagcattcaaagactcagcatgagagaaaatccactgctttgaatccaacaggacactcctttctttggaggattgtttctctgccttactaaagccatatgacaattgcttaggaaagaaattaatatgtttagatgataatcatgtaattaacatctctatagtaagactgaaaggagtagtaaagcagtattccccaccccctagcccacacccccataccctgccatggagggagagctgcatggcttgkttaataagaataggtgaaccagatttgctcatgagtgacttcgtgtcagccttggtcctccataaaactcccgtaaactttctgaactgttgaagctaaaaagg

SEQ ID NO: 518450 - DNA, 451 bp, Homo sapiens
aaccagagaagctttggagacaawtatacttaaaatgggcaaggataagcagttaggctgtaagaaggggacaaaatgaaagctgtcccctgacccagacccttcagaatacctatcaggcaatcgagcttccacaacctagataataaaaaaggaacacttctccagagaaactgaaccaccccaaagataagctatttgggtatgcctagtgataagccagtgcccgcttaaagttgcttacaagtaatgtccaccaaagaggagtccaccattcacacagaggttctgtgatggttaattttagatgtcaacttaactagtctaagggatacctagatagtgataaagcatcatttctgggtgtgtctgtgaggatgtttctagaggagattggactgtgagtcagtggacttggtggggaagatccaccttcaacgtggacagataa

SEQ ID NO: 518451 - DNA, 594 bp, Homo sapiens
gctgaacgaaaaaacaggacttgcttaatgaggttgatgagttccttgttcaaagaagtagccccagtaaaataagagctcagatcccctttttgagcccttttattgcaatgggcttgtgtcgtcatctactgttttaccattggatcctctctgttctaatgtttgatatgtctctgaatgatctgacctccatgctctggctttcttcttccatttggcctcctcagataggcttggtctctcatttcatttggattttatttttcccatatagtgcctgtcatttctgtctgcattaaaaaaaaaaatcacctacccatcatcttcctaccatactggtttcttcctttcttacrcttccatagagtttcaaaaaacatattagtcattttgaaagtgttcagtgttgcgtttggcactatttagggcctctgtctctggatgcttcttccttgctctcctcctcttagcctacatcagtgtctcttttccctccagattagaggcaagatcaagtcttgcctactacctcttttgtaaataaaatgttattgggacacaaccacactcatttctctatggctgctttca

SEQ ID NO: 518452 - DNA, 612 bp, Homo sapiens
aaaacaggacttgcttaatgaggttgatgagttccttgttcaaagaagtagccccagtaaaataagagctcagatcccctttttgagcccttttattgcaatgggcttgtgtcgtcatctactgttttaccattggatcctctctgttctaatgtttgatatgtctctgaatgatctgacctccatgctctggctttcttcttccatttggcctcctcagataggcttggtctctcatttcatttggattttatttttcccatatagtgcctgtcatttctgtctgcattaaaaaaaaaaatcacctacccatcatcttcctaccatactggtttcttcctttcttacacttccatagagtttcaaaaaacatattagtcattttgaaagtgttcagtgttgcgtttggcactatttagggcctctgtctctggatgcttcttccttgctctcctcctcttagcctacatcagtgtctcttttccctccagattagaggcaagatcaagtcttgcctactacctcttttgtaaataaaatgttattgggacacaaccacactmatttctctatggctgctttcatgctaccacagagttgagcacttgcaga

SEQ ID NO: 518453 - DNA, 476 bp, Homo sapiens
gtatgcctgtggaagtccaagtgccaccattaatgaagaaagaagtccccggagaaggaagtcaaacacagaagaaagagctgagaggtgcagaaatggagaaagagtgaaacaccggaaagattaaatgagctgggtggtatcatttgataccctggatccagccattcctcaaacatctatccctggacttttgagtttcaagagccaagaacaattggctactcttgctgaagctagtttgagktaaatttctctacaaattaacaatgtagttaaagagatacctccttaaaggctcaattggtagaaaataaagtactgtctctaaaggatcacagaacgttgagttagattcaatggcagagactgcgagaaggagcctccagggcaaagtcatcatttatctttaaaatagcactttaattttctagtaaccttggtattgggtcaaaaaccttcctataattagaaac

SEQ ID NO: 518454 - DNA, 476 bp, Homo sapiens
gtatgcctgtggaagtccaagtgccaccattaatgaagaaagaagtccccggagaaggaagtcaaacacagaagaaagagctgagaggtgcagaaatggagaaagagtgaaacaccggaaagattaaatgagctgggtggtatcatttgataccctggatccagccattcctcaaacatctatccctggacttttgagtttcaagagccaagaacaattggctactcttgctgaagctagtttgaggtaaatttctctacaaattaacaatgtagttaaagagatacctccttaaaggctcaattggtagaaaataaagtactgtctctaaaggatcacagaacgttgagttagattcaatggcagagactgcgagaaggagcctccagggcaaagtcatcatttatctttaaaayagcactttaattttctagtaaccttggtattgggtcaaaaaccttcctataattagaaac

SEQ ID NO: 518455 - DNA, 516 bp, Homo sapiens
tttaaccagtactttatgagattgtagactactgaaacagtgtaataggctaagagacatacatgcctgaataaatactgactgtakgaaggattatttttctgagatcatgttgcaattagtgatgacggtgacaacaaaggtcatggaatacagtgaacctttaaataacacaaccacacgtcagaaattaaaattttaattttaggtaacatttgtctccttttgctcttatatgtaagtaattaaaatccctctttttcaagaaagaccaaggggattatggtgcacattatgtttttctccagaactctaaaaattcagaaaaactgggtattcagggttttattgtatatgtgagtatgtccactaggaatactttcagaaggattttgtcataattgccaattttgtgaaaatggaatttgaatggacattaatatgaacattaactaaatagataaaatcagacttagaatttagttcttggtaagtgttcaattcttccaagcactt

SEQ ID NO: 518456 - DNA, 547 bp, Homo sapiens
aatgcctaggggaagaattcagaaagggagagactaagtaggaaaagagaggaaaacaggtatgacaaaagtcctgaaccaggctgaagctgaggtacaggggtaaagtgggtaatctggggtaaaggtgaaggaatcggcctttgtttttgtaggaaagatgcatcctatgttgcaaaagaggtgaaacaacgaggacaggacagatacaggtgggtttagagatttgacagtggcaagatgaaggtattcctgccttatggcctctttttttactctgaaaattatgaggcaatgccatacactgaagtgatgagataaaagtgcaaacctttgagagtaaatgagatagtctaagtctagaatgtattgtaaaagtaataayattctcagatcagaaactttgaagcatattcacctttaaagagtcaggggaggaagaaaaatatgtgcagcagagtaacagtgggtggacgtaggcagaaagagagcaaagaggccaggttatgccaagaaagggcaaagtttgcatgagtctccaaaggga

SEQ ID NO: 518457 - DNA, 650 bp, Homo sapiens
tcaggcaccattcaacataacagagagtagtttatagcaacttaagacaaactgcaaaaaggcaagggcttctaatacatgaataaagcaaggcattttaagcacccataaatttctgccaacttaatcagaaatcttccagtgtccgcttgtttctctggcaaacacccacttttttaagacttctcataactactctcccttttcagattaatctcatagaatctaasctcattgaaccagctttttcttaattttgttacagttttgaaatcctgtatgtgcctatttataatctacttcacttacataaccattaaaaaaacaaaaaacaaaagaacaaacaaaaccttatgttttgagggcaacaactaactgctggcatatggaatgtgacactcaaatacttccgaacttagaaggtatctttcaagacttcttcatttgacttagcagatatcacactgaaatgtaaaatgtaaatgtcctaacacactccagagctggccatgtgtggcctgctcttactgtaaaccagtgtcaaaagacagggaacttggttacattaatcttatatgaatttcagtgagtcaggctctcattcagtgactctcacaataagctggggatggatgttttttttcccctca

SEQ ID NO: 518458 - DNA, 650 bp, Homo sapiens
tcaggcaccattcaacataacagagagtagtttatagcaacttaagacaaactgcaaaaaggcaagggcttctaatacatgaataaagcaaggcattttaagcacccataaatttctgccaacttaatcagaaatcttccagtgtccgcttgtttctctggcaaacacccacttttttaagacttctcataactactctcccttttcagattaatctcatagaatctaagctcattgaaccagctttttcttaattttgttacagttttgaaatcctgtatgtgcctatttataatctacttcacttacataaccattaaaaaaacaaaaaacaaaagaacaaacaaaaccttatgttttgagggcaacaactaactgctggcatatggaatgtgacactcaaatacttccgaacttagaaggtatctttcaagacttcttcatttgacttagcagatatcacactgaaatgtaaaatgtaaatgtcctaacacactccagagctggccatgtgtggcctgctcttactgtaaaccagtgtcaaaagacagggaacttggttacattaatcttatatgaatttcagtgagtcaggctctcattcagtgactctcacaataagcyggggatggatgttttttttcccctca

SEQ ID NO: 518459 - DNA, 364 bp, Homo sapiens
agtggccactgaagcagaggccaggaagcatttttatacctaaccaatctgccaagggtgcctcagaaggagagagcaagattctaaacctccacatttagtttcccccaatgctttaagttgaggcgaagataaatatctccacctcgktaacatgggctagcaataccacgctgtccccagatacttccctgccagtctgagcttccataactgataagacatccttccctttgcttgaatacttcacttctccatcaccttcatgacacatagatgaaagcatgctcctgaacaaaaaaaataaaaacaaaaacaaacaaattctaacattgataagagacaattagcgcacagtgggcaa

SEQ ID NO: 518460 - DNA, 529 bp, Homo sapiens
ttaaaactgactttcatgcaatcgtcacttgtcattggtaaggatcccctaaaaggaaatcctatcaaagtaatctcctttcattaaggtcactaagaaaataagcagagagagataaacttattytgttccataacaaagaatgtatttcatgtcataggaagagtaggaaagaaaaggatgtggtgattatctgacctttcagattactgcatatttgagttgctgaacaaaggacaagagggctgtgaaatacattttgaaaagaaagggttactcacttcatttggaaaaagtaagatcctgtgtcattcaactcaactggccaaaactccaaaacacaatcatgcaaagcaattctcgaggaactccttgggttcagctccacatgttcctgtgatccactgcttttgtaccagcttttggtggttgtttcaatctcatgtgcaagtgaacacgagcaatgtttcagatagaaaggttccccttcaaccacagtaatgtggggacgtgaagtacaagattcttc

SEQ ID NO: 518461 - DNA, 207 bp, Homo sapiens
ttaaaactgactttcatgcaatcgtcacttgtcattggtaaggatcccctaaaaggaaatcctatcaaagtaatctcctttcattaaggtcactaagaaaataagcagagagagataaacttattctgttccataacawagaatgtatttcatgtcataggaagagtaggaaagaaaaggatgtggtgattatctgacctttcagat

SEQ ID NO: 518462 - DNA, 529 bp, Homo sapiens
ttaaaactgactttcatgcaatcgtcacttgtcattggtaaggatcccctaaaaggaaatcctatcaaagtaatctcctttcattaaggtcactaagaaaataagcagagagagataaacttattctgttccataacaaagaatgtatttcatgtcataggaagagtaggaaagaaaaggatgtgstgattatctgacctttcagattactgcatatttgagttgctgaacaaaggacaagagggctgtgaaatacattttgaaaagaaagggttactcacttcatttggaaaaagtaagatcctgtgtcattcaactcaactggccaaaactccaaaacacaatcatgcaaagcaattctcgaggaactccttgggttcagctccacatgttcctgtgatccactgcttttgtaccagcttttggtggttgtttcaatctcatgtgcaagtgaacacgagcaatgtttcagatagaaaggttccccttcaaccacagtaatgtggggacgtgaagtacaagattcttc

SEQ ID NO: 518463 - DNA, 484 bp, Homo sapiens
tgcaatattcctgttgctacttttaacaatcggaagacattctcataatcttttactcatttttttttgaaatgctatttacttccaattaagctagcccagtgttttacatgataaactttcaataaatgtattgaatgttctatttgaatttcagatagttttccaatgagattttgccatataattcttttaaaacgtaatatgagatccttgcctggcatctacaggtgataaaaatcacttcgaaggagatatttatgacactgtaatcttaatggaaatagttaatttgtagccattccatatttttctattttgcttttcttttyctatagaaataaaaatattttcaccaaaaagtataaacattgatgtaaacctctattagcctcagataaggtactttaaatcctagctttccagtagttccttctgtaataccttgaatccttcagcacaattttagattattagataactt

SEQ ID NO: 518464 - DNA, 541 bp, Homo sapiens
tcacttatcctaaacacctattttaaaactaaagcaaaaaatatatataataggtctcataatcatgagactrgaactaaggtactgaaattgcaccaacctgtctttataaactattttcctcaactcttctctttttgttctttatgagttctatgtgattatgtagataaaccatatattcatcccatttctctttttctttggctcattagagccaggagtacaatttaggaagaacttgatagatgtagctaaagccccatccatgcatttatcccaattccacagtctaattcaattctattttatttaaaagatattgctaaacttccactgtatggcaacattctaaatactgaaggtggtagaagaataaatacatacagttcactctggtataatacttcttttaaaaatgcacattagtctcaacactactgatatattatgaaacagtttgagcgtaatacaaattttgcattggcttatgcatgatttcatctgtgagaaacactagctgaatgcagaaaattgcacc

SEQ ID NO: 518465 - DNA, 537 bp, Homo sapiens
ctgaattattagcatgtaatccactcatgtgtttaagccataaatataagcatcagccttaatgtcttgcttatcttctttgtttgcacccagttccacaccaaaagttccacatattctcttactcatcttgtgtatctggccatatcttttcatacttggggccattatcctagtgccattatcctcttgtttggactatttttaaagttttttcattgatctcctagatttcagtcttgcccactatcaatgcaatttctatattgagccatccaaaaacatatgatcgccctactctctgacctaagatattaatgtgacctgtgatgtccttcataattgccccttgcttgcctctcacatctcttcttactctattctggatattcgagtcacactagctttcaytgtgttttctgcatgttgtttcttctttgaacatgctgtcactactcctggaatcatactttcctaattcctctcttttatgctcctgactcatcttcctatgtcatctccttcagtcagccttct

SEQ ID NO: 518466 - DNA, 623 bp, Homo sapiens
ttgccatttaggttattattgccattgttcttcttctgttgtgtttgaaataaaattctggtttagyggttcttaggatcatgaggcacaccagcatgtcaacatcacctctgaagtgcatagcaagtaatttgtaaccagactttttaaatgattcattcctttttaaacacgttagtgtataggcaaggtcattcccataacttatgctctttctgctaatgccttgaatgggagaaaaaggaatggatattacaataagcttacaaaaattacatatatctcaaacctacaataagtgtctattttggctgtattaatattatagctatatcagtagctataattataaattataatttaaaaatttgtgatagtagggggtgtttatccaagcctggtacctgtccaagaatattttatacctatgaatgtcatttttcatgctgctcatggatcagtgaacagaatttgatactttttgcccttgtgggtcaaaaattaatgcaatgtgaatagctaatatagtctacaaagaagcttaggtaaatacaaataatgacaataaaagcaataataaaaattgtgaaatgtagtcaaaccagattggaaaaaatatggta

SEQ ID NO: 518467 - DNA, 594 bp, Homo sapiens
tttcatttttttcttaaaataattgatggtattttatatgctgatttgatttatggaattatctgataaggaaaatttatgtgtgttataatcaaggtgcatgataccctatcaaactagtatttgacaaccctaatagtcrgtgatatatgcagaatgaaataggaaaatatcaagtaaaatactttttaaaactgagaattttgcagagattgaataatcactttaggccatacttctcagaaaggtattgggctttgttgtgagaaggcaagaaatgaggagggcctagaaatggaaacaaacaaacaaacaaaaaccatgcaaacagttttaaatactatttattgggttctgccatgtatcaggttctgtgctaggtatttttgcataaattacacattcctgacaacacagacctgtttaaaatacctgtatcatatttgtttttttttgtgtatatatatatatttgtgtgtatatatatatatactcaatatgtatatttttctcccaatataaagagaggttaagtacttatataaagagttctaaaggtatgaagtcaggatttaagtcaactttcccctgact

SEQ ID NO: 518468 - DNA, 501 bp, Homo sapiens
tttaatgcagtgctattataaaaacaagttactgtctggsgtatgagtgaggctgtgtgtgtttgtgcctatgtatgtgtgtggctgtgtgttcccaactaaatacatattgcgcgtctcccctctcgcggttagcagtcagtagcagtttggaggagtttgttttggtccaaatgagaaattaagtgcggataagtaaactaagctgccagagggcgacaagatgttgagtgaattgcttttagatgaaacaaattaaggaaacgagggaagacaatctgcttctcgcattattagacacgcttggagttcaggggaaagtggcatatttttgaaatgctaatttcttaagcagaaggaatgcaccttatttactgctctatgtgaacagaataaaaatatagggcgggggatgctgttgtatagatctttaagatatttcttaattgtaacagaagagaacctcttttttcttttgcttggaaaaaaattcagcattag

SEQ ID NO: 518469 - DNA, 521 bp, Homo sapiens
tttatacttaagaacaatcagttgagaatataattctgtaataattaatcatctcttacagatttctatttcttctacttgtcacttaatctkgtactctatttatcccatcagatttgggctccaaaaatattttacacttatttagtgtatgcaatattttctgatgactgaaatacagttttgttgtagtgattttgataaaagtgaaatacatcaattcagatttttcttaatctacatattgttgtcattctttataccaattttattttatgttagggagttagaagaattattttgaagctgtttttgaaattacattttcttcattgcaaaatgttgctataaaaatcagatttaattttaaaaatgctctagaggaagtgtgtactacagtttacttggtaaaccattatttccttaagataaaaatatttatgctttttttttcttaattttgttttcaattctccttcaagggtgaaataaacctgaaattttaaaccattaaagaaaga

SEQ ID NO: 518470 - DNA, 656 bp, Homo sapiens
ctctgcttcctctccttacacctcacacatcctttatgctcagcttctaagactcttcacttacaatgaatttatttgaattttaggggcaacgtgagaatatatatttcagtggaaccatgtcctctgccatccatagctgtcatccagaaaatatttattgaatacccactactctattagaaaatgatcataactctcctccctcttacattatccattatttggacctgaggtaaaatgttgaatcgatcaaaagtatttctcacatttttggtctttatttgatggaaaatgctcaataaattggacaattcactggacttgagcttaagatctactattgattgatattattatttcatgtattcaaaaaatacttactgagcacttagtatatgccagatactgttctagacacctgggatacaaaagagataaaatttcctgttgtcatgagctttccttctagaagggaaagacaggcaatgaacaaataagtaaaatacagcattttaaatgrcaataagtgctacagaaaatgaaaagcaggactggggacaaggactgcttggagaaggttgtaattttaaataaagtggtcaggaaaggccacacggacaaggtgatgttggagaaaagatctgaaagaaatc

SEQ ID NO: 518471 - DNA, 581 bp, Homo sapiens
gaggttacttctttacacacccatgcaaaagccacccatcaagcgacaataaaaggaaagcacgcttagccctcaaatttcccgtactttaaatagaccctgaattcaaggacccaggaataggaacagctatcagaattgagaaaggccttcaaaactagttcacatcatttttatacattaagattcttcaagaaaataagataaatgtgaaaccaaaacttctggtgccaactttttcaggtcttgcagcgatgctggagcaacatttttccaaaagtaaaaatattgtaagactttcctagcaataatcaatgtaccccatgtttttgttcttttccaccccaacatactatytactcaggtacatcctcatctgctagaaaatgttgcttcataaccctggaatcacccatggagatattttctcaaaacctcctaagttactgacttctttcttagaatgcaaatgagtcattgatttccaatatgtgccatcatgttatgatagacatgagctaatctttcagattctcaatgcttcttcaccttagcatattactcacatttgccaggtgaaa

SEQ ID NO: 518472 - DNA, 626 bp, Homo sapiens
agaattcagagctattcacaaaaacttaagacactggtggggacaaagtaaaaaagtaatgtttggatgattacatattgatgctatttaatataatagcagttatataacaattcctttggtaagatgtatataaaagcttttagtttgactagtattacaacactttttgttaaaacagaccattcgaagatgggactcttctgtaatcagtccaatatatgactatccaaagtcacaagaatatgtacagattgaccaaagttgtgatgactttatattgctaaatccttcaattaatagagagacagtcttgatttgaaagaacagtggagggcaatactttcaaatagttctgcttatttaacctttcccgctttacctcttaaattcctaatataaaaacagctaacatttgtgaargatttattatattccaggttccatgccttatgccacttaaataaattatttctgacatttccacaagacacaataagggaggtatctctaccatccctatttctcagatgaggagattgaagcacaaagaattgaactaatttgcccaagtagtaggttgaaaattagggattcagattcagctccacaggactccagaaaca

SEQ ID NO: 518473 - DNA, 646 bp, Homo sapiens
tgctctgtagctcttttctgaccatgtaaatcacagtcttcagtcttattctaagtcttcttgatcaaggtctcagccataagtaaagcagagtatcctgccttgcatgaaagctcatggtttttgctgccagaactctcttcctactacatctttctccccatatatttcctgcagtgtttatttttaattggttaaatgactggtgggggttcatggtatttttatatgtaataattggccttcacagctctttacgtttataactagaatgcattttttgaagcacttctgtattttatgaaatttgagaaataacatttttcattctcaaaaagttctttcatatatactacagtacttcagagaccatgtagtatattggttatgagtacaggaactagattctatgattgtatatcttgctacttactagtagtttaactttggaaaaattacttaatttcttcctatctcagtttgctcatctgtaaaacaagaatgataataagtagtaccaccattagatgcaagcaggtaaagcccctgccttgggtactgccttgtggagggtaggraggaaaagggttccttaaaaatttttatgtacccttccagtacctacaactggccagggctggcagtg

SEQ ID NO: 518474 - DNA, 540 bp, Homo sapiens
ctctctttggcactatactacaaaaaggcaattaatctgtatttttaataaaaatggctagcttttaaaactggaaacaatgagtcattcgtctayacaacttttagacatttgagtttgccagtcaaaaaatgcaggataacacttaataatgtgagactagtattttagggagacctcaagtatccaccactgtgctaagtgcctaacactgaaatgtcacaacctcaataattactaaaacctcataaagaagctggagttatccctttttacaagagaggaatgataactttaccaagatcactaagttataagttcaaacccaagtctgtctgactccacagctcaggttccttctctctgttgtgtcatatttcccatgtgttacacttccagtttctaccgtgaatgcactgtcttatataactaatattctacatgtcaattctgtaaaatgcatgcatttaatctgaagacagtagaatctacagtttaatcctataatcaatatcagtgcccactgatagtcattcttct

SEQ ID NO: 518475 - DNA, 542 bp, Homo sapiens
aaagtatcataatgaaattttattatatatctttaaatgaaagtaaaagagggaggcaaaaatcttcatacaacattcctaccataataaaagtttctacagagttaatacattaagtcctcactttaatgttatcartaggttcttggaaactgtgactttaagcagatgatgtggaacaaaactaatttaaccacaggttaattgatataaacaagagttaaattcctgtagtatatttctgattacaaaaacatcatcaaaacttctaaagacctaaaacatttctaatacgaaacactgaaataaatgcggagtatgcatacatttgagaaagtttaataaaaacaagataacgatttacccaatttttgacaaaacaatgagtgctgtcagtagtagtggtgatgggttaaattaaggaataaatgtttgcaaagtgaaaatcgttaaagagcacttcctattaccatgcagtttaaaaacaaacaataacaaatatgcgggttcactgagccctttcataccacatcgttattatg

SEQ ID NO: 518476 - DNA, 542 bp, Homo sapiens
aaagtatcataatgaaattttattatatatctttaaatgaaagtaaaagagggaggcaaaaatcttcatacaacattcctaccataataaaagtttctacagagttaatacattaagtcctcactttaatgttatcagtaggttcttggaaactgtgactttaagcaratgatgtggaacaaaactaatttaaccacaggttaattgatataaacaagagttaaattcctgtagtatatttctgattacaaaaacatcatcaaaacttctaaagacctaaaacatttctaatacgaaacactgaaataaatgcggagtatgcatacatttgagaaagtttaataaaaacaagataacgatttacccaatttttgacaaaacaatgagtgctgtcagtagtagtggtgatgggttaaattaaggaataaatgtttgcaaagtgaaaatcgttaaagagcacttcctattaccatgcagtttaaaaacaaacaataacaaatatgcgggttcactgagccctttcataccacatcgttattatg

SEQ ID NO: 518477 - DNA, 269 bp, Homo sapiens
cctagaagcaaggacatcccagtagaaactggaatggggagttatattccacctccttgagggtaaaggcactatataaaatatttggcattcttctgctwaggaaacttatctgtgttcccttgtttatttgttcgttcatttatattagtatgtactcatggatatttcccaggtacaagcacacccattgcccagatcttggtttctttttttttttaattatactttaagttttagggtacatgtgcacaaagtgcaggttagtt

SEQ ID NO: 518478 - DNA, 637 bp, Homo sapiens
ctgcacagtggggtggtttagagtggacactctgaagccaaactgcctgggttccaatcctctgtttactagctcttggaaaagtgagtgtgtggaaattgccttatctgtaaaatgcaaataacaattgtacttatcttataggttgttgtgaatactgactgtgatatatatggttcggaatcattcctggcaatgtagtaagagcttaatgaaagytggttaacattattattgtgtggtgttaccgatactaatgagaatattaatcttggcatagccagtgtctagtacagcgattgatagacaggcattctacaaatattggtggaagggatgactcaacataagctatatccaactatcttactatttaatttcatagctacatttcctccagcaatatacctgacgtttcgaaaatgtcctatcagggtagctctgtgaaagcggaatgctacaccttgagttttgtcatgaaacccattgaagtacattcatagagagtgtaaacaatggccaagagatactttaaaaatctatcacaagctgaagaaattatgacacatggctggagatcccccacccctgaccgacacggcatcgtcccttcttacttacaatagccacggaagga

SEQ ID NO: 518479 - DNA, 637 bp, Homo sapiens
ctgcacagtggggtggtttagagtggacactctgaagccaaactgcctgggttccaatcctctgtttactagctcttggaaaagtgagtgtgtggaaattgccttatctgtaaaatgcaaataacaattgtacttatcttataggttgttgtgaatactgactgtgatatatatggttcggaatcattcctggcaatgtagtaagagcttaatgaaagctggttaacattattattgtgtggtgttaccgatactaatgagaatattaatcttggcatagccagtgtctagtacagcgattgatagacaggcattctacaaatattggtggaagggatgactcaacataagctatatccaactatcttactatttaatttcatagctacatttcctccagcaatatacctgacgtttcgaaaatgtcctatcagggtagctctgtgaaagcrgaatgctacaccttgagttttgtcatgaaacccattgaagtacattcatagagagtgtaaacaatggccaagagatactttaaaaatctatcacaagctgaagaaattatgacacatggctggagatcccccacccctgaccgacacggcatcgtcccttcttacttacaatagccacggaagga

SEQ ID NO: 518480 - DNA, 480 bp, Homo sapiens
tgtggtattctggaaggaatgttggtttgagttctggctctgccatttaattactggctaaccctggaccacatacacaatatctctgtttccatctcctcatttttgaaatacggattctaatctgacctgaacagtgctgtttacaaacatcgccttgtgctctataaagcccyattatgatttcaacaaccagcaagataatggcttatgatatctaagtcctggcaaggagaatgcgggtgtgtaccttgctatattcagttgaactctgcatcacatacagaaggctgatagaccttttagctttcctttttcctccagtagtgtagcttgtggccatttaagttttacacaagagaatagaaaagagagataaaatttgctaaaattcaaatagtctatttgtgtttgtttctagcctcagtgaaggttttggggagaggggtagctggttaaaagagtagaagcttaagagtt

SEQ ID NO: 518481 - DNA, 480 bp, Homo sapiens
tgtggtattctggaaggaatgttggtttgagttctggctctgccatttaattactggctaaccctggaccacatacacaatatctctgtttccatctcctcatttttgaaatacggattctaatctgacctgaacagtgctgtttacaaacatcgccttgtgctctataaagccccattatgatttcaacaaccagcaagataatggcttatgatatctaagtcctggcaaggagaatgcgggtgtgtaccttgctatattcagttgaactctgcatcacatacagaaggctgatagaccttttagctttcctttttcctccagtrgtgtagcttgtggccatttaagttttacacaagagaatagaaaagagagataaaatttgctaaaattcaaatagtctatttgtgtttgtttctagcctcagtgaaggttttggggagaggggtagctggttaaaagagtagaagcttaagagtt

SEQ ID NO: 518482 - DNA, 592 bp, Homo sapiens
gccagtggaccaatggaagaaagagtcagtagagcccactttagtcccggttatgctgttatgttgtcacttattaacctatattgacatttgttctttatctataaagcagagggtttgaagtgtgtgcaggttgtgctgttatgtagtcacttattaacctatattggcattgaatgtgaagtcagctttaaccaaagtccagtgaagacctccctgccttakcacttagagagtagaagactccagtattttctggcttaaactctactattggttttgtttttcctctaacattttatgatgagcattttcaacatacagaaaagttgaaacaactctagctaacccttatataccacctagattgcactattatatttgtattatacttgattcatcatttttatctgttcattcatgcatctgtgttactgtctttgggtatttcaaagtaaattgaagacacctatgctttcccctaagtataatctttacttttaaaccagatgtctgccctcttacacacctgaccatgcttctgtgtcttaatttgacctgttacttttcaatagctgagaaggttgagctt

SEQ ID NO: 518483 - DNA, 482 bp, Homo sapiens
cccagcatgctcagggctccttcttttttctcatttctctcctccccatctccagacagcctttacygttcataaaaagaaatgcaggcctaaagaggactgggggctggaagagggttaggctgagtcccattgcccagggcatgaccagggaccatgtggtggcccccaggggcatcatgtggttttccaggccaaggagctgcctggctccatgggccgcctcaggatgtggcccagccggcttcctttgtgaaggcaagccccacacaaggagcaggactcctggaggggacaatggctgtccatcagtgatagcaaattccagcgtccaggccgtgggttcatctggctgccaggctgggctgatggcagcaacgctgaccacactcgtcatttctctgctgttatcacagcctgggagcgggacaggatctgttccattgactgcatttttaaagctgccctgatcttcctttttg

SEQ ID NO: 518484 - DNA, 569 bp, Homo sapiens
ggtgggttttgtgtggctactgaacagtgggggaaaaaagttttggcaaacactcgggaaacccaggacagaggaggtaggtaaactcaggaaactgttttcatgagtaaatgaaggaaacaaaggcctcgcagcaggagcagaagggacacacactccctctgaatagctccctaaaaacagagctgaaaaggaagaaggcccatttgcttctgggaatccaataaattgtttcaggaagtgaaagtctgtccaggctaatggagctgtgattgacaggccttctcattatggagcccatcaggggacagggcattccagtgttatttaggggkcgaggtgggaatgagaggaagccagagcccggggtgggggcgggagcgggggctagctgtgggtgttcattgaaagagtccaggtccccgacagccctgctccaaggacagacaacctcgtcttgcaggatcatttaccttttatattatgacctagccacttctcatggctctaccacaccatcttcccgagagagcctgtgcccgccccacagtcccggctgaaatggcaaa

SEQ ID NO: 518485 - DNA, 284 bp, Homo sapiens
tgacactgcagtgttcttctggacacaaatggactttgctccaagctacrggtcagatttgagtgctacacatttctgttttttcaggctgtgataacaacagctccctggaataaattcttcttataatggatggtaagagtacaagaaggctggctgaaacttgccacactcttaaacctcaactccaacacattgttttttccacgtacactgcattggtctgaagatcacacaatcaaccctaagtgaatgcgaaaggaaaatgcattgtctccacgggg

SEQ ID NO: 518486 - DNA, 284 bp, Homo sapiens
tgacactgcagtgttcttctggacacaaatggactttgctccaagctacaggtcagatttgagtgctacacatttctgttttttcaggctgtgataacaacagctccctggaataaattcttcttataatggatggtaagagtacaagaaggctggctgaaacttgccacactcttaaacctcaactccaacacattgttttttccacrtacactgcattggtctgaagatcacacaatcaaccctaagtgaatgcgaaaggaaaatgcattgtctccacgggg

SEQ ID NO: 518487 - DNA, 639 bp, Homo sapiens
taggcatatactaaggttgcaaaccccatgacaaaagagtaagcatatctcttcagttctaagatattccaaatcawatgcctacatattttctctatctacccaagttacctgtatctcatctaccatctgggcaagaccagtttgtcttcattcacagttctaatctggctagttaccaggaaaaacgtaagaaatgattgcagcagaaacaaatgaaattcaggcacaggcagtgtcctcactagggaacttctgtgtttatggcaacttctgtgatttggcgtcaaattttgcttttgcattcgtgctcttcggtttactcaaccaacaaaaaagcactgaaaatgtttgtggctattcacactagaaacgtttttaacagtttatcaacaaagacccccagatggctatcccatcatgcacggtctgcacagctctaagaaatccttggaatttggtctgttatgtgatcataatcccctccaatgtatcccctatcttacagaggcttttactaaacccattaacctcattctcttttttctgctaatggtcaagtttcttatatggaaaatctgtatctcaaattccatcactttatttacccttttacaaacactgatgggatctttggca

SEQ ID NO: 518488 - DNA, 478 bp, Homo sapiens
tgtttgctttcaattaatttaaaaaacttgttactttttagagttaaaaaaaaatgttccaaaaaaaaatcctttggctgacagtttcaatgactatattattcagaagagaagagtagagcaaattaattgcaatgtaatactgcaactctcccctcagaaaaacatataaactaatttgtatttgcctattttaacactgaaaagaagatagaggagatagtgtttagaaatagctcagaacaatttaatcacatagggtttccatttacatttctgtttgcggatccaacaactgtcccattaatcatcttaaccttgggatacagcagtagaaattttttattcccataatgtctatacaagaatccttaatataaaagtgttttaaaacataaaygagttaatacacctttccaattatgttttattattctgataaggtgcataatcacagcatagtctgatgattggttgc

SEQ ID NO: 518489 - DNA, 410 bp, Homo sapiens
ttgattgttgtgtgattgtaagtttcttaatttctctgagcctctattttctcatctatacaatgggaamctggcttgcagaggtgtcacatgtgaatagtaaataataaacatcaaataattttgaatacacatggaaggcacttttgcataaatagcagtcattttaattgctatgttttggattaaatatttatgctaaaaatgctaactttcatatcattatttataattcctttataaaatatttgatgtctaaaatttgattctaatgcatactcatattttctaatgttatattattaaaagtgtttgatatttagtagtcaggctgcagtatatgccccattatatttttaaatttataatagcaatcttatcacacagtgcagaacaaaaactataacact

SEQ ID NO: 518490 - DNA, 574 bp, Homo sapiens
ggaatgttgaggtgactctccatgggaaacagctagacctttattgggagaaacatgttgagatgctgggaggtctggtctggccctagatttagcttactgagttgtcagatcctggtctaccgacttccgcctcacatcccaaatggcagaggctgtgtggggtgayggagaagcccttaatcctgaaacaggaaccgagtgtgttggtgtatggactggccagcttgtcttcagttaaaatccatcaattcagtaccttttaggtgcccgtgggtgctgagcatgaagaggtggacactgcttaaccattgcaggctaagctatgcatcaagtcatgcagaggagatcaaagggtctcaccagatgactcatttcactgatggtgcatctgagttccaggtgagtcatggggctttcttaggatcacacagttggctccggccaggactgggaccctgatttctcaatggagaatccagtgctccttgcttctcctccaggagccaataaaaaccacagacagcacagtggagagcctttaattggagtctggccccgaattaaactttcc

SEQ ID NO: 518491 - DNA, 574 bp, Homo sapiens
ggaatgttgaggtgactctccatgggaaacagctagacctttattgggagaaacatgttgagatgctgggaggtctggtctggccctagatttagcttactgagttgtcagatcctggtctaccgacttccgcctcacatcccaaatggcagaggctgtgtggggtgacggagaagcccttaatcctgaaacaggaaccgagtgtgttggtgtatggactggccagcttgtcttcagttaaaatccatcaattcagtaccttttaggtgcccgtgggtgctgagcatgaagaggtggacactgcttaaccatygcaggctaagctatgcatcaagtcatgcagaggagatcaaagggtctcaccagatgactcatttcactgatggtgcatctgagttccaggtgagtcatggggctttcttaggatcacacagttggctccggccaggactgggaccctgatttctcaatggagaatccagtgctccttgcttctcctccaggagccaataaaaaccacagacagcacagtggagagcctttaattggagtctggccccgaattaaactttcc

SEQ ID NO: 518492 - DNA, 427 bp, Homo sapiens
gcctcacgatacagaattaaaggcacagttaacatatgggagtcagatggcacacagttcatgatgaaccgtttgcgtttcatgctcrcttgctgtagtgagccagggagtggttctcaaatggaaaactttaggcagaagagggcatgagttggctctggaacaccactgggcttctccagaagcttcattctgcatccttatctactgaattgcagagtaggatggaatacattctacagaagaggaggagtggtgcagccagagagtgccaggagaggcattcatgcaaccagggcacctttcaggcttggtgttcctccaggtcagtctgatattatctggagaagcagtgtgatccactctacttgggtcacttaccaccccctgcacctattaagtgtggccatgaggtcatcatgatgga

SEQ ID NO: 518493 - DNA, 727 bp, Homo sapiens
tggtggaagggtttgattcctagtccagtatgcccaccgccacatttactacctcattcccaaatatgtagtttctgatacttctgctctccagcttcccaaggccaaacaacagctacttttcctgagtcctggatagaataagaaaaggtataacaagacaggggacccttgagggggaagaggaattagtttgaagtgctggcaaatgtagtatttctaatcagatgctagtaaattccatatgtatggcgaggctttcattacttagatttggggagcctctcagcgttttagcaatttgcaatcaggttgaatggatccattgtaaatacttaggaatacttaggaatccacgtcctggccctggcatgcttttcctcggccaggtgcactggcggtcaccttgcctttcattgtgccacgtgcataaaaatacaatgtttgctgtagggaaagataacaggagtgaaaatgtcctctgccctttgtttgaagtataggaccttcagaatgaggctgggctggttccttcagcaagcttgtgctcaaaggctgctatttctaccagcctgaggtaaacggtaataaagtacttgtttatcctacaagtgcattccttgcattgcagatttgatttcctttgatttcttgtcaccamctggaaaccttactttgtttcaggttggtacagttagaaaggtactgaatcttctgattcagacaa

SEQ ID NO: 518494 - DNA, 339 bp, Homo sapiens
  misc_feature (1)...(339): n = A,T,C or G
attttaaaaaggtggatgttataggtgctaaaaagaagcttatgcagttattgaaaactaagtgaaaaaaggaacctattatgagtacatagaccatctttcccttgactgttagagcaagtcttttcttaaaagcagtggattttaatgtggcatgcatattggggcttgncttcttggaatgatcacttatccaccaagctgagaaattccaagcaaccacgtaaagatctctacatggaagacaacaaaagtccctggccarcagccagcctcaacttgccaattatattaatgaggtcatcttggaaggggatcctccaatcctaagttgagcct

SEQ ID NO: 518495 - DNA, 599 bp, Homo sapiens
gacctcctggccttggactccagctgcctcctgttcattgttcttgtgttctttgccttattcatcatttttaaggtacgttgctgactaaatctttaggggtgactgagattgacactgtgaatctaaacctttttgctgcctttcaccttacaagtcacaggagattgaggatttgtggggacagtgtttattctggcacatgagcagagatagcttctagggaatggtttctgttgtgtttccaaggaatggttgtaactgtcaggatccttctctragtgaaaggacctactttttatgtttttgaaaaggggttcatgatttgtattgaaaatctgttaaaattcccaaggttcacaaacccagaatttcttctgcagcacagtgggttgacctgaattgaagctccatctctggtttctctctgaaatgttggcgatgaaactcatgacacttaaatgagagcaagtagggaaagggcctggcctgtgctgggtccacacagaggtcagctcccttctacacagaggatgtgtggggaaagcattctaagtcactggcattttagagcaggtagtctgttgagtttctagcag

SEQ ID NO: 518496 - DNA, 372 bp, Homo sapiens
ataatggtagggatagtatgacagtaattgggcattagcaatattattttaatttatttttaataatataaacaatggtacacaatgtgcaaaggaaaataatatccaaccacctctgctcctgagccacccaggctgttcttttaacagacaaccattgtgcttagttttttgcatattcttcctcaattatttacggagaatattatatatgtgtgaatatatatcatatatgtcttatagattggtttagtaaatgcaaaatgtagtatcaactgataataggcatagttcactaaaratgagatcttaaaatgaatgagggcttctggacctttctcataaatgtagtcagtcaatcggtgtctctct

SEQ ID NO: 518497 - DNA, 372 bp, Homo sapiens
ataatggtagggatagtatgacagtaattgggcattagcaatattattttaatttatttttaataatataaacaatggtacacaatgtgcaaaggaaaataatatccaaccacctctgctcctgagccacccaggctgttcttttaacagacaaccattgtgcttagttttttgcatattcttcctcaattatttacggagaatattatatatgtgtgaatatatatcatatatgtcttatagattggtttagtaaatgcaaaatgtagtatcaactgataataggcatagttcactaaaaatgagatcttaaaatgaatgagggcttctggasctttctcataaatgtagtcagtcaatcggtgtctctct

SEQ ID NO: 518498 - DNA, 400 bp, Homo sapiens
aaactatgcatccaacaaaggtctaatatccagcatctataaggaacttaaacaaatttacaagaaaaaaaaaaacataaaaaagtgggcaaaggacaggaacacttttcaaaagatgatatayatgcagccaataatcatatttttaaaaagctcaacatcactggtcattagagcaatgcaaacctttaatgttcttcaagagatgtgagtaacgatgcatttccttaaatgcaacactgaagccagggcataattctgatcaaagatgatttactttctcattgtgcagaatataaggtgatgatcactgtgcttatactaaacacttcattagattgtgtctatggaatggcaagcagcagaccttaatcttcttattaatttattcccagtacag

SEQ ID NO: 518499 - DNA, 666 bp, Homo sapiens
tttacacctgtgtccttctccagttacttctccatgctaggcagaacaaggagagatgcctgggaagccacctacccacaaccctgggttggcaatgacataaggttcttaagcctgaactccttgcagggcaatacagccctgtgagcctggggaccagaccaaggctagactttgcctaagaccatatccttgtagatcctcctccttttctatcttgctctcctcactctcttacaggattttcctaaagactgctccctcattaaatcctgtgcacatgaatccactttctagggaaataggctaagacatgactaattgttgtgtaattacttacgaaacttttcttagcgtgataatggatggggctagttattgtttggtggggaagagttaacacatgtgggaatacccataggagtcttatcaaaagggcatcaaacaacattgtgtgctcttgcactgctaaaataaaggttgaaaactggtggatcacatgatccctagtgactcttctaaaatttatgtcatcataattcctgacagtgaataagagatacttattgtacaattttgtgayaggaagttccaagagaggcaagtactcatgtttactaacaaaataattcattgaacaaatgtttactgctcctctatgttcta

SEQ ID NO: 518500 - DNA, 338 bp, Homo sapiens
ttctagtatactaggctttggcatcctacctaactgtgatggattccaaactctgttgttagtactcaagtgctatatgccttcatggtatatggctttatgtaatttcatcaacttcagtttttttaaacgaactcctctgaaggcacagctcagaagaggwtcctgtgtttgggttttaatgtcttacagttgctgtcttgaaattcattataaacttatctttggatttgtgacttaagtgaagtctgataagacaatggcatgtgcaccaaagacttggagcctcagtgcaggtatagtcctacctcccacaatctccacacatccctagaact

SEQ ID NO: 518501 - DNA, 451 bp, Homo sapiens
tgagtgagccatcttagatctccgtctcagtgtgaagccctcagatgactatgctgcagccaacaactaactgcaaccacatatgatgaccaaagtaagaactgcccaratgccattctcacgttcctaagtcataaaattgtgagcaaaataaaatggtaattttaagacataaagctttgggcaaatttgctgcatagcaacagtaatgacaatcatggtttatccactttatagaaagaacacttagaccagcagatagaagaactagtgcccaatttcaactctaccactaactagacggcattcactagcctgagtgaatcagttaattctatggaattcagttttttcatccataaataagaaagacaagatgaattatatagtcccttttagctcaagcagtcataatttttataacccttgaattgcttgacactaattttca

SEQ ID NO: 518502 - DNA, 664 bp, Homo sapiens
cagctgctaactctacccagatgagttccaaatctcagtggaaatctcactcctgaactccaaatcttacattcaggtgtctactgaacagcaatacttaatattccataggaccacaaatacagcgtgtccaaccagactcagtatctttgtcataaaactcaatcctcctcaatatttcttctccagattcccagtaatttaaatatgaaatgtagacttcytccttctcacaagcctcctatatttgatgaggtatcaaattatgtttacttattttttaagtatctcttaaatccactttcttctttctgtctacactgcacctaactaaccttagctcaggccctcaacacctagtgcctagattttagtgataacccctacttctaccattatcctgcataaaacaccttttgtggtgtctgcctagctcacaaccttcccatcttctcagaatgtgtctccctctcccactctctgccacctcaaccacacacagagattggggcctgacagtcaagtttatagtagccatacttgactggaggcagggcaggggacatctacccccgcttgagcaatgactttctctcttaaaaaatttgaactaggattcagagacattcacagacaatctgggagtatgcctgaaatggtaacg

SEQ ID NO: 518503 - DNA, 664 bp, Homo sapiens
cagctgctaactctacccagatgagttccaaatctcagtggaaatctcactcctgaactccaaatcttacattcaggtgtctactgaacagcaatacttaatattccataggaccacaaatacagcgtgtccaaccagactcagtatctttgtcataaaactcaatcctcctcaatatttcttctccagattcccagtaatttaaatatgaaatgtagacttcctccttctcacaagcctcctatatttgatgaggtatcaaattatgtttacttattttttaagtatctcttaaatccactttcttctttctgtctacactgcacctaactaaccttagctcaggccctcaacacctagtgcctagattttagtgataacccctacttctaccattmtcctgcataaaacaccttttgtggtgtctgcctagctcacaaccttcccatcttctcagaatgtgtctccctctcccactctctgccacctcaaccacacacagagattggggcctgacagtcaagtttatagtagccatacttgactggaggcagggcaggggacatctacccccgcttgagcaatgactttctctcttaaaaaatttgaactaggattcagagacattcacagacaatctgggagtatgcctgaaatggtaacg

SEQ ID NO: 518504 - DNA, 558 bp, Homo sapiens
ctgttgggtttctgctctatgtgtagcaccaagtctctgtcaaagtagacttcatggctatatgtctgtaacaaaacacaatcatatggagtccttttcacacagccatattcactactgtgttactaaaatgtcacagtacctatgctagggatcttcaaacatacacttagaagaaaatagttgctagaaagaggtttatttttcattatttgtggatatgcagattattaacaaaaaaggcattctacaaaatatagagaataaaaagaactctggacccagragtctaaatacccagattctattgccaacgctgctattatctatctcactgtgtgatcatttacgaggtgccaaacttcccaggttctccactgataaaacaagacctggataaaatgatgtctattgttccttacaactttgacattctataatagttgaaatatcagacaaatgtatacaagagtacctgggaatcccgcatgcttagatatggtctctagtaaataattgtggggattaccgtattctcttattttaaaaaatttttcc

SEQ ID NO: 518505 - DNA, 538 bp, Homo sapiens
attaaatgagacaacccactttacttatactgtatcacagtgactagtagatagaaagtgctcaataaatatattatttaaaaaaagaactgtaagatacaaaactttcaattggtggaagaatgtgaagtgccttaatttgtctaaacagagcggtatctcctcactaggtagcacaaatagtaaataggataggatttgttttgttttctcccagagttgtgataaatattgtaaaaaattgaggaacaataagcttgctgcattgatgctctgagaatrcagaaacttagatccaggagtgcaatgcagaatgcacctcttttcagcgtaacgtctgtacctgctgatggaagctaccctgcttcacctgggcttgcattaaacactcagaattgttacccataatgttttgtacctgtcactagtacctgttaagtaggtgggcatgtagctagagtctcgaattaaaatatcaggtaaagagggggtttaggtagggcaggaagacattaatgtctggcaggtggcagaatga

SEQ ID NO: 518506 - DNA, 601 bp, Homo sapiens
aagatatgtaaacagttttgatgaggaccttgtgaagaatacataatgagcccatgattgaatcaaaattgttttaaacagacacatattgttcaaaggatgagcttgaggtcaattgtaattctatgtgagcctagagacttggtattaaaaaatgggttatgacctgatattgtttttcctgtccccaaaacatttccctccctgctgccagctcatcgtggcaaaagcagaatatgtttaaaaatccattatattttttattggctgggacactaatggagggctctgcgacggctctattttacaggctgaatactytaattaggctggttactgatcagttgttgggatatcgattgtgtcatttatcaaagagctggggaagcagaaaaaaattttttgttcttgttgttattgttaaatcaaagcacaaggctgagcaaagcaagccctagctctctttcctgctgcagctccagctttaatttaggactagcttacctcctataccaggctcagtttgactagcagttcagaagaaagggtaatacactgggtgtgggaaaagtgttacaagccttgacaaaaagctaaagga

SEQ ID NO: 518507 - DNA, 571 bp, Homo sapiens
tgattttggcttgacattttaacattagattgaaaccttgcttaaagtgtatttataaagaaattgttattcatatgaacatgaaactgaaaaacctcactttctatcagttctgtaaataactcagttattgagaattgaaatgctcttttttttcaagtacaatcggataggtataaaaaggggaaaaatacaaaaaattataaaaatagcatttaaccttaaaaaatacaggtgcccaggctatacaatatgtaaagatacattcatatatgtaccctccaagaaatcaatcaaactttgaccttttatgttatgctaatggtttttgaggaaacattaaaattctttatattatgccttattttgagagtactgtcatatacaacccacataaacatacaaaccactcaacaatcaaaagcagaagaaacatttactgttttagcaagacatacaaagagttaatggcaaaaggaaagagagggaaaaaatcaccrcaatggtctgtgtttagaatataaagcctgttaccaaggtatacaaggaggagctggaaggcaaataaagg

SEQ ID NO: 518508 - DNA, 674 bp, Homo sapiens
cacctgccttgatctctcaaatgggattacaggtgtgagccaccacaccctgccctaaatgaactttttatccacagctcttgattttcaatagataaaatatagaaatcagaattaaaaacaataaagaccccagattttttatgctattatgaagtcattatcaactcttttgggtaatctaaagagggtggtgactcctgatttttatagccgaatctcttagataaatattttgccataagacacatgaacttgtaattcatgacctcataagaatgtgcttttcagagactaatttctcttttcattatctttcgtcttctcatacaaactgttaattgtattttcagtgcatggtraatacaaggaagtttttgctaatctgtgaaactcgagagactttttttttttttaatttttcccgttcaacagggcactgaaagaagcctaacagtggccttgggtttgatttgtgattatatattaccccttcagtcacttccctctcaagcagtctgaaatcagaagcgagccttactcacattttttctcttatgtttaaacatgtattcaaaaggcacacaagcagttagaaacctagaagcaagtaaagcaaataaaagccctttgaagccacagaccactttacaacacaggacaataaaaattaa

SEQ ID NO: 518509 - DNA, 674 bp, Homo sapiens
cacctgccttgatctctcaaatgggattacaggtgtgagccaccacaccctgccctaaatgaactttttatccacagctcttgattttcaatagataaaatatagaaatcagaattaaaaacaataaagaccccagattttttatgctattatgaagtcattatcaactcttttgggtaatctaaagagggtggtgactcctgatttttatagccgaatctcttagataaatattttgccataagacacatgaacttgtaattcatgacctcataagaatgtgcttttcagagactaatttctcttttcattatctttcgtcttctcatacaaactgttaattgtattttcagtgcatggtgaatacaaggaagtttttgctaatctgtgaaactcgagagactttttttttttttaatttttcccgttcaacagggcacygaaagaagcctaacagtggccttgggtttgatttgtgattatatattaccccttcagtcacttccctctcaagcagtctgaaatcagaagcgagccttactcacattttttctcttatgtttaaacatgtattcaaaaggcacacaagcagttagaaacctagaagcaagtaaagcaaataaaagccctttgaagccacagaccactttacaacacaggacaataaaaattaa

SEQ ID NO: 518510 - DNA, 562 bp, Homo sapiens
aagaaagaatatttagtaaaatgacaattctgctttttaccagttttctgagtggtttaaaacacaaggtaatattatgatatacatactatagacaacttgctgaaaagccaagaagagaaaatgttatggattctttataaaataatataatgatttctgtagagggcttaaaagttgcataataaattcwgcatttggtgctaactgaagaattaatattcagatagaaatattcaggtagataattgatattaatattcagatagataatattcagatagaaagtaagtagaaatgatttataaaaaaatcaatgtaaaagtataccatgtaaattaagggatatcaggaaaggggttattaattaaaaaaagcaatgtaccacacatttaatactattcatatttaataattaatgtttaataataaatattgcaagaacttaccaatgaggtgaataagattactacaggtttcttcctcagtaatattaaagtcactgcaatataagttactaaaagcacttaaggaatggaatattttcctttatacatcagga

SEQ ID NO: 518511 - DNA, 592 bp, Homo sapiens
agtaatgttgaagatagaaagaaagtgaagggaaatgccaaaacactgcttgtgagttatattatttttaactatccacctttagaagcagaaatatccttctaaaggcaatccaaagcaaatagcagtctaaagaaatgtgccaaacagactgatgttatgtaggtattagtctaggccactatttactgaataggtgggttcagttgtatctctgttttcccctccctcccttcttctcacactttcttcttctcttccccattccttttcttctrtcttgtgaccatgtggtttgtgtattaccattgacttttccctgaggagatgattctctttcagatgtacgataaaagggtaagaagtctttgagattccagtgctgccttgctaaacaacatgggcatagtcatcaaaagtgaaacttccagacaagacctgttactgatgcaggccagacatgggcctggtgccacagggaacctgggaaggccccttgattgcaatgctccatccaactctgtccccaaacaacccttctgctaactccattaatctcctgaatctgtaaatatgggtagagttgtgtggg

SEQ ID NO: 518512 - DNA, 635 bp, Homo sapiens
ccaacagtggatggactcagccaatgtcatttaagtctgtctttctgagtagaccctgtgaaaggtctggggctgccagtgccatttactgcatcaaccaagatctgagcacattccccttccgttttttttctggaaatcaagtgccgtctccattagaaatgcatgttcctgaaggccagggaagcctagagcgaagccatgtcagccataacacatcatgagatcctccctgtgccccattaaacaaagcctcggtatttgccttgttactgcatttcacctttcagtgtggaagagggttctctaaagcagcgaagcttaactattgtctttaatctatcacttgatctaccttttctttttttcttttttgcctacataaatcattcaaaatttgtttttgtgtttaaccaaagtttcagtaatcctctmaatttatattagatgtctgactagtggtattcatcatttcactttttctaatagaagctactctgaccttaaatctatgagaaaaggaaaatgtgaaggacatggactttggaaaagcttgttagtctctgtaccgacaggtcatgtcactggccactttcctaaaagaaagaagaccatggggaggacattctagtagg

SEQ ID NO: 518513 - DNA, 384 bp, Homo sapiens
tccaaaacgcatccatgacccagaaaagatgaagaaagaaaggctctgagatcctcattaccctgaacatcctcagggaggggaggaggggacagctttattctagatgctggaaatttaacctaaatgtgcctgagtggtgtgcccttttctagcacctgacggagtgagtgtgagctctggggtgctgaagagagtgggaaagagccccccaaaagggaaaaagtcttctagaarataaaagacaatgacagaaaaggaaaacttcagagatgtcacaatttgccagtggcaaagtaggcacattgcaaacaatctggaattaataggaatgaacatttttaatacaaagaatacagattttgaagaaattactcagagcct

SEQ ID NO: 518514 - DNA, 605 bp, Homo sapiens
tgtttcttgcagaaatgacaaatctaccttttctagctgttgcttttctttaatgattccatatgttcctcccttccacagattattaaggctggccaccaccatctctagattagtgatttgtttcctaaacaaaactttcaaagatattatctctgttacattgtcccttgtgcaaggggtcattaccctcttttggtttctggagtaatgtggcatcctcagttgaactgcatgcattagttctgtgctcasagcagtttcaggcaacaattcctattctatttaagctgtggtcaaggatactgcctttgatggttctcagaggtgacactgtgtttaaatgacagcttttacaaggcaaaatgaattctaagtgcacacacacacacagaatgacaggtctgtagaaataccaggggatgatctggttttctgtttctcttccatcattctgttctggtacttaaatattcttcccttgtgtttcccttcttacaaattaacaagaaaatgaaacagtttaatgaatttcttatgcaattttaaaataaatttcttatgcaatttttatatggtattttaatatattacatgcattttgc

SEQ ID NO: 518515 - DNA, 605 bp, Homo sapiens
tgtttcttgcagaaatgacaaatctaccttttctagctgttgcttttctttaatgattccatatgttcctcccttccacagattattaaggctggccaccaccatctctagattagtgatttgtttcctaaacaaaactttcaaagatattatctctgttacattgtcccttgtgcaaggggtcattaccctcttttggtttctggagtaatgtggcatcctcagttgaactgcatgcattagttctgtgctcagagcagtttcaggcaacaattcctattctatttaagctgtggtcaaggatactgcctttgatggttctcagaggtgacactgtgtttaaatgacagcttttacaaggcaaaatgaattctaagtgcacacacacacacaraatgacaggtctgtagaaataccaggggatgatctggttttctgtttctcttccatcattctgttctggtacttaaatattcttcccttgtgtttcccttcttacaaattaacaagaaaatgaaacagtttaatgaatttcttatgcaattttaaaataaatttcttatgcaatttttatatggtattttaatatattacatgcattttgc

SEQ ID NO: 518516 - DNA, 615 bp, Homo sapiens
aatggagtttagcagaggccacagtcctaaccagggtttgtaattgatatctgggaggctgcagactttcctttctgcaaaagcagtccaattagtgaggcctgcatgtctgtgcaaggagagaggagaaggtggtggaagaggaaacctgaggtcccctgagggtttgaaactgcttggctctttcctatcagaacagttccacagaagcaagacaggcagagtgcttctagaaaagacagactcttcaaacatatttgcaacatgtattgctgcaaatacacataacatacagtatttgcaacttacagtcatcattctccaattaatgttcaaaagagtttagtggtttattcctctaacccttaggtatataggacataaatttattcacttaaaatttaacttgtcaatataattcactctggaatatttttaaatagtaagttgcttgattcacttaaaattactttataatgcaattaacagaattgtttttaaagtaagtccctttgaggcctattatttgatttttaaaattatttttaaaaataawtttgtatatacataataaaatggtacaaagtctgaagaattcagggaccacctttatat

SEQ ID NO: 518517 - DNA, 579 bp, Homo sapiens
aatacaccatctaggcccgataattccagtataaatggaagaattgtggacctacaaatagaaacagtcacatacctatccaacaarctcaacctgatgcccgcatccccggtcacaccttgcagaataccacaccctatttagagcacagaaggtagaaaagcatgatgataaaacaacagtaaaagcaaagcaatgcttttaggaaagccatataaaatccattagctatgagcaagaattttggtggcaggagtcaacgaatcaccttgtaagcaagcaaacactcattttccctcttttcctaagtgtactctttagatggtggtcttgggtctatctgggcaatgatacttaggactcattatttatgaggcagtcttcctttaaaaccacttcccagttccatgacagaacttactccctgcttgtgcactcccagccctgaccctttatcacatcttcttccacctagatcccctgtcatgctggacatattattaatgctgattatctgtaatatctagaatttccttctgagtggtagaaatcactttaaatggctttgtgtttgaacag

SEQ ID NO: 518518 - DNA, 579 bp, Homo sapiens
aatacaccatctaggcccgataattccagtataaatggaagaattgtggacctacaaatagaaacagtcacatacctatccaacaaactcaacctgatgcccgcatccccggtcacaccttgcagaataccacaccctatttagagcacagaaggtagaaaagcatgatgataaaacaacagtaaaagcaaagcaatgcttttargaaagccatataaaatccattagctatgagcaagaattttggtggcaggagtcaacgaatcaccttgtaagcaagcaaacactcattttccctcttttcctaagtgtactctttagatggtggtcttgggtctatctgggcaatgatacttaggactcattatttatgaggcagtcttcctttaaaaccacttcccagttccatgacagaacttactccctgcttgtgcactcccagccctgaccctttatcacatcttcttccacctagatcccctgtcatgctggacatattattaatgctgattatctgtaatatctagaatttccttctgagtggtagaaatcactttaaatggctttgtgtttgaacag

SEQ ID NO: 518519 - DNA, 579 bp, Homo sapiens
aatacaccatctaggcccgataattccagtataaatggaagaattgtggacctacaaatagaaacagtcacatacctatccaacaaactcaacctgatgcccgcatccccggtcacaccttgcagaataccacaccctatttagagcacagaaggtagaaaagcatgatgataaaacaacagtaaaagcaaagcaatgcttttaggaaagccrtataaaatccattagctatgagcaagaattttggtggcaggagtcaacgaatcaccttgtaagcaagcaaacactcattttccctcttttcctaagtgtactctttagatggtggtcttgggtctatctgggcaatgatacttaggactcattatttatgaggcagtcttcctttaaaaccacttcccagttccatgacagaacttactccctgcttgtgcactcccagccctgaccctttatcacatcttcttccacctagatcccctgtcatgctggacatattattaatgctgattatctgtaatatctagaatttccttctgagtggtagaaatcactttaaatggctttgtgtttgaacag

SEQ ID NO: 518520 - DNA, 521 bp, Homo sapiens
tgggttttttgtttttttttttttgagacggatttttgctcttattgtgcaggctggagtgcagtggcatgaccttggctcactgcaacctctgccacccgggttcaagcaattctcctgcctcagcctcctgagtagctgggattacaggcacgcaccacaagacccggctaattttgttttgtatttttagtacagatggggtttcaccatgttggtcaggctggtcttgaactcctgacctcaggtgatccacccacctcagcctcccaaagtgctgggattacaggtgtgagccactgcgcccagtcaaactaccatgtttcatatcacatggtgtgtttttctcaaatgtacacaacatttgaaaataagtggttcaggctggcatggttattcttcttcttaagtgcttagaggcccaggtcttcctcagccaaccaccatgtttgccctaggatgtttcccatgtcctcatggcccaacatagamcacctgccattatatccacaatccaacca

SEQ ID NO: 518521 - DNA, 585 bp, Homo sapiens
aaaaaagcatagcgataaaatgaattttgaaatgcattccttgtttgagtagatttcaggatgccagtagataaactagtaccttcaacacaataattcaccccaatgtgagaagatcctttgctttgaagggaaaactttcctcctgaaaaccagaagtgtactaagcagattgatggtctgttttattgttactgggtccagacccttgggtcggagcaagaattccagatcaatccaagctctaaaagctagttttcatctgagtacctaaaaagtagtcaacaatcatctccaytttgcatttcctgtagtttatgagataagaaaattccctgaaggtcttagcagacctgactaaagatccaaagaaggtttgctccaactgattaaaggagaaacatattggtgaattcattgacatttttattttatgcatttagcatgcaatatcctctccaaatagataagatagaagctaccgtttttacaatatgtaatgttaggcagcataattttttttctaatgcaagggaatgtgaaaaataactgtgccaagaatgaattatttgaatttaacacaca

SEQ ID NO: 518522 - DNA, 551 bp, Homo sapiens
gtttgagtagatttcaggatgccagtagataaactagtaccttcaacacaataattcaccccaatgtgagaagatcctttgctttgaagggaaaactttcctcctgaaaaccagaagtgtactaagcagattgatggtctgttttattgttactgggtccagacccttgggtcggagcaagaattccagatcaatccaagctctaaaagctagttttcatctgagtacctaaaaagtagtcaacaatcatctccattttgcatttcctgtagtttatgagataagaaaattccctgaaggtcttagcagacctgactaaagatccaaagaaggtttgctccaactgattaaaggagaaacatattggtgaattcattgacatttttattttatgcatttagcatgcaatatcctctccaaatagataagatagaagctaccgtttttacaatatgtaatgktaggcagcataattttttttctaatgcaagggaatgtgaaaaataactgtgccaagaatgaattatttgaatttaacacacaagctgcag

SEQ ID NO: 518523 - DNA, 618 bp, Homo sapiens
cagttgatattttaggcatttagactacatatgtaaacaaaagaaaatatattcaaaattagaaagtaataaattgttgtttaatgaaatttatgtcaaatatagttttgggcttatctaagttgttaaagtagataacaataatttccttaatctataaaaataatagtcatcatttataaaccaatrtcccatttcaatgtgtcaacaggaaaaatatttttttctttctgaattcctttgaccttgtaaaacacacacagtaataatatcatattgacaaaagaggtttagttcaataacatcccaccctctttccttgcacattgtgaggtacggtattagtagttgaagaggaaaaatcaataggcataattttgtgtatttggtttctccttctaagaaaattgagggtgtagataaagttggataccagggttgtgcatggcacaaattaacattcttgtgcacatttctccagcagtcttggcagcagaggattagagtagaaagagcaatggattaagagacagagtcatccgttctacttcttgccttgtgcaaatttgtgctatgagtgcattaaattctctatatttaagtttctacatctgcaaa

SEQ ID NO: 518524 - DNA, 619 bp, Homo sapiens
atcatggagacaacctggaatgccagtggaagctattgttaatgaaggactttttagaaaagatgtttgagacaggccaagaagtctcagtgaattaaatggtttcaatctacagtcttccaactacattaagacttgattcaattgtcaactaaccttgcaacattaatgaacgtgccttttgtacctgtaaatgaaattaccctttgtttagtgaagactccagaatttctacagagaaagggcttatgagaagcaatctgtttcaagatgctgcaagaattacatagcacatgtgctgttgaatttagattgtgtatttacttatrgtaactggaagagaattggtctgctcttggagattatcaatattctaatacccatctctcccaaagccgcatcttgggctctaatgggctatgcccctaaaaataataaagaggttaatcgtggacaccttgatgtgatgtagggaggccttcatcacaccagactgaaaaaggtctctcttcactgtgaatgacaaatcatttgttctgagaaaaaccatatataaagagtgacagcagaaaaaatgggaatgattccctactgcaccaccaggctgggatacagcctt

SEQ ID NO: 518525 - DNA, 629 bp, Homo sapiens
agccaagctcaaagaacacccaggggtaggatgactgccagtccaaagcttcggccacagcttcgttttcatcatcatgctccccactaagttccagcacccagttcaagtttcattagtgtcacctctaagattcggtccaccttgatatgctgagggctactactgagagaaagaaaatcttaggattcacttactcaatttcctaaaatacatttcattttataaaatgcctgccaaagtcaactgatggcagattctaaagacatctttagtttactaccacgtattggacactcactaagtgctgaacactctctcaggtgtggggacacaagagaatgaagcacagctcttggaaactgagaactcaaagttgaggagaggagctstaagtaacagaacaactgcacagtcatacaaattgtttgaaagttgtggcacatactgcccgcaaaagaggatgtaaagattaggagggcatgggaggcctgggcttcttgtggtgactgacaaggacagggataaagagcacggtgagaaacaaatcttgagtacagtggggcttcaataaacattcgtggagtgaagcagtcaacagggatcttaaaattcacaagccaagggct

SEQ ID NO: 518526 - DNA, 629 bp, Homo sapiens
agccaagctcaaagaacacccaggggtaggatgactgccagtccaaagcttcggccacagcttcgttttcatcatcatgctccccactaagttccagcacccagttcaagtttcattagtgtcacctctaagattcggtccaccttgatatgctgagggctactactgagagaaagaaaatcttaggattcacttactcaatttcctaaaatacatttcattttataaaatgcctgccaaagtcaactgatggcagattctaaagacatctttagtttactaccacgtattggacactcactaagtgctgaacactctctcaggtgtggggacacaagagaatgaagcacagctcttggaaactgagaactcaaagttgaggagaggagctctaagtaacagaacaactgcacagtcatacawattgtttgaaagttgtggcacatactgcccgcaaaagaggatgtaaagattaggagggcatgggaggcctgggcttcttgtggtgactgacaaggacagggataaagagcacggtgagaaacaaatcttgagtacagtggggcttcaataaacattcgtggagtgaagcagtcaacagggatcttaaaattcacaagccaagggct

SEQ ID NO: 518527 - DNA, 629 bp, Homo sapiens
agccaagctcaaagaacacccaggggtaggatgactgccagtccaaagcttcggccacagcttcgttttcatcatcatgctccccactaagttccagcacccagttcaagtttcattagtgtcacctctaagattcggtccaccttgatatgctgagggctactactgagagaaagaaaatcttaggattcacttactcaatttcctaaaatacatttcattttataaaatgcctgccaaagtcaactgatggcagattctaaagacatctttagtttactaccacgtattggacactcactaagtgctgaacactctctcaggtgtggggacacaagagaatgaagcacagctcttggaaactgagaactcaaagttgaggagaggagctctaagtaacagaacaactgcacagtcatacaaattgtttgaaagttgtggcacatactgcccgcaaaagaggatgtaaagattaggagggcrtgggaggcctgggcttcttgtggtgactgacaaggacagggataaagagcacggtgagaaacaaatcttgagtacagtggggcttcaataaacattcgtggagtgaagcagtcaacagggatcttaaaattcacaagccaagggct

SEQ ID NO: 518528 - DNA, 625 bp, Homo sapiens
ctggtaagaactgaaactctctatacttacgcagtctggctccagggtacggtcttttcattaatataataatttagttcagtaagtaaggcatccagctatctaaaaagattctgtgttcacatagacctattattaagaaaatctatgtcatgacattagctcagaaaagataataaaaggagattcatgtggggtttatttgcacagtgaagggaatattggactatgaatatgtgatatatgagtaaatttatactcatgatttttattccamctgactactagctgtggatgccttggttatgttcatttcctcatctgtaaaatacagataatgtacctgccttgtaggattataaaattaaataaatttttacaggcaaatatctagagtacagtaaatgtaaataaatgctatcactaacaagttcagctcctgtgctagtgatttacctgttgtctgccattctctgcttactcttctgttttcttcccagacatgccaggcctggagtctgcaatccatatttcccagagcaccttgccttggattgctgtagttagactactggaggcactagagggagtgtgaaaggcagaaggcggggagaaagggctcctt

SEQ ID NO: 518529 - DNA, 666 bp, Homo sapiens
atcacaggcatcagctcctgtcacaccaaatcatctgccctgatgtatcaccctaccttagaaatgatagctgtttcatgcagttctcacagtttctaatactaatccagcatcacctttctgttctttcagccttccaacatctaaccaatcccctttattacatcctcactgtttgaaagacctagaacattttctgttttctagtaggatcccgatattgatagcatcttttaaagcagaggtaattacatcttctccagaggtaattatgctcaaaacaaataatcctccagaaatcttcataagtcataaaatttgcttggtatgaacattacttactaacgctttcagtctggtcttcagcaaattgtgcaacaggccaccttatagtgtggcttgcrgttagacatatctgagtataagagtttctgtgtctcgttacctgtgtgtctctgagaagttacctagcataggccttgtttatacacctataaaacatggttagagatgctaactttcttgttgtgagaatctcatggagtcatatgaagaaatatttggtcagtcattaatcactgtataaatagttatttctccagattctctttctgcaccctcctatacagtgtcctgctttgctcaccttccttcactttctgccca

SEQ ID NO: 518530 - DNA, 593 bp, Homo sapiens
tttgaacactagcagcagcagatctctgtgccgggctccatgagccgtccacagtgctctgtggaagaaaatgaaaagctgctggcagagcctycctaaagtttgggcagaacctgagggttatttttatttttaaaaacaaacatttagagaatagcctatttctaaacctcctttactgttacaagaaatttaatttcttttgaagtgcaagcattccaaaatgagggatgtaaagagttattgcagccaataaatatgtggcagaccccttaaaataaataagcaccctgtccattcctgtataaatggcttttgtttgaggttcggatggatttgataaggatggtgttacaacatttaatgaggtgtaaaggaaaaatgactttcataagttcacataactgtcattatattgtctcctatgttctccaccctcacagactgtctcgatcttttgacatctctacaatagaagacaaggggatgagccgataagagtctgtatttgctgtgggtacataaacagatattaaaggtaccaagaaaagctaccagcaaggaggagaaacaagaaagctgtgtgtggactg

SEQ ID NO: 518531 - DNA, 592 bp, Homo sapiens
ttcatagttttattcatgtaggtaaaaaacattttcattgggttaattattgtataacaagtgttttatcattataaatgagattcttaaaaactcatgctagtctctgaytattagtattaaataggaaagctattgatacatgtattatttattttataatataccattttgctgaaattattatttctaatggtatttgaatcgggttaaacagatatatgattatataacttccaaatgattacaaatgtgtcttcccctttcaagatttatgcctttgattttgttttcatgtcttggttaaaactttcagaataatgttgaataataatgatagcactgggcactgtaattcctggctgtaatgggactgcctttaaagaagtgatatgaacacaaatgctgagaaaaacttggcaaggggcaaaaaagtgacacaggccaagttaggaaaacaacaatacaaatgtcataaaacctagtcactgccacctggcgtctgcacagagggaattaggtagagtgctggtaactggcaggccagaatgtacagagccagtctgcgttggcatacccctactcagctaca

SEQ ID NO: 518532 - DNA, 592 bp, Homo sapiens
ttcatagttttattcatgtaggtaaaaaacattttcattgggttaattattgtataacaagtgttttatcattataaatgagattcttaaaaactcatgctagtctctgattattagtattaaataggaaagctattgatacatgtattatttattttataatataccattttgctgaaattattatttctaatggtatttgaatcgggttaaacagatatatgattatataacttccaaatgattacaaatgtgtcttcccctttcaagatttatgcctttgattttgttttcatgtcttggttaaaactttcagaataatgttgaataataatgatarcactgggcactgtaattcctggctgtaatgggactgcctttaaagaagtgatatgaacacaaatgctgagaaaaacttggcaaggggcaaaaaagtgacacaggccaagttaggaaaacaacaatacaaatgtcataaaacctagtcactgccacctggcgtctgcacagagggaattaggtagagtgctggtaactggcaggccagaatgtacagagccagtctgcgttggcatacccctactcagctaca

SEQ ID NO: 518533 - DNA, 592 bp, Homo sapiens
ttcatagttttattcatgtaggtaaaaaacattttcattgggttaattattgtataacaagtgttttatcattataaatgagattcttaaaaactcatgctagtctctgattattagtattaaataggaaagctattgatacatgtattatttattttataatataccattttgctgaaattattatttctaatggtatttgaatcgggttaaacagatatatgattatataacttccaaatgattacaaatgtgtcttcccctttcaagatttatgcctttgattttgttttcatgtcttggttaaaactttcagaataatgttgaataataatgatagcactgggcactgtaattcctggctgtaatgggactgcctttaaagaagtgatatgaacacaaatgctgagaaaaacttggcaaggggcaaaaaagtgacacaggccaagttargaaaacaacaatacaaatgtcataaaacctagtcactgccacctggcgtctgcacagagggaattaggtagagtgctggtaactggcaggccagaatgtacagagccagtctgcgttggcatacccctactcagctaca

SEQ ID NO: 518534 - DNA, 607 bp, Homo sapiens
gctgttgaatggccatctgtttttactcaggagtgtccatgctggcaagtgaacagcttctctctcagaaaaagatatagaagattaacagacaaatgcctgaatgcctccaggatggcgctcagtgtgtattttactcgatagtaaaccacccaaaaaattcatagcaaacttctgacccctttygcttccacgttaacactggaaatgctgagaccagaaagtcagcttgcagagaggtgaaaaatgtctgtatggagggttggaaacacatttgttacacatggccaagagaaagcattgggagaaacaagcaacaatagtacaaaaatataggagcaactgttttattagctaaaaaaaaaaagtattgttattagtgggaattgacatcgaattttaaagaaagtgtttaccatttttaactttaaaaaaaaaaaaaagacagcagtgtcctaaagagaaaagatgagtttctaattcccttggtgctttcaatgaagagttcttgcctttttgcctgggggtgaagaataagagacagtgtgtagtcttgtccttttgggcaaccatactggatttggatcttggatttggatcttggact

SEQ ID NO: 518535 - DNA, 597 bp, Homo sapiens
gccccacttaaatagccaggcactttccagcactcaatgtacatctatgctcgtgtgcttacatccagcctccttcagkttacctacctggcctctgtggcattttgagtggatgaacctcttatccaatcaggctatggcaagaagtatggttacaaggtagattatattgcattaaccttctagacttctttaaaaatgttaacttggttatttaaaaatggggccaggtgtggtgactcatgcctttaatcccagcacttggggaggctgaggcaggcagatcacgaggtcaagagatggagaccatcctggccaacatggtgaaaccccatctctactaaaaatacaaaaattagctgggtggggtggcatgcacctgcagtcccagctacttgggaggttgaggcaggagaatcgcttgaactgaggaggcagaggttgcagtgagccgagatcctgccactacattccagcctgacaacagagcaaagtccgtcacaaaaacaaaacaaaacaaaaggacattgcaccatcaagtaatacaaacattaaacattaagatgagattaaggtattttaaaatgatcgaacttt

SEQ ID NO: 518536 - DNA, 622 bp, Homo sapiens
gctgactgaaaacgtttggtggtttgacattgatcttcctaatattgtgacagcatcccttaaagaagctattccctttgaggatagcacgacttcagattttcatctaactaaagttagagtcacattatatcgcatgatcaaagatcattttaaaagaatcacacataaggaaaaattggaatggtaccactaccagctatttattgagtgcctattatgagcgaggcactgmctaggaggtagggttagagatttccataagataaccttctgccctctagtgagagagatggccatgtaaacattccatccaaacattcattattaagtagcctataatagagaaagtaacaaggcagccaccagtagaacttgaggaggaaggaacaattacctgaatttggagatcatgtgaatccaatggtgataggaacgtgatagaatttatatgttgccttctctggattcccagatgcagacaaattatacaaggtgagcaaaacaatcccttctagatgtcaaacaatcctgtctcctctcatgccatggtaacacactaaaatatttattttttaaaaaaatttttcttgcttgacacaaattttagtgagtccatttg

SEQ ID NO: 518537 - DNA, 622 bp, Homo sapiens
gtggctgatccctgttagaatrcagggtcgcagactttagtatatgcaagcactacctggaggtgcagagtcttggactgcacccctaggctctaggattctgtctatctagggtagatcccagggaccctttggcagcatgccgggtgattctgatgcaggtcatctgcagaacattctttaagaaatactgattaagtctttggaattaggctcattattctttaaacaatattttttaaagagaaataaaaaaaaaactgtggctggatggccagttttgaggaatgttatagaggaaattaataaacagattgaggaaatggactggatttctaaagtccattcctttccacctctgcaactctatgattcagcactttttaaagattaaatatagtatatctgaatccatggaatttaggagagatttcttggcatctttctatctctactgaagatcctccaagatgaaagattatgctaaaatgtagaaaatgtgagtatagcagctttggtaccttcctggagctattctttgctcactaaacctacactctagtgtatggtccctcctcattgtcaccttctgggagtagtttgcttggttttacaagattag

SEQ ID NO: 518538 - DNA, 540 bp, Homo sapiens
gctgatgggagggcctcagaccctccaacctgtcctccatgctactacaaactctgtggaaagcattctcttttgtatttatcaaaattgtaactctattcaacattgattcaccaaatcttctaagaatttatcctaaggaataatagacgtatgtgcaaggatgtttgtgtacaaggagcttagttgataattaggtgacratgagcaacattaactccattaaaaaggatttggtcaaataaattatggtacatccaacaacagaatcctcattcaaaaattagaaagtagatctttatatttgaaaaagtttatagaatatgatgattgcatttatttaaaaattacaaagatacatggttatatagacatttaaatgctccaaattgttagttcactttctccgtattactctgatgcttttactatgttcacatataatcagcaaaagaggaataacaagggaataggtgattctaagccatttatccctggcctagcccctcagatacctatgttaaagctaaaagagttttt

SEQ ID NO: 518539 - DNA, 641 bp, Homo sapiens
gaaaattactctgtgtttgtctgttcaccttccacaatgctaactgttatgtgtgctaagaaagtaaagaaggtaggcagagatgaacatggaagaagcaagcaagtttttgataccccaacttcccttaagtgatgatgaaccattagacaagagaccggactacagaggccgcagtctatttaataaccatcaatgccttcagctataaaacaaagccagcctaatgtagcccactaattctgccccaacacagtcaagtttcacttctataagtaactccaacatcagaggccactgtggtcagaattggaatataaccatgtgccactacactaaattatgcttaaataaaaatgcaatgcatccatcatatttgtataatcaaggtattaaatcagctataatttccaagccttaaaagaaaattccaagattttatgtatattcctagtgaaagataatgtgatgaatgccacaataaaaaaataacttagcaggaggaaataatttttatcctttttaaattttccttatgaaatgcatcattttaacataacgcacttcaacagttayccataaatgtaaattttgtttttgataaaatgaagagccttttaatccaaattgcacagtgatgc

SEQ ID NO: 518540 - DNA, 602 bp, Homo sapiens
ggctctttcctcattatgaatcctccctgcacataatgaggttcatcattagttgatggagtgaatttgccctagctctaccttgaaaggcacataatttacatactacttcagagcctaagctttaatggattcttcgatgaataaaatgaaaagctactttctttaaatttttgaacactgtttagataatacgattttaataagacattcaatttgcttgttaagtatatttgaaagtgctttttttttttttttyccttttggggcaaaatatattttggcttgccatgctgtgtatcacagcgatgtaccctcacagttgtctcagaggacatatggggtacgttgttaagaaatgggacaatcttaggcggaaagctttttcacatgtgagcctccagattattgacaaatctttttgtatagaaactcttctgacattaaatggttataacaaaaaggtttggaaacaagcttattattagtgtctggtttcacatatacgaaatttgtgtgcatgctgattccagccaaaattgacaatagctagctgtacctcctgatgtattttaatgatggaagagcaaacttccctagtg

SEQ ID NO: 518541 - DNA, 602 bp, Homo sapiens
ggctctttcctcattatgaatcctccctgcacataatgaggttcatcattagttgatggagtgaatttgccctagctctaccttgaaaggcacataatttacatactacttcagagcctaagctttaatggattcttcgatgaataaaatgaaaagctactttctttaaatttttgaacactgtttagataatacgattttaataagacattcaatttgcttgttaagtatatttgaaagtgctttttttttttttttcccttttkgggcaaaatatattttggcttgccatgctgtgtatcacagcgatgtaccctcacagttgtctcagaggacatatggggtacgttgttaagaaatgggacaatcttaggcggaaagctttttcacatgtgagcctccagattattgacaaatctttttgtatagaaactcttctgacattaaatggttataacaaaaaggtttggaaacaagcttattattagtgtctggtttcacatatacgaaatttgtgtgcatgctgattccagccaaaattgacaatagctagctgtacctcctgatgtattttaatgatggaagagcaaacttccctagtg

SEQ ID NO: 518542 - DNA, 585 bp, Homo sapiens
ccatataagcagagggctctgggtgagtcatttaactcactattcttcagcttcctcacctgtaaaatgaatttttagaatgatgattacttcacagagttactatgagttaataaatatcaaaggcttagaatcatgtctggcatacagacagtaaaggtagctattatagggtagacctttcaaaagctagaatgtttctcttaaaaaactgctgtttattgagatttttcagggttagatttttcatgagtttagaaaattctacttccacctctccctactttttaagcatgcagaatattggtgacagcacgaaatgcaagttcttctaggtacatacatacagataaacctaagaaggtctaagcaccaattattctaggagtagaatcccaaagaaactgccaggtttaggaagtgagtcaggagtgggagactattttgtgtcaccattaatgactggggacagatgtggacaaagacaggacacaggctctcctggttggaatacccagggcaaaacctttactgatcccctgggaaagctggcattragaaattcagccctagagcatcttagcc

SEQ ID NO: 518543 - DNA, 585 bp, Homo sapiens
ccatataagcagagggctctgggtgagtcatttaactcactattcttcagcttcctcacctgtaaaatgaatttttagaatgatgattacttcacagagttactatgagttaataaatatcaaaggcttagaatcatgtctggcatacagacagtaaaggtagctattatagggtagacctttcaaaagctagaatgtttctcttaaaaaactgctgtttattgagatttttcagggttagatttttcatgagtttagaaaattctacttccacctctccctactttttaagcatgcagaatattggtgacagcacgaaatgcaagttcttctaggtacatacatacagataaacctaagaaggtctaagcaccaattattctaggagtagaatcccaaagaaactgccaggtttaggaagtgagtcaggagtgggagactattttgtgtcaccattaatgactggggacagatgtggacaaagacaggacacaggctctcctggttggaatacccagggcaaaacctttactgatcccctgggaaagctggcattgaraaattcagccctagagcatcttagcc

SEQ ID NO: 518544 - DNA, 619 bp, Homo sapiens
cctatgtcaggcagacccctgataagtactactataggctggggtctgttgccccaaaaccatcagttctgtgatatggtgtcaatgttaatgaattatcactgcaggtttgttattataggtggtgtgactcttacccgtctcacctaacagggctcaaaaactcaagagacagccagggtcacgtggttggcactgtttttcaatctgggtacaagtcaccaactgggtcatccatgagtactgctgacattctttgccacggacctgtggcagcttctgtgtgcagatgacacagtcctttgagggccattcccaagaggatctgtgggggactaggacctgctttgccgagtcagcacagaggcagggatggaggatgaggtggcagaagatcgacatcatgtaacatcagcctgcacgagygaaaccctacagtttcagattatcatcagcaataccaacttgaaagcagttagtgaattctgcttgcgaggcaggaccattgtctgactaagtcaaaaaaaaaaaaaaaaaaaaaggaataaaaaaagaactgtatgcttctcaggggaaatcctcaaaacaggatccagagacctaagctctgctaacaggg

SEQ ID NO: 518545 - DNA, 503 bp, Homo sapiens
tgaatatatattacttttatcataaaaaagcatcacagtaggaagaaagaactcatgtaacccaygcaaggagatcaggcggaagggcaggtgttacaataatgacattggtaaggaactattaaggccacaggcgcatcaccaatagcactgcctgcccccaacactcatttttcctttctaagctctagcccgttactttgtagagtcccaagtttcctctagcagatataataacagatgatggctgattgctcaggtcttttccagatttaaaattccacacgtctgctaatataccaattatttaccttccattaaggcattgataattctgccaaaagatatcaagcccccctcaaagtcaaacagaaaaaaaaggtgcagtacaacagcactcccttagattaaacccatttatgaggcaaattcaaatgctataaggatttggtggtctattattaacagcaacatttaaaaacattcttgaacttctagcaggc

SEQ ID NO: 518546 - DNA, 555 bp, Homo sapiens
cactacccctgaatatcactcggttccttactatacatagtcttggacaacacgggatgtggtaygagtgtaggtttgtgggctcaggagttttggggtagtggctctcctgcctgccttacctttttgttttgctgctgcctcagattgcaaagttaacagatgccttctctccaatttatctttagaagcagatgttccaggagaggagcagccggatgctgcaggccttatccccgaagcagagccctgtgagcagcccaacccggagccggtccccttcccgctccccatcgcccaccttctcatggcttccactcaaaacctcacccccttcctcacccaaagcagcctcagcctctatcagcagcatgagcgagggggatgaggatgaaaagtagaggctgctgggaggcaagagccgcaccatgcaggatggggaggagggcgagagtcacagggttgcctgggtggtgtttgaagggtaatagtcacaggagctgcagctcagcagagagaccctgaactctgctaagggaaggtcttgggaccagt

SEQ ID NO: 518547 - DNA, 448 bp, Homo sapiens
gggaaaacaatcagttacaaggtgtactaaaacccatatttaagaaccttgatatttgcccccaagagaattagcctttgttaatgaacataattcctgggggaaaaggtacactatcaaaagtgttcccacacatatcacacacacacagtcctcttgtcttggagtcttcattggtaactggagttgaatgtttaggcaacttctccaggtattcagcaggaactattagattaaaaggactcccatagagatgcttttgagacagagtgtgacagttcataagcatcaaagtatacttggtgatcaacttctttaagaaaccatcaagtagaaaccaatcaagagtaaaatctgaagatctcattaagagcccaaatatctgtagctgatagaagccttatgttagtcttygacacgactataatgtgtattctagaaaaggcac

SEQ ID NO: 518548 - DNA, 583 bp, Homo sapiens
tgcagttgaccaaaatgtgagaaacttggagaaatggtcagagcagggttgacatgtactgttcctagaaacaattttyttttattttttgacacagagtctcgctctgtcacccaggctggagtgcagtggtgggatctcggctcactgcaacctccgcctcccaggttcaagcgattctcctgcctcagcctcctgagtagctgggattacaggcacacgccaccatgcctgggctaatttttttttttttttttttgtatctttagtagagatggggttttatcatgttggccaggccagtctcgaacttttgacctcaagtgatctgcctgtctcggcctcccaaagtgctaggatttacaggtgtgagccaccgcacccggcttcacctataaacaatttctattctccttaactttataatctttcttgagtggaggtgaaataattaagctacaagcttcctgtactctattcataaagagttctgatggagggattagctacaagtaaaatatttgatctgtaaccttcgatttaaaaagaattgatgattctctacttgaaagagttggagtac

SEQ ID NO: 518549 - DNA, 544 bp, Homo sapiens
gggattagctacaagtaaaatatttgatctgtaaccttcgatttaaaaagaattgatgattctctacttgaaagagttggagtactttaccctttccacagggaccttttcaacggactatacttgcaaatatccctgtcactctaaaatgtccaagtccaaagaaaacttgtcatcatctgccatrtgcgtagcaggacatgacccattacatagcttgagaagataaccagtctttttaatctgtttggtagtcatgttccactgggaatatgttgacaaaatgccatttaccagcctgatcacagacccaccttaacaccactgagtcactgattctttttctatttgtttctatatctggtacccagggattaatgatagatgaaagaagtggaagaggtgtgtattcgtttcctactgctctaacaaattacaacaaacacagaggcttaagacaacacaaatttattaaattacagtcctgaaggtcagaagtccaaaatgagtcttactgggctaaaattaaggtgttggcaggtgg

SEQ ID NO: 518550 - DNA, 583 bp, Homo sapiens
tttcctctaaacgtcattgttattgacacaaccgtctgcaatgatcaattaagcaaatctgaagactcaaatgcttttatgcttcttatttaaaagttgcttagaatttattccctaattccagatgagttaccaaaagagaaygtttaagtgacttctccaagatcactggacaagggggtgggtccaacccctacatacgtagcacatacaactggcctgattggagggaccatccaagaatcttcctcctccatattctcacacaactctctgcccctttgcaagtgcctacactttccagaattgagagtcattcctcagtgtcttgagagtccctttattcaagtccaaatcctagggcaggaattgcacttgagcttttatcaacaatttacctagtggaaccttctgcctcatacctctttctgagacagatgtctggaagccaggccttctggggataaggcaggaatgggatgcttcaccctattgtgggagaagagaagactggagatgggaatttgccaaaaacaaaccttgttaggggcctgtgctgcttccagctggatagctatcccac

SEQ ID NO: 518551 - DNA, 525 bp, Homo sapiens
tgtcaagctgtattggtccccaccctgtgcacacacttcttttcgtgcatacctgctagacactmtcagaaggaagaagctggagaatgtgctaatgtgtcactcagcttctgcaaagatgtgcagatctgctctctaacaggagagctgcttttgcactgaaaagtttagcagaaacaatgacctagttcacctgcctcaaagctggctggcttgcccaggcaataggctggatgtttattaaaagtgaaaactcattctccggtaaacgtcttacttgtcagaacctttcctctacctctccatgacacagaatccagggtaatgagcagttacagaatgcatgcactttctttgctcttgaaacccaaagacagaacgtaggaggaccctctccaccttagtgtgttacagatcattttctggtgcacccaggatgggatattagagagcagtcagtcagctccatagctgtgtgcccagaactgacacacaccctcatctctgccttcgtgatcacacatg

SEQ ID NO: 518552 - DNA, 525 bp, Homo sapiens
tgtcaagctgtattggtccccaccctgtgcacacacttcttttcgtgcatacctgctagacactctcagaaggaagaagctggagaatgtgctaatgtgtcactcagcttctgcaaagatgtgcagatctgctctctaacaggagagctgcttttgcactgaaaagtttagcagaaacaatgacctagttcacctgcctcaaagctggctggcttgcccaggcaataggctggatgtttattaaaagtgaaaactcattctccggtaaaygtcttacttgtcagaacctttcctctacctctccatgacacagaatccagggtaatgagcagttacagaatgcatgcactttctttgctcttgaaacccaaagacagaacgtaggaggaccctctccaccttagtgtgttacagatcattttctggtgcacccaggatgggatattagagagcagtcagtcagctccatagctgtgtgcccagaactgacacacaccctcatctctgccttcgtgatcacacatg

SEQ ID NO: 518553 - DNA, 570 bp, Homo sapiens
gaataactgcagacccctacctctaaaaccatctcacactgaagagcgagtggcttctcagtccctggggaacatcggcagtgaggagcctccgcgggttctcaggggagcagcagttgagtggttgctttgcaacaaactggctcaaatcccagggaatccaagggctggcttcttgtacatgaaatgcaactcaaggtagtgaaatagctttgcaaacacttgttaatttgcaatgggccacacattacacgtgggttaggaggtaccctaggaaggggagatgttgaacaggcagtgaacacccagcaaagttgaagacacatggtaggcacaccacgagacatgattttagatctcacactctccgcatccacacaagctagcccagtttacaaccgggttgtccttgatgcaaatctcaccaccctttttagtttccctgtgaaatcaaatcaaacatggacaagttactgtttgggtgaagatcgggaataacagggaggcatcccatctaccgcacactgaattcctttgaaartatgctataggtttgtgttttccttcgaa

SEQ ID NO: 518554 - DNA, 727 bp, Homo sapiens
gctgcaaaagtcctatttccaaataaggtcccatccctctatacctggtgttaggatgtggacatatattttgggggccactgtgccacccactaccatatggacacttcctaactgatgtcagaatacatgcacttcccaatagttatatgctgcccggtgctttgatgaactgttgacttttggtttggagaaaacccacatgtctagagctctagctattccacagaacttaactcttactgggctctttccttttatgttcttgtaagacatgcttaaactgcttgagtgttatggttcatgtttcttttctttttcttgcagtgtaaagcctgttaattcatggccagttcaccaagaagtatcaaattcaattatatgaacactgytttttccccaaacaaatgcccttgtgttaaaaccacacacagcaatagcaatggcaactgcaacaattgcccccagctctacttaaatcacttgcatccccctattaccaatgtcaatcacctatggccactggaaggctaaggcagcgcatgcatagctattaataaaagtttttgctaaggattgacacattggtagtaccagctatgagctcacagtacaacacagttcaaacaaagaccatggatctaaatttcagagcttgaaagaagcaaatctttgcccagttaacattaggagtcttaactttttccaaggtaagaaagagagaaaa

SEQ ID NO: 518555 - DNA, 528 bp, Homo sapiens
aagcagttacgcttcatcctgcttccctgcagcagcccatccctgcagggaaagcaactgaaaatttgctttctgtctctgtggatttctctatctgtacatttcatataaacgaaatcatggagtatgtgaccttctgtgtctggcttctttcacctacagtataatgttttcaaggctcatctctgtcattgcatacatcattactatttatccttatagctgaataatatcccaytgtatggatgtaccacattttatttatttattctcactggttgatggacattttgattgtttccacattgtagattttgtgaatcatgctgccataaacatgcatgtgcaagtatttgttgaatacttactcgttctattttcaagcctgactcatcttctgaattccagaactgtcatcccaacatgttttatatttttctttggccttcctctgcacttaaatataattcaaactccttggatatccaatgagtttctgcattttcaggcttctgcccccaaaatgcg

SEQ ID NO: 518556 - DNA, 579 bp, Homo sapiens
ctgaccaacatggagaaaccctgtctctactaaaaatacaaaattagccagcagtggtggtgtgtgcctgtaatcccagctacttgggagactgaggcaggagaaacacttgaacctgggaggcagaggttgcggtgagccgagactgcgccattgcactccagcgtgggtaacgaaagcgaaactccgtctcaaaaaaaaaaaaaaaggatgaggataaatcactgaaactctctgtgactcaatttccttgtgtacatgagggaatacaaatgattgctcaagtacattcaagtcctaacaatctgtgattctgttttccaatttcatcatgagtatcccaacaaactgtacttcaaattcaatgcaggcaatttagtagacactgaagcatatttttacctttccaaattgraagtggataacaaggtaacaatagcactgtccctggagccatcctgtcctgtctactcccagtgaagtgaaatagctgaaagatgtggagagtaaatactcaaacacttttttttttttttttgagagagagtcttgctctgtcgcccaggctggagtgcagtg

SEQ ID NO: 518557 - DNA, 535 bp, Homo sapiens
gcaaaggagctcttgtggtgggtttcaacaagatatgaaaattgtaggttcttgaacactccttttcttcttccttaaaatggatgtctttagctacattctactctcttctctgtcttttatgacataatcagtcattcactcaacaagggaacatctaatattcacctaacatcccatttgcctgtcacatatggactttagcctccagtcgggccaatgacactattgatctcctaattccaatctagactctttgggtatttttttctcttttccattccttattttctttagaggcattttagataactcatttaaaaattattagtaaataaatcattatttgcaatcagcatagacaaggccttgggtgagtctaagtggatatctggagagatctaaacccgctgctggaaaagtgagtgggaaagccccattgatatgtgacccaactaaaccaacgtttcatmaaaagcagtgtcttcagggactgctttaggatttcagggaaaagaaaatggaggcaaatctg

SEQ ID NO: 518558 - DNA, 551 bp, Homo sapiens
ttgggaagagtttcgttgtagaacattaggcaaatggctgacaaaagagcttccagttctctcacaaggaattcttcaaaaagcaaaggaggtccttctcagtcagcctgctctttctgctcagtagacttctttgtgagactatgctgtgagtgagttctcaggctggtgatataacctggtcttcarttcttgtgcagctctgtaagtccacgtaggcaccactaaatatccttacgacattaagtgtcattggattgtttgctaacatttgcttccatatgggccccaggcattagcaaacatgtagtttattcatttatttattcactcagtgaatatttattgaacttattctaattgtcaggccactttgctaaatgttgttccatcactttccttgcagaacatacaggggaaaatgcacaactaactggaatcatcatttagtgtaatccatgcaatgatgcaacaagttggggagatgtgagaacatctgggagaagcatgtgtcccagactgagagggtgaaaatgcactaaggagaaatt

SEQ ID NO: 518559 - DNA, 587 bp, Homo sapiens
gaggaattaaagacacacagaaatatagaggtgtggagtgggaaatcaggggtctcacagccttcagaggtgagagcctcaaacagttcacccacatatttgttaacagcaagccagtgataagcattgtttttatagattatagataactaaaagtattctttatgggaaacaaagggatgggctgaaataaagggatgggctctggctagttatctgcagcaggagcatgtccttaaggcacagatmgctcatgctattgtttgtggtttaagaacacctttaagcggttttccgccctgggtgggccaggtgttccttgccctcattctggtaaacccacagccttccagcatgggggtcatggccatcatgaacatgtcacagtgctgcagagattttgttttggccagtttggggccagttatggccagatttagggggcctgttcccaacactagcctagttcatcagttgctgtataaaatgtgaaaatgtctgtgaatggctatgtgtggaaagcatttactttggttttatgcaaagctaagtcagggtcttcactcaatcaagtcttatgtggtaca

SEQ ID NO: 518560 - DNA, 593 bp, Homo sapiens
tgccacttagtcaagaaggtgtttaatacgtgcaactttttttttatttatttttgtccccagattagaaattgacatattcattgcaggaataacattagctacattttaagtttcatcatctttacctagagaacaaaaatgtgtgttccagttgaccctattctgccaacaatactatcagaattcctatttaggatgaagataatggtataaatgtaaaaacagcagccaaatggctyggcactatcacacctataaacccagcacttcggaagaactaggtgggaggatcgtatgaggccaggagttcaagaccagactgggcagcagagcgagaccctgtttctacaaaaataaaaatagaaaaattagctaggtgttttgttgcatgcctgtcaaccaagctacttgggaagctgaggtgggaggatcacttgacctcaggatttcaaggttgcagtgagctatgatcataccactccaatctgaaagacagagcaagaccctgtctctaaaaaaataataataaataaataaaatcaacagtcaaaggggaattaatttttttttgagatggagttttttgcttg

SEQ ID NO: 518561 - DNA, 629 bp, Homo sapiens
acatgtgttgacttgaatgcacagtttcagaacatttcctaagtcaccaggaaagaaggaagaaaagcatcaattgacaaaaatcaatggaaagcgatggatggcctctgcatccaagcaaacgtcagcaggaactggatcagygtacagatcgacacattccctagctcctgggaagtgactttggcgatgctacgaaaatttttaattattcagatttaatgaagtgaagcagcataggaaaatgagaggcaacaaattattacacttagcatgaaagaggtacgttgtcaatggtgccaatttgaaacctcaatgtggcttaaatgaatatatcatattgtcacaagatcacattttgtgatcatcaatcattccaaaaaggagtttcataatgttgattgagtgacgtgcatttgtagttgttgatttgcatagactaagcagtagtgttttggcagctttgagaatatgggttcctacaaaccttaacgtgagaaaagagattcagtgatttgtctagaggaagcttgattctgccaattcaagttcaaagactgcaaagtgcattggtgtcatagaatcagaaataattctcaagcacaccaaggcagagatgaccacacgga

SEQ ID NO: 518562 - DNA, 540 bp, Homo sapiens
atgagggcctcaactggcacaggagcagaggataaatgcgaggaaggttaaaaggaggtcgactcagtagamtttttgttttcctgttgattaagaagagtcagaaagttaggactcccgggtatctaatttgggattgactgggataaatggtgatattcattgagattgagaatggagctgggggaagatttaattttggacatactgatcttaagtagcctctgaggctgtaaggtatcactgcccagtcaatagttggaggggacaggcccatacccagtagcttactgcaacagtgatattcactcactcatttatttattcagtatttattggagtcttttatgtgccaggcactgtggtaacaggatagacagggtcactgcccttgaaagagcccacatttggaactggggggctgtgggatgagatgggggaagctaaacaacactttcaaacagtgttgtttgaaatcctccattcccagccctacttgagaaaagacatcgccagggatagaactttgaagaacaccaa

SEQ ID NO: 518563 - DNA, 469 bp, Homo sapiens
gctaagaaacaaagtttgaaaaggcatatttcataagtacaattttaattgtatttatgatttaaaaagaacatgtttttctttttctttttttttttgagtcagagtctcgctctgtcgcccaggctggagtgcagtggcgcgatctcggctcactgcaacctccacctccttgggttcaggtgattctcttgcctcagcctcctgagtagctgggattacaggcttacgccaccatacctgtctaattttgtattttttttttttttagtagagacggggtttcagcatgttggccaggttggtctcgaactcctgacctcaggtaatctgcccacctcggcctcccgaagtgctgggatgacaggcgtgagccaccgcatcccatcaactcatgtcttaatacacktattttattattagccccaagaaggaaatgtggcagacacatggctaagggttagttttc

SEQ ID NO: 518564 - DNA, 305 bp, Homo sapiens
ttacaaaatgcagtcttaaaatggatcagcccttttccataccacaggtagattataaagttataaagtcttattttatctttatatgttaacaaaaatgtggaccatgcccatcattccatactaataaaagaatakaaagggtttggagaaaggaaaggaaagataatataagcagagttttggaagcaaaagcaatactatctggagaaaaagaaaggaaagattttgcagtttttccttgtgtttttatgttacatgaaagtaagcatttttgtatgtattattcactagtctgttctaac

SEQ ID NO: 518565 - DNA, 569 bp, Homo sapiens
ctgagacacaggtgtttgatgtttggtttgttgttaatagttcatcatgcatgaagtgactaaatcatttttttacactactcattttgttgaattaaatggagaaagatgattacatttattatttctaagttttcattggcaatatcaaaggaacagacttttttctgctggaataataaaatctgttataatgtttcaataaataatgttttacattaacatttaaaatactcatattaggacacaccaaagggggacaagagttgccttgacagagctcccactggtcaaattgggacaawttgaacatcagaaagaataataatggtaatggtttatattatattgaatataaaaaagaattcctgaggatcctcagccagtgtcttcttattatgcctctcttgccttttttttaaggtaaataaataattttttaaaaaaggtccttaagttcagacctatgctagagttatatttctgaggagcatctgagaaaaatgtgaatttttatcccttttctgagtgactctttttttttttggctggccagcaatcttcacttc

SEQ ID NO: 518566 - DNA, 494 bp, Homo sapiens
gcatttgtcacaaagggagtttctcctcataaattatcttttagtgagggatttttttctttcaagaatgccatcagcaacgttccactcaggtctttttcctcagtattggtgggcatgtcaatatataacttcaagaaagacggagatattgtcagcctctatttttggatgtggaatacagtatgtcactaggaaaggattgtgatggggactggaatgcatgtacagttaggcaacaggtctgccatgttggtgaaacagaagtaccttagtctattcactgataatttatatcaattttctttgacattttccaytttgccatcttttattaatattatttttaattgacaaatcataattgtatatacttctgaggtacaatgtgatgttctgatatatgtatacaatgtggaatgattaaaacaagctaattaaagtattaatcactttatttgattataatttttggtaatgagacatttgaaatt

SEQ ID NO: 518567 - DNA, 524 bp, Homo sapiens
ctccctccaaacactttttcggggatgactggtgaaaatgatgacgcagagagaagcctgtttgtatatacacatcaggatggatgaagcagtgccaaagatgattaaattagatcagattagattggattagattagattagattaacctgcagattagtgtgctcccgtctaggtcaccattacctcctccatgttcccagcataaacgttttgttgtgtaattctcatcccatcctccagtggatgctggaccagaaagcaaaggcagatgtgggtcctaatatcttcagtacagcccagatccagatggtgttagagatgggtgtacatctaaggacwgggtttaatgggccatggtagaatgtaaaagcatttatattcatgaagggcttttttaggtttggggagtataggagagagtgggactgtggtaccaatctgggggtcaaacaagcagtggcttggaatagatgcgtgttggtcagcttttattcttcagctcacatcctcttagcctgtgt

SEQ ID NO: 518568 - DNA, 583 bp, Homo sapiens
gctgctggagacatatagaggctgtggagagagatttccttatctggccttagtgccctcaaaacataacatgaaacataacacgagaaaggaggctggctggaataccgctgtgaatgcatcaacattttccctctaggtataagtagagatttcattttcctttctctcttctcctcctactccccatagaatcgccagacaaaacacagtaccagttaaatttgtattgcagataaataacaaataatgcatgggacatacttatactttaatttgttgtttatctgaaattcaaattaactcagagccctgttgtgttttttggatttttgttgttgttgttttgctaaatctgtcaatcctatacccccctttcactgtatatatttcacttctctggcacagaagacattttcttcaattccattttcttccagaaaggtcttaataaaagtatttctaacaatagctcacatttactgagcacataactgggcattgttctatgtgtttgatattaacttatatatacttayatttattaatatctatacatttaataatgcacttatactcacaa

SEQ ID NO: 518569 - DNA, 643 bp, Homo sapiens
gctgtcaggtcccttggaacctcagcttcagaaaacaaacttgctcaaggtcacacccttctcagggcagcccacctccagtgactgggcaagatggagtacacaggcctggccatttctgcttgacccagggtgggatgaccagcaatattcacttcagagcttcccaccagcttggccaagaccttgtcaggctgcatcgcatttaatctctccctccccgaatcctcattctatcccctcctacaagtagtgatccctaataaacatcatgcatccaaagtccatctcagcatctgctttcagagaacgcttacttcacagttctccccaggggtggttcagaatcttgctataggtccagtccttccccaaaaccagtaaagccgatgtgcggccctccaaaaacccattctgaccaagtcaaatccatagccaccagagtgtgtgggggacgacatcagagatggctgctatggyatccagttgcctagaaaaagaaatctatcaagcccatactagcctcaggcctcagggcctttgcacttcatgttctcttttaggaatgctagagtttgtgcccagttcaccttcttaggcaagtcttcatagaccgccaatcaaaatgatcctctcctcaaca

SEQ ID NO: 518570 - DNA, 621 bp, Homo sapiens
tagttatttacacagtcatattgggagaaccttcttgagaacacagggtgagggaggtcctgccatctttaacaagtggcttccaaggtcaccaaaagcatcagtatccagccccctaataggggaagagaaactggaccatcatgcatggggttctttcagggactaggtctaacattttcattggccagaactcagtcacacgaacagattgtaatgctgtctgggaatgcagtctaactgtgagcttggcaggaaaggacacaggtttgttaaatggctagccatttctgccrcaagtcataatgctgagcaatgttatcagagaatgaagatgagtcccaaagaaaaaggttcagagcagattaaaaaaaaaaagtcctcttaactaactcatgagatgttttagtctcatctgactttgctgctcttagttctaattacatctagtaattagatactattgtgctgctcttagttctaattacatctagtacagatactattgtccattgctgtatgaccaactatcccaaaacttaatggtttacaacaagtattttgttatattttatcatatttcttatatattatgatttcatgattgggaatttgagtagg

SEQ ID NO: 518571 - DNA, 621 bp, Homo sapiens
tagttatttacacagtcatattgggagaaccttcttgagaacacagggtgagggaggtcctgccatctttaacaagtggcttccaaggtcaccaaaagcatcagtatccagccccctaataggggaagagaaactggaccatcatgcatggggttctttcagggactaggtctaacattttcattggccagaactcagtcacacgaacagattgtaatgctgtctgggaatgcagtctaactgtgagcttggcaggaaaggacacaggtttgttaaatggctagccatttctgccgcaagtcataatgctgagcaatgttatcagagaatgaagatgagtcccaaagaaaaaggttcagagcrgattaaaaaaaaaaagtcctcttaactaactcatgagatgttttagtctcatctgactttgctgctcttagttctaattacatctagtaattagatactattgtgctgctcttagttctaattacatctagtacagatactattgtccattgctgtatgaccaactatcccaaaacttaatggtttacaacaagtattttgttatattttatcatatttcttatatattatgatttcatgattgggaatttgagtagg

SEQ ID NO: 518572 - DNA, 492 bp, Homo sapiens
agagaaactggaccatcatgcatggggttctttcagggactaggtctaacattttcattggccagaactcagtcacacgaacagattgtaatgctgtctgggaatgcagtctaactgtgagcttggcaggaaaggacacaggtttgttaaatggctagccatttctgccgcaagtcataatgctgagcaatgttatcagagaatgaagatgagtcccaaagaaaaaggttcagagcagattaaaaaaaaaaagtcctctkaactaactcatgagatgttttagtctcatctgactttgctgctcttagttctaattacatctagtaattagatactattgtgctgctcttagttctaattacatctagtacagatactattgtccattgctgtatgaccaactatcccaaaacttaatggtttacaacaagtattttgttatattttatcatatttcttatatattatgatttcatgattgggaatttgagt

SEQ ID NO: 518573 - DNA, 621 bp, Homo sapiens
tagttatttacacagtcatattgggagaaccttcttgagaacacagggtgagggaggtcctgccatctttaacaagtggcttccaaggtcaccaaaagcatcagtatccagccccctaataggggaagagaaactggaccatcatgcatggggttctttcagggactaggtctaacattttcattggccagaactcagtcacacgaacagattgtaatgctgtctgggaatgcagtctaactgtgagcttggcaggaaaggacacaggtttgttaaatggctagccatttctgccgcaagtcataatgctgagcaatgttatcagagaatgaagatgagtcccaaagaaaaaggttcagagcagattaaaaaaaaaaagtcctcttaactaactcatgagatgttttagtctcatctgactttgctgctcttagttctaattacatctagtaattagatactattgtgctgctcttagttctaattacatctagtacagatactattgtccattgctgtatgaccaactatcccaaaacttaatggtwtacaacaagtattttgttatattttatcatatttcttatatattatgatttcatgattgggaatttgagtagg

SEQ ID NO: 518574 - DNA, 621 bp, Homo sapiens
ctcactgatgacccacccaggaataataatagtacctatcccataggactattgtaagaattaaatgaataaacaaagtgcttagaacggtttctgctgtcaagtatatactcttaatgttgatctctccctgtatgattgcattctctttaaggacagggatcatggctacttcctcttgccactttactcagcacctacacagggtttggtatacagtagtaggagttcaatatatgcatatagaatgaatgaatgaataaatgaatgagagaatgaatgaatgcattcagaattggagcttgggagatggtagatctgaaaatacataggagaaacgactcttttcccaaattggttactctaaaggtagcgtttcttaatctyggcacaattgacatcttgggctggacaataccttgggatgggagctgttttgggcattgtagaaagtgtagcagcatccttggcttctaccctctagatgctaataacaacccgccatgtcccaccccaccctcataccagttgtgataactaaaaattgtctcagacgttgcggcatgtcccagggagggaaaaatcatccccatgttgagaatggctgctcagtgggtgcag

SEQ ID NO: 518575 - DNA, 501 bp, Homo sapiens
tagctacccctagttcttcagcaygtctgtggctggctgcttgccacccaggcatgagaggatgctgtcctctgggagtcccagccttgtggtaaagaatgcaggctgagaaagactgtaagattcatattcaggatcttccacttggtgggcaaccctaagaaactcatttaatctttattagcctccgtttccccttctgtaatagtacctgcctcacagggttattgtgagagataagtgagatagttaaagaaagcccatagcacagtgtttgatacatagttaacactcagatattattaatagttatcactattaatgttgttgttgttactatgtgcttttatggtgacaaaatagctcattcttcaaaacgtaattatcagtatagaagaggctcctgaccaggggccagcctggcttgcatccaaggcaaaatcagaggcactaaaaactctcaaatatgatgaaatctaggaggagctgatctgaaaaagc

SEQ ID NO: 518576 - DNA, 601 bp, Homo sapiens
ctccttgaagagctactctctgaatttagggtggagaaactggtgccccgagcagaggctgctactctgacatgtctctgtcaaccgggagggccgcatgacatggatctatatcctaaaagattcagatmtatagtagaaaaggagtcttgctttgttgtctaggctgatctcaaactcctggcctcaaggaatcctcctgcctcagcctcccaaagtatttaacccttttattgcaaaataaaacacacttatagaaagccacacaaaataaacatataacttaatggattattataagatgcactgtattatagtcaactctggggcaatgaaatagatccctctggtgtcccatctcaatctcaatgcttcctcactccctgaaagtggacactctcctgacttacagaattgtcccttctttgcatctccttatagctttggcaccaggtgggcatttctggatgcacagtgtagccttgacccttttaaaacacgggatgttgttttttttttatctctttttatctgccttttttgtttcctttacaactttttgtttccttacaacttctctattgagggatctgggacattt

SEQ ID NO: 518577 - DNA, 549 bp, Homo sapiens
agctactggggcaggggagaggaaaattatgtgaatggagtggagtaggtattaggagagtcaacggggcatttgataagcatgtgaccgtggtttccaggctcacaggtgtggctgagggtcaccagcccggctccccgcccccgacagtccctgagcttgggctttagcttggagtggtggatgggaaagctgctatagtctcccggagtgaaaagcccaaaggctttatccctgtcaagagcagatctgacaagacaaaggcagcctggtaaccagagagccagtggggagttggaacacctgcctgcccttccggcttctgaaagcctcccttccccactctgggcctcagtttctccccttggcaacgtgcagatgtgagcatccaacttatggaagcatgcggtcacgcatgtttgcagatccctggcacccctggggagggaaggcacctgtgtaaacagagcagcaaggcatgatgtgcctggcgaatacattctatggaaggcgtcagtcccagrccgcagccctgaagctgcaggggga

SEQ ID NO: 518578 - DNA, 561 bp, Homo sapiens
ctgcagctcccaccttcccctctgccacaccattctctggcccacccagttttttctgttgggggrcccaggccaaggactagggccatagtagaaagcagcagtgactcactttggaaactctaattttagtaaaattcaggtgaatggtaaaaaaaaattaaaaatttaaaaaataaattcctcaaaaacacaaagtgagatttttttttttttgaatctccaggaccactctcttcatcttaagcttgtgtgcttctctggaagaggagagggcctggggtaaatattggtcctcccaattctgggctggctctgactttttcggtggtgcttaggaaaagagtgattctaaccttttcttccaactgcataccagccaaggagctcacgtcaacagagaagagtttctcaagctcatttttttttcttttttttttttttgagactgggtctcactccatctcccaggctggagtgcagtggtgcaatcatagttcactgcatggtgcaatcatagttcactgcagccttgaactcctgggcacaagcaatcctctg

SEQ ID NO: 518579 - DNA, 410 bp, Homo sapiens
ccacacctagcctcaagctcacttttaacttatatatatattggtatatattttcagcaaggagaagtaactgcccattgtttgaggaagtaacgtgcagcttggggtacgtgaggtgggaatctgcatttccytcagtcagctcaaaactgcttgcctttcaaactgtgagtatttttggccaagatattgttttgctccatgtgatcccaaactcagactgacataacatatttcagtaagttcagatgactagcttttctctaaaattgaagcagctcactgttcctttagttgaaactctcaaagtaatggtcttcaaaaatgctgtctttgtaaggaattttcaagaacaattttgatgacatactatcaagccaaagtgtcttcacctaaatgtgtctctctgt

SEQ ID NO: 518580 - DNA, 698 bp, Homo sapiens
ttccatcagtttgataagtcagggtgcaaaagagagtgagcaagattgaagccagtctttttctaacctcaccttggaaatgacatatcatcacttttgctgtatctcattcactgaagtaagccactctctatagcccacactcctgaacagtagaggcaggagccatcttcttagaagctgccaccataccaaatacttcctgctaatatttgctgcctctctgagccatatagcagagagggctgggaaggcagccctaagaagtgtgtgttttgttctacagctattcggccccayctttcctttggagaaaacactcttcccacaaggaaggggaagcaagaattagtggcagcaaggacaatttaagcccttgaaagaagcaatcatcacattgattaataaatacttaaaatttctttttttcattgctggtcaattgtttggtgataagatagagtaagcaaggaattcaatttagaaactagagaaagctggagtctgaatttcaaccaaaacaagtcacttaccctcatgaaacctcaatccgctgatctactcaccaggatgacagtgtcaactttgtaggattaattgaataacattaacgtcttttaaagttagctctttcatattgagtgacttagttaataaaaacaggcctactgggatgtcaaatgaggacttcccctctt

SEQ ID NO: 518581 - DNA, 586 bp, Homo sapiens
gctgccacttggctactgctgctggttgcttattctctcagttccactagcagaatcttctgcattcccatgttccccagacctaccaccctggagcaagtctctcaagcccagctcagattagcgttagtctgagttttgaaagacaccccatccatcttgaaggcagaatcgattttgctccaatagccatacatttttctgtttttttttaccagctctctagggccgaattcaacccgcttctgttctcatcagctttctcaartgcaactttacagttacgagggtggctacatttgcaatgagagccactctagactgcatgaaaaatttagcatgcaattgacaaggaatgtataattaataacttcttgtgtttaacaaatatttaatatgtaattcagttgtggtggtggatgatagggataccatggccagtgagaaaagaacaaaccaaaaccatgacccccgccccaagcttcatggagcttagaattagagaatacataggaacagaattgagaatgtgaaatgtgattttggagagcataaacatacatgtgttaagagcacatgacctggt

SEQ ID NO: 518582 - DNA, 586 bp, Homo sapiens
gctgccacttggctactgctgctggttgcttattctctcagttccactagcagaatcttctgcattcccatgttccccagacctaccaccctggagcaagtctctcaagcccagctcagattagcgttagtctgagttttgaaagacaccccatccatcttgaaggcagaatcgattttgctccaatagccatacatttttctgtttttttttaccagctctctagggccgaattcaacccgcttctgttctcatcagctttctcaaatgcaactttacagttacgagggtggctacatttgcaatgagagccactctagactgcatgaaaaatttagcatgcaattgasaaggaatgtataattaataacttcttgtgtttaacaaatatttaatatgtaattcagttgtggtggtggatgatagggataccatggccagtgagaaaagaacaaaccaaaaccatgacccccgccccaagcttcatggagcttagaattagagaatacataggaacagaattgagaatgtgaaatgtgattttggagagcataaacatacatgtgttaagagcacatgacctggt

SEQ ID NO: 518583 - DNA, 632 bp, Homo sapiens
tggaaaaagttcccagtgcaaagcagagttttccrggcggctaccattccttcacaacctgtctaagagggcagaggctgaagtcaccaggcgaagatctgtctgccgtggctagtcttgggctgttcaccacaggcctgtcctgatgattaattagattgtttcagtgtttagagtattgtgaagatatagcactacattagaacattgcgttgtattggtttggggataatactgtcatgcaaataacatgaaaacaagctttttaaggtgagggttcaggagccctgtgtaactctctcctcactctatctctctacaatttgcttctgaagggacttcggtccatgacaacataagggaggagataagcaggttgataaagtggcaaacttctaaggagtccagggaaagaagaattttgtctacaaagttgtgtcagatatcactgttggattttggagattttatccaacattctctgctctttgatgccccaggggctggcccttatgctctgtgtcacctggggtctcttgtctgctgacttctgaatttcgccaatgagagcagcagcaggagattagataaatgatggaatgtttcttccctgtgtctgagcctgacaacag

SEQ ID NO: 518584 - DNA, 538 bp, Homo sapiens
tcactacaatctccacctcccaggttcaagcaattctgcttcagcctctcgagtagctgggattacaggtgtgcgccaccacactcggctgactttttgcatttttagtagagatagggtttcaccatgttggccaggctggtctcaaacttctggcctcaaatgatccacccacctcagcctcccaaagtgctgggaytacaggcgtgagccgccacacccgccctaagcaatttttcagctagcccgttttctcggtgaagttccctgaatccatggaagggaaaagaacaccaggctttacctgggaacctagctggtgccagctctgttcttcccattcatctggacactggattacacagatgacttcattttgaacatccacttacatctaaacccctaaatacatgtctgaagacttttttagttgtcaactttccctcattttcctcctgtctgctttcttctctttgcctcttccccagacttaagatttaagcagaattttatttctgtagatgtttgatccattttt

SEQ ID NO: 518585 - DNA, 538 bp, Homo sapiens
tcactacaatctccacctcccaggttcaagcaattctgcttcagcctctcgagtagctgggattacaggtgtgcgccaccacactcggctgactttttgcatttttagtagagatagggtttcaccatgttggccaggctggtctcaaacttctggcctcaaatgatccacccacctcagcctcccaaagtgctgggactacaggcgtgagccgccacacccgccctaagcaatttttcagctagcccgttttctcrgtgaagttccctgaatccatggaagggaaaagaacaccaggctttacctgggaacctagctggtgccagctctgttcttcccattcatctggacactggattacacagatgacttcattttgaacatccacttacatctaaacccctaaatacatgtctgaagacttttttagttgtcaactttccctcattttcctcctgtctgctttcttctctttgcctcttccccagacttaagatttaagcagaattttatttctgtagatgtttgatccattttt

SEQ ID NO: 518586 - DNA, 211 bp, Homo sapiens
gatttgatcaatcctatttgaaatttggaccttctcctgtccaccaagaatgtaagttgtgtatcatctttcctggaagkctttcaaaagtggtgagacctctagtttcctgggttatgctgagagggggattaagcatctggacttctgagagacctgcctgtgtgaggagcctgaagggagactgcaagaccatcacccttcccatccg

SEQ ID NO: 518587 - DNA, 632 bp, Homo sapiens
acccacagagtatagcagaagtgacactgtgccagtttaggcctaattttgaaaggactgatagcttttgtcttggtctcttggagctgtgaactgacactgtgactactattttggagagaccatgtgaggaagtgccaagactgcatggagaggaaagggaggccagatgagccctctaactgttcccatcaaggtactaggcatgtgagtgaagccaacctggatcctccagacaacatagtcaccatgctgtgaaaagcccaagccatgtggggaagctctatgaggatggaccactttacagcccccactgagcagcaactgtcggccttgtgagtgtgccattgcagatgactaacttgctagagccttcaaaaaactgcagcccagccaatatctgactgcaagagagcccaagcaagaactgcctcattgagcccagtcaacacacagaactgggagctacaatgatcatttgttttaagccactgagttttgtggtagtgtattacacagcagcagataaccagaaygcactgatacgcaaataaaagttgaattgaagggcaagaattatgctggccttttctctacagtttctacaatgcctcatagagtgctttttccac

SEQ ID NO: 518588 - DNA, 531 bp, Homo sapiens
tagatcataggatacacagacaaaccccaggaatggcagctacctatgtcataccatcctgctgggtgatgcttttcatattcttttaaccaacaactaacttttataatttgaattamtttgtcacaggctaattattgaaagtataggtaatttttaggtgttctacttaaagagctattttttactgagtgtattttaaaaaattattatgaaatcttttatgaaactattctcctgattactaaatgaaatatttttagagcttccatgacctcttaaggaattcattttctggtgtgctactaacagtattttcacaaaatgctttaagcatacattaattaggttgtaatagtcttttggatgaattatgtgtttgtataaatgataatttggaaaagttcatggaagtctgatgtgaagaactctattgtttgacaacagtttgaaagatactgagtattagacatttttactttaaaagaaatggagacaaaatcattcaaaggaacgcactcacttaagaat

SEQ ID NO: 518589 - DNA, 604 bp, Homo sapiens
tcctgaaaatgttaaaatacaattaatatatgacctagcaattctactcctagttatgtacccaagaaaaatgaaaacataaatccctgcaaaaactagtttccaaatgtaatggagataggcagtcagtaaacaaaatatataaaatgcccagtggtgatacaactcctgatgtttcatttcattctttttctatatggtaagcccccttgactattagaaaaattgtacttaaaaaatatagcttgtacatacttygtcagaataaagtaggaatgttacttttttcataatctcttttaggtcaattgaatattttaaaatatatctgtttttgttttgctaattaaacctatttttttttgatctagggtttacaatacacatctgtaatttattgttcaactgactgagactgggtttcactctgtcacccagtttagagtgcagttgcatgatgagaggtaactgcagcctcaaaccccttggctcaaggaatccaatcctcctgcctctgcctcccaagtagctaggactacaggtgcatgccacatctggccagtttttgaaatctttttgcagggatggggtctcactctgttgc

SEQ ID NO: 518590 - DNA, 626 bp, Homo sapiens
tggtgtagtttggcaccactgcctcgggatacgcgctcaggtgccagaagttttctcacgactgcttttaaatcgttgccaaaagctcaacaaggggacaaagtacaaaggtctattctgatgaaatgattttggccttgtggcgccccctgcaaaggggctcagggtctgccacaggttcttgaaccacactttgggaactgctgctctagacttgtctcaaggattaaattacccaatgtgtgcagaactgtacgccagcacctgctagaaaagcacaatctacgtgttagttcctattaaaacatgttgtcacagaatgaaattgcatcttcctacagaatgctggatcttgaacttcatccacaacacatttacttttggctttctaaataacacacataaatcaggccaccgtcttaaatgtcactaactattaagccaaagaagttgttcartttaaagaaaagaaagcattcatactttcaattacttcagaattctagagaagtctagatattggtttgattatttgctctgtcattcaacaaatatttcttaaatacctagtaaacgtctatgaaatgggaacacaaatgagaattttgaaaaaggaacacagaata

SEQ ID NO: 518591 - DNA, 284 bp, Homo sapiens
actacaccctgaatcctgttaaagaaaacctttgagatcataacaggatgtttggaagttttaatataaatctcttacttatatcaaaagcagttgaagcaaatagtcttaaaatrtagtagaattctaatgtatctgacctgcttccttaagaattcagtttggctatggtaatctctgcaatcttctccttaaataaaaactgaaacattaagtctgccccttttctttaatccctgttcaagagggtatgtcgatacttgaacccttttaccagcatttaa

SEQ ID NO: 518592 - DNA, 281 bp, Homo sapiens
tcgaactctgctgtgtttggtggtgcagactacaccctgaatcctgttaaagaaaacctttgagatcataacaggatgtttggaagttttaatataaatctcttacttatatcaaaagcagttgaagcaaatagtcttaaaatatastagaattctaatgtatctgacctgcttccttaagaattcagtttggctatggtaatctctgcaatcttctccttaaataaaaactgaaacattaagtctgccccttttctttaatccctgttcaagagggtatg

SEQ ID NO: 518593 - DNA, 608 bp, Homo sapiens
ttgaaggatgaggagtaactgagacttctacaggggacagctatgaggaaaaccacgatccccatcatgctagaagtgactgcacattagtctttcaacatgaaagatgaacattttcaatatcatcttggcctcactttagccattaactctaggccttttgaccgcctgccaaaatgtttatttggtgtgccccaccatttttctgacccctgcatcaatcccatgactcttctctactttctacctgaggccttttccccattcctcatagttctttctcattgggcacagtatggaaatgagcccagcaaaggtctgtyaggcgtcaattaaaactctctcctaaagttggctttggtcagaagcagccctctgtaacatgtggtgccaatactgccgcccaccacatagcaccagctctcctcccagtcctggtaggagcacactctcctgccccctccatcagtgatggtcacctgctgcagaaaagaaaggcaggcagaagttagggactcagttacagtacaaggctcaggagtccgtgagttttatacaaatccaccatactgcttccctctgacagctatcagcagcatctgagatgg

SEQ ID NO: 518594 - DNA, 662 bp, Homo sapiens
gctccatcagcctgagtccctgggtaactgtgacgagcagtgacacctcactcaacccacactaactgtgcaccctaagcaggaaataaacttgctttaagccactgagatttcttggttggtaagtgctgtagcataacctagatttcctgattttatggttggtaagtgctgtagcatatcctagttttcctgatgttttcagaatgcgatcacaaaatctgctttggtacaaagaggattatgaagactaaatgagctgtcgacgttcatgttgaacttgtagatgttaaaatctagaatcaatgacattttaaaatctaaacgctactttggggcatcattaggccaacgactcattttccatgtgaagaaacttaagccaagagagcagaagtgactgggaaagacttcgcccctcatttgggcatgccgggacccaggccacatcatcagactcctggtgcagtgccctctacaggccccrtgctgcctgtgaggtcgctagaggtctgtggctgcttgatccaagctgtttcccacaccactttctctgacaaaatatgttctattctaaattaacttgcaaagggaaaatgtcttttaaattattctggcagttataaactgttgggaaccaagatggatacatatggtctttg

SEQ ID NO: 518595 - DNA, 528 bp, Homo sapiens
cttaagcttaatggttcttcaacaccacacagggttaataccttatttgcctaagtcatgcattggggtgatgtcttattggaggaattccacctaattcaaccatcagttaytgaaaagctcccctatgtcagatacatgcctagatgcagaaattagtgacatggactttaggatatacacagtcatgtggaagagaaaaataaataccaaatatattatttgataagtgccatatccatagttatatataaagtttcatgggtacagtggtaagaaggtcttagggatctctacagaaggactgacatattaaatcatccctgaagcataactaggacttcataagaaggaagagaaggaaaagaggttgggaatggatggaaaattacaggcagaggcaaacacacatgagaaaggcatagaggcatggaagtccacccaatgaccagcgtatggcttagattacgccctcctctgcatgtaagaagttgcctgcatggctctgagcaagtggaagcacacagg

SEQ ID NO: 518596 - DNA, 450 bp, Homo sapiens
gtttttatttggtggtcagcagcgtaatggcttttatttttagattctttcttataaatgtattgtcatcaggctagtgatatcaccattggaagttgtataataaagtgcaaactgattatttcaagttcagctaaaccamagcagaacatgatgtcaatatgactgaagatgtgaacacagagtgctattaacaaatgtgtttaataacaaaagagcattatttatttctatcatatacatagcacggaagcctgagaagaagcaaaaggattcaagagaggcggttgtgcagccttcctgcctgcgccagctctctcccagactcctatactgctcttccttctttaccttacgttgctgtttccctttttacttctttccctggaaagggcgggtttaattctgtccttatttataagacagagatgtttgctacctcctgagccc

SEQ ID NO: 518597 - DNA, 556 bp, Homo sapiens
cttatttctctataacacaatcttttttttgtttattttttattttttagacagagtcttgctctgtygccaggctggagtgcagtggtgcaatcttggctcactgcaacttccacctcctgtgttcaagcgattctcctgcctcagcctcccaagtagctgggattacaggcacacaccaccatgcccggctaatttttgtatttttagtagagccgggatttcaccatgttgactaggctggtcttgaattcctggcctcaagagatctgcccatctcggcctcccaaagtgctgggattacaggcaagagccactgcactcgtcctctatcatacaatcttaatggcaacgaataataataccaataataatagctttccattcattcggcaagtaaccattgagcacttgccacatgccaggcatccaaccaggccatggaggctcagtcgtaaagaagaaagtccctgcagcctggagctcagagccaaaccgagagacagacaagactcccctccggccactatttctggctgcctgaggagcgccaggc

SEQ ID NO: 518598 - DNA, 556 bp, Homo sapiens
cttatttctctataacacaatcttttttttgtttattttttattttttagacagagtcttgctctgttgccaggctggagtgcagtggtgcaatcttggctcactgcaacttccacctcctgtgttcaagcgattctcctgcctcagcctcccaagtagctgggattacaggcacacaccaccatgcccggctaatttttgtatttttagtagagccgggatttcaccatgttgactaggctggtcttgaattcctggcctcaagagatctgcccatctcggcctcccaaagtgctgggattacaggcawgagccactgcactcgtcctctatcatacaatcttaatggcaacgaataataataccaataataatagctttccattcattcggcaagtaaccattgagcacttgccacatgccaggcatccaaccaggccatggaggctcagtcgtaaagaagaaagtccctgcagcctggagctcagagccaaaccgagagacagacaagactcccctccggccactatttctggctgcctgaggagcgccaggc

SEQ ID NO: 518599 - DNA, 556 bp, Homo sapiens
cttatttctctataacacaatcttttttttgtttattttttattttttagacagagtcttgctctgttgccaggctggagtgcagtggtgcaatcttggctcactgcaacttccacctcctgtgttcaagcgattctcctgcctcagcctcccaagtagctgggattacaggcacacaccaccatgcccggctaatttttgtatttttagtagagccgggatttcaccatgttgactaggctggtcttgaattcctggcctcaagagatctgcccatctcggcctcccaaagtgctgggattacaggcaagagccactgcactcgtcctctatcatacaatcttaatggcaacgaataataataccaataataatagctttccattcattcggcaagtaaccattgagcacttgccacatgccaggcatccaaccaggccatggaggctcagtcgtaaagaagaaagtccctgcagcctggagctcagagccaaacygagagacagacaagactcccctccggccactatttctggctgcctgaggagcgccaggc

SEQ ID NO: 518600 - DNA, 308 bp, Homo sapiens
ttgccattgtatatacaaggtatctgaagcttcctagatgacttttttctttttttttttttaggttaatgtttatatacaattactttaacattggatttgggaaatggaacaacatactgcggatctttctgctaccgatgaaagaagaaggttgagttttaccttctagagctttacagtgtaaacaagcagtattaggktttgtttttaccttctcccctttggccccgtcacagaagcactggcctttgtctttacagacacaaccctaggaagagggaaagagaaagggttttgtttagaaa

SEQ ID NO: 518601 - DNA, 633 bp, Homo sapiens
tgggttgcacgtgcctgtattctcagctacgtgggaggctgaggtggaagaatcacttgagcctaggaggcagaggttgcgtgagtggagatcaggccactgcagccaaccyaggtgacacagtgaaaccccgtctaaaaaaaaaaaaaaagtgaaaaccagggcacaccaggcagaccccaggaagcagataagacttgatttaggaaggaaggaagatctcgggaaatggaaaaaaaaaataggaataagctatgacagtaccttataaagtatcttttaaacatcaggagagaaaaattacaagggataaatttttcagttagttagaaggagatatacagaaggacaattctaggtagaatcacagtcagcataaattcactctgagaataaaagactggaaaaagatataccacacaaacagtcagcataggaaacctataatggatatattaacagcacataaaaaagacttcaggataggcagtgacccttgataatgatttaaaaattaatattgcaggaagctataaatattaatatatgtgcttaacaacagaacttcaaattagatgaaggaaaaactgcaaaattgaaggaaaaaatagacaaatcctaaaatataattgg

SEQ ID NO: 518602 - DNA, 461 bp, Homo sapiens
gcatgggcattgagtttatttggttctagatttagtactgaatggggmaatattggtttccatggtcatttttattgctaatgatgcacagagcaactattaatttccaggcaaattatattgcagagattttaaagatatttggcccagtgcaagcactaagttaagtaaattaaatttggaaaagcaacgacaacaaaaatacattcttaattaaaacactggcaatgacatggattttttgaataagactgaggatcacttcaagtagcaaatgttataaagaaatggaatctattttatatttatttccttttattcagctagctttgcaaacaggaccaaatatccatggaacaatttgataaggtgaaaaatgatgcactgagctggttaatgcattctgatttaattctgtttatcctgatttttgtgaatttattagggggatcctggttcct

SEQ ID NO: 518603 - DNA, 599 bp, Homo sapiens
catttgaaaaggctctcgttcagacaacttcaacacaactcaacatacgttgataaaaaaccttaaaaaaawttttccactggaagtgtttagtgacaacttcagtcaagccaggctggtggacggctctttggagaactaaacagaaggttctgagagaaggcacaggcatcagtggggtaatgtctgtttacacagacgggagttttcagtgatcatcgcaaaataaacttaggttctgcagaaaggcatcagaatggttgtgaaagaagtgactgcaaagcaatagctggagccacactcgccatgcaggcctgagcatcgcagggcaagcatttgccagcatgccacaggcgccatgcgtcctctcgtctgactgcatctccatgagtagatcctgaagaaaccaggagcctgcagcccctaggagggtgcagtgaccccaagcctgggaggtgtgaggcctggatttgctcccatccgatctctttcctcatgtagggtgattttattgtcataaaatcaaaggtcacttcctatgccaagattcagtaattctagaccatatctggtcacgataggatcagaaaccaacagca

SEQ ID NO: 518604 - DNA, 629 bp, Homo sapiens
gggtttatcctcggctttctcccagtaattatagtaattgctgcccatcagatattacacatatgtgggcactaagaagtgtatcacttatgggtgcaaaaaggaggtagatctctgatgaaaaaaaatgttccttacagtttctgtaagtcttagtttgaaaaaatggtcactctcagacgttaggcatactcattgctccagggatttcatgttttacaatttaagaaacatcatacacatgtgaaaacatatatctgcaagtatggaaaattcattgtgatgcaaaatgatttaaaataaaaatatatcaatgaaggcaggatgagtaaactatggtacgtatatacaatgaaatacctagaggtccattaataatgagcacaagtgaagttattggcctataaatttttccatgaaatatatctgactgaaaaagcacattgcataatttgttatgatccarctaatacaaaagtctaactcatatgtagatatctagaactcaccaaaatgttaatgataaaaaattttagtgacttgatctacttactctctgtagttttcagtatatttacattatttaaaaggagtatgcatatttaccaaaaatgataaacctcatttta

SEQ ID NO: 518605 - DNA, 621 bp, Homo sapiens
ctaatgcatctttataattttttttatttcattaaattggacttgacctttctctggtgcctccttgattagcttaataatcaatcttctgaattctttttctggaaaatcagggatttcttcttggtttggagccattgctcatgagatagtgtggcttattgatggtgttaaagaaatccattttgtcatattaccagaattatttttctggattctcctcctttgagtaggctatgtcagagggaagatctcaggctaaaggtctgctgttcagattattttctcccttggggtgatcccttaatgtagtactctcyccattttcctagggatggggcttcctgagagccgggctgtggtgattgttatttttcttctggatctagccatccagggggctactggattctgggctggtttttgtggggggtgtccacacaaagtcctatgatgtgaactgtgttgcagtctctcagccatgtatagcagcacctgcttcagtggaggtgcaaaaagagtgaaatggactttgtgagggtccttagttgtatgattgttgtttattgcactagttttgtgctggtttgcctcctgcaaagaggagatgctttcaagaga

SEQ ID NO: 518606 - DNA, 621 bp, Homo sapiens
ctaatgcatctttataattttttttatttcattaaattggacttgacctttctctggtgcctccttgattagcttaataatcaatcttctgaattctttttctggaaaatcagggatttcttcttggtttggagccattgctcatgagatagtgtggcttattgatggtgttaaagaaatccattttgtcatattaccagaattatttttctggattctcctcctttgagtaggctatgtcagagggaagatctcaggctaaaggtctgctgttcagattattttctcccttggggtgatcccttaatgtagtactctctccattttcctagggatggggcttcctgagagccgggctgtggtgattgttatttttcttctggatctagccatccagggggctactggattctgggctggtttttgtggggggtgtccacacaaagtcctatgatgtgaactgtgttscagtctctcagccatgtatagcagcacctgcttcagtggaggtgcaaaaagagtgaaatggactttgtgagggtccttagttgtatgattgttgtttattgcactagttttgtgctggtttgcctcctgcaaagaggagatgctttcaagaga

SEQ ID NO: 518607 - DNA, 549 bp, Homo sapiens
ataaccttgctacgcctcagtttccttttcttttttttaatctcaaaatagagatgaatatgaaggaatttgtaaagataaaatgaaattgtctatataatgagcacagtacaaagtaagaaatcaacaattattttctttctcctttccttacagcttgtaattaatcatggtatttatagagatgtataagcaagaatagtccagtttgcaaacaacattttttttctgttactttttattcttccttcttcagartatgtctccattttccaaaactgcaagataaaaaaagaatcattgagcttcctgtactaagattatagttcacattcaatttgtagccatctagtcaaaaaagtgcaaaatcacctcttggtcgtctctgctttgccctatctttctccaaatggaagggaatgtgctgtgcccacccattttgctgaaattgacccaagggagagaaatttgccttgcatttgtcattagaaacctgttgcttttttattctctatagatgcactagttccatgacttcacttttactag

SEQ ID NO: 518608 - DNA, 298 bp, Homo sapiens
gggtaaaatatatcacgtttatacatatgaccacagtgtattttgatgacatattcagtaattaggttgctgcttcttatagtatgttccttagatcacagtttatcgaaccatgtatgtattaatatatatgtaacaagtagaccaaatatcatttaaacaatactgaaagcagtttaaacttcccagagtgagaatttaattcaggtttsggaaataattattctgttctgagaaaagcactagagtgggacttttacttacacaactaagaagagactagcagcacattgtcctt

SEQ ID NO: 518609 - DNA, 647 bp, Homo sapiens
ctgccagtgagaggcaagtattcttggtgcaaatggggaaagggttttgttagattttgttttccatctttggtttacagtattccttagataaaatcatggcagttattttcttaaataagatgaatggtagttcaccatttagaacaacagartaatactttgtacagagggtttcactttcttctttcatttaatcatttcatccaattttaaaatatcataattatttgacaaatataaaaaggaaggttacataaattttaaatatcacatagtaagatatgaaactggatttcaaatccacataaatcagaattctaacattttaaatttagtcttctacactgcctctccactgtctgctaagtatattttttgtttgttttagtttttaaaaaaatattttaaaaaagctagtatcttaataggactaagccaagaccaagtttgcaagctgacattctaacatatctttagtaatcttttttatcaaaggcactgtatctttcagaggaaacctataccagatgaagttgagaaacaggagtgaacattttagctattgtctatgtaatttgttcccagatttgaatattttcattcttaaaaatcatttgcatgaatgaaactcacaaaaaatgtga

SEQ ID NO: 518610 - DNA, 327 bp, Homo sapiens
caaactaatacggtcagtatcacactgaaagaactgaatatcttttcacaaatatgaagaattacgattttgttcttcatgtaatgagatggcataatttaacatttaggatatgatatgctttataagcatctttgagggttcttaaagacaccaaaagaaaaaaaaaagtttggaccattgccctttcaaagagtctgaagtgcaggcaaagaacagatatgccttatttactagtraaccaggaaagacaactgaaagattgatttcaaatatgagccccaaaacaacagtcacaaggaatgaagctgcttatctactgtagag

SEQ ID NO: 518611 - DNA, 556 bp, Homo sapiens
acctacacccaacagaagacgatgactcagtcctgcatttcctgactatcaacctaaccacagaaggtggcctaggtgggtgcattccttctctggactgacctcaacaacctcaggaaagtaggtcagcacagcaaggccaattactcaggaaccaggctgacagcaagagtgttcccttttccttctcctactaggcctgagatttcccttctccactcagaaacatatatgggtacatacaataggctgtccttctcattagttttataagccgtattttaagattgattaaaatataacactatctgatatgcaagacgatatttaaaagtaggaaaggaaaaakgacataaatgaagttaaggtttctgcaattcactgaaagtggtaaaatgttgatatcattagactgtgataagccacatatgtatattataataactagagcaaccactgtgaaaactaaacaaagagatatgctcaaaataaatcaagatgtaaacctaaaaaataaaaaatccaagtaatctataggaagtcaagaacaacaaaa

SEQ ID NO: 518612 - DNA, 508 bp, Homo sapiens
gtaatgtgtatgaagaagaaagctttgggccaggcacggtggctcatgcctgtaatcccaacactttgggaggccaaatctgacagatcacttgaggtcaggagttcgagaccagcctggccaacrtggcaaaaccctgtctctactaaaaatacaaaaagtagccgggtgtggcggtgtacacctgtaatcccagctactcgggagcctgaggcaggagaatttcttgaacacgggaggcagatgttgcagtaacctgagatcgctccactgtactccagcctggatgacagagtgagactccgtctcaaaaaaaaaaaaaaaaaaagaaagttttggctactggtgtgttaggcttggtgggagaaactgaaggcagggagatgtaaggagttgactgcaattgtataggaattgaagaggcagaaagaatatctgaatgtttgatggtagagaaggtgaatgtcagaaaaaacaaagcggagcagacactgtactaagaataacc

SEQ ID NO: 518613 - DNA, 534 bp, Homo sapiens
aaattacgacaaacttagtggtttaaaacaatacacgtattatcttctggtttctagaggtcagatatctgggctgttggttagagctcagatgycaacagggctgtgtttctgtctggaggctttgggtatgaatctgcttccaagctccttcaagttgttggcagaatttagttctgtgtggttataggaatgaatgaggtccctctccttgctggctgttaccttaagatgttaacttctagaggctgccctcactccttggctcatggctctccatcttccatcttcagatatagcaatggcagatcaagtcctttgttatgcttcatatatctctaactttacttttctgccttctgctggtgattagagctcattcgattttatcaggcccatgaggataatctgagatagttccttattctaaagtcagctgagtagtaaccctaagttcatctgccaagttccttcacggcagtacctggattggttgattggattaccaatcagtcaaaccaggggacagaaatc

SEQ ID NO: 518614 - DNA, 534 bp, Homo sapiens
aaattacgacaaacttagtggtttaaaacaatacacgtattatcttctggtttctagaggtcagatatctgggctgttggttagagctcagatgtcaacagggctgtgtttctgtctggaggctttgggtatgaatctgcttccaagctccttcaagttgttggcagaatttagttctgtgtggttataggaatgaatgaggtccctctccttgctggctgttaccttaagatgttaacttctagaggctgccctcactccttggctcatggctctccatcttccatcttcagatatagcaatggcagatcaagtcctttgttatgcttcatatatctctaactttacttttctgccttctgctggtgattagagctcattcgattttatcaggcccatgaggataatctgagatagttccttattctaaagtcagctgagtagtraccctaagttcatctgccaagttccttcacggcagtacctggattggttgattggattaccaatcagtcaaaccaggggacagaaatc

SEQ ID NO: 518615 - DNA, 626 bp, Homo sapiens
ccctgtatacaaaatcaactcaaaatggattaaagacttaaacctaagacctgaaactayaaaactcctagaagaaaacatgggatcaggactccttgactttggtcttggtggtgattttatggatgtgaacccaaaagcaaaataaataagtaggactatatcaaactaaaaatcttctgcacagcaaaagaaacattgacagagtgaaaacgcaacctacacaatgggagaaaatattcatgaaaacaacatatctgataagtgctaatccccagaatgtacaaggaattaatagagctcaaagcaaaaaaactaatataagccaacaacaacaacaaaaaaatgggctaagggcttgactagacatttctcctgagaagacttcagcttttccagtttagaaaggatagcagaagtagcgtatctattgtagctaacatttgagcacaaagaccagaggaatgggagattttccttaagaatgcttatatattatatttccatcactgaagagcgatttttgaagctagtggtcttctagtatacagtaaggtcaacttattttgaaacacaaaagcacaatagagaattagcttccatcaatatacgtactatactgaata

SEQ ID NO: 518616 - DNA, 626 bp, Homo sapiens
ccctgtatacaaaatcaactcaaaatggattaaagacttaaacctaagacctgaaactacaaaactcctagaagaaaacatgggatcaggactccttgactttggtcttggtggtgattttatggatgtgaacccaaaagcaaaataaataagtaggactatatcaaactaaaaatcttctgcacagcaaaagaaacaytgacagagtgaaaacgcaacctacacaatgggagaaaatattcatgaaaacaacatatctgataagtgctaatccccagaatgtacaaggaattaatagagctcaaagcaaaaaaactaatataagccaacaacaacaacaaaaaaatgggctaagggcttgactagacatttctcctgagaagacttcagcttttccagtttagaaaggatagcagaagtagcgtatctattgtagctaacatttgagcacaaagaccagaggaatgggagattttccttaagaatgcttatatattatatttccatcactgaagagcgatttttgaagctagtggtcttctagtatacagtaaggtcaacttattttgaaacacaaaagcacaatagagaattagcttccatcaatatacgtactatactgaata

SEQ ID NO: 518617 - DNA, 626 bp, Homo sapiens
ccctgtatacaaaatcaactcaaaatggattaaagacttaaacctaagacctgaaactacaaaactcctagaagaaaacatgggatcaggactccttgactttggtcttggtggtgattttatggatgtgaacccaaaagcaaaataaataagtaggactatatcaaactaaaaatcttctgcacagcaaaagaaacattgacagagtgaaaacgcaacctacacaatgggagaaaatattcatgaaaacaacatatctgataagtgctaatccccagaatgtacaaggaattaatagagctcaaagcaaaaaaactaatataagccaacaacaacaacaaaaaaatgggctaagggcttgactagacatttctcctgagaagacttcagcttttccagtttagaaaggatagcrgaagtagcgtatctattgtagctaacatttgagcacaaagaccagaggaatgggagattttccttaagaatgcttatatattatatttccatcactgaagagcgatttttgaagctagtggtcttctagtatacagtaaggtcaacttattttgaaacacaaaagcacaatagagaattagcttccatcaatatacgtactatactgaata

SEQ ID NO: 518618 - DNA, 450 bp, Homo sapiens
catgccttggcctcccaaagtgctgggattacaggtgtgagccaccgtgcctggcccctgcttttcttttgttcggtgttcttgtccatggagctccctcaggcaggtgtcacaggtgtagacaggccatatacttgctgggtcagccctaatctgctctctgagtgcttcctggggggacatagggttgtgcctgcycaggcataagcaggacccctggactagaagctttagtggatatggcctttcttatgagagtgggttggagttgcctgccctgccatccaggcattttcggggcaacaggaggctgtgccctcagcaaattcaggcagaggcaggacctctggactggaagctctagcaggtgtggttctcctggagtcacccaccctgctttctgggtattttccaggacaacagggtgctacaatcagacagaagtgggac

SEQ ID NO: 518619 - DNA, 593 bp, Homo sapiens
atattacaaaaagttcttgagttatttttcccaaagcactcaatattgggcataggtatttacctagtttctctctccctctctggctaattaagtactttctctttttttctttctttctttctctctttctttctttctttctttctttytcttccttccttccttccttcccttccccttccttccctccttccttccttctttcttttgtttccctttttttttttttttttttttttttttttgaggcagagtctcactctgtctcccaggctggagtgcagtggcgcgatcttggctcactgcaacctccccgcttcccgggttcaaatgattctcctgcctcagcctcccaagtagctgggactacaggtgctccccaccatgccccgctaattttttgtatttttacggggtttcaccctgttagccaccaggatggtctcgatcacctgacctcatgatccacccgcctcggcctcccaaagtgctgggattacaggcatgaaccactgcgcctggccttgtttcctttttccacttggacttttctttttcttcaggaattttttaccctctgtgtccccagg

SEQ ID NO: 518620 - DNA, 550 bp, Homo sapiens
tgaaatcttaacattccccaggatgaggctgtcctgcgaactgaagccccagcctctttactttgagctggaattacatcacctgtgtaacaaccttgttcatttcatactcacctgaagctggcttggtgactagaatggcttctaggtaaggaaaacttggaagcaaattgattattagaaaaaaatccagtttgccttctagataaaatcttcccaggtgtccttggtgggaaaaggctgggaatggtgctcagggcagtgacctgcagatccctaggtggagaatagcacccccatcccaccctccttccttcttccccatctgccctcactgcctccctgcaactgaacagaaccagctaccaggcatccttggccagtgtccagagcacattgattgacctcagggaaaaagctctgtcttttttcccccagtcatacacctacaaagccccagtgcaaggccagcagagtgcattgakgtagttcacatgaaaacagtaacacttgtttgttttgcacttcaaggtgcagaaaatccttggca

SEQ ID NO: 518621 - DNA, 675 bp, Homo sapiens
gctgtgtggcacctgctgcactctggttggtcactgcctctcgggtgtgttgtgtcctatgctgttacataaccagcctggaagggtacttttgaaaatgcattttctttgggtcctcaactagaatatcttaatcatccctcataggcgcagtgctctttaatcattgtcaaggatgtaattggtggataactgaatgaatgattgagtggtgagttagaccagtgacatccagtgcttctctgccccccacacccrgagcagagccctgggcagccacaatcctggccaccctccttgtttccaggtgtgctgaggcctcttggcagtgcttaggctgaggaggaggtcatggagttgaagagtagcagggaagccagatgtcgctgagccaggtcccgccacacttctctgaggtgggtccagtgtcatggctgctgggtgaaggtcgctgaaggaaggcactgcagcaaatagccccatgtgtgggtgccaggctgctgctccctgcaccccagggctaccatgactcctggtgggtggaggaagcaccgggacccccttcccaggcagaagcctcccggagcaggacaggatctggggccaggggaggcacagagcccaccagtatctcccctttccaaactctccatcatgccagcagccaatgccttt

SEQ ID NO: 518622 - DNA, 570 bp, Homo sapiens
ctgcctgtgtggtagatagtgaaaatcagaaaagactccagtgccccctcaatgtagttctcctttgtgcctgatatcccctcatcagcagttctcacctttgagttttaatggattcaaatggatatgtttctggagagggggagggtatcacacgtgaagacccttctcttcagcactgtatttctcccatgatagaagggcccttagcccccaccctgctgcccccaaggcctagagcgtggtaggggcagggtgcctcagtgggacagatgtgtagaagtccaaccttcttgacttccttgctttgctgtgagcatcacagcagtgcgcraaggagggggcaggcaggggaaaggggtaggcttgtgtgaatggctgctgtgaattttaattcaattcagtctggctggcttactgaatcaatgttgggaaaacatagcgctctcctgggaggagaggtgtttggtataaatagaaggtattatcattaagaggcaattaggggacgtcatgtcgctcaatacagcgcaaggcagcagcacgagccccagccgtgggctcagagct

SEQ ID NO: 518623 - DNA, 696 bp, Homo sapiens
ctgccaggaattctgcagggacagcccaggtgcgagggggaaaggtaggcacgggcctctgcctgtgctgagtgtgttggcatttcctaggggcggggtgcattttggaggccatgcaggtttggattgctgggttctcttctaaaatggaaggtcgggaaagaaagctgagattgcatgggagctaattctgaaggtctggcagcctcagtggcaggcagggaagaggtccttgcctgtgtcagtgcagaagtgggactgcagggcctgcccctgccagcaccctctttgtcactccccacacttcctgctggtttggcatggaatcacttgtgtgactgtgtgcttagcatctgcttctcttgccagattctgggttcctggaagatgagaacgctatctcctccattcccctccatgtctccagtgcctggcacagggcatggcacatgggaggggctacagaaatattttcrgaatcaatgtaaatttgaatgaatggccgtttccaagattcccaactctacctaggcacctgttttataaaaagtaaaatatgatgatcagatgatgacctgctttgtaaaagaaggctttgcttctcaaagggattcattccaaagctcctgtaagcagcaacataccccattatatttaaagagagatgtaacttgtaaccaatgtcaggaacccagc

SEQ ID NO: 518624 - DNA, 633 bp, Homo sapiens
ctgcatgaagtccaccttactgccgtttctaccttcacagtccccraatccctaaggcatctcagttcctaacatcaaattagtgagcaatatacatgacccagaaggcagttcagcagagtatataacaagagctgaagtgggtcatacacctgtactgattggagttgttcgggcctcttggtgcagtcaagcagagattggattgtatgcctaacatacggaaattgccttacaaagctccttgatgtgcattgttcagccgggcaggtatgcattattcatgtatccattttaagaatgaagaaatctgcattgccaagtgacaatttgcagtacaatgtagtggttagggagagaatgctgggggccctggtcttgggtatgaattttagcttgtcttggtctgttttctgcttccataacagaatatcacagactgggtaatttattaaaaaaaaacaaacaaaaaaaagttgatttcactcaccattctggaggctgggaagtttatgatagagggctctggcatctggcaagagtcatccatgtggaaggcatcacatggtgagcaagtgcaggacagaatcagcccaaactcatccttttatcaggagcccactcccgcaataa

SEQ ID NO: 518625 - DNA, 682 bp, Homo sapiens
gttaacaggaccacttggaaccagtgggagttgctgagaagtagaggtggggttattggtcacaggaaggggtatgtcttagttcattttgtgctactgtaacagaatgtctgagactgggtaatttataaagaacagagttttattgtaatacaattctggaggctgggaagtccaaggtttaggggcttacatgctgcaagtgccttcttgctgcattataacatagcagaaggcatcacgttgcgggtggggaacatccacttccaagatggttcctcacatgcctgccaagttagtgctggtatgactggcggcctcagttcatcaccagcaagaactccacagggctaagttcctcctgacatggtggctatatgtctccagagsaggcaatccaagagagcacaaactagaaatcacaatgtctcatatgacctagccttggaattcaattcgcactatgtcatttctgtaacgtcctgttggttacacagatcgactctactcaatgagggagaggcctatacagtggtatgaggaccatgaggtgaggatcactggggggccatcctagaagctggctaccaagggctcaggtgtcatgctctgtatgtaagtatgaattcagaggagggaacagtctctgggataactaggattggtttaatgaaagaggttg

SEQ ID NO: 518626 - DNA, 592 bp, Homo sapiens
ccatgagaggaaataggccgagaggaacatgctaaggatggcagattggaaaggcataaggaatctggtttctcagtgacattactgagcaactgagatggccatccatgaatttcttgttatatatcataataagtgccattattgattaagccattttgagtagggtattctattactgaaagctgaaagtctcctaaatgaaacaggcgcaggtgtttcatccccctggggaagggggatatctgcacatcatgccgccccacattctgctatttctccattaaggacatactccctcctccatattcttactcctttcctatccccttctcatcccctgccatcctactcccaaaattgagtgtcaagtctcttaagagtgttggcacagaaaaaaaagtgagaatcactgcaaatgagctgaaggaggtcacggtagygatctatttatcttcttaccctcagtacctggcaaagttaataaagatttgagcacaagggaaaaaatgaatctataaatgaatgccctgccacctcttaaaacatagtttcaaaattgaactcaactttccccaaataccttcccaag

SEQ ID NO: 518627 - DNA, 437 bp, Homo sapiens
tgtgcagcatctacctgaaactgctaagaaccaagatggagtaccacaccaaagtgagtctctgcggacagttctgccgccaccgccgcctcccctgctccatcccttcagcccctccctgggctcatttgtcagctctttcaggtaatagacagcccaggcttctgaggaagtgtgcacatcatgtacccaagctgtgagagaggaaagccaccgccaggcccacggggtgtgacgaaggctgggattttggcccgtgtcttctgcaccctttgttccccattttgcagctagaaagaaacctggccaggcacrgtggctcacacctataatcctagctctttcggaggcccaggcggatggatcacccgaggtcaggggttcaagactggcctggacaacatggcaaaaccccgtctctactaaaattacaaaaa

SEQ ID NO: 518628 - DNA, 565 bp, Homo sapiens
gaagttctagagagcttgaagcaggaacttgccacaagccaacgggagcttcaggttctgcaaggcagcctggaaacttctgcccaggtaaatacctcctttttttttttggagayagagtcttcttctgtcactcaggttggaatgcagtggtgcgatcgcagctcactgcagcctccacctccctgggctcaggtgatcctccccacttagccccccgagtaactgggactacaggcacacacccctacacctggctagtttttgtattttctttggtagagacggggtttcactatgttgcccaggctggtctcgaactccagggctcaagtgatcctcccacctcagcctcctaaagtgctgggattacagacatgagccttcatgcccggcctcctttcttgccccacccctggctttggcgttgctgtcatccaccatccttggcctggccaagtcagcccccactgcaatcagtgtgtccccgggagggaatcagagtggcaggttaaagagccatcaccttcccagtccttgcaacccggtggtgggttggacctct

SEQ ID NO: 518629 - DNA, 536 bp, Homo sapiens
gttggacactgtcaggtcacatacacacagctcttggcagaagcccagccctcgggcgtgcaaggccaggctggctcacaaaggtcccacggcaggagcaggcacggggatgtgcccgggtgggggtggcaggtccccaggcaaggggccagagaaggaaaacctgagaacaggcagcacagatgggaaaggagaagggcaaaacaaaggcagaggaggccgggcacggtggctccacctgtaatcccagcactttgggaggcggaggtgggcggatcacccaaagtcaggagctccagaccagcctggccgacatggtgaaatcccatctctactaaaaatacaaaattagccaggggtggtggcgcgtacctgtagtcccagctactcaggaggctgaggcaggagaatcacttgaacccacgaggtggaggttgcagtgagccgarttcgcgccactgcactccagcctgggtgacgagagaaactctgtctcacaaaaaaaataaaataaaggctgggcgcggtggctcatg

SEQ ID NO: 518630 - DNA, 432 bp, Homo sapiens
agctgtggaggacattcatcaaccaacactagctgagtgattcctcatctccccatgggaacgcctgcaagcaaagccttagccagggtgagggagatcccagccrggctgtgatcctggtggctctggcacagagcattctcaccgggcttgccttggacaggagatggactttttcaacaaatccaggaaccttcactttgactcaaatgagaaaagccttttgctgcctctctttctgggggcatgattacaccctcaggaaacacacaaattcctagacctagggcttagttcaggacacctgaaaggtgcagcgtcactcaggaactaggaaggtgggtgttgctggtgggagagggggcactgtgtcatgctatgaatcataataacagataacattgatcacgttcttagcatagtaccaggcac

SEQ ID NO: 518631 - DNA, 572 bp, Homo sapiens
tgctggaccaggcagtaaaaaaaagccctgccaagcctgggtggagggcattcttgaaagctggtgcatgtggggggtgggaagtggagggaggcttattctctctgacaaatagatggagactgttttcctatacccttgggtgttaatcttttcttttgaatcttgcaagcccatgsgattgagtgctgaaacccattacagagcaattgtccttggagctcaagttcccttacaattcttttcatgggaggctcatatgatgggtgccaacattactccatgaatcatagacactcctgcttgaggctctaagaaatgtttttcacctgcctggctccaccaagcaatagaactttattcccctttgtgcactctgaatgccctcatcttcaagaaagcgggctttcctcaaaagcctccttcttagaggaggagtttttaatcaaatacagaaaaggccatagacctgagttagagacactgtggggactgatgtaattgtagtagtgcaagaatctgattctatgaatcacagattcaaggcatgcgagatcaggaggcaactgtgg

SEQ ID NO: 518632 - DNA, 572 bp, Homo sapiens
tgctggaccaggcagtaaaaaaaagccctgccaagcctgggtggagggcattcttgaaagctggtgcatgtggggggtgggaagtggagggaggcttattctctctgacaaatagatggagactgttttcctatacccttgggtgttaatcttttcttttgaatcttgcaagcccatgcsattgagtgctgaaacccattacagagcaattgtccttggagctcaagttcccttacaattcttttcatgggaggctcatatgatgggtgccaacattactccatgaatcatagacactcctgcttgaggctctaagaaatgtttttcacctgcctggctccaccaagcaatagaactttattcccctttgtgcactctgaatgccctcatcttcaagaaagcgggctttcctcaaaagcctccttcttagaggaggagtttttaatcaaatacagaaaaggccatagacctgagttagagacactgtggggactgatgtaattgtagtagtgcaagaatctgattctatgaatcacagattcaaggcatgcgagatcaggaggcaactgtgg

SEQ ID NO: 518633 - DNA, 633 bp, Homo sapiens
ggcctggtgggacttgtttgtcagaaagaatactaaatgccttagtagacattttaaaatgaagagcagtttctttttgcctttgtgtcctcatagctgagctcccacatatcagtaagaacacacaatgtttggttttccattcctgagttacctcacttagaataatagtctccaatctcatctaggtcattgcaaattctgttaatctattcctttttatggctgagtggtattccatcatatatacataccacagtttctttatccactcagtcattgattgatgggcatttgttgttaactagcaacccaggaagccataagttttcaaagtacattcaaattctttgaaattagaaatactactgtctttaccaaactttggaaactgggtgctgagaacaaagtgstacgtttgctttttcgtacatgacattatgtagtaggatggtacacaagcattttttttttcttggtaaccagaggaatgtcaacgaagtctattttaatgagtgaacaatctcatcttgactgactgactcatctgctggttgcaacatgtccacacatcccacaagacctctgaaaacactgagtgagtcagggaggatgcagaagctccaatgtgag

SEQ ID NO: 518634 - DNA, 530 bp, Homo sapiens
ccattggtcttcccaaaacatccaaatattcctgtttatgggaaaaaaaaaaaaagtcgtggttaaaactaggaatgctgtgttgaaataaaaattacagagaaaaaatattctagagttaaaaatgaatatagaatcaaaattattgasactgaatatataatcagttaatttctattttgggtactccataggtggtatggctacgttattttgaatgaacaatatttgacttacattatttatacaatatatctaccccagtttttttctagtaacaatcagagcattgtttttctgtgttacagccagtaagtgaaatacgttccctgtgaattgtttcatgttaatctaaactatttaaggctctgtgatttactgcgtggaattgcacaaatttaaaatcatacagcagccacatactttctttcatatcacagattgtttggctgaaattcaaaactacatttaaacacatcaaaaaataaaggaaatactgtgccaaatctagacatcagactcaaatgcag

SEQ ID NO: 518635 - DNA, 616 bp, Homo sapiens
tttcctttcatcaaaaacctttaattttctctgctaaatttctacttgtcctccttttcattagtcctcagtctcctgaaatttcatctcaacctctcctccaaaactgctttggatgatttcttaattgctcattcyaatctcaatatattctgtcagtttccctctgaaaactcagacttctctaagtcccagagcttcactgccttctcactcactctcttctcaagatagtccgactcatctgccccttaaatattggtgtttataaattctttacctatatgattttattaaatgttatggtttcctatcttcattctggtccaaattcccaatcgtcattggatactcatacctaggagtcttaaatatatgactaatctaacatacctagaaaataactaacatctttctcaatatctcttcctccttttgccctctgtatctcaggacatagtcaaagcggcaaagtcagctaagctagaaactttagtgtcattaaatgaccaaattctgacaagcctacaccttaaataccttttgatttcccactactttctacacccactgctactttctttcttcagacttttgtcaactcctgcccaaccat

SEQ ID NO: 518636 - DNA, 541 bp, Homo sapiens
taacctaaatctaggctaatctcatctctagatccttaacttaattacatttgtaaagtccctttatccaaataaggtcacattcacaagtttcaaggattaggacttggacatttcttttttggggacacaattcaacccaccatacatattcccttggcattatggtatttgagtggaaaatgcttattatgagttccctaatttatatctccaaccttgttttttcccttatgtccagattcttacatccaagttgatatagtagatggccaatttgatttctccacctgagtgtgcctcaaaactgrggtactcattctcccatcttccaggggagtcgactagttgtggctcatagctaagattctccccagaaattactttggggtggaggaagctgcttttctccaagtaatacccacttcagagggacaaagggacagaaggacaggtttggtaacatgtctcaattcagcccatctctggagggccatcccagctccagtttcccatgagattgactgacgcctctgtttca

SEQ ID NO: 518637 - DNA, 473 bp, Homo sapiens
  misc_feature (1)...(473): n = A,T,C or G
gtgtgtgtaggggaactgccctttataaaaccatcagatcttatgaaacgtattcactatcacaagaacagcatgggaaagacccaycctgtgattaaattacctcccaccagnngntccgtgtcacgtgggaattatgggagctacaattcaaggtgagatttgtgtggggacacagccagaccctatcactctgtgtgcttcccaggaggcttgcagcactcacactgcacctccaggctttcattggctgcctctgacacctctgtgactcccagcagaagtcatccagttccatgccccttaccattactcctgccccagcacctctcacacgcctgagatgtggcacttatggttctcttccatggtgcttcaccccagttcaccctggtgcagttttagcaatgcccccctgcatgtcagggccatcagcacctcatccaccaccaatggtgcattctcacttccag

SEQ ID NO: 518638 - DNA, 473 bp, Homo sapiens
  misc_feature (1)...(473): n = A,T,C or G
gtgtgtgtaggggaactgccctttataaaaccatcagatcttatgaaacgtattcactatcacaagaacagcatgggaaagacccaccctgtgattaaattacctcccaccagnngntccgtgtcacgtgggaattatgggagctacaattcaaggtgagatttgtgtggggacacagccagaccctatcamtctgtgtgcttcccaggaggcttgcagcactcacactgcacctccaggctttcattggctgcctctgacacctctgtgactcccagcagaagtcatccagttccatgccccttaccattactcctgccccagcacctctcacacgcctgagatgtggcacttatggttctcttccatggtgcttcaccccagttcaccctggtgcagttttagcaatgcccccctgcatgtcagggccatcagcacctcatccaccaccaatggtgcattctcacttccag

SEQ ID NO: 518639 - DNA, 615 bp, Homo sapiens
atgaatgtgaatttccttcactcttctaagttaacaggaggtttattcaacaatattcagcaaacatttactgagcacttctatgtacgaatcattaagaacagaggtatacaagtcatggggtctgtccaggacagctcggctttctcagcctcagcacgactgacgttttggagtggttaatcctttgtcctgggggccgtcctgggcatgggaggacgtttagccgtgctcttggcctctgtacactaaatgccagtgcaccacccgccataacaagcaaaaacrtctccaggctttccaaatgtccctgggagggaaatcacccccagtagagaacggctggtgggtggagaagtcagaccagcagacagggagttcctaggccacagtgttgggataggggtgagagtcgtgggggtcaaggggaggtggcctgacccgtgggggccacctggggcaggaaggctccccgggctggaggtgctcacgtgcgggcctggaaggtgacaggtgtttcaatagcccagtggggtgggagctggtggagggcatcagaggccagagggcaggagtcctcggtgaacagtcctgggatgagatgggcagaggaca

SEQ ID NO: 518640 - DNA, 463 bp, Homo sapiens
tttggtctggttttgttttctgttataatagggcagcactgaatccaaagcctcacaattgctgcactctccccctccctatcacacactctccactctccactccatgccaccactgctggaggtggggaaggggtggcatcagcgattcaagactttttcctacctcttcagtgcctctttcagtaatatgacattaaaaccaggtactgtgagtacttatctgatttttgattcttatgaaggtgtttttttgtgcagatagttgttaaattggtgtccttgcaggagggatgatcagtggaaccttctattctaccattctgctctacccaccttccaggatccctcaaaggttttcagcataagggtaacataacagttttatatttttaaaagatagcactgtgatcagagtaatgagtaaacgagagagagaggygtgttggacactattaagtac

SEQ ID NO: 518641 - DNA, 566 bp, Homo sapiens
agctgcgggctggagggtgtcctggtggagactgtgaaggcattgctgtgagcaatttgtgccttcgtgctttctgtttctcctcatttctccagacactgcctctttttggcctggcagggccagaccctccggctgaggcaggtcgcctggggaagaaagctgactctctcctagaagaggcatgctggtgaaaggaagagggtgaagcgccacagatkcccaaggattgaaaagtgcctgtgatacagggaggggaaggtgggcagggtgcgtaaaagaaggtcgaggagtttcctgaagaatttgtccacccaccaccctcccctttggggactgtcagtcccaggtgttcccacctgtgcaggtgagcaggctcctctgcaggctgcctctgcggggctgccctggctcccaccctcctccctgaggctgctcactgcagaggcagatcggtcccatcacccctgctaacgaccttcccatagcagcccatggttctcagattcgagtaacagttcattttgttttattttactattttattttattattttattttatat

SEQ ID NO: 518642 - DNA, 566 bp, Homo sapiens
agctgcgggctggagggtgtcctggtggagactgtgaaggcattgctgtgagcaatttgtgccttcgtgctttctgtttctcctcatttctccagacactgcctctttttggcctggcagggccagaccctccggctgaggcaggtcgcctggggaagaaagctgactctctcctagaagaggcatgctggtgaaaggaagagggtgaagcgccacagatgcccaaggattgaaaagtgcctgtgatacagggaggggaaggtgggcagggtgcgtaaaagaaggtcgaggagtttcctgaagaatttgtccacccaccaccctcccctttggggactgtcagtcccaggtgttcccacctgtgcaggtgagcaggctcctctgcaggctgcctctgcggggctgccctggctcccaccctcctccctgaggctgctcactgcagaggcagatcggtcccatcacccctgctaacgaccttcccatagcagcccatggttctcagattcgagtaacagttcattttrttttattttactattttattttattattttattttatat

SEQ ID NO: 518643 - DNA, 641 bp, Homo sapiens
taaattaaggatgttgagatgaagagattattttggattatgtagatgacgaatataatcaaaaagatctttattaattttttctttccaatgtttattttaggtttaaggggtacatttgcagatttgttacwcgggtaaattgcatgctgtgaggatttggtgtgcagataattttgtcaccgaggtaataagcctaatacccgacagataggtagtttttaatcctcaccttcctcctaccctccaccctcaaataggccccagtgttattgttcaaaaggctccttctaaaagaaaaagagaaatgcaggagtatcatagagagaaaaaatttatggttttacacagctggctttgaacatgctgttaaggtggaaaaaacaagaaaatgaattcttccctagaactcacagaaaggaatgcagccctaccaacattaggattttagccccataagaactagctcagatatccagaaagatactaaagttgtattgttttaaaccagtaagttttgggtaatttgctacagtaacaatagaaaacagatactattaaactaatatattaccttataattctccccatatatgtaatttttcagagatgtaacatcggtgtttgataaaaaagtatgc

SEQ ID NO: 518644 - DNA, 641 bp, Homo sapiens
taaattaaggatgttgagatgaagagattattttggattatgtagatgacgaatataatcaaaaagatctttattaattttttctttccaatgtttattttaggtttaaggggtacatttgcagatttgttacaygggtaaattgcatgctgtgaggatttggtgtgcagataattttgtcaccgaggtaataagcctaatacccgacagataggtagtttttaatcctcaccttcctcctaccctccaccctcaaataggccccagtgttattgttcaaaaggctccttctaaaagaaaaagagaaatgcaggagtatcatagagagaaaaaatttatggttttacacagctggctttgaacatgctgttaaggtggaaaaaacaagaaaatgaattcttccctagaactcacagaaaggaatgcagccctaccaacattaggattttagccccataagaactagctcagatatccagaaagatactaaagttgtattgttttaaaccagtaagttttgggtaatttgctacagtaacaatagaaaacagatactattaaactaatatattaccttataattctccccatatatgtaatttttcagagatgtaacatcggtgtttgataaaaaagtatgc

SEQ ID NO: 518645 - DNA, 641 bp, Homo sapiens
taaattaaggatgttgagatgaagagattattttggattatgtagatgacgaatataatcaaaaagatctttattaattttttctttccaatgtttattttaggtttaaggggtacatttgcagatttgttacacgggtaaattgcatgctgtgaggatttggtgtgcagataattttgtcaccgaggtaataagcctaatacccgacagataggtagtttttaatcctcaccttcctcctaccctccaccctcaaataggccccagtgttattgttcaaaaggctccttctaaaagaaaaagagaaatgcaggagtatcatagagagaaaaaatttatggttttacacagctggctttgaasatgctgttaaggtggaaaaaacaagaaaatgaattcttccctagaactcacagaaaggaatgcagccctaccaacattaggattttagccccataagaactagctcagatatccagaaagatactaaagttgtattgttttaaaccagtaagttttgggtaatttgctacagtaacaatagaaaacagatactattaaactaatatattaccttataattctccccatatatgtaatttttcagagatgtaacatcggtgtttgataaaaaagtatgc

SEQ ID NO: 518646 - DNA, 641 bp, Homo sapiens
taaattaaggatgttgagatgaagagattattttggattatgtagatgacgaatataatcaaaaagatctttattaattttttctttccaatgtttattttaggtttaaggggtacatttgcagatttgttacacgggtaaattgcatgctgtgaggatttggtgtgcagataattttgtcaccgaggtaataagcctaatacccgacagataggtagtttttaatcctcaccttcctcctaccctccaccctcaaataggccccagtgttattgttcaaaaggctccttctaaaagaaaaagagaaatgcaggagtatcatagagagaaaaaatttatggttttacacagctggctttgaacatgctgttaaggtggaaaaaacaagaaaatgaattcttccctagaactcacagaaaggaatgmagccctaccaacattaggattttagccccataagaactagctcagatatccagaaagatactaaagttgtattgttttaaaccagtaagttttgggtaatttgctacagtaacaatagaaaacagatactattaaactaatatattaccttataattctccccatatatgtaatttttcagagatgtaacatcggtgtttgataaaaaagtatgc

SEQ ID NO: 518647 - DNA, 606 bp, Homo sapiens
ctctggatccctcaaggtagcttttgacaactgatacctatttctatgtctgtctgtctgtctatctatctatctatctatctatctatctatctatctatctacctatctacctatctatctatcatctgtctatccatccatctatcacctatctctatctaggcattttctctaaatcttggttttcagtctctgtatctccttagagcagcttgagatcaaatctgtcagtctcaaaataagacactctctggctcatgcatgcatttgaccagtgacttagtagtcactcagcatatcagaattttcacaaagccactgrttgacttctaagcatttcccatgtaatttaatataactgctaccaagtatatcatggttccttattgatggtgttataatctatatagcttaaattctaaattattcacccacttttagccattgtgctagcataaaaatactcataggtgaatagatacatttaagccttagggagctaacagtcaagagtagagatagatatatgcaattgcattagaacatgaaatgtttcacagtagtatctatggcctatctagcagaaaaatcctgtactgtgcc

SEQ ID NO: 518648 - DNA, 527 bp, Homo sapiens
ctactgaggaggctgaggcaggagaattgcttgagcttgggaggcagaagttgcggtgagctgagatcatgtcactgcactccagcctgggaaacagaaatgaaaccatgtctcaaaaaaaaaaaagtagttactggttagtgctggaatggaagcctccgaataaaaagacatggaatagctccaaacccaaataatagtttataagtaaatcagagtaaaatttgcaaataaaattttgaaggtctaaatataagattattaagatagtattacttaggcatattaatctacaagctttcatgtaaatgttaaaagtaatgtcactaccaaataggataacatccttgtggtaatgaagtatttcttacacacgtctccaaaaatacaaaacaggatcatattttacacttggtaaagaacttatgactgaattatagatagactggaaacatgctagaaccatgggcagatagaacattgctattagtaaggagaagaatgcwaatttaaatcgcaatacctca

SEQ ID NO: 518649 - DNA, 598 bp, Homo sapiens
gctgggtggagaagcctggttcctgctgcttatggatgtttgggagtttactgtacatagtcataaagtatgcacacagtcagtgactttatacaagctcttccagttgtgaactcagcatttttcttctttaattcttcccacattacctggtatagagtcctggatacagaaaatgtgcaataaatccgttctgaaaataaagatcacaggacattaaaaagttttatggccttaatattggccttataccaaaagttgatgtgtaaaaggctttatatgtctatgtttctaggatgttcacaataaaatgagtagcacaaaggtgccaccatttttccaaaaagggaatgatactcaaaatgtgctctccctcacaaaattctcaaaagacaygcagagaaaatacaaattactattttgatttaattttttgtttccaaggaaatagttaaactccagtttcagaatatcctaaggagccactgcaaaggaaatcatggagaccacttgccaatatgccctcactatgctttcctgcaggcagacatgcatgctgttttcatggtgttttacacacacttagcctcctgcagta

SEQ ID NO: 518650 - DNA, 603 bp, Homo sapiens
tggtttttgagtgcacaatgctgtattgttaactacaggcacaatgttgcacaggtctctagaacttattgmaatatttcttaagcgttttagactttttaaattcaaagtacaaattcctgaaaaagcaaccaccataaaaacacaacacaaataaaagagacaaagcagcagttgaagagagcttagttagtaattctgagcaattaatgagctgaattaatgctactttgtacccaaattactccctgctagcatcttggtgctgagggaggcacatcaactttctcaagctgccttggctacttttttctacaatacagtaggaacacttccagagaatagcagagagtagaactatttatctaagctactcaggtaaactcaacccaaccagctttccatgtggctcacgtctttcaccagtgtgctggagttaatataaccaagatgctgctgctacccaaacactcaaaaaaatggcagcagcaataaaaccaaatacagtgatgggctctttccttttcacctgtatagtaggtttagaaaatatatctttgattttaagacatgaacaacttcaggtaatataagagcaaacat

SEQ ID NO: 518651 - DNA, 589 bp, Homo sapiens
tggtttttgagtgcacaatgctgtattgttaactacaggcacaatgttgcacaggtctctagaacttattgaaatatttcttaagcgttttagactttttaaattcaaagtacaaattcctgaaaaagcaaccaccataaaaacacaacacaaataaaagagacaaagcagcagttgaagagagcttagttagtaattctgagcaattaatgagctgaattaatgctactttgtacccaaattactccctgctagcatcttggtgctgagggaggcacatcaactttctcaagctgccttggctacttttttctacaatacagtaggaacrcttccagagaatagcagagagtagaactatttatctaagctactcaggtaaactcaacccaaccagctttccatgtggctcacgtctttcaccagtgtgctggagttaatataaccaagatgctgctgctacccaaacactcaaaaaaatggcagcagcaataaaaccaaatacagtgatgggctctttccttttcacctgtatagtaggtttagaaaatatatctttgattttaagacatgaacaacttcaggtaat

SEQ ID NO: 518652 - DNA, 638 bp, Homo sapiens
ggcttatcattagatcatatagtttgatatgtgtaaaaagtaatgctcagatatgtggtaaagtagggaagataaataaaatttactcaatctgtttctcttagatggaaagctagtgccatatattctttttttaatcttcagggataaacataaaacatggccccataattacctccatttctagtatgttctctgtgctgcaggtatgatagtaggtgactggcaagcattggctaatttgattcacaatttagtgtggcaataatatkttggctctgattttttaaatagaagaaaaaataagcattcagtatgtaaattggaaagcattatctctttaacagaaggttaactttattaaacattttgctgcactaggtctatgacatttgagaaggaaattttacaaagattttggaaatccccaaatctacatatgtatctttccataaagtacatgtacaatgattttgagaacagcaaaactcatctggaaggcacatgctggaagatgggctttgttcaccctgagtgcccactcatgttcacctactaacatataaactcacaggggtaggactcctggtaggacatgtgacagatcagaaatgtgagaagacaagggggctcgtgga

SEQ ID NO: 518653 - DNA, 544 bp, Homo sapiens
ggatatactaacttcctaaaggccaagtataaaatgttaagatttatgggtatatgaaacttgggtattcaaacattcaattatcataatttgagatatttatcttcaagtttgacagaatagagctacgtgacattgcacagactctcacatttgcattttcctgaataccattaarttattttattgaagaacttttttcttatctgtctctaaattgcattctactaattttgttttccatatgattgtccatcatttttcagataaaaagctgtataaatgacaaacatttttgaaaagttataattaagttacttttgtccccatattgtaacagttatagcattattgtcaatattctgatataaagacttattttcaaaaagacgttagaaagctacctgtcattttttcactgtgcctacatacagggtagactataacctattcagccaaaaacactttctaagcagaaaatctgatcatactttgtgacaaaagaactgggtgtatgaaaaacttatgacatttttcacaattg

SEQ ID NO: 518654 - DNA, 438 bp, Homo sapiens
cctatagagtaggtagaaactaaataattgtttaaacaacagtaatcagaatttacaactattttggcaaggggcaaagggtttgagaatacaataaaatgtgttcccgaggagaaaattagtaaattgcttttctgtcaaatactacstctttgatctaatgttcaggttcagttatattaaataagatgatctcataaagataatggaaagatcatctttgtaggtattctccgtattaacatcattttctgtttttatgagttctttgtgtcttcatattaaacgattttagacaggcaattttgccttttgctaactaacaaattaccccatcactttttggcttaaacccatccattcattttattttatctgaccttgtgggtgaggaactagagccaggctaggttcttatgctccatagggcactgacag

SEQ ID NO: 518655 - DNA, 438 bp, Homo sapiens
cctatagagtaggtagaaactaaataattgtttaaacaacagtaatcagaatttacaactattttggcaaggggcaaagggtttgagaatacaataaaatgtgttcccgaggagaaaattagtaaattgcttttctgtcaaatactacgtctttgatctaatgttcaggttcagttatattaaataagatgatctcataaagataatggaaagatcatctttgtaggtattctccgtattaacatcattttctgtttttatgagttctttgtgtcttcatattaaacgattttagacagscaattttgccttttgctaactaacaaattaccccatcactttttggcttaaacccatccattcattttattttatctgaccttgtgggtgaggaactagagccaggctaggttcttatgctccatagggcactgacag

SEQ ID NO: 518656 - DNA, 471 bp, Homo sapiens
cattgatttgggctggtgatcaatttttacaatgctgtctttaaagtcaatgaataaggaagccagcattcccaaagtagccttccatcaatcaatctaaacaatgccagggtctggctgccaacaactaggcagataacctctctggtggtggatttcaatggagatgtgagctctagctggctctcgccatacccaaaagccatgttcctatgaggctgcttaatattaagtttttggtaatcaagttatgtttccccaaagattcatacttttagagatgctttccctcacttctggattgcaytttaaccagacttcttaacattttagctttactttgtttttttctctccctctcagtctaggtactcagcaatctgtgaacacctacataggctagaaatactcagaagcggaacgtttcaaattgcaactagtcatgagtgcatttctttgcaaagctgaatt

SEQ ID NO: 518657 - DNA, 573 bp, Homo sapiens
taattttgtcctaactcactattttataggtaagggactattatcttagattaaataggctaaagtaaattttaaaaattcttttgtttaaaatattcawaatttcctaatatctatgccaagtctatttgacaatttaaaatatcaggaggactaactcaaagttaagatagattaaaacataaacatatatacattgccaaaatgtagaactgcaataagacatcatttatttgctcacttaaataaaataattgtgatagaaacaagttcagttttctcagctaaaaatggggaatataataaaacttgccttagagcaagagttgactgagataaaaaggactttgtaatttgcaaattgcagttttacaaaaatattcttctgtgtttttagaaataaataattgtgaaaaacaagaaatatagcattaaatgcaataatgaataagaaagcatcttgaaaagtgtaaatttgttgcataaatctaagttatggagactgtagaaataccaaatgtcaccactttaagtagttggtaccttaaactatataagagaagccccattttt

SEQ ID NO: 518658 - DNA, 573 bp, Homo sapiens
taattttgtcctaactcactattttataggtaagggactattatcttagattaaataggctaaagtaaattttaaaaattcttttgtttaaaatattcataatttcctaatatctatgccaagtctatttgacaatttaaaatatcaggaggactaactcaaagttaagatagattaaaacataaacatatatacattgccaaaatgtagaactgcaataagacatcatttatttgctcacttaaataaaataattgtgatagaaacaagttcagttttctcagctaaaaatggggaatataataaaacttgcctyagagcaagagttgactgagataaaaaggactttgtaatttgcaaattgcagttttacaaaaatattcttctgtgtttttagaaataaataattgtgaaaaacaagaaatatagcattaaatgcaataatgaataagaaagcatcttgaaaagtgtaaatttgttgcataaatctaagttatggagactgtagaaataccaaatgtcaccactttaagtagttggtaccttaaactatataagagaagccccattttt

SEQ ID NO: 518659 - DNA, 418 bp, Homo sapiens
ttagtgtttttattagactgaaatgtaaattacttgccttcatgattattctttaaaactataatcayattttgtgtcaggtgagactaaaactatgcctgtgatgacaccactgaagcatctatggcatggatacccactcttctgtcagagtccacatgtcagccagtaccaaggtgacaggagatttctattaccaagatgctcagtaccttgtgaactgttaataatatcattttctttttctctctttttttttttctctctctctctctctctctctttctctctttttttttgagatggattcttgctctgtcacccaggctggagtacagtggtgtgatcttggcccactgcaacctcggcctcctgggttcaagcaattctcctgcctcagcctcccaggtagctggga

SEQ ID NO: 518660 - DNA, 644 bp, Homo sapiens
ctggaagtgtaccaacaccagccyctcatcacattaaaagccccaagtcagtctttcctggaagcgttacccatttttagatacttgggaagcccgccctgcccttcctagaaagcctcattgtgcaagcaataaatttttcataccttcttggtgtgtgtgtctgagtgtgtatgtaaaattatcagcctcaacaaccaaacaaaattcagtgtggtggtcaatcttagttttgtaggacacccatacacattgggtatttacatcaaatatatatatttttttcaattcaaaagacagcaaaattatttgcagagactgcttccttcagacttcattacatgtctttaaccataaaaacctttcctgacttttcctaaactggtcacttaagaaagggaaatgagattctcttctttggctaagactcattatccttatgccctgggctaagaaaaagctgtgtttgacagggcatttgattaaacaatatcagccttcaaaaaacgaaaagagaagaaagaaatgtctgttcagtagacacccatgagtatctactacaagcaatgtagcagaaatttatccagacataatgagtgttgaatagcagttccttcctgtagttccaagtattagcaagcagt

SEQ ID NO: 518661 - DNA, 297 bp, Homo sapiens
gcttacttgaatgacaagaagtcagccatgtcattcaggctgaggtggcaacaggtccaaaggccttacacagaaacaatcatggtacaaataaaaacagaaggagggcagtcttaatttcatctaaagaagctraagtcttattcactacccacataatacttttcaaaggaaataacagaatagttgaaaacataatattgataaaatgattataagtctcttccctgcatttgccatgcataaacaacaacttataaaaaaaaaaggtatttatatcacaatccatctcataat

SEQ ID NO: 518662 - DNA, 536 bp, Homo sapiens
ggttgaaccccttatcccacattctcactaaaatatctgtatattttacatctcagtaacattttacctcccgtatttttgtttcattgtttttctgtagcaactcttcgtgtaaattaaccagtgttcatgggttttccctgaaacaattcacttgactgaagatgttaagatgataagtttgtttcatcatgcagcataatacaaatgtaaaggtgaatattaggcaacactgtatttaaaaatcctttagcttccaactgaaagttatcaccagccaccattttgcaagatcctaacctggttattttgctagaactcccctyttcaacttaattctctttcaattttcctatacagaccactttatctctgtacactgtattcttttggatgtagtccttcattaatgtgtttgcaaaatcaaatgccccaatacaattccagggtgttgttctaggtcccatttctcaccaaacagaaaggcaatcactgtgacaaaaattgccagggaagaaatctttacttggatgcta

SEQ ID NO: 518663 - DNA, 577 bp, Homo sapiens
atataaataatattatcaagaatattaagctaccaaaagaatagcctggtattaaggatttyatttcaggaattgttatattaaaacagatgtttaaaatgatggttaagtggtatagctagagtgtttatagtaagtaagcatatcagaaatgcccctaactcttcactaattacaaaataactatgtcctcagccctgttaccaaggaagggatacctgcatagtatttctgtctgtttagagataagaagatactatgttcattgctatgaaagctggatttttatcctttgcccatggtttagaggtgtgtatgtcattaatcctcattaagctcattagtgatgcttttttgcagacagattctttcaaatgtagaaggcttaaggaaagtgggtgtaaagaccctcaggtggatgccaaagcgctacagaggccatgaagtaataaaactatatttcctttaaaatagtcattttccttctactcactgccccagctattcatttattttataaatatgtgagttcattttatttccatgtgtcagttttaaacatggtgggcaacgcaga

SEQ ID NO: 518664 - DNA, 417 bp, Homo sapiens
tgcttttattcactctcttggggcctcagattgtttaccctgtaaaatgggctggggtcatgtgattcaggaagatgtgggaacaaacacactgttatttaaactcctcaagcagtttttgttttgttttgagacagggtcttgctctgtcatccaggctggggtgcagtggtgcaatcacagctcactgtggcctcaacctcctggctcaagcaatcctcctgcctcagtcccccctgtagttgaaaccacaggtgcacaccaccacacccggccatttttytaatattttgtagagatggggtctcactttgttggccaagctggtcttgaactcctgggttcaagtgatctgccctcctcggcctcccaaaatgctgggattacaggtgtgagccactgcacccaggctatcaa

SEQ ID NO: 518665 - DNA, 464 bp, Homo sapiens
ttagggcagacaggggctgcaggggagcagggaaggtcgaaccatggggtcttgggttctaacaaagtctcagagatgaaagccgacagagcctttgggtccacttatccaatacaggaagaggttgggtgggagttggaatcattatgagtaaggcattcatgttcttgacaccatctgggtagttttccaaaatcatgtaaaagttgccccaaatgtctaataaggatcataagagaagttctctctgatatctgtgccactacataagtgctattaaggaattcacaaagggcatcggagggttaagagtttgggatctgaaatctggctgcctgggttgaaatctatgctctgccacttactagctgtgtgascttgtgcaaattatctaacctctctgtgtcttcattatcatttcttttgaacaaggataataacacccacctaatagggttattgtg

SEQ ID NO: 518666 - DNA, 663 bp, Homo sapiens
ctgtcgctccctcttcattcgtactaattccagccccttcactctgtgcagcctggtagcagttctggctgctgctgggaycacgtctgggccgttcccctctcggctctgcacatgggacctttctgccttgacttcttctctcccaggagagctgttttctccccatggaccgaacatcaggagtgggcagtgagtgcccccaacaagcactgggggcaaccagagcatcttttaaaacaataacttttattgtacatatttcaggtatacagcatgatgctatgggatgcatatagacagtgagatggttaccatgatgaagcagttaacatatccatcatctcacagttcccttagattttttgttcttgtggcaagagcagctaaaatctactcatttagcatgaactccacatacagtacaattttattacctacagtcctcatgttatacagtagattctagccttgttcatcctacatacctgctactttgtatgctctgacctttaaaaaatccctttcaaccctttgactgtgggatacacacctgaaagtataatgtctccgactaggtgagattcctttgtacacacttacagcaccttgtgatttgccgtcatagacctcgtgacagttctaattctgtagtgatttttg

SEQ ID NO: 518667 - DNA, 544 bp, Homo sapiens
tataacttgtctatgtaagttgaactaataatgtgacacacaaactgttgtaaaaaatgccagttactgcccgggggtggcggctaacgtctataatcccagcactttgggaggccgaggtgggcggatcacctcaggtcaggagttcaagaccagcccggccaacaaggcgaaaccccatctctaaaaatacaaaaaaattagcggggcatggtggtgcgcacctgtagtcccagctacccgggaggctgaggcatgagaatcgcttgaacccgggcagtggcagttgcagtgagccaagatggcgccattgcactccagcctgggyggcagagcgagactctgtctcaattaaaaaaaaaaaaaaaaaaaaaagccagttactttgaatgtgagcattttttccaaaatcatttatgtgtcgaattccttctataaatcaatgtgaaaatgattttaaaaattcaacgagatcatgaacaaaggacagaaaactcagagaagaaacacaaatgttcaataaacacataaaaacatttcatta

SEQ ID NO: 518668 - DNA, 541 bp, Homo sapiens
acttgatctacgaaggggagttactggctggttcatgtcactgatatactcagcggtagtcctgattcaggtgaagcttgatctagggctcaacaactatccctaaggtcctgtccctaagggacaaatattytccttgttcctgctctgccttcctggactaggcttctttcctgaggtttataccaaaggctgctagcagcccaggaaagcttgcagtttcaaaatagttgctggagttctaatccttacaacctctgattatgtcatccagtggaagagagagggtctcctctagtagtttttacagagcagggatacagtctctattcccacaaagccccggaaagtctccttgcatatccttggctctgattagtttgtgtgtccatccttgggccagaagcatggaactctctgactgacttagggaccctctcctatgctgggggtgggtttaactttatcaagtcacaaggctaagaatgggaaggaaaacaaaagattctgttcacgaaagaggggagtttgtccgcagacc

SEQ ID NO: 518669 - DNA, 496 bp, Homo sapiens
ctggaatgaggtgagaaatatgagcatcttggagagtcatcaaccccaagcaccttctgtgagccaggcctcattgtacccattttgcagagaagaaaactgagacacagatgcccgcaattttgctgytggtaaacagcggtgccaggggcatttgctcatgcttggccacatgaaaatctggtgttactgggcctcagataagcactgaatgtctaagtgtttgaggagaaggtcccaagtgttacctttccacgtatcagatggccggtgatgtaagaggagttctcccagaaaagtggtctccccataaagctgcagctccagtcccaaaatccccactgtcttaggtctgcttagctggctgcctccctcccgcagctccagcgatagctctgtggcagcagcaagaggcagttttagggaataaaatagatcggagtagagctggtcgaggactcccggctccatggccatcactaaacacctacataag

SEQ ID NO: 518670 - DNA, 694 bp, Homo sapiens
tttttggaaaaggaaacttgggctcttatttggctgtcggtgtccaaggcttgcaaaatgtgtgggtgggtgcagtgggaggcgaagtgacaacagagggacgacctcactcctcatgaccacatctgacctggccctctgtgaatgcattttagagagttagtgtccattggtaatatctttgtctcggaagccagacaccagggctgggtgtttgtttgtttgtctgtttgtttgttttgttttgagacagggtctcactttattgtccaggctggagtgcagtggcgtgatcttggctcactgcagcctcaatctcccaggctcaagcaatcctcccacctcagcctcccaagtagctgggaccacaggcgcatgccaccacgactggctaattttgtttactttttatagacacgaggtctcgctatgttgccaaggttggtctggaactcccgagctcaagcgttctttttacctcagtctcccaaagtcctgggaccacaagcataagccaccrcccttgcctagggctgagtcttattccttctataatcacaccaagtgggagtctctgagcccatatctgataagcaagtttgagtgaaaaagcccagaatcatctggacagcatagacatccctccagcatggcttaaagtgtacacatgacacagggtcagggtctacccctc

SEQ ID NO: 518671 - DNA, 582 bp, Homo sapiens
ttagcgattaacataatctgagattaggctaggaagatactaaaggaaagcactcaatccaatattgagtcatatattgttttccaattagaaggtttatatttgaggaagaattataaaaaggtaagttcgtgtttctactcaacttaaagctggattttttttttaaacagtttgggactttttctttctttctttcttttttgcatatccatgagttctgggagcttccagtatgagcagaaaaacatggctattttgttttggaactgcctgggggtcaggaggcaataggatcaaagcttcacagcctgagtacttgtcattatggcccgtgagccttcargtggtgggccagcctctcaaatctcactcctatatcttcacccacgagggacagttctttcactttgaaacaaaacattttattccactatgagattcagcttaaaaggcaaaattttcagggagtataagtgactgtatcaatgacatctagcaggccatttcctgcagccagatctgtttttttttttttttccccagggggacagtgggttcaggcaggacagaatttgaata

SEQ ID NO: 518672 - DNA, 591 bp, Homo sapiens
gcatcctgtacttggagtgtgttgggacaattgggaatacatggtgtttccagtggcctaaagtgttggccatatccctgagcaagctgggacaggttgtcttagaagttgtccaagaggaccccaatggagaaggcccttctgcagaaagaagctggaggtgactttgggtgtttaagagccaaggaagggctttttttttttycccaatcaagagaatgtcaggtacaagattcctcctagggacaggcatctttgaaaaatttatgcatgattccaatgaaagagttgactttaaatctctgctaaacccagagaactctgatgctaagccatccagagacgatgcatcaaatgtgaacttttctgctcttcatgttttcttccttccttgagctccaacactggagtagtcagaaacttaattagcaaggcatatggagtcacaaaaggggaagatggagaatgagtgaagcctatccaaaacatcctcctatctcacctctgccactggcttcttttgcggcttctttggtaaagtaaagggaggatggctgagtttctcaggatggccagcttctttgccacaag

SEQ ID NO: 518673 - DNA, 612 bp, Homo sapiens
taaaacatgcctaaaacatgcctaaaacgtcttcattcagatggtagagtgaagacagcagtggcaatctgatacatttccatttgtggtctgaatatttttggtgatggcacagacatcagagaggattctgggaaaatattcacaacaatgccttccaaccactgtgaaagtggcccttccagaatccagaatccagaatcatgaccaatgccagaggattttgaaggactgtgttcctgcagctctctagcatcgtagttttggtaagattgtccagagtcacggatgtttcctggaacacagcaaggaagatgcaggagtgccagtaaaattcctgagtggyccacatagcagcaagtccaggcacaaaggttgcccatacatgatctactgcaacagtcaagtctttttggttactcccaatattttagccttttgtcccaagtcttcttgagaacttgatgaaaaaggaaggtcacagccttcttccaggcctgggattgtgtgcctaattttgtagttgtaacacatatttgtagagcttttgggtaacctagctcccgataaacttaaatcatgcagaaaagtagttacaacaaaaaaataaaa

SEQ ID NO: 518674 - DNA, 612 bp, Homo sapiens
taaaacatgcctaaaacatgcctaaaacgtcttcattcagatggtagagtgaagacagcagtggcaatctgatacatttccatttgtggtctgaatatttttggtgatggcacagacatcagagaggattctgggaaaatattcacaacaatgccttccaaccactgtgaaagtggcccttccagaatccagaatccagaatcatgaccaatgccagaggattttgaaggactgtgttcctgcagctctctagcatcgtagttttggtaagattgtccagagtcacggatgtttcctggaacacagcaaggaagatgcaggagtgccagtaaaattcctgagtggtccacatagcagcaagtccaggcacaaaggttgcccatacatgatctactgcaacagtcaagtctttttggttactcccaatattttagccttttgtcccaagtcttcttgagaacttgatgaaaaaggaaggtcacagccttcttccaggcctgggattgtgtgcctaattttgtagttgtaacacatatttgtagascttttgggtaacctagctcccgataaacttaaatcatgcagaaaagtagttacaacaaaaaaataaaa

SEQ ID NO: 518675 - DNA, 612 bp, Homo sapiens
taaaacatgcctaaaacatgcctaaaacgtcttcattcagatggtagagtgaagacagcagtggcaatctgatacatttccatttgtggtctgaatatttttggtgatggcacagacatcagagaggattctgggaaaatattcacaacaatgccttccaaccactgtgaaagtggcccttccagaatccagaatccagaatcatgaccaatgccagaggattttgaaggactgtgttcctgcagctctctagcatcgtagttttggtaagattgtccagagtcacggatgtttcctggaacacagcaaggaagatgcaggagtgccagtaaaattcctgagtggtccacatagcagcaagtccaggcacaaaggttgcccatacatgatctactgcaacagtcaagtctttttggttactcccaatattttagccttttgtcccaagtcttcttgagaacttgatgaaaaaggaaggtcacagccttcttccaggcctgggattgtgtgcctaattttgtagttgtaacacatatttgtagagcttttgggtaayctagctcccgataaacttaaatcatgcagaaaagtagttacaacaaaaaaataaaa

SEQ ID NO: 518676 - DNA, 595 bp, Homo sapiens
ctatttgcaaaaagagaacatttaggggctccatggaatcataactcatggtatgaaaaggggaatatatgtccgttttcttcactgacagttaagctgtttggaatttcatyggttcatttcctaaaggcttctcctttgctcatttacagattcctgcatagaaacaattcattctttggatgcaaaagtgtctcattcttagctagtttagccatttgtatgctggtctgtgtcagagtgagaaaaatcccccttgagcactcctatagtctttttaaggccaatcttatctttacaaacatttctgaatctgctttatcatcctaccctggagaacatggatttgatatatatatatattttaagttaaacattttgcttgttttaaaatagcacactaagataatgctgcactatttaatcctttgttctttttacagtcttttattcctttgagatctttgtcattttaattttttgtatcgctgcatttcctaacttatttcccatatagctctttattaaaaatattttgcatttagatcaaatgtatctgtaatttaggagatctgttttgaactaatttttaaaa

SEQ ID NO: 518677 - DNA, 654 bp, Homo sapiens
tttgtccctcaaaacactgtaattagactgctaaatcattcactgtaaagcacttggggctttataaaaaaagaactattctagtaatgcaaagtagttctgaggttgtaaagattttattattattgtaaaagtgaaagcgctggtttagagactattggtatatatcctaacataaaaacaaaactgaattttgaaataaaattatttcaataatataaaattttattacttgtttacttattatcctatcaaaagtatctctcatttgttgatggttacaacattattccataaccacaaatatagagcctaccatataccagktattatgatggacactaggaattcacaaaggaatgaggcttttcctctgcactcagagctaacttataagctaataaagacaaatcagcatattatacatgctgattcaggtaagcatatagtattatgaaagcatgtaggagcagaaaacagcacaagttcagaagttagtaaagttcaacgaaggcttttcacaagaattgatatcaaattgcattcttaataacaagccagattctgatccatagtttttgttttccagatccacttttatgtcttcatccatttggggaaaaattacatagatatgagagaattttacattca

SEQ ID NO: 518678 - DNA, 612 bp, Homo sapiens
aattactatacaaataattctagagtataatctatgttctcattgatgtcacaaataatgaggacagagagctgaaatataaaatgaagaaacatagaacatgtcactaatgaaaaagttgataactagaacactaatttctgtatatataaaccgttgtgggtactagaagatttctatgattatttagggtatcttaagccatggtgagtaaaacaagaaagaattctcaatggatgctcaccagtcaataatagaaagtggaaggtgtgtgtgcaaatgctcctctttgccatagtgagatgatgccgtgttacatgacataagcaagctcccattaattaatgacycagatatttttaatccacaaaagtgtgaaatgtctcaatatttcattagcctttggggttggtgggaaagagattaagaaataggtagaaaagttgatttccttctatacagcatctcaaaaggcatgacattatcattctcatggataaaagggaagaattgatatcaatatttaaacaacagatatatgacttcttattcttatctgaatgaaatctgactatgagatatatactttattaaagcaattactcagattta

SEQ ID NO: 518679 - DNA, 635 bp, Homo sapiens
ttaaaaaaaatgatttgtgctcagtgtgttcgtgaatcttgcatcactttgctttcctattattgatgattacatcattagacattttattttagaaaacttgtataaaatatgcagtagtaagtttatatcaaagaatatgctctactggacaattaaataatttagcttatgctccttgttctaagtggctaccaagcttttcacattgttgaatactcagattctcatgttctcaggtttttatttttaactctagtgacagaaaagatgccayttgaagactaaggaaaatatctaagtatatgtgatcgcaccccatcaataaatcataccattaaataatattcctgtgtattatatgtatacattaattgaaaaaacctaataaaagttgaatgagacaaaatgtatcacaagcaattcttttgttttcttctccttggaaatccattctgaagccaggacatataatttcagtaagtagctctcctcagattcaataagggtattattaagtttattcttactaattttaggaagaattccactatacacttcttcaagtatttggacaaataaattattctgaattgttaaatatctatataattggatggttatctaatcaagtg

SEQ ID NO: 518680 - DNA, 635 bp, Homo sapiens
ttaaaaaaaatgatttgtgctcagtgtgttcgtgaatcttgcatcactttgctttcctattattgatgattacatcattagacattttattttagaaaacttgtataaaatatgcagtagtaagtttatatcaaagaatatgctctactggacaattaaataatttagcttatgctccttgttctaagtggctaccaagcttttcacattgttgaatactcagattctcatgttctcaggtttttatttttaactctagtgacagaaaagatgccatttgaagactaaggaaaatatctaagtatatgtgatcgcaccccatcaataaatcataccattaaataatattcctgtgtattatatgtatacattaattgaaaaaacctaataaaagttgaatgagacaaaatrtatcacaagcaattcttttgttttcttctccttggaaatccattctgaagccaggacatataatttcagtaagtagctctcctcagattcaataagggtattattaagtttattcttactaattttaggaagaattccactatacacttcttcaagtatttggacaaataaattattctgaattgttaaatatctatataattggatggttatctaatcaagtg

SEQ ID NO: 518681 - DNA, 424 bp, Homo sapiens
gttattatttattttgaatatatgtaagtaatgggtttacttggctacataaaagtgggaaattctcatgttttaatttttcatttcatgtttcttttatgacatgcccaaattgagttctcttactaatatataatttagttagtagtttcttgttgatgttgttatctaacacaaatgatgaaagataaaaggtaaaaataattctaggaaaaaataacatgttaaaagcagaagtataggtacagaaaaaaggagaatagggcagakaagtatgtgaaactacaatttttatgcaaggagaaattaaagttattgataaacataaggaataagtgaaaagatacaaataaatacctgtcctattatattaggggtaataattaaaagaatatgaatggattatgtaactctttaaattagc

SEQ ID NO: 518682 - DNA, 559 bp, Homo sapiens
tgcctttcctaatttgcagaacactaatttcaccaagaaaagacataaaactccaaatgctagaaagtataaggatagttatttacaaaatttacagaatcaccatgaactactaccaaacaaaactctaaatgaccaaatgataatgtataaatcataacctatagtgggctcaaatcccttactttgctagttaaataaattagacaatttgaaacccagtgaagtgacaggtaataaaatgaggtaacttcatttaaaagagagtaatacaaatatttctcaaaatatagagtatacttgatatgcgaagtcttgaggattatttgaacaatgaaatctttactgccattcggcaacagttaccaaggtttagtgatcttattttccatarctaaggacaatgtaaggcagagatttcatttgcaggaaaatgagctagaaaaaaatcttattaggaatgctcttcagcttcaactgcaaccaaagagctcaacagtgcttgtcaagaacaaagtgaggtctccagtctttattagctttacaggtcaaacattga

SEQ ID NO: 518683 - DNA, 505 bp, Homo sapiens
tggtggtggtggatatagtggcagtggggatggctataatggatttggtaatsatggaagcaattttggaggtggtgtaatgattttggcaattacaacaattagttttacattttggacccatgaagggaggaaactttggaggcagaagctctggcccctatgctggtacaggccagtactttgccaaaccatgaaaccaaggtggctatggcagttccagtagcagcagtagctacagcagtggcagaagattttaaattactgccaggaaacaaatcttagcaggagataagagccagagaagtgacagggaagctacagtttacaacagatttgtgaactcagacaagcacagtggtggcagggcctaagtgctacaagaagacatgttttagacaaatactcatgtgtatgggtaaaaaactcgaggactatatttgtgactaattgtgtaacagattcttttagtttctgttctgtggaaagtgtaaagcattacaac

SEQ ID NO: 518684 - DNA, 640 bp, Homo sapiens
tgtctacaggtgtgttctgtgtgacagattagagaccaggatttgtcctgtggtagacaaatgccagagaggcaaagtatatttaaaaagatagataatagttactctctgtgtttgtgttttattaacccctagcccagtggttccccaatttgagcctgcaacagtattacctgggctcttaaaacgtggattgctggatctgcagtcctaacaggttcccaggtgatgctgatccgtgtctatacttgagaaccactatcctctcatcagtaaaggggattggagctttctgttttaaatgtttgagcctggagaagggtcaattatctagttgggctagactgtgaaaggagagtgggagacaaggccacctccctgggacttaatgagattggtgtcagcagttatccaaagaagagcctatggaagaagggaatcttgggaaagagagccacctggtgttgcttgcctgcctcgtgaggaaactgtcttcccygccgggttgaggctcctgagctttgttttagggggcacttccttagaataaagagcataactggtgataatgggtgaggtagattacctaggttgagaagcacttcaaaatataggacctaacttttgcagcaacatggat

SEQ ID NO: 518685 - DNA, 285 bp, Homo sapiens
tgctacatgatttggaagataaaaatataaccaaaaagcacttatgtgtacaaaagttcaaaatcttttatattatgtgttgtttagtattatgcttacaactgytcccttttattagatttctgaaagcatagatggtaatttattgaaatttagaatataaatcagattactgatttctaagcagcaacagattttatgtaaaattgaatataaattataatattctgatgctataacacttcaatcttatgaatataaatatctttgaaggtatgaaaaagt

SEQ ID NO: 518686 - DNA, 574 bp, Homo sapiens
tgaaaatactctggaaagcacaaacacaaaacatgtgcacagcattaccatcacaatgctagaaagctgacactcctttttttttttttttttttttttgaggkggggtcttcctgtgttgcccaggctggagtgcagtagtgcaatcagagctcactaaagatatgatctccagggcttaagcgatcttcccacctcagcctctgtagtagctgggactacaactgtgcatgaccacaccagctaattgttttattttttgtagagatgggggtctccctatattgcccaggctggtctcgaactaccgggctgaagtgaacctcctgcttcagcctccaaaagtgccgggattataggtgtgagccaccatgcctggccaaaagttgacacttctataaccagagagctttgcctctaatagttataaaacagatgttaaaaataaaacaaacacatttccttataagttcatgtctatgtgatagattgattgcaaaatggcccatttttttccctctgtatacctctctctgtatcctcatcttcttgcactgtgacctttgcagcaccc

SEQ ID NO: 518687 - DNA, 669 bp, Homo sapiens
taaccccacatacccactagctgtctactggtgcaagtgagagctttttgaggaaatggaaatgttctaaaactggattgtgctgatggttgcaaaactctaaacttacaaaaaatcatttttacatataacctgtgtgtatccatgcgtatgtatctcttatctgtagtttgcattgtcctacatctgaagtctaatctttatgtaaaagcaaataatgcctaaggtcacgttgtccccatgatcgggtcataagtttaaggaaatgaaatcagtctgacctttcctttgccaagagattgtcttcggttgttttcattacccatctgcactgagggcttgcaccttyaataatctcagctatgccagtaaataggtttaaaatattatattcattttggtgccaattaatgcacttaagacattttactggtgttatttctgtagtatattaacaatgagggaacaatatacagcaattattttaggtttagggagcactttactagattaaaagctgtaagtggcagacattacatttcagaatagtggtctcatcatatagtgagattggttgttagccatggtattaatatcagaatgataataagttagaaggaaagatgataaaattaatttagccaccaaatcatgctgggaaaacaccca

SEQ ID NO: 518688 - DNA, 669 bp, Homo sapiens
taaccccacatacccactagctgtctactggtgcaagtgagagctttttgaggaaatggaaatgttctaaaactggattgtgctgatggttgcaaaactctaaacttacaaaaaatcatttttacatataacctgtgtgtatccatgcgtatgtatctcttatctgtagtttgcattgtcctacatctgaagtctaatctttatgtaaaagcaaataatgcctaaggtcacgttgtccccatgatcgggtcataagtttaaggaaatgaaatcagtctgacctttcctttgccaagagattgtcttcggttgttttcattacccatctgcactgagggcttgcaccttcaataatctcagctatgccagtaaataggtttaaaatattatattcattttggtgccaattaatgcacttaagacattttaytggtgttatttctgtagtatattaacaatgagggaacaatatacagcaattattttaggtttagggagcactttactagattaaaagctgtaagtggcagacattacatttcagaatagtggtctcatcatatagtgagattggttgttagccatggtattaatatcagaatgataataagttagaaggaaagatgataaaattaatttagccaccaaatcatgctgggaaaacaccca

SEQ ID NO: 518689 - DNA, 630 bp, Homo sapiens
ggggtctccaaggaattttcaccctttggtccttattcaaattatgcgatacaggttcaatttctcttccgcatagttacctttggatatttgggggctttatcttggcaagtttttctgtctctaggcaaatatacccttacaattcttcacagttcctcctragaaaccctgacctacctggtccctcccctctgagcaagctccaatgtcgtaatgtcttagtgcccccagtccaacacagatactccagggacagtccaattgccaccaacaaaagataacaagacccacagctctctttctgatcaggacgggaaaatggaccaggatgctacaattaacaataaaattcgggcaggatgcaatggttcatgcctgtaatcccagtgttctggggacagagaatgagggaacgcttgagctaaggagctcaagaccagcctggacaacaaagggagactctgaatctactaaaaataaaataattagccgggcgttggccaggcgcggtggctcatgtctgaaatcccaccactctgggaggctgaggcggacagatcacctgaggccaggagttcgagaccagcctggctgacatgacgaaaccgtctctactaaaaatacaaa

SEQ ID NO: 518690 - DNA, 268 bp, Homo sapiens
gtgcaactcagacagtcgctggcacacagcaggtgctcagcacaggcttgtctgctggaaaagaatgaaggtacaaccacacaagtgagtasgggctaatcgagtcaccctggaggctcctctacaagccagagaccatcgctaagcttacaactggcaagagaaattgcagccaaggccaggtgaggtgctcatgcctgtaatcccagcccttcgggaggccaaagcgggaggataacctgaggtccggaattcaagaccagcctgg

SEQ ID NO: 518691 - DNA, 541 bp, Homo sapiens
cttcatgggccagcaagcacagaggctgcagggcagagggaagaggacccagtgctgactggggccagactggaggctgagtggccacaggggtgcgaggcatggttccctgtggtgcccacatcccctgatgcccaataaaactttagggctgatgacrcactgactttacccacatcaacaagcctcggtttccctatctgtaaaataggaagaaggatagctacggatagctactatactggtatcagaaataaacagggcagtgtatgagaactgtggtatctcacacacatacttatttaatgtttctctaatgaaatccctgtgctcaaaccctcagaggaaagtatgtaaatcaaaactgtcaaagaatacctaaaatttgattacctttgaagagtcctatatataagtgctttacttgttacgtttcctgccatcaaaataaattacccactgctcattttagaaatgttagctttaaaaaagacaaatattggcttaatccctgattattcaaacacactaaacaggaact

SEQ ID NO: 518692 - DNA, 201 bp, Homo sapiens
tgaagagtcctatatataagtgctttacttgttacgtttccygccatcaaaataaattacccactgctcattttagaaatgttagctttaaaaaagacaaatattggcttaatccctgattattcaaacacactaaacaggaactttctcatgcctataatcccagcactttggaaaactgaggtgggaggatgacttgag

SEQ ID NO: 518693 - DNA, 509 bp, Homo sapiens
ctggtgagcacctcacactgcctcaggacactggatcaaagataagtcaggcttctctaaacacgagatgggccgtgagtttgcttctcagccttgcatcctctgatttcttcgcagatgggtttgtctcacttgagtagggcaattagataccagacaccacttcgactagttcagctaatgtgggcaagtccagctcccacacatccactacaccagttccatgtacactctctgtggcattaagctccccattcctacttccaggaaaagtgtgagctcctgacaataagcaagcacagggtctgtgtcccaggaggaatccacaggagactctgtgtgctcaggaracctgcacaccattagagaaaaaataatactgatgatgggtgatagtcacagatcaagtcacaatttaatttcgtgctagctctgcaaagtcttctatattctccatatatcattcagcattactttagaatagctgtgaaaagaaactacatacgcgg

SEQ ID NO: 518694 - DNA, 590 bp, Homo sapiens
gttgtctttaaatcaacatgatctgaattacttgctagatatatgtatgtattttgagacrggatcactgttacccaggctggagtgcagtggtgtaataatagctctccgcacactgcagcctcgaacatgggctccagcgatcttcctgccccaagtagctgggaatacaggcattcaccacaatgccaggctagttttttgtttgtttgtttgttttttgacagtttcactcctgtcacccaggctggagtgtagtggcgtgaacacggctcactgcagccttgacttccagggctcaggtgatcctcccaccgtagcctcctgagcagctacttttttgtattttttagtagagatgggtttcaccatgttgcccaggctggtcccaaactcctgggttcaagcaatttgccagccccaaagtgctgggattacaggcgtgagccactgttcccggccttttttttttcttgtagagatgagatcttgctttgttgtctgggctggtctcaaactcatggcctcaagtgatcctccttcccttgtttgtcttttgcaaccctccatagatgtaaaagccattcttg

SEQ ID NO: 518695 - DNA, 704 bp, Homo sapiens
tatggcttcctgggggaccacttggatggggtcgctgctcctttgggtgcataacagcagtctctgcccttatctcctcagagctgtgtgtataaaaagtgtgtgtgcatcatgttgtcaacaagccggagtgtgcctctgccacactgcccaggcagggagaaaggcaaagatacagataaggtcctggggctcctgggttctaaccctgtttctgagacatgctggctgtgtgacaggagcaccctcaactcagaataacagaatattagagcagaagaaacctgcaaagtcacccggtccccttcattttgaagattaggaaactgagtccggttgggggttgggggagcaaccccagagtcacccagagagttgatagcagatggaggaattgaaccctgacctttcatatcctggcccaggtggcccatcttagcaacacctctctacactaccctcccctcgagaagcaaaataaacaccctaatacctgycctccctcctgggtggttgtgaggggtagtaggggtgagaagggtggatagatataacagaaagtgctgacagcgacaaagagcagccccatttaaccagagtccagtgccgaaaataggggagggtgagagtcattaagtgactgcatcacccagtcacatccctgtaactttaaatatttcatggagccagcagtgcaccacata

SEQ ID NO: 518696 - DNA, 451 bp, Homo sapiens
tgctgaagccacatttttgtattactccacagaagcacaactttttgcttagatcagatggatattctaaataatttttacaattttgaatttctgagttttcttgagcatgtatgaaatgtgaacttatagctgttaatttattagctccattaataaatgaactttgcaaatagttaaaaaatgaygattttatatcagtgtcctcaagtgttttaagtagaaaatcagttaattctagtaatgattctattttttttttttttttgcagccaagtcctggaatcaaagtaaagcttttggaagtttatttgacattgttgttaatgctattttaaagttagttaaaaggtttaattttgaagacaaaattatttgtttttgtggtgataatatgaacaaggtttttggtataacataatgtgtggtaaatattttaaaataaaaaaat

SEQ ID NO: 518697 - DNA, 630 bp, Homo sapiens
gttgggcactggagtcagagaaattagtttagtaagattcccygcctcaaaaactttacagcctaggaatgaaactgaacttaatgtaagaatttgagatcaatgtaacctgtgctaagaagcccctagaagagagggacagtagtttaggaatgtggggctagagaaaagggtatgtgttgaataaacacagcagtttattcaactgtaaggacaagatcagctattcaactgtaaggacaagatctggctcctggctgaacgtggggattatgggtgagggagagggtggcatgcccacgggattcagtgtgagtggctagcagggtagcatgatcttggcaggaatggaggaatccgaggtgtagtggaggtggggtgtgtgcatgcactggtgagtgcaccactacaggcagaggtgggtactgcattctcagtctccaaagtcagtcttgttagatccctgaaaacacaatagggcaagtcctactgagcatgagccttttctcagatggaaattagccctcagagttcccaactcagaacttgcagcaagaaattacctctccagctccagccctgcttgcctttctctcctcctaaagccgaggaattgaaggggaatgagct

SEQ ID NO: 518698 - DNA, 580 bp, Homo sapiens
tatggagggattcagcttcattcatgattcagagatagaggggtgggggcttaggtggatatcattccatccacacctattagacagcccagaggagggaaggaatgtgcctgtctgctgtgtagcagagtgtgttgtgcacagtggagctgggtgagttctttactctggctttacgtcttgctgtaagtgcgtagcttttctgtaaaggtgtatgctatggctgtatatttataatgtatctatctcaagtctgggagtctccttgtcctctaatcttctttaatctctctttttaatacatgaaaaatcacatayaggagaagaccagcccactcttcccaaatatctgcagatccctggggggcttttgaatgatcatctctccctatgatttcctcttcctgcaccactgctattctcattggtaccttgttctctgcagctattctgtcagctttgaatccccactgcccccataccagacttagtctcctttctctgagtcccccctgttgtgggagacaagttcttgctgaaggcttgggttgacatcacagcatgacaaacagttttgtat

SEQ ID NO: 518699 - DNA, 563 bp, Homo sapiens
tgtttggtagaataagatctggaagagaaaggggggggtacacacactctccctatcactttagcttcccaatgtggagatagggttaggtacctgcgtctccatcctctctctggcccggggtgagccaccgcctaggtctctaaggtgtgactacaagaaggatcatggtgaagcctcacaaatctgtagaggatgaggaggacacagagccaccagcatggggcatgttccctgggagtcaggggaaaggctgctatgcctggaggcaggggactggctccctcctggtctttttccccctgaaatgtgagtagttcctctggcatctacaaggttgacttaatccaaccccaaggagctcatgggtccctccttttcaaagttagagtaactaggatacacgaaataccaygcaccagctctgcaccaaccaaactcagaaacacaagcacattctcaggccccagagcaattatgtgcccaggccctagtgcatggttttttgtggggcttttaagggttgttttgtttgtttgtttgtttgtttgtttgttttgcag

SEQ ID NO: 518700 - DNA, 497 bp, Homo sapiens
gggctcagcgattctcctgtctcagcctcccgagtatctgggattataggtgcccgccactacgcctggctaatttttggtatttttagtagagatggggcttcaccatgttggccaggctggtcttgaactcctgacttcaggtaatccgcccgccttggcctcccaaagtgctgggattacaggcatgagccaccatgcccggcccaatccttcttctattggggttgttattaaaagagaatagcagaacagaaagaagtcttaagagtccaggctctggagtgggctattgggatgcaaaataatctaaagtattctgtgcctcagtttccttatttgtacaaaatggatgatgataatacctctaccataaggttgttataaatatttaactggttgctatatgtaaaatgcttagaataaagcctgacacatcagtggaaattcactattactctctccmttggcctgaagctggcagctttacaattaca

SEQ ID NO: 518701 - DNA, 497 bp, Homo sapiens
gggctcagcgattctcctgtctcagcctcccgagtatctgggattataggtgcccgccactacgcctggctaatttttggtatttttagtagagatggggcttcaccatgttggccaggctggtcttgaactcctgacttcaggtaatccgcccgccttggcctcccaaagtgctgggattacaggcatgagccaccatgcccggcccaatccttcttctattggggttgttattaaaagagaatagcagaacagaaagaagtcttaagagtccaggctctggagtgggctattgggatgcaaaataatctaaagtattctgtgcctcagtttccttatttgtacaaaatggatgatgataatacctctaccataaggttgttataaatatttaactggttgctatatgtaaaatgcttagaataaagcctgacacatcagtggaaattcactattactctctcccttggmctgaagctggcagctttacaattaca

SEQ ID NO: 518702 - DNA, 345 bp, Homo sapiens
acttatttcttaacagagaggaataagaaatggtcacaatcctctttatacttaatttgacatgataaaytttttaagatgaagaaaagtaactccctaaaattatagaaaaggtgagcaaataattgtataaatcagggcagggaagccctttctaagtaacttaatatcaaagacaggagccctaaaggaaaaaaaatgtagatttggctatatatgaatttagaatatttatatattaaagcccagtgtgatggttaatattgaatgtcaacttgattggattgaaggatgcaaagtattgttcctgggtgtgtctaagggtgttgccaaaggagattaaca

SEQ ID NO: 518703 - DNA, 644 bp, Homo sapiens
cctactccaaaggatagctacctaaaaatttaaatatataaaaaattaaaaaccccaattcagcaaatagttcaagactttgatgagaagaaaagctgattaatcattttcttgttgcttgcctttcttttgacatttttctgaccttttccaaaaccattacacatctgggatgctcaatcatttactaaaagggttaaggcaatataacctccttgtgattaagaataaaaatgaagtggaatggagtccttcacagttttacagttttacttgactcaggggttggaggtggtgatgaggacctagaaaagtttctattataataattttctttagtatttggtattgagaatgatgggaaaaaatcaagagatgtgattaacccatgaaactagctatatttggttacagactgccctagccctataagttattttgcgatgctatctgtaatgcatttaaagagcctgttgttaccgacatgtgtcagttatctattgctatcatgatgcttcataaaaaataaacacaaacgttcagtagyatatgataatagatatttataactcctgcatttggagtgcttagctaggcagtatgctgatcttggctgtgcacgttcacatatctgggggtaaatt

SEQ ID NO: 518704 - DNA, 476 bp, Homo sapiens
aaagcagctgctcaggagttagactttgtacaagattcagtgtcacaattttgttcactatgtaagtatcttatcccaaagggcatttacaggattcatggtgacagagaaaccgtgttcctggtgatttgttttattacaaaaaacacaaaagctccctcccccaaagtcccctattttctatgccaggaactccccataaacacccctgtctttatctctttacttcctatggtttgcccagcccctagcccacctcttgtcactagcttctttsaattcctcagttcctattctaaacacacacacacacacacacacacacacacacacaaccaccacagcatgaactaccccaggagcagctcagaagacacctaccctttttaatctaaatagctaattatctattttttttccttttagggaagcacttccacagaaaagtttttgccagagacccagcttcagatctc

SEQ ID NO: 518705 - DNA, 595 bp, Homo sapiens
gaaaggccctgagtccccgggaaaaggctcgatcacgctggtgttggctgcttaggaaagcggcggggctgtcaagtgtctttaaaaggtcccttcagggtggatggaaaccaggccccggccaccgctctgtgaacaagcaggtggggaaagaatggggsagatgttttcagattcaagacagaaggagcccaggcctgcggcggggtcctgagcccttgggcaagttaggaaccagccagggcgtcagtttccccatctgtgaagtagagacgcagaactggaaccttccagttcccaaatcctctgagtctaccaaagtgacgttttctgctgttgggttgcaggccacgctctgggatctcacttatccagaacataccactttccacaatgccggatgaccaaggtgtgtgaaatgtggagggtgcaagtcaagagaaagggagatgtctgtttaatttgattcctttcttctatcacaaaacaaactcaggaatgagaaagggagaatgatatgctaccctccctagaggaaaataatccttataaaccccactccccacctcccagtactctacccctgacacaccag

SEQ ID NO: 518706 - DNA, 664 bp, Homo sapiens
catggcagagcaagtgcagcaaggcgagaaaggagggatctagatggcatgccggcagatgttcacagaaaaaattctttcagcctcactgttatgttagaaattttttatagtaaatgctgggaggctggggctcaatgaataacacagcaatacaataatgaatatggtcaggtgctgaaacaaacaagcaatcgatgaaataggtccctgggaaagaaagkaggtccctgtaagccattaggccagacgaagtcagcacggatctttgcagggccccagggtagacaagataacaacacggtaaagtggttgtgagcgtggctaagatgctaaaaatcctgggttcgagtctcacctcagtgccttcccagcaaggtgcccttggataaggtaggtggcatctctagtagatttctggggcagccatgactaattaccccaaagcgagtggcttcagacaagaaatacagacaccgactctcttgcagttctggaggcctgaaatcaaggtctcagggtaacctgccaacagctccaagggaaaaatccttctttgcctcctctggcttctggtggctccaggtgtcccgtgacttgtgggaatctttatgggaccttattctctgtgtctcaaatctccctctgccttctcttataagga

SEQ ID NO: 518707 - DNA, 558 bp, Homo sapiens
tccacacccacagaagggcgatggcagctccagcagaagccaaaagcaagccgaggatccaggagctacaggtggagccttcaaataaaccatctttgagaaaccccatgggccccgtgggtgcactgagctggtcacacccagcctggaagatgggtgagcattttgcactcatckgcctccctggccctggaagtcccagctcctcccacacagtcgctcctgtcccctgaggactcctgagcagggctgcaagagaccagctaaagcccaccaggaagtcgggactgtcctggccactgtaagatcttcagggccctaggcctggaaaacaatcaccatgtcccctcccaaatgtaattcaaagcacaaacaagctaaacacccaaatcaagccttgctttctgaaatggcttaaaacacatgagtgctggcgttacaatagcttatttcagtgttgtggttgagagagctggcccgccttgctggtgcccagggcttgcctcctgggccatccagcatgggtattgccatcctcatctcacccaggggctttca

SEQ ID NO: 518708 - DNA, 629 bp, Homo sapiens
ttcctaacgtcactcccaagcatgctggatgtgggaaccaccggaccagacacaagcccgtatttcaagccctcagacagagccccaggtgwtaggctcccgggcacccgcgcgatgctcagctcccgcttggcccatgctcaggagaaagtgagcccatggacagggtggggctcatccccacctggaacagagccttggccgcctcgtagtcctggatgtcttcataaatgcgtggttctccttcgtgcagagccatctggaagtctccaaacaatatgggatccctcatcaccacctccacgtcatctttaaaatgttccacaaccaagctgcctatgtgctgttgtaccttgaaacagaagcccacttaaggacccaaactcaacaacagtacacggcctgaaacttgctaggagcagaggatacgtactattatctaaaataatttgcgttctattttttttcagttgctgcaagacgcttaataacccacccaccctcctttgccccattgacctttcgtgcctatttttccacaattcgcgtcctaatataaaaaacacttttggcgcttgtttattttcctgagaagaatttcctgagaagaagcattggatgtactgacc

SEQ ID NO: 518709 - DNA, 540 bp, Homo sapiens
gctgccagcatattttaaaaaccatgcagacatactgaaaaaacatccaatgcaacttaatgtaggtggatatgactggactttttgctgtgaaacttgagtcatgtttgagtaatgaaataaacaaactaaaatgcggagcaagcacaagaatcatctcttatatcatctcttattcagktttttttttttttttttttttttttgagacggagtctccatctgttgccaggctggagtgcagtggcgtgatctgggctcactgcaacctctgcctcctgggttcaagcgattctcctgcctcagcctcccgagtagctgggactactgcgccaccacgaccagctaatttttgtatttttagtagagatggggtttcaccatgttgctcaggatggtcttgatctcttgacctcgtgatctgcccgcctcggcctcaggagtgagccactgcccccggccttattcagtatcttttaaaacatgttttcagccaagtaaaagaacgattcaccttcataatttgctggctctccaaag

SEQ ID NO: 518710 - DNA, 540 bp, Homo sapiens
gctgccagcatattttaaaaaccatgcagacatactgaaaaaacatccaatgcaacttaatgtaggtggatatgactggactttttgctgtgaaacttgagtcatgtttgagtaatgaaataaacaaactaaaatgcggagcaagcacaagaatcatctcttatatcatctcttattcagttttttttttttttttttttttttttgagacggagtctccatctgttgccaggctggagtgcagtggcgtgatctgggctcactgcaacctctgcctcctgggttcaagcgattctcctgcctcagcctcccgagtagctgggactactgcgccaccacgaccagctaatttttgtatttttagtagagatggggtttcaccatgttgctcaggatggtcttgatcycttgacctcgtgatctgcccgcctcggcctcaggagtgagccactgcccccggccttattcagtatcttttaaaacatgttttcagccaagtaaaagaacgattcaccttcataatttgctggctctccaaag

SEQ ID NO: 518711 - DNA, 644 bp, Homo sapiens
ctgaaactgacaagcccgggagccgctttctaggaagacaacgcatgtgctgaggcctgggtgttgagcagatgccagctccctgaggaccaggaagaaactgggcagggggctcatgtgaaggtactgagggcacatgaggctggcaagcttgaagactagaaaggagatgagggaggctggtgtgtggtttgcagagagtgcaggaggtgaggttggaaggaggcggyggctgggccacctccagcttgtgagccagtgagaggatgtgtgttctaaagagcaatggaaggattaagcagggcagtgacgttctctaacttacatttttaaaagataagggtgactactggtagaggtccagttgtggaggagcaagaatgaaagccagagagacctgtggttgagaggctgttgaaatagtgcaggcaggaggtgaccgtggcctggatagggtggagcttgtagtggccatggagagatgcaagggcagggctgggttatgttgtggagaggaggtagagtgtgcagtgatttgcactggtggggctggaggaaagcagaattaaggacaatgcatctggatggatgttggtgtgcttgacagagatggggaagaatgaggaaggaacagtttgagggga

SEQ ID NO: 518712 - DNA, 472 bp, Homo sapiens
gactccacgcatctgaagtgtctcaagttatcaaactcatagaaacagaaagtagaacggtggttactggaagctcagggggtctgagaaaatggggagttgttgtttgcttagtgggtacagcatgtcagtttcgcaaaacaaaaaagttctggagatctgttgcacaacagtatgaatatacttaccactgctgacccgtactcttaaaaaggattaaaatggtaaagtttacattgtgcttttttaaccacaattttacatttttaaaattatttttaaaaatctacccacaaaacaaaacaccctgaattgtttaagtgttttacaaaatgaactctagatgcctcygagtcaatcagtgagcccgcaccccaccccacagttattattctgaattcgtggtgacttacagagctaatacgcctacgacattgttctgagaagcgctggaacccatcctcggcagtca

SEQ ID NO: 518713 - DNA, 508 bp, Homo sapiens
ctgctagcaagaggatcaagatcagagaagttttgtgaagttaactttaaaaggaatattctgacttagaacggattctattttaatgctttgagacaaaaatccttcccctgggaaactgcctccaactcacttgtcacatcctcagaagtggagaccctgtttttcatttctgagatgttatcactgagacattcaaataagagcagtgttgaagaacagtgacatgtgatgtggtggctttaaggcagtgacgggctatagacactaagaggccaaggccagaggggtcagctcacaagctcacaagctcctscctttgcttcgtggtgcaggctctgtctctcatcggcacggcatctcttcagaggggatctccttggagatttggggaaatcagctcaattttgtcacccagcctgtagtcccaagtcctcgtgactgtggatgggccaggaatgtggcttcacatacagacatcttgttaggccaggcacggtggctcaca

SEQ ID NO: 518714 - DNA, 587 bp, Homo sapiens
ctgaagtcatcatttgtgaaagctgggagcaccccgctgcattccccgattcctgtccaaacagccattcgacagagcggccctctagtctaatattcatttctgtgtcattaaaaaaaaaaaaaaatcacactgactttaaaacactttttccccatggatgtgaagtgaagcaggaagactgcccgtgactggtatacatctgctggagaacacagactaatgatcatattttccctaaagagaaaaatttaaaggtcaagcaagaatgactagcagcatgcactggaagtaacccagcaaagtgaaattcacagcacagggagccccaaagcccaggcagggaaggctgggaggggaaggaagacgaagatgggcacacacacacaggcacacacaggcacacacgtgcacacatgcacacacatgcccmcacacacacgcacacagaatggtgcgatgacttatgctccagcttttaaccaagcaggccgtgcaaaggcccaattcaccttaaatcaccctgccgcctaacaatggtgcatcagtgattacaacccaaggggccctgaagggaggaggcaggt

SEQ ID NO: 518715 - DNA, 546 bp, Homo sapiens
ctccaaaactggtgctcttaatccccacatcatgtgttggtctcatctctgtctatcctcttctcccaccrtctctttccctcacaccctggcttccagccccacgaatcggctttcatgtccctgtcttgttgccatcaacagcatgacttgaagttgcccatgtcatggtgtctgaaccttcatgtttgctgtcctctctgcctggagtgccttccctctcccttttgactggcaaagtttcactccaaggtctagttcacagcccttttgtgatgattcccacccccaccccgttataagaatgagccaaagacggtgtattggttcctaggttgtttcttcacaacagactgcacctaacagtctcaaaaacctgtaggttccaaactcaatttttaaaatatttatgagtttattacaaagaataccaaggaacagtccgatgcagaggtacatagggcaaggtgcgggaggggtgcagagcgtccatgccctctccaggcatgccatcctcccaccacctgtgtgttcaccagctcagaa

SEQ ID NO: 518716 - DNA, 546 bp, Homo sapiens
ctccaaaactggtgctcttaatccccacatcatgtgttggtctcatctctgtctatcctcttctcccaccgtctctttccctcacaccctggcttccagccccacgaatcggctttcatgtccctgtcttgttgccatcaacagcatgacttgaagttgcccatgtcatggtgtctgaaccttcatgtttgctgtcctctctgcctggagtgccttccctctcccttttgactggcaaagtttcactccaaggtctagttcacagcccttttgtgatgattcccacccccaccccgttataaraatgagccaaagacggtgtattggttcctaggttgtttcttcacaacagactgcacctaacagtctcaaaaacctgtaggttccaaactcaatttttaaaatatttatgagtttattacaaagaataccaaggaacagtccgatgcagaggtacatagggcaaggtgcgggaggggtgcagagcgtccatgccctctccaggcatgccatcctcccaccacctgtgtgttcaccagctcagaa

SEQ ID NO: 518717 - DNA, 546 bp, Homo sapiens
ctccaaaactggtgctcttaatccccacatcatgtgttggtctcatctctgtctatcctcttctcccaccgtctctttccctcacaccctggcttccagccccacgaatcggctttcatgtccctgtcttgttgccatcaacagcatgacttgaagttgcccatgtcatggtgtctgaaccttcatgtttgctgtcctctctgcctggagtgccttccctctcccttttgactggcaaagtttcactccaaggtctagttcacagcccttttgtgatgattcccacccccaccccgttataagaatgagccaaagacggtgtattggttcctaggttgtttcttcacaacagactgcacctaacagtctcaaaaacctgtaggttccaaactcaatttttaaaatrtttatgagtttattacaaagaataccaaggaacagtccgatgcagaggtacatagggcaaggtgcgggaggggtgcagagcgtccatgccctctccaggcatgccatcctcccaccacctgtgtgttcaccagctcagaa

SEQ ID NO: 518718 - DNA, 546 bp, Homo sapiens
ctccaaaactggtgctcttaatccccacatcatgtgttggtctcatctctgtctatcctcttctcccaccgtctctttccctcacaccctggcttccagccccacgaatcggctttcatgtccctgtcttgttgccatcaacagcatgacttgaagttgcccatgtcatggtgtctgaaccttcatgtttgctgtcctctctgcctggagtgccttccctctcccttttgactggcaaagtttcactccaaggtctagttcacagcccttttgtgatgattcccacccccaccccgttataagaatgagccaaagacggtgtattggttcctaggttgtttcttcacaacagactgcacctaacagtctcaaaaacctgtaggttccaaactcaatttttaaaatatttatgagtttattacaaagaataccaaggaacagtccgatgcagaggtacatagggcaaggtgcgggaggggtgyagagcgtccatgccctctccaggcatgccatcctcccaccacctgtgtgttcaccagctcagaa

SEQ ID NO: 518719 - DNA, 647 bp, Homo sapiens
tgtatatgtcccctctcccctccctgtgtccctcctctagccaagtaacgaatgayggcttggcaaagaaagcacaagcccttgccaaaataaaaggtctgtcggagcaactctcaagagttactgtgtcctcttagccctcccgcctggggaacatttcctgcgaagtttccatctctgtcggacaccagaatcccaaggtgatcactgtaaatttagcacctggactaggtttctcaaagtggcacagcacagctagaatccctgagggtgcctgtttgattccaagcctcatcctggccctaatgaatcgactatctgaggggacctctgaataagtttccaagtgattgtcccactccaacatttgaaaacagcctttctaatgtgcaggaccgtccatcctggtcaagtcatccagtaatttacatgcatcatctcacctctgcctcacttcaactctagaagcagatactattttgttcccattttagatatgaggaaactgaggctttgtgatgttatataaccccaggtcacacggctaatacgtggcaatgttggactttgaacaaagctcaatcccatactcaaaactcactctgaaatactcctgcaataggtgacttgagtatttcaggacactg

SEQ ID NO: 518720 - DNA, 647 bp, Homo sapiens
tgtatatgtcccctctcccctccctgtgtccctcctctagccaagtaacgaatgatggcttggcaaagaaagcacaagcccttgccaaaataaaaggtctgtcggagcaactctcaagagttactgtgtcctcttagccctcccgcctggggaacatttcctgcgaagtttccatctytgtcggacaccagaatcccaaggtgatcactgtaaatttagcacctggactaggtttctcaaagtggcacagcacagctagaatccctgagggtgcctgtttgattccaagcctcatcctggccctaatgaatcgactatctgaggggacctctgaataagtttccaagtgattgtcccactccaacatttgaaaacagcctttctaatgtgcaggaccgtccatcctggtcaagtcatccagtaatttacatgcatcatctcacctctgcctcacttcaactctagaagcagatactattttgttcccattttagatatgaggaaactgaggctttgtgatgttatataaccccaggtcacacggctaatacgtggcaatgttggactttgaacaaagctcaatcccatactcaaaactcactctgaaatactcctgcaataggtgacttgagtatttcaggacactg

SEQ ID NO: 518721 - DNA, 564 bp, Homo sapiens
attgcagagctgggcaataggattttgaaagcaaaaagttatctatatatctgctaaccgttcttccctctacccacaagcagcttgataacgcgactcttcacttttttcctgtgatagcacagagtccagactttggagcaccacagccatattgtttattcctggttccagcacttgcctgctgtgtgaccttgggcaggttacttcacttctctgtctctgcatctgaaaaatggggataataataatattggtacctccctggaggctttaataagataatgcaccacacctagtagttagygtttgtttttgttattttttagcatttattacaaatacaactgctgtatttcctgaattaaaagtatggggacatggatgaaaaattgcaagtgtctgtatggggatacgatgaaatatttaaaatagggattgtttcctgaaagtgggatggctgaacagtgggattataacatgcttgtaagaaagatggaggagctaaattgtagaagggactgagaaagccaggacacgttaggacccttggcactgaggagg

SEQ ID NO: 518722 - DNA, 509 bp, Homo sapiens
ggagagacacacatgaaactggtatcagtgattatgcaaaatagtctaggacctggagccccagtgtccagcacatagtgtgtgttttagaaatactaatgagtagacagttgttgcctgggtagagtggggatagtggggaagacctatttttcactgtataaaccttttagtgccttttggttttcataccatgtggcttcgttacctcttcaaaacattaaccctttagatccagtggcagtgaaggtggtaaagggagatgtaagttcccatttaggacattttaggacccccaagggttgttaccctaaagagtagttgatgattaaattaaatctctgaaccatcctcatgccgaaggggtgttgacaggggacagtgrcaaccagtgtgttagtccatttgtgttgctataaagggatacctgaggctgggcaatttatagaggaaagaagtttgattggcttacagttctgcaggctgtacaagcatggcaccagcatctg

SEQ ID NO: 518723 - DNA, 554 bp, Homo sapiens
tatagaacaaatgatattgagctacttaatcttactatcactgtaccaggttccataaagatgatgccttggtcagctcaggctgctgtaacaaacaaaggcacgtttcttataaacaatagaaacttgtttttcacagtctggaagctgaaactctgggatccaggtggcagctagttggttgttagtgaggctctcttctgggtttgcagatggctaacttctcaccatagcctcacatggttgaggatggctggagaactctctagggtctctctctctcttgctctctstctctctttttttaaaagcagcatctcactttgtcacccaggctagaatgcaatggtatgatctcagctcactgcaacctccaccttccgggctcaggtgatcctcccatctcagtctccgtgcccatcctctagggtctgttttataaaggcatcaatcccacttatgagggctctaccctcattacctaattacctcccacaggctccaccttctaataccagcacattggggatttcgacacacgcattcagtccata

SEQ ID NO: 518724 - DNA, 605 bp, Homo sapiens
ttgaggggcacacttacggttcgtgcatttttctctatgttatatttctgtttaaaagttttatattttaagtggggatgtctatactttgctttaaaattggtttcaggatcagtattccagaagatgtctgtgatcacccaggttgaaatttaaatgagcgaatgcccacaaaagcacttagcatgatgtctggaatggtggactctsctccataaacactaacagttgttattattactattattatgtctttcactttccaaacgggagcggataattttttaaagcacgccgcaacacaggtgcacctcaagcaccaggagtccacttaaacaggggcagtagaaaaataagggcaaaatcccccaccggctgggcccatccagcaccaaagctaatgcagtttgcccgaatggccatatgccatagaaggcacaagctgcctgcaaagctcaaagcgaggccaagatcctttccaagtaccatctgtctttctttgccctttttttccattaccctgcacaggataccttttcataacatgaggctcctggactcagactgaccacaggcgcttgtgtttttagggaaggaaggcggag

SEQ ID NO: 518725 - DNA, 605 bp, Homo sapiens
ttgaggggcacacttacggttcgtgcatttttctctatgttatatttctgtttaaaagttttatattttaagtggggatgtctatactttgctttaaaattggtttcaggatcagtattccagaagatgtctgtgatcacccaggttgaaatttaaatgagcgaatgcccacaaaagcacttagcatgatgtctggaatggtggactctcctccataaacrctaacagttgttattattactattattatgtctttcactttccaaacgggagcggataattttttaaagcacgccgcaacacaggtgcacctcaagcaccaggagtccacttaaacaggggcagtagaaaaataagggcaaaatcccccaccggctgggcccatccagcaccaaagctaatgcagtttgcccgaatggccatatgccatagaaggcacaagctgcctgcaaagctcaaagcgaggccaagatcctttccaagtaccatctgtctttctttgccctttttttccattaccctgcacaggataccttttcataacatgaggctcctggactcagactgaccacaggcgcttgtgtttttagggaaggaaggcggag

SEQ ID NO: 518726 - DNA, 605 bp, Homo sapiens
ttgaggggcacacttacggttcgtgcatttttctctatgttatatttctgtttaaaagttttatattttaagtggggatgtctatactttgctttaaaattggtttcaggatcagtattccagaagatgtctgtgatcacccaggttgaaatttaaatgagcgaatgcccacaaaagcacttagcatgatgtctggaatggtggactctcctccataaacactaacagttgttattattactattattatgtctttcactttccaaacgggagyggataattttttaaagcacgccgcaacacaggtgcacctcaagcaccaggagtccacttaaacaggggcagtagaaaaataagggcaaaatcccccaccggctgggcccatccagcaccaaagctaatgcagtttgcccgaatggccatatgccatagaaggcacaagctgcctgcaaagctcaaagcgaggccaagatcctttccaagtaccatctgtctttctttgccctttttttccattaccctgcacaggataccttttcataacatgaggctcctggactcagactgaccacaggcgcttgtgtttttagggaaggaaggcggag

SEQ ID NO: 518727 - DNA, 431 bp, Homo sapiens
agctgcttggagctgctggccacagttgtggggaacacattgtcctatagctcaccgactcccttctcagttcccttgtcatttggtgcaatccccccagcccttctcgtcctcgccaggcacctacaccccatcctgggcttgtgtcttcctgccaatgacacccaaccctgtgtcctaccccaggactgctgccctgtcccacctcctccycatacactatagtcatatgttcatacatgcacacacatgctcagtcacactcatattcacttccaccccatgcttacacatacacgtgctcacacacattctcatgcatgctcactctcacttatcaagaacaactcacaacaaagaaatgtcccttgaacaccagaaaagccttgtgaatccggggcagagtttctgaaaacacggtctgaacatca

SEQ ID NO: 518728 - DNA, 533 bp, Homo sapiens
actagcattaacataaaaagagagaccttaatacagatagactcttttacgtctgatcagaaatattctcttctgttgattttatctgcataatgggaaacttggtcaccacaaccccttatcttaacccagacattcccttccactgattctaggtctttagataataactctttcaaccaattgccaactagaaaattcttgaatctgtctatgacctggaagcccactccccccagagttgccccccttttccagactgatcttatgcgtattgattgcttgatgtcttacgtctctgtaaaatgcataaaaccaagctgtagactgaccaccttggacacatgttctcaagatcccctgggactgtgtgatgagccactggtcastcatatttggctcagaataaatctcttcaaatattttacagagtttgacttttttcatcaacactgactaggcggacttgggggccttggaaacctgaagcctaattaggcagataagagttcaaaggagaagacagattccag

SEQ ID NO: 518729 - DNA, 608 bp, Homo sapiens
gtaatctgtaaagaaacattgggacgtaaataaaaaactgtattctaaaggcaaatgataaaattaaaagtatctggcaaataaccgacaaaataagaacttcaaggatataatttaccatgtttctttgcatccctaactattgtcaagaggttttaagaaaaatgcccataaatatgaagtaaatcttattcagtgaacaagaaaatggggtcctattttaatgaccctcgaatgtttccaatggtatataaagaacagactttaacagacagataaaagtgcagctatgtagataggcacatagaaagatggattgattttaactcaactactatgctagatacttcktcacactctaccctaaatactataaaatatatgcttactttcataattctgaaggataaaagttccaagttacatggttattattaaaatactcagtagtcatcagattagattagtatatgtagtagtagattaataatatatgtccagtttcagaatgtacatgtctttccttaaatagaaaaaaagtccatacagaagactcataaaaaagactaatgattgacccaaaatattttccatatcaaattatgtaa

SEQ ID NO: 518730 - DNA, 539 bp, Homo sapiens
taaaatctacgtagcaaacaacagatggttgcttatttgacttttgggcaagaactgggatatagaaattgctgttgaaataggtctttctcaatgtttcagatttctatcatcttccaaagagtgagcatggatctagagactgagaaaatttttaaagcttccctttgtattcttagtctcttgttatgtgggacaaattttccccacttccatcagaaatatgcaaagggttgaattttaataaccttagttacagtgttcttgaatacacagaggttgtcattaactttccaaatgcctcttgggcgccaggagtatttcatgattartttaaaatgtatgtaaaatatctacacagagttagtttggcacttgcagataaagaaaaacaagtttaatcagatgaccctgataaaatgaactgtaagtccttctcatgaacactgcttctcacgagaaatattaagtacctctgttgtggcaaaaatattacttaatggtattccttaaatcgaacatgatatgttttagaagct

SEQ ID NO: 518731 - DNA, 635 bp, Homo sapiens
attaggtgagttgtatgtcctgtttgatgctgaccctaaatgtcctttgtacctcatttgcagatcccttccccatctgcaactgtgcctcacagcacaagcacagatgttatctgagtcttgagagccggtgtctgtgactcaccattgaaaagctgtggaacaacatgcaatctccaatatgcatattggaagtcagtcagagaagacctcagggcttgcttaggataagcaaacagaggaattgttcagtgaaatggaggctgagggtgtagagaacagatgacaggaaatatcttggaaaagcagtttcagagggctcagtgggagggattggaaggcatgctaatgcaagactagaaatcattggakaatcattggtcagcatgtggaggaagttatgcataaggaggacagatgatcaggacttgtttagtaacaaaggctagaaagagatgaagaactaaataattaagatgaggtcttaatttctaggcagaattaggcagtgagttccaacgaggctggtcatctgtggtcaagttattttgatagggtcctaaagtggcatctgcccagtctgttgtttagaaggaatgatttaactgcagtggtgggaaatacagcatctgcag

SEQ ID NO: 518732 - DNA, 539 bp, Homo sapiens
gctttctatgctacacttgttgcaaagacaataatctaacaaaagaaaaaatttgtgcctaggagatattttctaggcaaaccaaatttctatggtatttcagcttcatgatctctctgatacttcgtcacgtattccctttawccacaatagtcactcttagaaggggaccaactagccaaagggaagcagccattggatgatggcgactggcggactgggaatggggtgcgtaccacctggcagaaaccagtggaatcatcaccaagtctcacatcatctggggagctgtcctaggagacagatgaggatagagaagtaactatctgtggctatcaccgcagagcacattttccagtccaatagtagtgaaaaatgacccatgtcctcacagacagataaccaggtcttatcctttctttcctctccaagtatacctcaaaaatggatagtcattccactgatgactagactagtgttaggctctgattggtagaaaaaggaagaagaaacaggtggctttgatatatcccccaaat

SEQ ID NO: 518733 - DNA, 595 bp, Homo sapiens
tgaatattgtttcttgaaaagatgggtgatgatttttaagcctaccaacctttctgctccataattttctccccttctttttacattctcactcatttttttctgttgtactgctagacaatagaggcagccatcataattataataaatgtaacacgatctacttcataaggaaacattatttgtgattaatataataagattaaagactcagaaacaaccctgtggagctatccaacctcctttgctgtgacagttacataatatatcaatcatatctgtaatacattggtctctttggtgggtgaaatctctattcgcctttgttaaattgttaatggcttcgaagtttagctacctggttttccttaattttttttttttttgcagtttgtttagaactttttattttcctaaattgacaaatttatrtaaattttacttatgaacaatagtcccccttaaaagcaattcacatctagacatctagtacattcctagatttaatgtactctttaggtctaatcttacctactcactcaatagttataaattaaaatataatacagctttgacttctagactaaatctgaca

SEQ ID NO: 518734 - DNA, 489 bp, Homo sapiens
  misc_feature (1)...(489): n = A,T,C or G
ggtacatacagcccaccagttcacaactcaayagcacgtacactacatattcagatttgtaatctttcacagcacagtaacaaagttattaggaaancaggactaccacaaccaaagatgttacagagtgcacacaattctggcagagagagccatgatcaaagagtggttttctttaggaaacaattctactaaaaaacaacatggtaatagaagtaatttaaaatgttcaagacattaaatgcaggactgactccatattgccatttaatatgctttgtattataggatataaaaactaaccccccatctatggaatgttaagctgacacccgagacaatcagagcctcccataattcaatatcccacactattttctggttgtaccaaaaaataaacaaccagcaaatgatttcacctcttaaaaaaaagcatttacacttaaaaaatgggatgaggtgggattccctccttcttaaaaatgtttc

SEQ ID NO: 518735 - DNA, 489 bp, Homo sapiens
  misc_feature (1)...(489): n = A,T,C or G
ggtacatacagcccaccagttcacaactcaatagcacgtacactacatattcagatttgtaatctttcacagcacagtaacaaagttattaggaaancaggactaccacaaccaaagatgttacagagtgcacacaattctggcagagagagccatgatcaaagagtggttttctttaggaaacaattctactaaaaaacaacatggtaatagaagtaatttaaaatgttcaagacattaaatgcaggactgactccatattgccatttaatatgctttgtattataggatataaaaactaaccccccatctrtggaatgttaagctgacacccgagacaatcagagcctcccataattcaatatcccacactattttctggttgtaccaaaaaataaacaaccagcaaatgatttcacctcttaaaaaaaagcatttacacttaaaaaatgggatgaggtgggattccctccttcttaaaaatgtttc

SEQ ID NO: 518736 - DNA, 489 bp, Homo sapiens
  misc_feature (1)...(489): n = A,T,C or G
ggtacatacagcccaccagttcacaactcaatagcacgtacactacatattcagatttgtaatctttcacagcacagtaacaaagttattaggaaancaggactaccacaaccaaagatgttacagagtgcacacaattctggcagagagagccatgatcaaagagtggttttctttaggaaacaattctactaaaaaacaacatggtaatagaagtaatttaaaatgttcaagacattaaatgcaggactgactccatattgccatttaatatgctttgtattataggatataaaaactaaccccccatctatggaatgttaagctgacacccgagacartcagagcctcccataattcaatatcccacactattttctggttgtaccaaaaaataaacaaccagcaaatgatttcacctcttaaaaaaaagcatttacacttaaaaaatgggatgaggtgggattccctccttcttaaaaatgtttc

SEQ ID NO: 518737 - DNA, 663 bp, Homo sapiens
caggaataaacttaaaaacaaagaagatactgaagagagcttacctatcttcagtatttcccttttgtgtctctagagcattcagttttattcttgttatctccacttctttctcttgttgtgtcatagatccttggagaacttgtacattttcccatctctagaggaaataatcttggctactttctcttttctgtccgatttctattattagagcattgttcaaaaacctttgtaattyttctcgtctcaggtcattggtatttatctatgaattgcatgtaaaactatctatataaaagcaaatcctttctccacaaagatatataaaagccaacaatcacacaaaaagatgcttcacattactagtcataagggaaatgcaaataaaacccaaaatgagataccatttcatacccattaggatggctataataaaaaagacaaataataaacaagtttggcagtgacgtgaaaaaaacagaaccctcatgctcaagggaaagtaaaatggtgtagccattttgaaaaacattctgccagtctcttaaaaggttactagaggcacaaatgaaatcatatgtccacacaaaaccttgaatacgaatgttcacagcagcattgctcataacagctaaaaagtagaaacgacacagatgtcca

SEQ ID NO: 518738 - DNA, 605 bp, Homo sapiens
tttcccttttgtgtctctagagcattcagttttattcttgttatctccacttctttctcttgttgtgtcatagatccttggagaacttgtacattttcccatctctagaggaaataatcttggctactttctcttttctgtccgatttctattattagagcattgttcaaaaacctttgtaatttttctcgtctcaggtcattggtatttatctatgaattgcatgtaaaactatctatataaaagcaaatcctttctccacaaagatatataaaagccaacaatcacacaaaaagatgcttcacattactagtcataagggaaatgcaaataaaacccaaaatgagataccatttcatacccattaggatggctataataaaaaagacaaataataaacaagtttggcagtgaygtgaaaaaaacagaaccctcatgctcaagggaaagtaaaatggtgtagccattttgaaaaacattctgccagtctcttaaaaggttactagaggcacaaatgaaatcatatgtccacacaaaaccttgaatacgaatgttcacagcagcattgctcataacagctaaaaagtagaaacgacacagatgtc

SEQ ID NO: 518739 - DNA, 672 bp, Homo sapiens
ctgatttttgtaattatttttagtagagacggggtttcaccattttggccaggttggtctcaaactgctgacctcgagtgatccacccacctcaccctcccaaagtgctggattacaggtgtgagccaccgcgcccgactgtggctggtttttcatacctggactggttttgtcagagaaaatagaataatgactgttcctaagactattaaattatccttccttaactgtgagtgtcagaggctcttcctgacccttcctggccttgctctcagaacacttcacacttcagtggcaagccagaagggaagtccacagaactagagctgtgagtgcattctcactgacttgagagcggacaggttgctagtcccttcctgggcccaccacaggaggagaaccrggctgggtgggtggtccctaccttccaggagctctaggtctatttggagggcaaacacagagcgtctcacgaccaaggtggatggaatgctttaaagctcagagctccatggacatgcagagccttgaaatgtcttagccatctgcattgagcacaggaaggtattttagtcagtgactaagtcttcttgttcagagagagaggtgtgatcttgaaggacacttttagagaaaaagctaacaatcattgagtgtctcttctgtgacagg

SEQ ID NO: 518740 - DNA, 437 bp, Homo sapiens
ctgttggtcttacaactcaaaaaagcacaggtcccctggcaggwgcaaaagaaaatgtgccatggagatggaactgggggagggagttacgagtcaattactacttatgttgaactaaaagaagcccaaggcatcagcttcggctcagtcttctccatacaccccaagctgctttccattctcactcagcccctgactattcctcccattcccctgcccagtacaataaaaacagcatgcagttagcttcctccaccccggagctgaccaggaccagaatcagcacttggatagtactgcatggaattttgcctgtattctgggcatggtgctgaacgctttacattcctaacataatttaatcttcatacatctggaaaggtaaatatattaccatgatcccattttacagatgagcagatgaaaaccttatttcc

SEQ ID NO: 518741 - DNA, 437 bp, Homo sapiens
ctgttggtcttacaactcaaaaaagcacaggtcccctggcaggagcaaaagaaaatgtgccatggagatgraactgggggagggagttacgagtcaattactacttatgttgaactaaaagaagcccaaggcatcagcttcggctcagtcttctccatacaccccaagctgctttccattctcactcagcccctgactattcctcccattcccctgcccagtacaataaaaacagcatgcagttagcttcctccaccccggagctgaccaggaccagaatcagcacttggatagtactgcatggaattttgcctgtattctgggcatggtgctgaacgctttacattcctaacataatttaatcttcatacatctggaaaggtaaatatattaccatgatcccattttacagatgagcagatgaaaaccttatttcc

SEQ ID NO: 518742 - DNA, 405 bp, Homo sapiens
agctgcagctagcacctaaggcactactcgcaggtgggacaatgaggaggggtgcccattgttcagccagatgcagtcctgcatcctgccccggggcactgccaagcgtagtacagggcrtgcgtgcggaggccctgctgctccctccccaggcctgtgctgtcctaactcctgcccacgcctccctgatctggaggccctgagagcaccgcccaaaaagttgcttctcatcctgaggtcatcctgggttttgcttctccatggctggggttctagagagcttgtgctgtggatcggcttctggggaagggcagggtgggagccgtcctggcctttcgttcacccacggcatcctatggggattacacttgggcagggaaattctctcgtttacagccctggatg

SEQ ID NO: 518743 - DNA, 545 bp, Homo sapiens
gcagctgtgtcagggctggggtagaagtcagccagcaaaaaaggccagtccaacacagcaggttaaggcgcctaatctggccttccctgccacttctcctgggcctctccctgctggttcctgtccccagcgcccctccccctggaggctcacctgaactgcctgtctggagcctggtgttttcatccttcagtgccgctgccccatgctcacagtaggttctactgtgctcagtcaggaggttctcagaacagcccctttccctatcattttwaaaaatgtttcactaaagaattacaggcatttaaaaaatggcacgtggcaggtgcagtggcttacacctgcaatcccagcactttgggaggccgaggcagtcagatcacttgagatcaggagttcaagaccagcctggccaacatggtgaaacccatctctactaaaaatacaaaaatgagctgggtgtggtggcgcacactgtagtcccagctcctcaggaggctgaggcaggaggatcacctgagcccagggaggtggaggctgcagtg

SEQ ID NO: 518744 - DNA, 663 bp, Homo sapiens
aaaatgtttagacagttacaggtacacggtagtccagagaggtttccttggaatcagtgagatcctagagtttatatgaaaccctaggactttatgaaatccatactagtctctgaaattataagcaaaaaatcaagtgagtgtgtcttcatgtgtattaattattctgcagaaagaatatacagttttcatcagatttttcaaagatatttrtaatgtgaaatttggcactttggggctcaaataagttgtatttaattgccagaaataatctggcatttcattcattaattcattcagaaataattattgagtggatactatgtatcagacactgttttagatactggagaaccagcagtagacaaaacagtacctgtctttatgaagtttacaggcaagtagggggaaaaaaatatgaaagaaattagaaaatgtattatgtatctgaatatgtcagatagttttaaatgccacaaactgattaatgaaaaaacaagaccctataatcttctgcctaaaagagacatacataaggacacctaagacccaaagtaaaaaggtggaaaaggtctatcaagcaaatggaaaaccagtgagcaggggtagatactcttatagaagacaaaacaaaatttaagccaacaacagtataaagaaata

SEQ ID NO: 518745 - DNA, 613 bp, Homo sapiens
attaaatcagtatgtcaaagagatatctgcactcccatgctcatttcagcattattcacaatggccaagatatggaaataatgtaaatgtccattgacagatgaacagattttacaaatgtggtgtgtgtgtgtgtgtgtgtgtgtgtgtgtgtgtgtrtaatggaatattattcagtcttaaaaaagaaaaaaatcccctgctatttgcaacaacatggatgaacctggagaacactgctaagtgagatgtaagacacaaaatgaaaaatattccatgatctcacttatatatgtgacttaaaatagccaaactcaaagaagcagagtgtacaatgatgggggagggggaaagaaggaggtcatgatcaaaggtacaaagtttcaattatgaaagataaacaagttcttgggatctactactatagagttagtgcctttatctaacattagagtataaatacttgaaatttgctaagagggtagatcttatgttcagtgctcttaccgtacacaacaatagtattagtagtagtagtactaataataaaggtgaacggaggaaactttgggaggaaaaagatatgtttacggacttgatggtgattattgtt

SEQ ID NO: 518746 - DNA, 613 bp, Homo sapiens
attaaatcagtatgtcaaagagatatctgcactcccatgctcatttcagcattattcacaatggccaagatatggaaataatgtaaatgtccattgacagatgaacagattttacaaatgtggtgtgtgtgtgtgtgtgtgtgtgtgtgtgtgtgtgtgwaatggaatattattcagtcttaaaaaagaaaaaaatcccctgctatttgcaacaacatggatgaacctggagaacactgctaagtgagatgtaagacacaaaatgaaaaatattccatgatctcacttatatatgtgacttaaaatagccaaactcaaagaagcagagtgtacaatgatgggggagggggaaagaaggaggtcatgatcaaaggtacaaagtttcaattatgaaagataaacaagttcttgggatctactactatagagttagtgcctttatctaacattagagtataaatacttgaaatttgctaagagggtagatcttatgttcagtgctcttaccgtacacaacaatagtattagtagtagtagtactaataataaaggtgaacggaggaaactttgggaggaaaaagatatgtttacggacttgatggtgattattgtt

SEQ ID NO: 518747 - DNA, 429 bp, Homo sapiens
aactagacgcacaaagggagaatcttggcctttgcagaacagcaggtctggacagcttagttcactgcacagccaactcagaagcccttccggagcaaatctggcccagaaggctgcacatatttttgcctggatagacttcttcatgttcaacaggagcctctgcagcgatgatggggtcctccatattgctcacacaaagctacagtatgggacaggaaatctggctctttaaccctctggctgctgcacatgactatttggctagcaaagcagaaaaatgtcgacagcctaaggtttaaatgattagtaacaggtttttgagtgattttcccagaatgtgctagyataaatagaggactgtgaaactgtggtttgtggtattttttttcttccttttgatattgtggcttgtttgtttccatttct

SEQ ID NO: 518748 - DNA, 641 bp, Homo sapiens
accatccaatcgcctggaagacctcttcggggaccacaaatcaccttacgtactatccctctttgttctaatgaagaaaggaaaaattaaagcaagctaccgtggtttattactcatgttttctctgktatgcatgggccgtgggagccaccgcattcacattaggagccttggcattttaggtaagcattacatgacagacaagccaatgagtttaatattcacggatctggaagtgattttatgaatatttgaatcttgaaatgtttgattgattgtgtgtgtgtgtgtgtgtgtgtgtgttctttgtcattttctcagtgaaaattgccctgacactgatctcaatgttaatgtattcctgcttacatttgactttggaatatgttacagctaattatcattacactggatgaaagatcagagccctgagtgaggtgcttgggtttaggaacaaagggagaccaaatcagcatcttggctctaggcccaataattgtaatcaaacatcttgaaactgatgggatctttgcatttattttttatttgttatttttttgttttctttcctcactttttgaaaggaggtgggaaaagggggctaagggtttgaaggggctgaaatttccccttgaacatga

SEQ ID NO: 518749 - DNA, 639 bp, Homo sapiens
gctggactgggctgggctgttcctgagaacatattgctgtggggttccttctttattgtgggcaccaccctttaatgccatactgctcctccagggctccagccatggcatgcctcctgagaagtccaggtggaccctggtccctgccctggggtcaggcgtccttcccctacccccatccaygcaggcccagctcagttttgcaaaggttacagctccagtgactagcgaggactgctaatggtgcaactgccttggggacaccatgggaggatgcatttgggagtgatccctgaatgcctcccccatggccctgacagttccttgcaccatgtgtggggcaacctttatagccctccagcctcctgagctccttggttcaagagcaactgagcccagcatagttagaagaaaagcctcctcccaggcctgctgacctccattcacaggggcacggagggtcccttgggcttggagtaagatggtttctcctgcctccaagccttctatgaggctcctactctccttcccctgctctcacgccctcaccaccatggtcttcattgagacctcaagtctaagcttatgatcccttttatccctggaatgccatgcacccccggatcacccctcatctcc

SEQ ID NO: 518750 - DNA, 639 bp, Homo sapiens
gctggactgggctgggctgttcctgagaacatattgctgtggggttccttctttattgtgggcaccaccctttaatgccatactgctcctccagggctccagccatggcatgcctcctgagaagtccaggtggaccctggtccctgccctggggtcaggcgtccttcccctacccccatccacgcaggcccagctcagttttgcaaaggttacagctccagtgactagcgaggactgctaatggtgcaactgccttggggacaccatgggaggatgcatttgggartgatccctgaatgcctcccccatggccctgacagttccttgcaccatgtgtggggcaacctttatagccctccagcctcctgagctccttggttcaagagcaactgagcccagcatagttagaagaaaagcctcctcccaggcctgctgacctccattcacaggggcacggagggtcccttgggcttggagtaagatggtttctcctgcctccaagccttctatgaggctcctactctccttcccctgctctcacgccctcaccaccatggtcttcattgagacctcaagtctaagcttatgatcccttttatccctggaatgccatgcacccccggatcacccctcatctcc

SEQ ID NO: 518751 - DNA, 473 bp, Homo sapiens
ttaagataatattgataactgggatacaaaactgcttaatgtcctacaatgtaataaaacaatttctgttgtgttttgcatgagatagaaacaaaaatacctcccattggtcagttttctacaagataatctttaactttacagggttgtaaaatagctatgcctgaattgttagttaaaaccccatttttttttttagagaaaacaatgatccttagactcacttactagaaatatgttctagtttttttataaaaataaaataaaataaatatttttattataaaataatawatatttttataataaaaataaaaataaaataaaaaatatttattttaaatatttttttcaagcatcagtataccttattcttgttcaacttggggaatggccttattcaaattgggaatcctcagctcatctttgtctttggcattccagagaatgaatgtgtttgggaaattgtgtca

SEQ ID NO: 518752 - DNA, 583 bp, Homo sapiens
aaaaataaagaaaaaaaggacccctggctgcctgttagcctccatcgccaaatcctctgcccactgttgcagaatctgggctgcgtcccagtctcagcagagggcggggctgcctaactctctcatctgcccagcccccactactccgtgtgagtcactattcctgttttctcttcctgctaaactcgacctcactagcagcttccccacacactgcacaacacccataagtcacagctatagtcacgctcctgggagtcgcaatgactcagtgagagagtcactgacagagtcagtgagagagagagacagtgagagagacacaccayggggcctgagcttccaggaagaatacgtaaagtgacgcaggcttctgttagtcaaaaagtagaaagcaactgaaccactcaactctgtgtcagaaaacaatcagtggtgggggactgaactgtcttcttctcaaagacgcaagcaggagagagcagtcatgggtgtgcttagacggggcggcctctgcagatgccagagccaaaaccagagaccccctccccatgcccagtcggactatccacagtactagcag

SEQ ID NO: 518753 - DNA, 491 bp, Homo sapiens
gctgaggccagaacgacactggccttcaggacacagaagtgaagcagagaatgtgcacacccagagctgcaagctgccaygcacagatccctattcactgcaattctaagggaggtaacgggcacttaggaggccaggagcttggcaggggcaaaggcacgattgctaactccatacagcaaccactgtgttttctgttaggttctagaaaaatatttggtggggctttagcttgatgtatgcaagcataggtttaactgatcattaaaggacatcagcaaattcaagtcctctctcttgcatgtagctagccacacacgtgcgtgtcaaacacacacacacacacacacacatacactaatgatattaatagaatcaagaacaactgtcttggtaaaccacacagcattttgcaaggtatttcacacacctcccctgataggttacgaatttaaagttgttctcctgattctggcttcaccctccactat

SEQ ID NO: 518754 - DNA, 447 bp, Homo sapiens
attccatccagagccttagcagtaggtgactcagcaaaatgtaaggtggtatggtcattttgttcctgtgtctttttagttttatggcctctacaggataaaaagactcaccatgggcattacacttttccacctgaactttctatccattcaactcacttttctrtcttaactggaattagcccacctgacctctctacttttgtctaatttccaagctctttcaggtatcatttcctttcctgtccatcctggattcacgtgtccatcacttgaatcacttcccttccagtacctcaactctgcagccctccgtccttccagcatcttcacctgcaaagacccattctgatggatcccttcatccctctcctgcaagccttcaaccagagagcagagcactataggagataatcacataaacaggggtcttggtaccactacaaa

SEQ ID NO: 518755 - DNA, 447 bp, Homo sapiens
attccatccagagccttagcagtaggtgactcagcaaaatgtaaggtggtatggtcattttgttcctgtgtctttttagttttatggcctctacaggataaaaagactcaccatgggcattacacttttccacctgaactttctatccattcaactcacttttctatcttaactggaattagcccacctgacctctctacttttgtctaatttccaagctctttcaggtatcatttcctttcctgtccatcctggattcacgtgtccatcacttsaatcacttcccttccagtacctcaactctgcagccctccgtccttccagcatcttcacctgcaaagacccattctgatggatcccttcatccctctcctgcaagccttcaaccagagagcagagcactataggagataatcacataaacaggggtcttggtaccactacaaa

SEQ ID NO: 518756 - DNA, 522 bp, Homo sapiens
aatatatgagacctttaatgaaatgagaaacttcctaagacacaaaatcttaccaaactcacacaagagaaagtaagaaatttgcgtaattctttcaccattaaagaaattgaatcaatagatgaaaatcttcccataaagaaaactcatgacccagaggggtgtgctggcaggcrttaacaagcaggaaaaactaattccaatctcaaatgactagcctgtgctcctccatgccaagagttaccttctatgtcaacatatgccaggatcatcaagaaaagagaacttttgaagatgaaaacacaaagtgcagaaagatgagcgtaaaaaaggaagggctagaaagagctagactatatatttttatttgctagtatagcatcatacaagaataatcacagggcactaatcatggtagccacagttgaggaaggtgtgatgagcccagaacaaatatggaacggtagcaggaaagaggttttccagggggtgacctcttagaatttgtgattattgaaccat

SEQ ID NO: 518757 - DNA, 459 bp, Homo sapiens
gaaaaaaaatttggttcacttttaaagttcatttctaccaaatttccttttttttttttttttgagacggagtctctctctgtcgcccaggctggagtgcagaggctcaatctcggctcactgcaagctccgcctcccgagttcacgccattctcctgcctcagcctcttgagtagctgggactacaggcgcccgcaccgcgcccrgctaatttttttaatgtatttttagtagagacggggtttcaccgtgttagccaggatggtctagatctcctgacctcgtgatccgcccgccttggcctcccaaagtactgggattacaggcatgagccactgcgcccggccataccaaatttcttagaagaaatttgttctattgacggtttccttgctttcaccttgtgtcataaaataacgctttatcttataaaatagcctgtagtaattccatttgagc

SEQ ID NO: 518758 - DNA, 459 bp, Homo sapiens
gaaaaaaaatttggttcacttttaaagttcatttctaccaaatttccttttttttttttttttgagacggagtctctctctgtcgcccaggctggagtgcagaggctcaatctcggctcactgcaagctccgcctcccgagttcacgccattctcctgcctcagcctcttgagtagctgggactacaggcgcccgcaccgcgcccggctaatttttttaatgtatttttagtagagacggggtttcaccgtgttagccaggatggtctagatctcctgrcctcgtgatccgcccgccttggcctcccaaagtactgggattacaggcatgagccactgcgcccggccataccaaatttcttagaagaaatttgttctattgacggtttccttgctttcaccttgtgtcataaaataacgctttatcttataaaatagcctgtagtaattccatttgagc

SEQ ID NO: 518759 - DNA, 528 bp, Homo sapiens
tattttccataataaaaagttttttaatgtaaaaaaggaaagcaggaagaagaaattaattaatataaaagtataaatgagatcaaaacagaaaagcaataaatctagtaagtaatctcaaaataataataaatctagtggatacaaaggaatcaaggattgtaccagacctccaatgccactttcctctcataggttctaaatttggtggtcaaatctgcccttgtggagtcagcaatctgccaagtcaaaagtgtaaagaaataatgaaatctttgctttccatgacattagccaaaaatgacccaaagtatccttgcaatgctactggtaaatacatatttgctgtatttttattgagtaggctaccttaataaaggcytcactatattctacagcaggagctaagttaaacagcattacataaaaaataatggcatcattttctcctactgttcaagcatacagtgtctggattttacaagtatctgctatttcctaattgtcttttgcatatcagtctccaaa

SEQ ID NO: 518760 - DNA, 629 bp, Homo sapiens
tcttaataatatgatgttggcatataatctaccctaacaacagaaaaggggcaagggtatgcaaarctggatgaaaagaaagttttggaaatatctctttttctcttacttaagtaattatctctacaaaatacataatggcagtggtcctttgactctaaagctaattccaattaacaatgtttttgatgggccacagcaataatattttgttgtagggtcatttatttctccttcaatgaaaaagctctctaaaagacagctacaaccaggctacaggacacagacagagaaatcaatgttaagaataatggctcgagtccagagaataggatgctgtggtgtatgagtttccttctttatttaatgtttttattaatagaagaaaaattaaattaataactgctccttctcttctcttcttcccacccctctcctccttttctccactatcctctctaactagaaaaagagagattaggaaacttgattaacacgtcctaattcactggctcacgctcgtctttttgaaacatacgttttctttccctaagtgtgctctgtcacgcgtatgttcatgtgtattacaggacaatgctactgagctgacgtgtacacatgatcgggcc

SEQ ID NO: 518761 - DNA, 573 bp, Homo sapiens
aacagtaaaaaaaaagaaaacttctcaattttttcttctgaacataagaattacatatcaagctgtccccagcaggcatcccctgcaccttacccacttcccccagaggatgggttggtatatgaagacatggtttcttctctagttaggaagttagttacagggaaggtctctcctgctattccattatacaaatggctcacggtcctaagtttcttcttttttttctgggacagagtcttgctctgtcacccaggctgcagtgcagtggcccgatctcggctcactgcaacctccacctcctgggttcaagcgactctcctgcctcagcctcycgagtagctgggactacaggtgggtgctactgggcccggctaatttttgtattttttgatagagatggggtttcgccatgttggccaggctggtcttgaactcctgacctcaggtaatcctcctacctgggccttcgctggggttataagcatgagccaccacacccggcccctcagtttcaatagaggaaaaaatggggagaggagggaggcaggaaaacatgagagaaagaaatgt

SEQ ID NO: 518762 - DNA, 655 bp, Homo sapiens
tgggattctagaaattgtactttacaaatcacatcccagttttacctgagctattctttaaagactagcaaacaatgcacagaatgctatgactcattgattctacataaaaatctctcccaacatgacagtctgcaagttcttagtttctaaatcatatggtgtgcactgaggtaaagtttattaattaatggtcaatcaacacatagaagttaaaaatactttaaactgcaagtaacaaattttcactataatgttatttattgtttatcttaaaaggcagcaaaaggatgattgttttatggataatccagcaattaaaactacaagcatacctattttatttctaattctttatctgctatttttcctaatccttcttgcatattgtgataaatagtttccatagctgtagaaatcacatttttaaggcagaaatccaagagaaaaagtgacacsagccagctcttttcttgtgcttatttcttctcagcaaattatatttgaacaagtcctcagcaaaattcttctttgattactttggccagaattgggcaacatgacaatttctagcttcaagagagactacaaaatgagctgttctgtaaattgtcttggggcaagaaagttaggaatgaattgtggaaaactaact

SEQ ID NO: 518763 - DNA, 648 bp, Homo sapiens
ataaatgacgatggtaatctcataaagacatgcactccacagtaaatctgatagcctctcaataataagatcattagttaattaaaatttttattctgtctataatattttcttaatcttttctatattttttattrttttgtatattcccccattttaaaatgagcatacatttacatttcctttatactcagaaatacattaacattgtaccaatgtactcaaaacatttcagcagtaatgcttgaaacaattacctacaatttatttaatatctgcataggataataatttccagaatatttattggttttactcaaggtgagatataataaaaataacatcggcttgggaaaccaatctacgtgaccttggactaatcacttgacttcagagcatttttgcaacttaaaagcccagattagcaacacttagttgccgcagtttttgtgagatttaaataaaaaaagttaatatgaaaaattgtaatgaacaatgtttattttatagtaggtggctaggaagaaaaatggtaaactctaaaattgattattttttgaaaagttatggatcctcagagttctttttttcttgtgttttctatgaaatgtcaaatttttacagacagactatttgaattttaatagg

SEQ ID NO: 518764 - DNA, 648 bp, Homo sapiens
ataaatgacgatggtaatctcataaagacatgcactccacagtaaatctgatagcctctcaataataagatcattagttaattaaaatttttattctgtctataatattttcttaatcttttctatattttttattgttttgtatattcccccattttaaaatgagcatacatttacatttcctttatactcagaaatacattaacattgtaccaatgtactcaaaacatttcagcagtaatgcttgaaacaattacctacaatttatttaatatctgcataggataataatttccagaatatttattggttttactcaaggtgagatataataaaaataacatcggcttgggaaaccaatctacgtgaccttggactaatcacttgacttcagagcatttttgcaayttaaaagcccagattagcaacacttagttgccgcagtttttgtgagatttaaataaaaaaagttaatatgaaaaattgtaatgaacaatgtttattttatagtaggtggctaggaagaaaaatggtaaactctaaaattgattattttttgaaaagttatggatcctcagagttctttttttcttgtgttttctatgaaatgtcaaatttttacagacagactatttgaattttaatagg

SEQ ID NO: 518765 - DNA, 648 bp, Homo sapiens
ataaatgacgatggtaatctcataaagacatgcactccacagtaaatctgatagcctctcaataataagatcattagttaattaaaatttttattctgtctataatattttcttaatcttttctatattttttattgttttgtatattcccccattttaaaatgagcatacatttacatttcctttatactcagaaatacattaacattgtaccaatgtactcaaaacatttcagcagtaatgcttgaaacaattacctacaatttatttaatatctgcataggataataatttccagaatatttattggttttactcaaggtgagatataataaaaataacatcggcttgggaaaccaatctacgtgaccttggactaatcacttgacttcagagcatttttgcaacttaaaagcccagattagcaacacttagttgccgcagtttttgtgagatttaaataaaaaaagttaatatgaaaaattgtaatgaacaatgtttattttatagtaggtggctaggaagaaaaatggtaaactctaaaaytgattattttttgaaaagttatggatcctcagagttctttttttcttgtgttttctatgaaatgtcaaatttttacagacagactatttgaattttaatagg

SEQ ID NO: 518766 - DNA, 597 bp, Homo sapiens
aataaaaaccggaaacagagaaaatttttgtaaaccaaaacgtttttaaagattgataaaaatgagaaacctagagctccattgatcaagggaaaataaagacacaaatgaccaatatcacaaatgaacaagaagacatcccaagatattctaaagatactaaaagaaaatatgatttaactttatgccaataaacatagatgaagtagaaaaattctttaaaatactcaaattactaaaatttactcaagaacaaaagaaaaataataaataataattctgaacttaataaataatttataaataaaatctttctggaaagcaaatgccaagatatgtaggctgcattggtaaactttatcaaacacttacagaaataatttcaatctcatacaatctatttcagaaaacagaggaaaaataattgtttggaacaatttgcaacacatttaataagcctagcattacataaatatcaatataggagaaaaacatcaaycataaaaacaaacccccaaaatcaattatatttttatgaagttgaaacaattatagttatattaaaattgttttataatatcatctaatatgaactca

SEQ ID NO: 518767 - DNA, 672 bp, Homo sapiens
acttgcacatcaatgaatagttggtttattacaaaagacaattttttccaataaatagtactcagtcaactggatattcttgtgagataaattactgttgactcctacctcatacaaaagaataacattggtttgtagatctacaaaaacagatacccaaatggccagtaaataaacaaaaaggtactcaacttcatgttgtaaggtaagtataaactaaaattattactagatacatacatacctttcaaaatgactaaaatttatgagccatatacctaatattaacagatacatgaaataattttagctcttctaaactctgtgtattacttttcacatggctataaagatacagcctgagactgggtaacttatgaagaaaataggtttaattgactcacagttccacatggctgggaaggcctcaggaaacttagaatcatggtgaaggctaagggaaagcaaggcatgacttacaygacaggaagagagagcgagaggagaaagggaaactgccacttttaaaccatcagattttgtaagaactccctcactatcatgagaacagcatgggaatgacctctctcatgatccaatcatcttctgccaggtttctcccttgacagatgaagattacaatttgtgatgagacttggatgaggacacaga

SEQ ID NO: 518768 - DNA, 672 bp, Homo sapiens
acttgcacatcaatgaatagttggtttattacaaaagacaattttttccaataaatagtactcagtcaactggatattcttgtgagataaattactgttgactcctacctcatacaaaagaataacattggtttgtagatctacaaaaacagatacccaaatggccagtaaataaacaaaaaggtactcaacttcatgttgtaaggtaagtataaactaaaattattactagatacatacatacctttcaaaatgactaaaatttatgagccatatacctaatattaacagatacatgaaataattttagctcttctaaactctgtgtattacttttcacatggctataaagatacagcctgagactgggtaacttatgaagaaaataggtttaattgactcacagttccacatggctgggaaggcctcaggaaacttagaatcatggtgaaggctaagggaaagcaaggcatgacttacatgacagsaagagagagcgagaggagaaagggaaactgccacttttaaaccatcagattttgtaagaactccctcactatcatgagaacagcatgggaatgacctctctcatgatccaatcatcttctgccaggtttctcccttgacagatgaagattacaatttgtgatgagacttggatgaggacacaga

SEQ ID NO: 518769 - DNA, 458 bp, Homo sapiens
tttttttttagagacacagtcttgctgtcttgcccaggttggacttaaaactcttgggctcaagcagtcctcccgccttagcctcctgtgagsgtgggacaataggtgtatgccactgttcctggctttattatttcttccgttaatgtttgagagaattcaccagtgaagacatcttaacatgcaggtcgtgtttaattatgtgtgtgcattggtgcacgtgtgtgtgtgtgtatgtgtaaaggtttttttaacaatgacttcaaacttaaataatatagagccattcaagtttattccttcttgagtgagctttgatagtttgggtctttcaaggaatccattgcatttaggttatatttgttcatataaaaactaattattcactgattttaaatgtcagtagttctgtagtgatcattcttatattggtaattgtatcatctctctttttttct

SEQ ID NO: 518770 - DNA, 458 bp, Homo sapiens
tttttttttagagacacagtcttgctgtcttgcccaggttggacttaaaactcttgggctcaagcagtcctcccgccttagcctcctgtgagcstgggacaataggtgtatgccactgttcctggctttattatttcttccgttaatgtttgagagaattcaccagtgaagacatcttaacatgcaggtcgtgtttaattatgtgtgtgcattggtgcacgtgtgtgtgtgtgtatgtgtaaaggtttttttaacaatgacttcaaacttaaataatatagagccattcaagtttattccttcttgagtgagctttgatagtttgggtctttcaaggaatccattgcatttaggttatatttgttcatataaaaactaattattcactgattttaaatgtcagtagttctgtagtgatcattcttatattggtaattgtatcatctctctttttttct

SEQ ID NO: 518771 - DNA, 302 bp, Homo sapiens
cagcggcggaaacaggaagcagaagagaaggctcggctggaggcagaggagaggaggcaaaaagaagaggaagcagcaagactggctctggaagaagccacgaaacaagcccaggaacaagccaggtactggatatttgggcaacagttgccatagggggatggttcaagggcttcactgtccagtgctagtgctagctttgcactgyctttagacaagaaaagtccccccacccccagcatggcttggaagactgaaaggcatagagggattcttttgctgcaaatgtcaaggattccttt

SEQ ID NO: 518772 - DNA, 401 bp, Homo sapiens
gactgggcaacatgttattcaggtacaaaaagacttggaatataactcaaaaatgatcaaataatagttcatgcatcaagtgcaatgggaagctcttctggagggtgagagaaggttccagttaaggtgacttttgaagccaagtcctgaaagatgaggaagagttgtatgagaatggggtgggaagggggaggtggaggggaatgggctggggtgggatggagtgagctgcccagacagggaaaccagcactgtaaygacctgaacaatgaagatggcacattttttttttcaggaagtggtgaattaagtgtggcaggaatactttgtagcgacagtaatttgcttgtatggaattttgcctgagagacctcactacagtttctaatcttttgatgtta

SEQ ID NO: 518773 - DNA, 465 bp, Homo sapiens
atggcacattttttttttcaggaagtggtgaattaagtgtggcaggaatactttgtagcgacagtaatttgcttgtatggaattttgcctgagagacctcactacagtttctaatcttttgatgttatcatccatccctgtccttgtcaaatagtttggaataggtatgatgatcacaataacaccaagcataatakctcattaattctcacaaaatgacaggtaggtgccacagttatcctcattttatgaatgaagtgatgaagacttagggataacgaatgatttgcccaagctcacctggatattaagactgagtcaaatgttgggtctggtctgactttaatgtttgctttgttcatgagcaccacatattgcctctcctatgcagttaagcaggtagacaggtcaaagaaaagcctgtgtttgtctctgctcatgcacttttgactgaacatgtgtgtg

SEQ ID NO: 518774 - DNA, 465 bp, Homo sapiens
atggcacattttttttttcaggaagtggtgaattaagtgtggcaggaatactttgtagcgacagtaatttgcttgtatggaattttgcctgagagacctcactacagtttctaatcttttgatgttatcatccatccctgtccttgtcaaatagtttggaataggtatgatgatcacaataacaccaagcataatagctcattaattctcacaaaatgacaggtaggtgccacagttatcctcattttatgaatgaagtgatgaagacttagggataaygaatgatttgcccaagctcacctggatattaagactgagtcaaatgttgggtctggtctgactttaatgtttgctttgttcatgagcaccacatattgcctctcctatgcagttaagcaggtagacaggtcaaagaaaagcctgtgtttgtctctgctcatgcacttttgactgaacatgtgtgtg

SEQ ID NO: 518775 - DNA, 465 bp, Homo sapiens
atggcacattttttttttcaggaagtggtgaattaagtgtggcaggaatactttgtagcgacagtaatttgcttgtatggaattttgcctgagagacctcactacagtttctaatcttttgatgttatcatccatccctgtccttgtcaaatagtttggaataggtatgatgatcacaataacaccaagcataatagctcattaattctcacaaaatgacaggtaggtgccacagttatcctcattttatgaatgaagtgatgaagacttagggataacgaatgatttgcccaagctcacctggatattaagactgagtcaaatgttgggtctggtctgactttaatgtttgctttgttcatgagcaccacrtattgcctctcctatgcagttaagcaggtagacaggtcaaagaaaagcctgtgtttgtctctgctcatgcacttttgactgaacatgtgtgtg

SEQ ID NO: 518776 - DNA, 570 bp, Homo sapiens
gctgctatcattgcagacttgctattcagacacttaggaatttttcactaggaggcatgtaaagaaagaccatgagcatttgtaatgaatttagcattcattctttgactgcatggctatccccagagctgtaactttactaatgaattttttagaagctgataagctagcaactgagcctaaccagccactcaccttcattattcagtgcccttttattcttgtctatttctccaccaacttggctacactcacaaagtggtaaaaacttgcatttcttttctttcctttttagagacagagtyttgctctgttacccaggctgcagtacagtgacatgatcatgggtcactgtagcttcaaactcctgggctcaagcaatcctcccatgtcagtctcccaggtagctgggactacagacatgtgccaccatgcccagctaatttttttatttttttatcatagagacgggatcttgctaggttgctcagactgggctcaaacttctgacctcaagtgatcctcctgcctcagcctcccaaagagctgggattacaggcaggcatgact

SEQ ID NO: 518777 - DNA, 570 bp, Homo sapiens
gctgctatcattgcagacttgctattcagacacttaggaatttttcactaggaggcatgtaaagaaagaccatgagcatttgtaatgaatttagcattcattctttgactgcatggctatccccagagctgtaactttactaatgaattttttagaagctgataagctagcaactgagcctaaccagccactcaccttcattattcagtgcccttttattcttgtctatttctccaccaacttggctacactcacaaagtggtaaaaacttgcatttcttttctttcctttttagagacagagttttgctctgttacccaggctgcagtacagtgacatgatcatgggtcactgtagcttcaaactcctgggctcaagcaatcctcccatgtcagtctcccrggtagctgggactacagacatgtgccaccatgcccagctaatttttttatttttttatcatagagacgggatcttgctaggttgctcagactgggctcaaacttctgacctcaagtgatcctcctgcctcagcctcccaaagagctgggattacaggcaggcatgact

SEQ ID NO: 518778 - DNA, 570 bp, Homo sapiens
gctgctatcattgcagacttgctattcagacacttaggaatttttcactaggaggcatgtaaagaaagaccatgagcatttgtaatgaatttagcattcattctttgactgcatggctatccccagagctgtaactttactaatgaattttttagaagctgataagctagcaactgagcctaaccagccactcaccttcattattcagtgcccttttattcttgtctatttctccaccaacttggctacactcacaaagtggtaaaaacttgcatttcttttctttcctttttagagacagagttttgctctgttacccaggctgcagtacagtgacatgatcatgggtcactgtagcttcaaactcctgggctcaagcaatcctcccatgtcagtctcccaggtagctgggactacagacatgtgccaccatgcccagctaattttttwatttttttatcatagagacgggatcttgctaggttgctcagactgggctcaaacttctgacctcaagtgatcctcctgcctcagcctcccaaagagctgggattacaggcaggcatgact

SEQ ID NO: 518779 - DNA, 570 bp, Homo sapiens
gctgctatcattgcagacttgctattcagacacttaggaatttttcactaggaggcatgtaaagaaagaccatgagcatttgtaatgaatttagcattcattctttgactgcatggctatccccagagctgtaactttactaatgaattttttagaagctgataagctagcaactgagcctaaccagccactcaccttcattattcagtgcccttttattcttgtctatttctccaccaacttggctacactcacaaagtggtaaaaacttgcatttcttttctttcctttttagagacagagttttgctctgttacccaggctgcagtacagtgacatgatcatgggtcactgtagcttcaaactcctgggctcaagcaatcctcccatgtcagtctcccaggtagctgggactacagacatgtgccaccatgcccagctaatttttttwtttttttatcatagagacgggatcttgctaggttgctcagactgggctcaaacttctgacctcaagtgatcctcctgcctcagcctcccaaagagctgggattacaggcaggcatgact

SEQ ID NO: 518780 - DNA, 626 bp, Homo sapiens
caatttcttaattcgacctgtggccaggggccacttccccacggccttcatgtttagctcctcgagtttcttctgctcctctttttrtttctgcttgaaagccttatcttcctcgtccttctccttggcctgcttcttgggctgtttcagggccttcttcttgccacctttgctgccagacatggtgcctgccatccattccccacccatggcctttatgttttataaatatatagagatggggctttgtcatatatatatatacatataaaataactaaactcctagaataagtttattgtttaatatctggtttcctagaattatgaaaataatctatactttaagcaaattgatgtgacatcactaaattttacatacgatgataaaaacttcagaagtacagaaaaggatttactacttaaaactatgggccaacatttgaggaggctaaggcaggaggattgcttgagcccagaagttcaagatcacccttagcaacacagtgaaacctggtctcttcaaaaaaattttaaaattaggcttggtggcacacaattggtggcactcaggagactgaggtgggaggatcacatgagcccagtaggttttggctgcagtgagca

SEQ ID NO: 518781 - DNA, 626 bp, Homo sapiens
caatttcttaattcgacctgtggccaggggccacttccccacggccttcatgtttagctcctcgagtttcttctgctcctctttttgtttctgcttgaaagccttatcttcctcgtccttctccttggcctgcttcttgggctgtttcagggccttcttcttgccacctttgctgccagacatggtgcctgccatccattccccacccatggcctttatgttttataaatatatagagatggggctttgtcatatatatatatacatataaaataactaaactcctagaataagtttattgtttaatatctggtttcctagaattatgaaaataatctatactttaagcaaattgatgtgacatcactaaattttacatacgatgataaaaacttcagaagtacagaaaaggatttactacttaaaactatgggccaacatttgaggaggctaaggcaggargattgcttgagcccagaagttcaagatcacccttagcaacacagtgaaacctggtctcttcaaaaaaattttaaaattaggcttggtggcacacaattggtggcactcaggagactgaggtgggaggatcacatgagcccagtaggttttggctgcagtgagca

SEQ ID NO: 518782 - DNA, 348 bp, Homo sapiens
gagtggggtgtggaaatactacttctccccaaaacaggctgtgatgctggtggacgaacatgacagatgccctgctggcagtcctgctgaaaagcgatggcttggagaatcgcccaggctggggaagatgcccagggtcttagatggttacccctgcccraccctcaggcaggacaggaactggctgtctcctctctgagtcttgaaatctacactgcacacacctggcaaatgtgcacctgcagctcaggcacagccctgcaatccacactgcacacacctggtaaatgtgcacctgcagcccaggcacagccctgccatccacactgcacacacctggtaaatgtg

SEQ ID NO: 518783 - DNA, 348 bp, Homo sapiens
gagtggggtgtggaaatactacttctccccaaaacaggctgtgatgctggtggacgaacatgacagatgccctgctggcagtcctgctgaaaagcgatggcttggagaatcgcccaggctggggaagatgcccagggtcttagatggttacccctgcccaaccctcaggcaggacaggaactggctgtctcctctctgagtcttgaaatctacactgcacacacctggcaaatgtgcacctgcagctcaggcacagccctgcaatccacactgcacacacctggtaaatgtgyacctgcagcccaggcacagccctgccatccacactgcacacacctggtaaatgtg

SEQ ID NO: 518784 - DNA, 348 bp, Homo sapiens
gagtggggtgtggaaatactacttctccccaaaacaggctgtgatgctggtggacgaacatgacagatgccctgctggcagtcctgctgaaaagcgatggcttggagaatcgcccaggctggggaagatgcccagggtcttagatggttacccctgcccaaccctcaggcaggacaggaactggctgtctcctctctgagtcttgaaatctacactgcacacacctggcaaatgtgcacctgcagctcaggcacagccctgcaatccacactgcacacacctggtaaatgtgcacckgcagcccaggcacagccctgccatccacactgcacacacctggtaaatgtg

SEQ ID NO: 518785 - DNA, 470 bp, Homo sapiens
ttcaccttcagaaaggaaaccagaaaacccaaaagcccctctttctcttcttcctcaaatgctatcagcctgagtggggtgtggaaatactacttctccccaaaacaggctgtgatgctggtggacgaacatgacagatgccctgctggcagtcctgctgaaaagcgatggcttggagaatcgcccaggctggggaagatgcccagggtcttagatggttacccctgcccaaccctcaggcaggacaggaactggctgtctcctctctgagtcttgaaatctacactgcacacacctggcaaatgtgcacctgcagctcaggcacagccctgcaatccacactgcacacacctggtaaatgtgcacctgcagcccaggcacagccctgccatccacactgcacacacctggtaaatgtgtacyggcagcccaggcacagcctgccatccacactgcgcacacccagtaca

SEQ ID NO: 518786 - DNA, 675 bp, Homo sapiens
ggtgcaatttggggtgtgagaccaccagagctttgattccccctgccacacttgtattatttggagttgttttgttgttgttcatggtaattacctatgattagacaacaatctagttccatttgcaatagggaataatatgtctgtgacacagcctctagacctggggaacctctggccaccccgagggggcccggtcatcctgctgctggtcatgtccagctccgggtggctggctaggtggcctgggtgggaggtccactctttgtctttataaaaagaagggcttgggcsaggcatggtggctcatgcctgtaatcccagcactttgggaggccaaggaaggcggatcacctgaggtcgggagttcaagaccagccttaccaacatagcaaaaccccgtctttactaaaaaatacaaaaattagctgggcgtgtggtgggttcctgtaatccgagctactcgggaggctgaggcaggagaattgcttgaacctgggaggcagaggttgcagtgagccgagattgcaccaccgcactctagcctgggcaacagagtgagactccatctcataaataaacaaataaataaataagataacaaggtgtgctggagatggccacagtgctgtggcagccgcgccatcagggaaatggagtcagagagagctgcag

SEQ ID NO: 518787 - DNA, 675 bp, Homo sapiens
ggtgcaatttggggtgtgagaccaccagagctttgattccccctgccacacttgtattatttggagttgttttgttgttgttcatggtaattacctatgattagacaacaatctagttccatttgcaatagggaataatatgtctgtgacacagcctctagacctggggaacctctggccaccccgagggggcccggtcatcctgctgctggtcatgtccagctccgggtggctggctaggtggcctgggtgggaggtccactctttgtctttataaaaagaagggcttgggcgaggcatggtggctcatgcctgtaatcccagcactttgggaggccaaggaaggyggatcacctgaggtcgggagttcaagaccagccttaccaacatagcaaaaccccgtctttactaaaaaatacaaaaattagctgggcgtgtggtgggttcctgtaatccgagctactcgggaggctgaggcaggagaattgcttgaacctgggaggcagaggttgcagtgagccgagattgcaccaccgcactctagcctgggcaacagagtgagactccatctcataaataaacaaataaataaataagataacaaggtgtgctggagatggccacagtgctgtggcagccgcgccatcagggaaatggagtcagagagagctgcag

SEQ ID NO: 518788 - DNA, 537 bp, Homo sapiens
catgtccagctaatactttttatttttatttttgtagaggtggggtcttgctttgttgcccaggctggtcttgaactcatgggcctcaagtaatcatctcaccttggcctcccaaagcattaggattacaggcatgagtcaccatgcctggcctgatttgcttctgactagtgtcctgcatttattaaagaccctagatcactcctggtgttctaaaaataaccaagcccacctatctgccttctagacatgggctggagggcctgccacgagcatccttgggtattcccaatagccctarttaacccaggctgacttacaattcctccctctcttaaccaaaattatgttgaatttttgtgttccttgtcttttaactgaaaagctcttgtttatttgttatttaatttaattttatttttttgagacagactctcgctctgttgcccagggtggagtgcagtggcatgatcttggctgactgcaacctccgcctcctggattccagcgattctcctgcctctgcctctagaacag

SEQ ID NO: 518789 - DNA, 675 bp, Homo sapiens
ggtgcaatttggggtgtgagaccaccagagctttgattccccctgccacacttgtattatttggagttgttttgttgttgttcatggtaattacctatgattagacaacaatctagttccatttgcaatagggaataatatgtctgtgacacagcctctagacctggggaacctctggccaccccgagggggcccggtcatcctgctgctggtcatgtccagctccgggtggctggctaggtggcctgggtgggaggtccactctttgtctttataaaaagaagggcttgggcgaggcatggtggctcatgcctgtaatcccagcactttgggaggccaaggaaggcggatcacctgaggtcgggagttcaagaccagcctkaccaacatagcaaaaccccgtctttactaaaaaatacaaaaattagctgggcgtgtggtgggttcctgtaatccgagctactcgggaggctgaggcaggagaattgcttgaacctgggaggcagaggttgcagtgagccgagattgcaccaccgcactctagcctgggcaacagagtgagactccatctcataaataaacaaataaataaataagataacaaggtgtgctggagatggccacagtgctgtggcagccgcgccatcagggaaatggagtcagagagagctgcag

SEQ ID NO: 518790 - DNA, 675 bp, Homo sapiens
ggtgcaatttggggtgtgagaccaccagagctttgattccccctgccacacttgtattatttggagttgttttgttgttgttcatggtaattacctatgattagacaacaatctagttccatttgcaatagggaataatatgtctgtgacacagcctctagacctggggaacctctggccaccccgagggggcccggtcatcctgctgctggtcatgtccagctccgggtggctggctaggtggcctgggtgggaggtccactctttgtctttataaaaagaagggcttgggcgaggcatggtggctcatgcctgtaatcccagcactttgggaggccaaggaaggcggatcacctgaggtcgggagttcaagaccagccttaccaacatagcaaaaccccgtctttactaaaaaatacaaaaattagctgggcrtgtggtgggttcctgtaatccgagctactcgggaggctgaggcaggagaattgcttgaacctgggaggcagaggttgcagtgagccgagattgcaccaccgcactctagcctgggcaacagagtgagactccatctcataaataaacaaataaataaataagataacaaggtgtgctggagatggccacagtgctgtggcagccgcgccatcagggaaatggagtcagagagagctgcag

SEQ ID NO: 518791 - DNA, 463 bp, Homo sapiens
acaggttgggtgcagtggctcatgcctggaatctcagcactttgggtggccaaggtgggaggatcacttgaggtcaggagtttgagaacagtctgagcaacatagcaagatcccacctctaaaagagaggctgggctccctggtctggactgagcaatttctttggcgttcttagaaatgagctactttgcagccccatgcagcctttcttcagtgcatacattagggtgctgtgcggcccaggtgaggggtgtcaccatggctacatccgtggagggatcctaacaccatcatttgtgcgtccagtgtcaygacagccacttcactgtgcttgtttctagatgcttccaaacagcccttcatgtatggaatcatccctgtcgtgtaaataggaaatctggaactcccagaggttgtacattgcacctgatgccatttggtacaatccaaactctgggagcag

SEQ ID NO: 518792 - DNA, 437 bp, Homo sapiens
gtgctgttcctccagggtgcaccaggggccttcctcctcccctcactttctttcattccccactcagtagcttcagaggttgacaagaattcagctcgggcaggcaaatgttggtttataacatgaacactgaccatttctatcttacaattgagagaggggaagcaaagagaagttgccagacatctacagtaaatcaaaagaggatgttgggatctttccatgatgccaagttcttgctaccaatggctttttctcctgaagtaacttttagctaaatttacagattttcagaggaaagaacccctgtagccatgttttcccccaaagatcagrctccctttccacctcagaatggcttctcacaaatacagtagtttttcaacaacagatgggtctaagttgaaagagaccttgtcattggtccagtggcatga

SEQ ID NO: 518793 - DNA, 510 bp, Homo sapiens
ccagatgtcttgctgagggggatgggtacaacccaaagcatagggtttggggcattccaccaagtgtggctttagccgtggccaagaacaacatttgacccagcacagggcaccaagaacttgacttccccatgccccgcctgcctgtctgcctcttctcctcctcccctcgactcctgcctccctgcctgccgtctcctgctctactctgtctcgygtcaaggaaaattcctacaggagccagggagatgggcagacaccggcccggccacagccgtcccgacggccgtcctggacaggatgggggcccggggaggggcctgcagtctgtgccagccccatctgaagctggagaacggcttagatccagggggcctcagaggcaagatagcagtgccctggtgtacagtggggactgtgggggtccccgtgcccctgctggagaccatccccctttgaaccacattcagatgccaagcccagctctggaaatcaaatgtaggcaagaac

SEQ ID NO: 518794 - DNA, 638 bp, Homo sapiens
cagtggacttgggagatgagctgaatgatctgccaagtagttgcctccattcattcttacagaatgtaagactcacacagtgtttaaatgttaccgatcgggtaggtgacttcatgctggggcagccacaggaagagtttggaaagtagagtccaggactaagaatcttgggatgttagttcaagaagaggccccatgacaagtggcctggaacaatctacttcacagtagaggaaggaaggacccagagagctgaaatgactggcccagggcctcatggcctgcagcctgtttcaatgcatctgtccttaaccatcctgctgactggcaaagcaaagattataaagagcgagaagagagagcayttagaattccacctggaaaagccatgtttctttggaaatgggccacagatgacataaccctgccatctcccattacctggtacttggctaatctttgcatgaaacttgttttggtgaaacttgagcctggaaaagccaactaaagtatattattttatcagtattgaatgcctcctagacttgagataacatttaatccaaagagtaaggtgatatttcctgagatagcaatgaattcatgttttgaaattaaataagatgagtttattgcgt

SEQ ID NO: 518795 - DNA, 521 bp, Homo sapiens
acctgtggatcacaaaaggggttgcctaactcagtccgagggcaagtgggagtcaagaattcattcaagtcactgaatgactgcatgaaacttctagaactaaaccttttacaaagtaggaaaaagaaataaaatgtcctggggtccatgcctagtgattaaaatcaaactcaagataacaaaatatatagattctgcacttgatcagggcaaaatctggtcagccaaatacattcatgatactaatcataaccaggaattccaggggcatatctattccacccaagcataatgaaaaatgggacatataactcaaccagaatgttgttcttctctgctcacwcagcaggcatatacttttttcattcagttgcacgtcgtgaatttatttccacaatgaagaatgcttacaagtcacctcccagtccatgatggaaaaaaacaggcatgcagactcaactctcattttttccccaaatttggctgacaagccagaagcaaagttgatggtttcagataat

SEQ ID NO: 518796 - DNA, 636 bp, Homo sapiens
gccattagcccctgagttacagtaactgtctgaaggttaaggaggcataaaggaataaaaatgcatcttgcctttttgctctgtgaatgcatgctcccaaatggattctcggcagcaagtggaaagccatgggtacagatgccttccagcttaaatgataccattcaggtcaccctggccaggggagggagagrgcagtgggcccttcccgggacatccatgggtctcactgaacaggaaattgcttccagtttcccccaagcaagtccctccttcaatgaagccctcaggagtactccctggcatctcctccaactcttttgcacctgctgaggcccacaattaagaaaacaagcgaaacctgccacacctgttgacatccaggaccttcccaatttcagcttcctcagcttggcctttggtttatgcagttgtattttctcaggccaccaacaatgtccagacagatctttctctacctgctctaaaaatacaccacccagccctcaccctgggcggacatatgaaacaaaaaagcagcacaaaggtggcagttagctcttctagctttccacagatgaaagtcctgcttggagggctcgtggtctctgctctgcatagaaaataaattgaaac

SEQ ID NO: 518797 - DNA, 636 bp, Homo sapiens
gccattagcccctgagttacagtaactgtctgaaggttaaggaggcataaaggaataaaaatgcatcttgcctttttgctctgtgaatgcatgctcccaaatggattctcggcagcaagtggaaagccatgggtacagatgccttccagcttaaatgataccattcaggtcaccctggccaggggagggagagggcagtgggcccttcccrggacatccatgggtctcactgaacaggaaattgcttccagtttcccccaagcaagtccctccttcaatgaagccctcaggagtactccctggcatctcctccaactcttttgcacctgctgaggcccacaattaagaaaacaagcgaaacctgccacacctgttgacatccaggaccttcccaatttcagcttcctcagcttggcctttggtttatgcagttgtattttctcaggccaccaacaatgtccagacagatctttctctacctgctctaaaaatacaccacccagccctcaccctgggcggacatatgaaacaaaaaagcagcacaaaggtggcagttagctcttctagctttccacagatgaaagtcctgcttggagggctcgtggtctctgctctgcatagaaaataaattgaaac

SEQ ID NO: 518798 - DNA, 636 bp, Homo sapiens
gccattagcccctgagttacagtaactgtctgaaggttaaggaggcataaaggaataaaaatgcatcttgcctttttgctctgtgaatgcatgctcccaaatggattctcggcagcaagtggaaagccatgggtacagatgccttccagcttaaatgataccattcaggtcaccctggccaggggagggagagggcagtgggcccttcccgggacatccmtgggtctcactgaacaggaaattgcttccagtttcccccaagcaagtccctccttcaatgaagccctcaggagtactccctggcatctcctccaactcttttgcacctgctgaggcccacaattaagaaaacaagcgaaacctgccacacctgttgacatccaggaccttcccaatttcagcttcctcagcttggcctttggtttatgcagttgtattttctcaggccaccaacaatgtccagacagatctttctctacctgctctaaaaatacaccacccagccctcaccctgggcggacatatgaaacaaaaaagcagcacaaaggtggcagttagctcttctagctttccacagatgaaagtcctgcttggagggctcgtggtctctgctctgcatagaaaataaattgaaac

SEQ ID NO: 518799 - DNA, 555 bp, Homo sapiens
atgatacgcagggagagaaaaatgaaagtagagattttgagtgtctgaagaaaaaaaaaaaggataatggggaaactgaataatcaatttgatattatataacaaagtcaacttgagaagtcagattgcaggaactgtttttctcaattttctrtactgcaaaaatcatactatatggtttaatgagccaggtcttccttgtgcctagggaacaacctgtaggaaagactaagagctgcttagtaagcctgctgtgcagatatgtgaaatgttaggaatacaaattaaaatgttacacaaaaggcactggtgagtcagtgaagggatttaaaagaagaagtgaataaagtgtgattattttgtttgagatttaagctgattgaagtcagggataattaataatgtctcagaaaagatttagaattatcatggactctatcttttacagacgttaagaaaatgacagtattcatattcagatcaaccacatattaaactcctactgtatgtcagttcaactattgcttttctatattttacctttaatcttctcac

SEQ ID NO: 518800 - DNA, 488 bp, Homo sapiens
ctggccatttggtgtatactcatgtattttttcagtcagatgacagaaatgttttaaggggcttctccaatcacaaccaaaatagttttttctaaatatccgataccagcaacaataacttttcatggttttaagtttctattatatttcagaacatgaagaaggaagggaagaagggaggcctgttaaagagttgcttgttgtgacctaagtaaaacacagggatggcatacattaaacrggtacagtgagattggagggaaatgaaagaatttaaatatataaggagctataaattatgtgacttggtgctatatttgtgtctttataaaaagagacactagagatcatgcttcgtatctctatccccaccccgtggaaagatgacagtgtggatgtggatgaccatgtggacatataaggagatgacagccatctctaaaccaggagaaggtccttcactagatgccatatctgctgccaacttg

SEQ ID NO: 518801 - DNA, 557 bp, Homo sapiens
ctgtctaatcaatctgttcaaaactgaacttaatatattgttttccaaacggctccttctccrtattcatctctccttcactagaaatattaaagataaacctgacctttcctcttttgcctcttataatattcagcaactttataaattcttttgaattatatttattatacctattaaatatgttttactttctcttttattagctcacatccttgccaactctagtgtgatctatggaccataccataccactgaaaccactgtttcagtagctgctttattgggctctttctaaccacctggactgtactcagtgtattaaatactttatatcaagaacttgccaagtcatttacatacttccaatttctttcccctccagatgatacctgaaacatagagttattttagctaggtacaagtgaaatacacttgtatgcctaaacctgagaatcataaaagcatttatgtgattttaaggaggttgcactaaatcagaataccagcaatgactatatgacactaagtaaaacattcttcttcttaatttgtaa

SEQ ID NO: 518802 - DNA, 414 bp, Homo sapiens
tgactacttgttgcatggtccaggtgctaaatatgttttttacacttttaaattgtccagttggaggagaacaacacacacaggggctactggagggtagagggtgagaggtgagagaggataaagaaaaataactaatgggtactaggcttaataccttggtggtggaacaatctgtacaaaaaaaaccayggcacaagtttacctgtgtaacaaacctgcacatgtacccctgaacttaaaataaaagttttttaaaaaaatgatgtagaccaacacatacaatgctataaactaaaataagaagaaaaagaactttcaaagattatatgacatgaaaattatatcaaattcaactttcagcatccataaagatgttttattggaacacagccatgaccacccattccttca

SEQ ID NO: 518803 - DNA, 643 bp, Homo sapiens
gttttcaaaccatatctgcacagtcctaaactttcatgggagtttgtcagtagttgctagcaacagcagggaaaatatttttattttattttatttttatttttagacagcatctcgctctgttgcccaggctggagtgcagtggcccaataaaagctcactgcagcctcagcctcccaggctcaagcgatcctcccaccttagccccacaagtagctgggactataggcacacaccaccacacccagttacttttttaatgttctgtatagatggaagtctcactatattttccagggtcttgaactcctgggctcaagcaatcctccaacaytggcctcccaaagtgctgggattacaggagtgagccaccccaccaggctacgaaacattcttttgaggctcaccaagtttctctattctacatttacattttttatttatgagttctctgtggaaactttcataaataacaacagtgtgttactatcacatacaaaacaaaacgaagttcgcaacccatttcttcaaaccaaaggaataatttctgatagaaggcattttatctcctgggcccatagaagaattatttctgtttaagatatatttatttatttgtttagccattgaatcctagcattaa

SEQ ID NO: 518804 - DNA, 460 bp, Homo sapiens
taactttgctatactgcagagttggaaaatctgtcaatatcttcctgcaagtgagctgttttcatgtcttaaacatkaattttgtgtggttaaaatcagttcatcacaccagaggcttctgtattgacctcttgtgaaaagtggaataatttttcttgaaggaacaatgctgcatattataatacaagtttcagaggcattatttgaattatcataattagttttgagaaccacatgaggcactgtgatcatttttgcttcaaccattaaacataattctgaaaattccagaggtaaagagaagtctatattatttacccacattttcacccttgcttgtttttttcttcttttctggtgttccaaatttccttcttttgttatttcccaatagtatgggtaatgtgtcctttaaaattttccctaaatattgtctttatcaaagaacactacataatag

SEQ ID NO: 518805 - DNA, 608 bp, Homo sapiens
ttacttactacattcttctctttggactacaagcgaagtaaaacatccgtctctggtaatgggttgggaacatgtgaaytggcaaatgtgccttttattcttaggagctctggtcctgagtccaataacactcaagtgattagtgaaatagatctataaagtgtggttaatcatacacgttagatatgtaacttttcaattcaagttgtcatacaacccagcaaaagcagtccacttaaatgccataagatgtaagtatcgttttttcttctctaaatttctacctggacatgacctgatttcaaaaatgtgcccattcaagagtgagtaggactagtttatatcttcacttggtatcaatttactgcaagatagtaaaaaaatctgttacttcctacttgggaatataaataaataatttttctggaacaataaatttaagtaagatcttcattatttttgcaaacaaaatgctaaatacatttttctggaacaataaatttaagtaagatcttcattatttttgcaaacaaaatgctaaatacatttttctggaaattttagagtttctcccagttagataaaatgcaaacacattggaaaatgta

SEQ ID NO: 518806 - DNA, 608 bp, Homo sapiens
ttacttactacattcttctctttggactacaagcgaagtaaaacatccgtctctggtaatgggttgggaacatgtgaattggcaaatgtgccttttattcttaggagctctggtcctgagtccaataacactcaagtgattagtgaaatagatctataaagtgtggttaatcatacacgttagatatrtaacttttcaattcaagttgtcatacaacccagcaaaagcagtccacttaaatgccataagatgtaagtatcgttttttcttctctaaatttctacctggacatgacctgatttcaaaaatgtgcccattcaagagtgagtaggactagtttatatcttcacttggtatcaatttactgcaagatagtaaaaaaatctgttacttcctacttgggaatataaataaataatttttctggaacaataaatttaagtaagatcttcattatttttgcaaacaaaatgctaaatacatttttctggaacaataaatttaagtaagatcttcattatttttgcaaacaaaatgctaaatacatttttctggaaattttagagtttctcccagttagataaaatgcaaacacattggaaaatgta

SEQ ID NO: 518807 - DNA, 608 bp, Homo sapiens
ttacttactacattcttctctttggactacaagcgaagtaaaacatccgtctctggtaatgggttgggaacatgtgaattggcaaatgtgccttttattcttaggagctctggtcctgagtccaataacactcaagtgattagtgaaatagatctataaagtgtggttaatcatacacgttagatatgtaacttttcaattcaagttgtcatacaacccagcaaaagcagtccacttaaatgccataagatgtaagtatcgttttttcttcyctaaatttctacctggacatgacctgatttcaaaaatgtgcccattcaagagtgagtaggactagtttatatcttcacttggtatcaatttactgcaagatagtaaaaaaatctgttacttcctacttgggaatataaataaataatttttctggaacaataaatttaagtaagatcttcattatttttgcaaacaaaatgctaaatacatttttctggaacaataaatttaagtaagatcttcattatttttgcaaacaaaatgctaaatacatttttctggaaattttagagtttctcccagttagataaaatgcaaacacattggaaaatgta

SEQ ID NO: 518808 - DNA, 608 bp, Homo sapiens
ttacttactacattcttctctttggactacaagcgaagtaaaacatccgtctctggtaatgggttgggaacatgtgaattggcaaatgtgccttttattcttaggagctctggtcctgagtccaataacactcaagtgattagtgaaatagatctataaagtgtggttaatcatacacgttagatatgtaacttttcaattcaagttgtcatacaacccagcaaaagcagtccacttaaatgccataagatgtaagtatcgttttttcttctctaaatttctacctggacatgacctgatttcaaaaatgtgcccattcaagagtgagtaggactagtttayatcttcacttggtatcaatttactgcaagatagtaaaaaaatctgttacttcctacttgggaatataaataaataatttttctggaacaataaatttaagtaagatcttcattatttttgcaaacaaaatgctaaatacatttttctggaacaataaatttaagtaagatcttcattatttttgcaaacaaaatgctaaatacatttttctggaaattttagagtttctcccagttagataaaatgcaaacacattggaaaatgta

SEQ ID NO: 518809 - DNA, 454 bp, Homo sapiens
atggcatcttcatgttttgttttctgtccattagacttatattatgattttgtaagcagatacataaattatgcttctacaaatactgatgatatatgactttcagcttctaagagtttagttccagaatcagtatgctcttaacctttttggaagccatgtgttgacctctttatattttaaaattaactgggcatttttttttttttgagacrgagtttaattcttgttgcccaggctggagtgcaatggcgcgatctaagctcactgcagcctccgcctcccgggttcaagcgattctcctgcctcagcctcccgagtagctgggattacaggcatgcgccaccacgcctggctataactgggcatttttgaaaggaatactataattctttgcctttacaagtgctgagttcatcctatggatttatctgtgaaactagttaaagttata

SEQ ID NO: 518810 - DNA, 506 bp, Homo sapiens
acagtcacctctttattggaaatatactggggagatccagtatagtatatactggggagatccagttccagtgtaaagagggctcatgacaaaaacaaaagtggtaagggtggggctgtagtgggaggactttagttggttttgaagaaagtggtaactagtgcttcttttcccgttcagctccctcgtgaaagatgcttctgttcctctgattgatgttacaaacctccctactcctcgaaaattccttgatacctctcactattctactgctggragctcaagtggtaagtatttaattcttcagccactaagctttttagtatgtcttagttcctaggtagatatctggaggagctttttgggggctgagctaggttgggctgggctaggtgggcctgagctaggtgtgttggaacctgtgatgagccctttgcaaccttcagagcaaataagatgtacagtgatttattgggctgttgcattatcagggttgaaaagtggca

SEQ ID NO: 518811 - DNA, 538 bp, Homo sapiens
tttagtagagacagggtttcaccatgttggccaggctggtctcaaactcctgacctyaggtgattggcctgcctcggcctcccaaagtgttgggattacagacgtgagccaccgtccccggcccacttgtattttcttcaccagcattatccactattaatacttttgcttccagtttaagaaaaaaaaaatcactctattgttttaaaaatagtactctcatgataaataattcaaacagtgaaaatgcagaaaaccgtgaagatgaaagtaagaaaaattatttcagattttatcctcctaaagttattatcattgatattagatgaacctaatcccagacccctcccttttctatgtgaatgtatgtgtgtatatgaaatgttgatggccagaaataattttttattaaatatgggatcttactctatatactaattttatttgtcctcctttttgaggtatacatgtatatgctagagtgcacaaatcttaagtatatggcttgatgaatttttacctgtgtaaccactgtcca

SEQ ID NO: 518812 - DNA, 452 bp, Homo sapiens
gctgaaaacaaaacaaaacaaaggaaacatagaaataagctctctgtgactgaattatgtgattttcagaggagaaacatttttaaattattttatggatattagaaaactgctggtctaatttcacaccacagaactctaaacaacagtccacacatatattttagacgtagtctcgctctgtcaccaggctggagtccagtggcgcaatctcagctcactgcaatctccgcctcccaggttcaagtgattatcctgccccagcctcccaagtagctgagactacaggcatgcaccaccacgcccagctagtttttgtatttttagtagagacagggtttcaacatgttggccaggatggtctcgatctcttgacctcatgatctgcccgcctcggcctcccaaagtgctgggattacaggcrtgagccaccacgcccagcccaacagtcc

SEQ ID NO: 518813 - DNA, 559 bp, Homo sapiens
ttcaaatccatgtcttatttcaaaatttatgctcttatccagttttgttaaattttcctctaagttgcagatttatatccagaattggtggcagcagaaatgcagatgtatctgatatctgggataagactgagtacatgaagttgttggataaaattggaaagactttatgggaaayacaaacagctttgtattcctaaattattcttattttctagaataattcaaattatctaaactactataaaagtcaatgaaataaggctactctgtaatagtagtttgggaattccctgtgaaaaccagcttctcttctgattttgtgtaacttatgcagtagggacattcaactcaattttccccgaactgttcgttgtctagggccaattcaaacaaaggacacattctcaatggctttctggaatgctaagcgtgatgatgggccaccttactgccaacctgtgctttttggatgtatccaacttatgtactgattatatgaaatctggactatctgccttgcctgctgtcttcctaatagacagtgctacaaagaata

SEQ ID NO: 518814 - DNA, 540 bp, Homo sapiens
gatgaagctggggctccagccaagcagtttgacctctgagttgacacataaccgtggactgtctcctggaaagaaccagtgcttccaaagaaaacaaaaacaaaayaaaacaataaaaacaagtatgggtctggttggaattcgaactctacctcttagttcttgtgaccttgggcaagttacttaatattccccagcctcagtttccccaactcttaagctggcgatcaataacacctacctcaaacacaatttttgtggtcaatgcttctgcttgtgcaagatttaaatgaaaaaaaaaatcttgaaagctaggacagtgcctgttacacacataggctcttaattaattatcacgggattcctggcgttgttgacatttatctctgatttttgtctttacaggaatcataaatccggttctgattatcgccacacacacagatccttctcaaagattcagagtcttattcttttatctcttccctaaaatacgatctaatttacaaaactttgacttacaactccgccagaagccca

SEQ ID NO: 518815 - DNA, 501 bp, Homo sapiens
ccggcccacttttcttacttttagatttttttgaataggtgtttcttcattgactgtatgcctttgggactatttccagactttaaatggttgttcttaaaaataatttttaccagttccattagggagcagatctgtagagatcttcacactgtcatggctggaagcggaacttcttgatgaaatctctatatgagaaaatgcacctgaaactctaaagtacaaatcagagatagtattcttattatcccagacagaaatcttaaaaagtgatccaacgatcatgtatagactgccatacctgtggcttactaagtcagggctgtcctgtccttgctttctagatttactcctccagtgccatggaaaacatctaaaactaaaagtggaatttggaatgaagtttaaattgtttttttgacctaccgtgaagcattcatcctgccctatgatacaacycagacctaagtcaagtcttgtgtcagattccagctggacagg

SEQ ID NO: 518816 - DNA, 561 bp, Homo sapiens
aggggatggtgtcatcagcagacagccccgtgtctcctcctggatgaaatttccctgcacccactcaagtgatcatctggcagtgaaatgctcctgcttaataaaatgctaatcaaaaatcattatttgcataattgaggtccccaagtaggtttactgaaggaatgatgcagatcattacctgtctacctagaggcctctggcaattctccacggtcacctgacttagcagaggttcttttgattgaaactcagacaccactctttgcttccatcttttctctaaatttccttccatgaactcgaggttctgtccaagtcagactacttggtgttgcactattccctgaatgcttcccaggtccatacctctgcaccttctaccttmaactctctctccctcctcactacctgtggcctcagagcccatccagccacgcagcatgcactctgctgctctgtgagcctttccccattacctgaccacaccagagctcgcctttcccaaaccatgattgccttgtatgtgccacttccaacctgtgaccaagttctaccctc

SEQ ID NO: 518817 - DNA, 620 bp, Homo sapiens
ttaggggcaaggatggaagcagggaaaccagttggaaggctactgcagtagtccaggtgggagagaaggtggctcagtgcattaattcattgactcattgaatgaaagaatgaaagaatcattcctctttgattggccattgaagttgtctccagcattgtgttaatgcaaataatgctataagcaatatctttttgtggcatgatttttgttttttattgtggatactttgttttgggatttcctcctcgtgatagtttctcaaaggtggagctgctttatccaaggggagacacatttcaatgttcttaaaacacacttttataaagtataggacagcattaacactttataaaaatgtgctaaattgaaaagtcacaaaagaccttttgctctttcttccatttgagcatcaagttcttcatctataaagtggggatcataacactcgctcagcttatctcacaggctcgtagcaggatcagagaggctagagactgggtacccaggcttgcctcctgggacttcaccagccrgaagtgggacaagagtgcagggcaagagctcaacctcaacaggctttcacagcccgctggctggaggggagccaggagtgacca

SEQ ID NO: 518818 - DNA, 607 bp, Homo sapiens
tgaggttcccaaggaaggagagattctatgtggctggaagtatcagggaagacctcacaaagattccaggctttatggagtggagggcttggtcaggctatgataattaattcattacctttccatccaaacctgctctactaccctcctgttacccaggcaacaaatacgggagtcagcttcaaatctttcctctccctcaactcctgtattagttagggtaggctaagctggtgtgacaaatagatccaaacacgggtggagttaacacaacagaaatctatttcatgcttgaagacagtactgctagggtattcagtcataaaggaggctctctgtaatgcagtcatttggaaacacgtgctccttcaatattaagctcccacatagcccagggcagtatttcccaaactgatccacagaccagcagtatcagtatctcttggaaacttattagaaatgctcttatctggtcctgctgcagacccaatgaatcagaaactctaggagcagagcccaggaatcttgytcagcaaacttccaggtgattttgatgctcactaggttaaggaccactgcctgagggctttgttaagtctgcaaccag

SEQ ID NO: 518819 - DNA, 594 bp, Homo sapiens
ttttgagaaagtcttcggggtaacagtatctctctcattgagccgtctacataaaacagttgaccttcaagagggcattggacagaaagaactggtggactttgatgactgatgggatgtagagaggaggaggccaggtttcgaggtggatggataccagtggattactgacaggctgagtcagcaaggggattggtgggagaaaaagctggggttcagggtaaggcggctgagaggtggtataayatctagttagaggtatccagaaagcaagtgaaaactcaggattggccttcaggagatgtattatccattagcatgttcacgtattcattcaatctctatacattattaagcacctgccgtggggtgctactactgagtggccgcaggtgcgtgctgcagacatggctaatctgtcatggctgatagttatcaaccagtcaacacatactctctgagtattcttttttctgtgtttgttttatactgtcttggaaaacccttgctcagtaaatatttgctgaccaagggacggatttattcactcctcccaaatccaggccacttcctgcaactttaacccaagccctg

SEQ ID NO: 518820 - DNA, 599 bp, Homo sapiens
tctcagcttccagcacctggaggtgcataaagtggatccccaagactccccaggaccactttccccgtccctggcctggagtttacttggcatcagccacccttgccgttttcctggcctggaaccccgcgaagcccacccsctgagctacagatatctgaaatgaatcactttagccccatgctctccccccctccccctccctctgggcactcccgcgtgggtgggagaaggggagctcgggggtgacacaatctctccacagggccccccatacacgtgcttcgggggcaccttccactccagcaggccgcccacccccttcctctactcttctgggagctctccgacagggcctagggcgcagcctctgccccagcccttcctgcgtcccgggaggcaggggatggggacccacctcccagcccttctcccatcgtcccgccccacatactcgaggcctggcccaggcgcagacggaggcggcaggagagggcgcggtccctgaggtgcaccgcggcgcggtactcgccggcgtccgcgcgccgggctgggcgcagccatagcgagaagtccccgcgctgccggccgcgctcatc

SEQ ID NO: 518821 - DNA, 642 bp, Homo sapiens
ctgctccttgtgttggttggcacggctcacctgctcctcaatgcctgacagcacgacctcacagcccacacacctgcaggagtcaggggagagaagtgtcagcagacaagggctgcgatcacagactcacagaaaactgactcaaaaagaaccctagaggcagggcgcagtagctcacccccataatccctgcattttgggaggccaagatgggcgaattgcttaagctcaggagttcaagaccagcctgagcgatatggcaaaaatccgtctctacaaaaaatacaaaaactagctggatgtggtgacacgagcctgtagtcccgtgctactcaagagactgaggtggagggtggcttgagccctggaagttggaggctgcagtgagtcaagatggtgccactgcactccaaactgagcaasagagccagaacacagcttctggcattttgagtctgagttgggaaccctcaccagggcacctagaaaccacctgtgataacactcctagcagtgggatggacactcggtgtggtcagagagggataaggaagcgcctggagtgatgagcaagatgggagtaggaactgaaaacaaaatagggtaggagatgccaaagagaaaaagaggtgacttaatgaa

SEQ ID NO: 518822 - DNA, 550 bp, Homo sapiens
ccaaagagaaaaagaggtgacttaatgaatacagaaaccctgaagttagatggggacacaaagaaaataaaaaagaggaaaagggtcatggcctgtggataatggtagttacagatcaatcgacrgagtctagcctaagacaggcgaccgaccttgctggttaggatccccttaagtataccactcccttttcctcccccaactactatatcaaggacactgacttctgccgcctcccagggcctcccctactcctgcattccccagaagcctttggagggatgaactcatttcccttcatcctcttgggttccacctctgcggaccagcccagctcctgccctctctcaccctgaagcgcctttctctttctcagggtgagaaggggacagtgccaggatacggttctcaccattcctgcagggttcgggcaatggcactgaggtcctggcgctggatgtcccgcccgatgctgtagtcaacctcgagccgctggttgcgctggtccagggagccacgaagcacgtcagcatacacagcctcaatcaca

SEQ ID NO: 518823 - DNA, 619 bp, Homo sapiens
tacccttctgaagcttgcattccagttgaagagataagatgaatggatagaaatctgaattatttatttatttagcaagtatttcttgcgaggcaattactgcatagctctgtgggatacctgagactgggtctataatcttgttgaaagatattcttaggtagcaaccttctgcaaggattgattgattaagtgccagaatgaagctgagcacagtggctcacgcctataatcccagcactttgggaggccaaggcaggtggatcacctgaggtcaggagttcgagaccagcctggccaatgtggcgaaaccctgtttctactaaaaatacaaaaattagcctggtgtggtggtgcacgcctgtaatcccacctgcttgggaggctgaggcaggagaattgcctgaacctgggaggcggaggttgcagtgagccaagatcgcgccactgcactccagcctgggtaacagagggagactctgtctcaaaaaaaaaaaaaaaaaaaaagtgccagaatgagtgatccrtgataggaggagaggaaatctgggtggactgggctgggtgatgcaagacagtgtcctggtcaggtgtgtctgaagcagagaccataagttta

SEQ ID NO: 518824 - DNA, 394 bp, Homo sapiens
ggttgagagagctgtgagattgagtccaaaatggtgccactgggctaggaaatagatggtttattgagctttcttgtttgtccctggtgtggtgttagatactatgccacaggagacattagtatgggtggaagaccaaggaaggcgattgggtgttgagaacaacatatgggaaaaagggatacgggtctgcaaagtcaggaggaatcagggaggcactgcagaaaaggagtacccacggagacgggaygcatgatggatgtgccttaatgttgcctggaagatcatctctccttatttttaacacccatggaggtaacacactcaatcatgatccggccaggtgcgatgactcatgcccgtactcccagcactttgggaggccgaggtgggc

SEQ ID NO: 518825 - DNA, 569 bp, Homo sapiens
cggccccggcaccatgtcggagaaaagcgtggaggcagcggccgagttgagcgccaaggtacgggcgggggcggcggcggcccggacctcgcgcagccctggggcccggcgcggtccttcgccccaggccgcccccgacggccccgcgcggcccttgcgcccgggtcctggcggaccccactgcgccctcccaccgctccccggcccggagctcctttcccggctccgcgcggctagcgccagcgccctctagctgccctgcgcgcaccacggcgcccggcctcgccgctccggtcgcgccgkcccccgcagccgtccccacccctcttcggccccacctcgctgaccggatcccgtccggcttcccgtccgaacgccccgagtctcactttgccgcgccccctccctgcgccccgctgccgcgtctttgcttgcaacctgacctcacctttcctcgctaagcggtttgagatcctcaagtgtaaacaggactctccctggaggctgctcctccgggcccctccccgcggcccgaccgtcgctcgcttctctccccggacggcggccgc

SEQ ID NO: 518826 - DNA, 569 bp, Homo sapiens
cggccccggcaccatgtcggagaaaagcgtggaggcagcggccgagttgagcgccaaggtacgggcgggggcggcggcggcccggacctcgcgcagccctggggcccggcgcggtccttcgccccaggccgcccccgacggccccgcgcggcccttgcgcccgggtcctggcggaccccactgcgccctcccaccgctccccggcccggagctcctttcccggctccgcgcggctagcgccagcgccctctagctgccctgcgcgcaccacggcgcccggcctcgccgctccggtcgcgccgtcccccgcagccgtccccacccctcttcggccccacctcgctgaccggatcccgtccggcttcccgtccgaacgccccgagtctcactttgccgcgccccctccctgcgccccgctgccgcgtctttscttgcaacctgacctcacctttcctcgctaagcggtttgagatcctcaagtgtaaacaggactctccctggaggctgctcctccgggcccctccccgcggcccgaccgtcgctcgcttctctccccggacggcggccgc

SEQ ID NO: 518827 - DNA, 266 bp, Homo sapiens
gtctggaagtattttaggggtcctgaggatggagtggggkatgagggaccaccagagaaccctgaaggagcaaggcagggagagagtgatcagggagaaatactagcatggaatggtcatttgtatcccatgtgcatgtcagactctctgcactcactcaggtctcagttctgaggtatgactccatagtcaccagtgcctagaaaggttcattttacaaaatggggaactgatgttgcgagagaggaagtctttcccacagtgca

SEQ ID NO: 518828 - DNA, 495 bp, Homo sapiens
gcaggttgggctggggtgtgggcagaatagacgccagctcatccgaactggcctagagtcaaggtgctgaactcctggctccatcgaagcacaacgtcctcacttttgccagggctcagcgcactgtaagtctcattctgcagacatctcatgcgggacacctacacasagattcagtgcagacggtctgtatcacagagccaggtgccaggagtggggaggaggggaggtgtcagaagcccaaaagaacgagaggtgggcaggcatgggcacagggcagtagagggaaggaggaaactcaaatgtgggtttttaaagccagaggagacatcaagcagcccaacccctttcatgcagaaacaggcggctgaggctcagagggggaagtgcctcatcccaggctacttggtgagtaagaagaggagacagaccgagacctcaacgtccaagtcctggcccagccaagggttcttcctgtggtgctcttaggaccct

SEQ ID NO: 518829 - DNA, 241 bp, Homo sapiens
aagtaactggcagagttgggaccagaacctctagctcctgttttctcagccctctgggtccccactcctttgcctgctctattggtggagggtggggtggggtgcaatggtctcttggagagaggcaggagrttcagtgaggacgggttctcagaagccaggggcccaagcccccttccacaaactagcgctactcacagcaagtaactggaaggaatggggtgagggtagggatggggct

SEQ ID NO: 518830 - DNA, 637 bp, Homo sapiens
aaaaagcagcttgtggcaaagttggcaaaacatatgaagacatttattcttcagtagttcttcaatggagtggaaaaccaaagcctgtattttgaagaaaggggtatgaatattatcttggaacaagattccctgagatgtgaggcagcacatcaccygaagatgatctgttgaggctcgatgagcatacaagtctaccaacgacttactctatgaccatattagcaatggtttttggcttttgaaaaaaacatgttacctttagacagtcacccatggggtcaattcaggtacaaacttttaagaaagaggccctcttttaagcacagaagtctccttaacataaactcacccccaaagaaaagtgaggaacagaaggaagaagagggaggaacaggggccacctcacgatggcaggtcaaaaaacttgcaagagatttggagagttaggcatccctttccagatagagtggtcagtcgcagcttcacaaagacggttctcccactttaaaggagcaaagccaccttcttctgagaaggtcaccgttttctgctgggaatgaaatttcaggagggactttcctgaaatggtaaaggagaaaggagcagcccagtctggacagtcagaacaactgaa

SEQ ID NO: 518831 - DNA, 519 bp, Homo sapiens
ccgtatttgacggtctcaacttcaaagacagtaccaggtgttagggttgggtagggggatgcctttgcgcagacgagggttgggggcaggtgaacagggtacagtcatggaaaagtccttcaatgagaaatttagacatcttattccgatctaacccaattctgtctctagttattactattataatttattgggtgtttaccgtttatcagccactttacctacatactctgtaatccttttgacatgcttgtgaggttggtattttggtctccacattaataaatggtcccacctgtatgaggraccaactgtggctgacagaagggctcacacactttcttctaccctccctgcctcccgtgccatattgagcacccctctgggccttggattctttgttgcaaaataaggggatacgatgagatcatttgtcaagtcttttccagaacagtgcaaggtgccttcatcctcaagcacagaagctctgcagaagacaattttcagagatgagtctct

SEQ ID NO: 518832 - DNA, 638 bp, Homo sapiens
ctgccgcattaaaactgcataagagtcttcctcaggaggcctaataatagcacatttcatctgtgagacactttataaatattaactgattaagctgccctctctcctcacaacctctgggcttctgcycagtggacttcattctcttctgccctcaaattactctgggagaaaaaaacgctgagacctgaggaatcttttctgtgtattctaggccaagacatcattaatggcaatggccttgcaacaacctccacctagttaatggcatggagtggaaagggatttaaatatatgttttattttattatttttcttaatttttaagttccagggtacatgtgcaggatgtgcaggtttgttaaataggtaaatgtgtgtcatggtggtttgctgcacctatcaacccatcacctaggtattaagcccagcatgcattagctatttttcctaatgctctccctccctcaatcctaccccctgacaggccccagtgtgtgttgttcccctccctgtgttcatgtgttctcattgtttagctcccacttataagtgagaatatgcggtgtttggctttctgttcctacgttagacattaataggggccaacaaacatatgtgtattttaaaagagactg

SEQ ID NO: 518833 - DNA, 638 bp, Homo sapiens
ctgccgcattaaaactgcataagagtcttcctcaggaggcctaataatagcacatttcatctgtgagacactttataaatattaactgattaagctgccctctctcctcacaacctctgggcttctgctyagtggacttcattctcttctgccctcaaattactctgggagaaaaaaacgctgagacctgaggaatcttttctgtgtattctaggccaagacatcattaatggcaatggccttgcaacaacctccacctagttaatggcatggagtggaaagggatttaaatatatgttttattttattatttttcttaatttttaagttccagggtacatgtgcaggatgtgcaggtttgttaaataggtaaatgtgtgtcatggtggtttgctgcacctatcaacccatcacctaggtattaagcccagcatgcattagctatttttcctaatgctctccctccctcaatcctaccccctgacaggccccagtgtgtgttgttcccctccctgtgttcatgtgttctcattgtttagctcccacttataagtgagaatatgcggtgtttggctttctgttcctacgttagacattaataggggccaacaaacatatgtgtattttaaaagagactg

SEQ ID NO: 518834 - DNA, 638 bp, Homo sapiens
ctgccgcattaaaactgcataagagtcttcctcaggaggcctaataatagcacatttcatctgtgagacactttataaatattaactgattaagctgccctctctcctcacaacctctgggcttctgctcagtggacttcattctcttctgccctcaaattactctgggagaaaaaaacgctgagacctgaggaatcttttctgtgtattctaggccaagacatcattaatggcaatggccttgcaacaacctccacctagttaatggcatggagtggaaagggatttaaatatatgttttattttattatttttcttaatttttaagttccagggtacatgtgcaggatgtgcaggtttgttaaataggtaaatgtgtgtcatggtggtttgctgcacctatcaacccatcacctaggtattaagcccagcatgcattagctatttttcctaatgctctccctccctcaatcctaccccctgacaggccccagtgtgtgttgttcccctccctgtgttcatgtgttctcattgtttagctcccacttataagtgagaatatgyggtgtttggctttctgttcctacgttagacattaataggggccaacaaacatatgtgtattttaaaagagactg

SEQ ID NO: 518835 - DNA, 638 bp, Homo sapiens
ctgccgcattaaaactgcataagagtcttcctcaggaggcctaataatagcacatttcatctgtgagacactttataaatattaactgattaagctgccctctctcctcacaacctctgggcttctgctcagtggacttcattctcttctgccctcaaattactctgggagaaaaaaacgctgagacctgaggaatcttttctgtgtattctaggccaagacatcattaatggcaatggccttgcaacaacctccacctagttaatggcatggagtggaaagggatttaaatatatgttttattttattatttttcttaatttttaagttccagggtacatgtgcaggatgtgcaggtttgttaaataggtaaatgtgtgtcatggtggtttgctgcacctatcaacccatcacctaggtattaagcccagcatgcattagctatttttcctaatgctctccctccctcaatcctaccccctgacaggccccagtgtgtgttgttcccctccctgtgttcatgtgttctcattgtttagctcccacttataagtgagaatatgcggtgtttggctttctgttcctrcgttagacattaataggggccaacaaacatatgtgtattttaaaagagactg

SEQ ID NO: 518836 - DNA, 368 bp, Homo sapiens
tttatgaataaagttttattggaacacaggctaattcattcatgtgttacctttggttacatttgggctacmatgtcaattgggcagttgtgatagagaccaaataccacagcaagggcaaaaaagtatttactatctagccctgtaaaaaaaaaaaaaaaatgtttactgacccgtggtctagggaacttaaattttgttctcatcctgtatattccctaaatatctttaagcaaatctcttccttcctggacctcactttctacaactatagactggataatctccaaggtgagccacagccttcgacttattctcctcttgttcggtaagtgttagcctctagtatgttagttttgccttattac

SEQ ID NO: 518837 - DNA, 642 bp, Homo sapiens
gctcagctgccatttctgtaaactagagacggttatatagctaacttttgagcttattgtaagaagtagataagaaaatggttgtgaagagcctagtgctgtaactggcatggtaaacgttagttcacttctctcctcccagacctgtgcctggtctagtgccctctcctgaccctcagtctagaactcattccattatagcatattgctctcaataaataaccatactacccacatctattttataaatgaccccatctggataatttcggtcataaatatcaactataaattccaccaagctctgtgccttggctagcagacaaagctctgcgtcttctctttcwatgtcagaagccagcccttcctcctcttaccctttggcaaacatttaaaaacttgatcccaaaagcattttggaggaagtccttagagagccagaagaaaaagcaatcgtctcttcccatctgacctggcaccattttgatatactgtgagcatcaagtgcaaaataaaataattgtccttgtaaagagtctagagctttactgtctagcacatggctgctgacacatgtggctactgggcacttgaaccgtggctagcctgaatttagatgtgctgtaagtgtaaaatacacat

SEQ ID NO: 518838 - DNA, 534 bp, Homo sapiens
gctcagtaactcaacttgttcagacacagcttgtacatttttacctcatgtcttcattaatcatcctgaactggcacagcgatacaccaaaataaaattgatcttgtttttttaccctttttataccataaggcttcaaagcattttctagcagagggcccagcactgaactgaacctgaggagacttgcgtattcctcagtctccgtgctcacctttgtccattgtcttaccttacactcttggtcaccaagaaattctcatctcctttccagacctatctccttcacttgtgttcttccagttgttaatcagtttcctgaacttaataaatattggccttttcttcagtatctccccctccacaaatcacaaagtccttttcattcattctgcacatgtgaccaactttcacctatccatrttggaaagaataaaagaaaagtattctgtataaattccaccttcctattctgctcccttcttctctcttccccatcaagaccactgtgttgaaagagttgcctacattcac

SEQ ID NO: 518839 - DNA, 482 bp, Homo sapiens
gcctgccatttcatctcaggtgttaccgtgggaaagttgtttaacctctttgagcctcagttccctcacatgtaaaatggacctacgagtttctcacacagggttgccctggggccaggattgccagataaaatataggatgcctggtataaaagttgcatgggacagacttatactaaatatgctccccaaattgttatagctctaaaatattatggctccaaatcaaatgtctgaactctatgagacagagcaaaaaccacgaacacaaagaagtaacagggtcaagagaaaagagcatgcacttggagggcagacatccaggaacaccatctctgctctgtgtcaagccaggctgtcactttaactgataattaaatgcttctgtgcctcgctgactcctctgtgccatagggacctaaagaaaggccctacctccctcacayagcacagctaagtactttgaaaacattaaaagcatg

SEQ ID NO: 518840 - DNA, 482 bp, Homo sapiens
gcctgccatttcatctcaggtgttaccgtgggaaagttgtttaacctctttgagcctcagttccctcacatgtaaaatggacctacgagtttctcacacagggttgccctggggccaggattgccagataaaatataggatgcctggtataaaagttgcatgggacagacttatactaaatatgctccccaaattgttatagctctaaaatattatggctccaaatcaaatgtctgaactctatgagacagagcaaaaaccacgaacacaaagaagtaacagggtcaagagaaaagagcatgcacttggagggcagacatccaggaacaccatctctgctctgtgtcaagccaggctgtcactttaactgataattaaatgcttctgtgcctcgctgactcctctgtgccatagggacctaaagaaaggccctacctccctcacacrgcacagctaagtactttgaaaacattaaaagcatg

SEQ ID NO: 518841 - DNA, 459 bp, Homo sapiens
gcatctagtaaactggcaagacattttggtagctgaggcaatagcagcctttaaatccaataatttaatatctcattcaaacacaataaataaataagaagggaacaaatgcaattacataaaaatcacactgtcattataactaaaaaaaatctaaattttaaattatctatgggtaaaaaaaaatcaagcaaacagaaatattcaagaacaccaacaaactccagcaagctacctccatggaacagggkagagggcaactagcaatgcctaaaattaatgctgaaccatcagccaagaatggaagattattcaacttgtgaaaataaagattgcaggggtcaaattgataaagtataagggcgtgttggatgaaaaggtagtctcctaggagtggaggaacacagtgaaaggagttgatggaaatggaaaagcattctttcgaagcacaaggatgaa

SEQ ID NO: 518842 - DNA, 619 bp, Homo sapiens
ctaattgtctatgaggttgttgatgtacracttgaaaaggaagatactagaacatagtccagttttacacagtttagaatttgtagtaatgttagacatctcttgaagatgtttaagcagctgggattatctaacaattatacattaatgaactcctatttaaaggattcaggatagataagggtgatcaataatatggtagtttttcatttattttataggttaaatactatggaataaaaatattaatgatagctataacttataaatttaccataggtcaggcattgtgttgagttctttatgggtattattcatttaatatttaacatatccctttaagagatggaggacattattaatatttttaaacagtgaaacttaagcttggattacaaaaggaatttgccaaaattttacatttctaatttaactggaatgcggtatgtatacattaaaatggaaggactgtatacaaacctaattccagtactaatggattcttaggataaggagcttgtgtgttttaatgaatatcaccttttcctcatccctcccacttttactggcatggaaactgagaactaaataactcctaaaatcccatcatgaatcagac

SEQ ID NO: 518843 - DNA, 614 bp, Homo sapiens
cagctgggattatctaacaattatacattaatgaactcctatttaaaggattcaggatagataagggtgatcaataatatggtagtttttcatttattttataggttaaatactatggaataaaaatattaatgatagctataacttataaatttaccataggtcaggcattgtgttgagttctttatgggtattattcatttaatatttaacatatccctttaagagatggaggacattattaatatttttaaacagtgaaacttaagcttggattacaaaaggaatttgccaaaattttacatttctaatttaactggaatgcggtatgtatacattaaaatggaaggactgtatacaaacctaattccagtactaatggattcttaggataaggagcttgtgtgttttaatgaatatcaccttttcctcatccctcccacttttactggcatgraaactgagaactaaataactcctaaaatcccatcatgaatcagacaacttacatctaaatgcctttatgattggagccaaatccttctcatttttgaaagcgtatatcattcttttgaggctgagatatgtcaattgccatgaaaacatttttgaca

SEQ ID NO: 518844 - DNA, 550 bp, Homo sapiens
  misc_feature (1)...(550): n = A,T,C or G
gaaatgaggaaatggttcaaagagcagagtatctcttggtagggatcatagttggagcagaattaaggcaatgaacatgaggattatggcaaaggaraaaaagatctcaaaatgatgtatgtgacaataatgttgtaataatttaactgttaatggaagctagacactatctttganaccagaagatcagagttgttctaagtttttttgtgtgtggaaagaattggaaaaaaaaaggaaaaccacgctgtctgatcataattctccgcacnttcctgcttccagtgaacaggtagaaatatagagtaggtgtaggtagttgacatacctcttagaactaactactatataatatggaataattaaaaaattgataattgagggattctaaatctggctctgggcctataataccttgcatgcatggtaggagttatttccatgcaaagatatgattctagtttactgctttatttgtgaattcagtcagcttttatttgcatcaatattttttataacattataaatcggatatctctagtccaataga

SEQ ID NO: 518845 - DNA, 550 bp, Homo sapiens
  misc_feature (1)...(550): n = A,T,C or G
gaaatgaggaaatggttcaaagagcagagtatctcttggtagggatcatagttggagcagaattaaggcaatgaacatgaggattatggcaaaggagaaaaagatctcaaaatgatgtatgtgacaataatgttgtaataatttaactgttaatggaagctagacactatctttganaccagaagatcagagttgttctaagtttttttgtgtgtggaaagaattggaaaaaaaaaggaaaaccacgctgtctgatcataattctccgcacnttcctgcttccagtgaacaggtaraaatatagagtaggtgtaggtagttgacatacctcttagaactaactactatataatatggaataattaaaaaattgataattgagggattctaaatctggctctgggcctataataccttgcatgcatggtaggagttatttccatgcaaagatatgattctagtttactgctttatttgtgaattcagtcagcttttatttgcatcaatattttttataacattataaatcggatatctctagtccaataga

SEQ ID NO: 518846 - DNA, 550 bp, Homo sapiens
  misc_feature (1)...(550): n = A,T,C or G
gaaatgaggaaatggttcaaagagcagagtatctcttggtagggatcatagttggagcagaattaaggcaatgaacatgaggattatggcaaaggagaaaaagatctcaaaatgatgtatgtgacaataatgttgtaataatttaactgttaatggaagctagacactatctttganaccagaagatcagagttgttctaagtttttttgtgtgtggaaagaattggaaaaaaaaaggaaaaccacgctgtctgatcataattctccgcacnttcctgcttccagtgaacaggtagaaatatagagtaggtgtaggtagttgacatacctcttagaactaactactatataatatggaataattaaaaaattgataattgagggattctaaatctggctctgggcctataataccttgcatgcatggtaggagttatttccatgcaaagatatgattctagtttactgctttatttgtgaattcastcagcttttatttgcatcaatattttttataacattataaatcggatatctctagtccaataga

SEQ ID NO: 518847 - DNA, 719 bp, Homo sapiens
atgattctagtttactgctttatttgtgaattcagtcagcttttatttgcatcartattttttataacattataaatcggatatctctagtccaatagagctagcttccttcagtaataggagtgtttaatgcacagagagtccttatgaaaaaggtgaatatataatatatacaacctagaatcactactctcatgaaacacacaaaataatttcctgacaatccaggggccatctgcttgggttttctactcactgtacaataaaatttcaagagaagactactaaaaaatagtagtcttcgaggagactactgtgtgacttgggctatcagcaatgggcattttgaaacctaacaattttcttttcattgttgctattctttggatgaatagtttgtcttatttcatcttaatggttgtgatacaactgtcatcaacccagtcttccagttttctgacctgctgtgcaatgaaaaaaagatgagtcagacttcacagagttatagagtttgagacaggggtgctgattactacagttctcatttggttgctaagatatataacaggagaaaatatggtatttccttagaacttagatgtactttagaatgacaaccaggacctatgtaatttactagagtcaactttccaagcataatgatatcagtcctttaaatttatgagacaatttatgataatagtatttcttttaaagca

SEQ ID NO: 518848 - DNA, 719 bp, Homo sapiens
atgattctagtttactgctttatttgtgaattcagtcagcttttatttgcatcaatattttttataacattataaatcggatatctctagtccaatagagctagcttccttcagtaataggagtgtttaatgcacagagagtccttatgaaaaaggtgaatatataatrtatacaacctagaatcactactctcatgaaacacacaaaataatttcctgacaatccaggggccatctgcttgggttttctactcactgtacaataaaatttcaagagaagactactaaaaaatagtagtcttcgaggagactactgtgtgacttgggctatcagcaatgggcattttgaaacctaacaattttcttttcattgttgctattctttggatgaatagtttgtcttatttcatcttaatggttgtgatacaactgtcatcaacccagtcttccagttttctgacctgctgtgcaatgaaaaaaagatgagtcagacttcacagagttatagagtttgagacaggggtgctgattactacagttctcatttggttgctaagatatataacaggagaaaatatggtatttccttagaacttagatgtactttagaatgacaaccaggacctatgtaatttactagagtcaactttccaagcataatgatatcagtcctttaaatttatgagacaatttatgataatagtatttcttttaaagca

SEQ ID NO: 518849 - DNA, 719 bp, Homo sapiens
atgattctagtttactgctttatttgtgaattcagtcagcttttatttgcatcaatattttttataacattataaatcggatatctctagtccaatagagctagcttccttcagtaataggagtgtttaatgcacagagagtccttatgaaaaaggtgaatatataatatatacaacctagaatcactactctcatgaaacacacaaaataatttcctgacaatccaggggccatctgcttgggttttctactyactgtacaataaaatttcaagagaagactactaaaaaatagtagtcttcgaggagactactgtgtgacttgggctatcagcaatgggcattttgaaacctaacaattttcttttcattgttgctattctttggatgaatagtttgtcttatttcatcttaatggttgtgatacaactgtcatcaacccagtcttccagttttctgacctgctgtgcaatgaaaaaaagatgagtcagacttcacagagttatagagtttgagacaggggtgctgattactacagttctcatttggttgctaagatatataacaggagaaaatatggtatttccttagaacttagatgtactttagaatgacaaccaggacctatgtaatttactagagtcaactttccaagcataatgatatcagtcctttaaatttatgagacaatttatgataatagtatttcttttaaagca

SEQ ID NO: 518850 - DNA, 562 bp, Homo sapiens
ggtgaatatataatatatacaacctagaatcactactctcatgaaacacacaaaataatttcctgacaatccaggggccatctgcttgggttttctactcactgtacaataaaatttcaagagaagactactaaaaaatagtagtcttcgaggagactactgtgtgacttgggctatcagcaatgggcattttgaaacctaacaattttcttttcattgttgctattctttggatgaatagtttgtcttatttcatcttaatggttgtgatacaactgtcatcaacccagtcttccagttttctgacctgctgtgcaatgaaaaaaagatgagtcagacttcacagagttatagagtttgagacaggggtgctgattactacagttctcatttggttgctaagatatataacaggagaaaatatggtatttccttagaacttagatgtactttagaatgacaaccaggacctatgtaatttaytagagtcaactttccaagcataatgatatcagtcctttaaatttatgagacaatttatgataatagtatttcttttaaa

SEQ ID NO: 518851 - DNA, 433 bp, Homo sapiens
ccagaggaggggagagagtgtttcctttggaggaataatgattattgcagtctttttcacccacagtgcccatctgtgccctcctttttcatttattgacatgccacttttgtcacatgggacggtcacgcagtgaagaaaaacatttcacttacaccaaggggaagaaaacttcaaatccattatttcttttcagtttggaaagtttaatctgtgagcatagcttgtgtttggagcctaagataattgagcttctttctcctgctaacttttttatttatgatacttaagaggaggtcaagctaggcagttcakcttagcttttgatgtgtgcccaggagagggtgggatgggggatgcagcaaaaagtaataataatgatactaagaaaagaggtcactgtgtgtcagttactatgtttctgtttaatcca

SEQ ID NO: 518852 - DNA, 581 bp, Homo sapiens
tggcctctagggacttttattgaacctgcccttggcagcctcagtgccagatcccctctgcagccagcctaattcctccctgttcctgcctccatgaggcctcaagtctcacatctgctggtcatgctagargaagccatgtaggccactctattgctgcccacccttcctgcctaccaaactcctgccctcagaattccccaagcaggagacaggagacaggcacaaccccaaccttcaccgaggctcctccaagtccagagaagtcacatcaatttcttccctatttcaggtgatcccaagaatgcactcatcaaaccctgctctcgcctatgaagatggacctatgagtgccacagttcagccagcacccagccagtgaaggagaggccagcctcctctggcaggcagcccaatctcttttttttaatatttatttatttatttatttatttatttataaaaaaaaagagatggatctcattctgttgcccaggctggagtgcagtggtgctaccatggctcactgcaacatccacctccccggttcaagccatcctcccacctcagcctccccagtg

SEQ ID NO: 518853 - DNA, 636 bp, Homo sapiens
ctgttgactactctctcccggaatcccactgcagaaggggaactgggaaaattattagttcaagaagaaaatcaaatctacagttataaactagcttgaaaatatctaaaatgtaaataatccataacagagttacatgttcccagaaagaaattaacagccctaattatttttattattaaaccatgaaaaataaatgaaccaaccactctgttgaaacagtttgagaaacaaagaaagaactgggaaggggaaaataagagtaaagcagaaattaatgcaccagaaaacagaaaagaattttaggttgataaataaatgcaagaaatttaaaacaatcgaaaagataaatttagagaaaatcaagttcataacagataaaattattagatgcatattcaattatatgattacatgcttcaaaatcaagagataatcaaaataactcagaaaattagtatatagatccagtgatacgattggatataaggtaygcataacattaaaattaaaaatcaacccctctcctaaagcaaaaaccaattagaacaaataatgggataaaatgccagtgaaaacgttaacaaataaaaactgtccaggaataaccctggcaataaatacttagaaagatgt

SEQ ID NO: 518854 - DNA, 563 bp, Homo sapiens
caaccctttatttagtcttcggttcattctccctgtgttttttgggttcttcttggttctagtcttatataggcagatacatttctggggttacctgggttgtacctgagggggtgaagacagtcacgttattgaacctactgtaaaaatgtaataaattctagaacttccataccctccacartcctagtgctgagtatttatgcaaaggaaaggaaatcagtgtgtcagagggatacctgcacccctgttcattgcagcagtattcataatagcaaaggtatagaatcaaactaagtgtccagcaacagaggaatggataaagaaaatgtggtgtgtatgcacagcagagtaccatttgaccctaaaaaagaatgaaatcgtgtcatttgcagggacatggatggagctggaggtcactatgttaagtgaaataagtcgggcacagaaaagaacatattgaatgttctcactcatatgtggaagttaaaaaagtcgacctcatggggccagagagtgaagcgatagataccagaggctgggaagggtgaatggcaggggta

SEQ ID NO: 518855 - DNA, 458 bp, Homo sapiens
ataaataaacatggatgcaatgagaaaagggatgtgacaggtattggggaagacaagccagcaactgctctgggctctgctttggaagtgcctttcatttctctttagtttttttttttttttttgaaacagagtcamgctctgttgcccaggctggagtgcagtggcacgatctcagctcactgcaacctctgccttttgggttcaacggatttcttatggctcagcctcccaagtagctgcattacaggcaagcaccattacgcctgggtaatttttgtatgtttagtagagacggggtttcaccatgttggccatactggtctcgaactcctgacctcaggtgatctgcccacctcggcctcccaaagtgttgggattacagatgtgagccactgcgcccagctcatttctttttactctctatccaccacttgtcctagctcaaatccttttga

SEQ ID NO: 518856 - DNA, 458 bp, Homo sapiens
ataaataaacatggatgcaatgagaaaagggatgtgacaggtattggggaagacaagccagcaactgctctgggctctgctttggaagtgcctttcatttctctttagtttttttttttttttttgaaacagagtcaagctctgttgcccaggctggagtgcagtggcacgatctcagctcactgcaacctctgccttttgggttcaacggatttcttatggctcagcctcccaagtagctgsattacaggcaagcaccattacgcctgggtaatttttgtatgtttagtagagacggggtttcaccatgttggccatactggtctcgaactcctgacctcaggtgatctgcccacctcggcctcccaaagtgttgggattacagatgtgagccactgcgcccagctcatttctttttactctctatccaccacttgtcctagctcaaatccttttga

SEQ ID NO: 518857 - DNA, 627 bp, Homo sapiens
acagctgttcctcagtgtacgattacagcctgacatatataggtcatacatataatgtgtccaatactgcatgatgaaaaagacagctaaaagactaccaagcatgcttttttcctctttattctgtgtgctcttactcattcgccctggattttccctttcccttccccagtacttgctaacttcccctcacaagccacacactcccaagggtcaaggcaagagacactatcagaatgggacagaattcctgacctttgacttaactgggcagctyccacagaaaaacctctgattcttcctctaacttaatctgtgtggttgggttggcttgtctttttcttcacttgacgatacagcatatcttttgttccatctaaatagagagcttccaatcccaagtcattaaattccaccttagagctaaaatgcatttcagatgtgtttgcctagcacaaccccctgggcagcctttccaatgcagtcagaggggccagaaggagaattttttttataaaacagtatagaaattaagactaagcatgcatgcatatcccaccaaggagacacagggaatgatggtcccaatgagatttttttctccttatgtggcattattgcttccat

SEQ ID NO: 518858 - DNA, 603 bp, Homo sapiens
ggtgcttgaggaagttatttgactgctcagagccaccggagcaaaaatactttccccaatttcccttggcaaatggatctcacacagcagaataactaaagcaaaggtctgtgtttcagtcagcctagcactcagcttctgaggtcttcacagatcccgggttctcctgggagtcagggagaatggcagaattatagaagtgataagagatgcatagcatctccaaactggaagagacactgcaaatcatttggtggggtcaccaaccaagaggaggaagctccttcctccgtgaaatggagaccctggaaggttggcttcgtgtgccttgaatccctgaggtagtgcctggcaggggcttgccctggcccttgctgttgacagtggtggtgatcgtgacaaccgtaaggaacactggctgggcattcttctgtggagagtgtagcctctgtgccaagtgtgatctgcagctttttgcacgtgtacttcatttagtcctcttaggaatcggaggtggtagttactgttattatctcacccttttcacattgccacctccatggaaratgatggtgtttctacagcatagtggagtaaaataag

SEQ ID NO: 518859 - DNA, 529 bp, Homo sapiens
taaagctcattcattaatatatacaaacatttgcttactctctattaagtccctactgtgtccaggcactaccttagtcacctgataaacactggttagcaaaacaaacagcgctaacactctggagcttgcayagttaaaaaaaaatatgtccttgagagcatttagttaaagagaaaaatgcttgacattttatgttaagtaaaaaaagcaggatacaacattatatttcaatacaacctttatatatctacagaaaattattaaaggataataagtcaaaatgtcaatagaagttgtctctgagtgctgaaattgagttatttttctttatgcttccctatagttcaatttttaaaataaattatttctaatgagcaacttccataatcagataaacactggggtaggcaggagagtaatacactcacctgagtcacaggaatctggaactcttgttctaaaaatgcctactctgtgttccttgtaggcagcatcattttttttttaaagtataggtttcccagtc

SEQ ID NO: 518860 - DNA, 659 bp, Homo sapiens
atagccagcagccactggaagccaggagagaggcgtggaactctccttcagaccttccagcaggaaaccaccctgctgaaatcttaatttggaacttctgtcctccagaactgtgagagaatacgttttggttttaagccacccagtttgtggcactttgccctgggaaattaatacagtcaccctgatttgaagaggccatcccaggagcttgagagagtgaggcaacttcctagacacaggaaggtgaaatgaatgggtggacaccttcatcagcctcctttacctacttagcttcagaactcagttttcaagttgttacatccacctcttcctggctcaagcaggagatgggaagacatttctctggagaagycaactgctatagctggtggtcctactgaatactctcctgtgaggcctgcaagtcagcaagctctgtccttgtggaatcggcttccaatcacctttccatgtagcacccttcactatacatggacaccaaataatcacaaaaggcaacaaattcagagaatcaaaagaatggcatgcacagagatatacaagttgttggagcattgcattctgtagggaactgtccctccttcccacagcccaagatccctctggtttcctctcagttcttacagtatgaccca

SEQ ID NO: 518861 - DNA, 624 bp, Homo sapiens
atgctttttacaaatggtagtggttcttctgttcaacctgctgcattggactatccctggatgtaaattcccccagtaaaccctatgtttcattcactgtcttgggtctcttcttcagtgtctcaaacatggtgcaacccctcttggagtcagcagaggtccggcacaacatccacacatcccaaagctcattaagattttctggttttcctcaacagcaggtagcaaagcaaaaaactgcaaattcacctgttaytatgatggtgcagttctaaaccgcttctccctttattgccatactacgtaggtgtacagaggcaaaatcacagtgctacgatgatgtccacagatcaatggcaatgtataacattcctctcacttatcttcaacaggagggaaacaaagatagaagacaaaatggtcttagccactgtaacccaagtcctgttgtttgagtcaagttgacttcgagtaagaggtttgagaaaattgctcaagactttgataaacagcgtttggccacattctgggtacttcagatcttctggcagcattgggtgatagaaggcaggctggtcttagatttagataagttcacatttgatacttcacatctaactcaca

SEQ ID NO: 518862 - DNA, 574 bp, Homo sapiens
gtgcacacaaagctgggattccttcctgttcccttaacacaaatgctcttctttctgtattacatcagtgccctgccttttgactgccctaaattaactgctacgaatcaaaaatatcaaagtttacagaagagaagtccactatctctctctgtacagyggcctggctaagggctctgaaaaagaatcctggctccaccagcaggtggttaggtgaccttgaacaagccacttagtttccctaagcctggctgggaccacttgaaatggggagttgggtgatctccattcgcttttggcccttaatgcctctctgacttgtcaattgctgtttttggcctcgccaaaatccaaaaagggtaggaggagaggtaaccaggcaaaaagttctgacgtgcttagtactgtcatgaagtggtcccatgccctctgggaataagagatgtttcaggctgacattgtctctcatgtgtggggacttcggaaacctgctcctgggttacaccaaatacaactttttcaagagcaaggcttccttcatctgtcagcttgtgttcccagaaagacactccac

SEQ ID NO: 518863 - DNA, 646 bp, Homo sapiens
attgctgaaaatttatttaaatgtatcaagtggcctgagttctgatgttaggttaatctcatgttggttggacctttggattgtagtggaacatggaggacttttgagctccaaggagctttaagaagtgcatgttttcatagtagttctggtacaagaagctttgttttcttaggcatctggagagacagcagatgacatgggtggctactccctctccttctattgtttttcttgaacgctgttgaagccagaattttgtgaaacttcagaatgtgggttatgggacctcttttcttgcttttaattttaaattccttttgacacatctttaaactgtcttcctaacttctcaaagatgactatgttcaaagatctttgatttcttccagtattctctcagaaatgtcagaagtattctatcctggaaagagcacactgtctggtggggaagggtggtagattaaagatgtttattaatacttggctgctcctccttcaagaggtacattcctactaccttgtcccagtcttggatggmtttgtgacctgctttgttcaataaaagtgaaggtggtggtgctatccaagttctaggcttagcccttaagaagcctggcaactcccactttttttctcttgtgca

SEQ ID NO: 518864 - DNA, 517 bp, Homo sapiens
atcttcttgatctacatggatctaaagtctaaaatcttggatttatttttagacatttgctgaaggtatttgtgatgctttccaattgtgtttgctgtgactgccttcaggatgaaagcactcagtttcgattgaatccattggatgtatattctaaatgtctgtccttataatatctttttgccttttttctctttgtaaatttgtcacagttgctaaggcctggactttcaaatgatttctcttgctcctatctatgaccagaccaaaaaaaagttttcactaataaaatagcagtatgttcccagtggatattcaggagcaagactgatgataaattcttgacttttgtcctggtacttttaaactcttcttctttcaagtctgctttttacttctagacaattctctagatatactgctgttcytcctccttttccttcacattaaaattttgaaacaaaaaataactcactggtccacatgcccctcatgcccactggtatacccagcagtg

SEQ ID NO: 518865 - DNA, 604 bp, Homo sapiens
gctgggaagtcggttctgcaagggaagtctcactgaggcttgctcttaaaacattcaaaatgcctaaatttcatgggattttcattatgtggtgtacacaaactatgttgactaacatgcacttgattaattgtagctgcccataaggggcaaatcacaatgattgagttcaaatgaaaccagctatgtacaaaattgattagaatgagacaggaaagagataacaccttaaaatgtgttttgacctttaatatttcaggcagtgagactgaaatactacgttgtactgagatgtcctgggtcactgagaaggacctggagagatgtaggatggtcaatgattccttgatagtggtaaagatggagcatgctctctctcttttcctttccctttctctcagtctctctccctttctttttgcctctctcccctacttctagggtattccattttgccatgaatgggtctaaactctaaaagatctttcagagcatgayccagtagagatggcagacttgacatcattcttcataaccattctcataacctgttccaggacccccacctacaatgtgcttaaaccagagttagaatgactgacat

SEQ ID NO: 518866 - DNA, 466 bp, Homo sapiens
cttgttcataaattatctgagcagtgttccaaaagggagcaagaaaggtaggtgcaaggcctcttggaatctatgttcaaaactagcacactgccatttccaccgcattccattgccaaagcaagttacagagtcagcctagattcaagaagtggggaaatcacttccacctattgataagaggagtttcagagtcaaatccaggcataaaaaattgtggccacttttgcaatccaccaaaaccctctctcccacatgctccttaatgccccactagctaaaccaacaagacagatcatagtcagcactgactgagtgcagcatttctgtttaagacaaatcagagcaacagcaagaatgcctgatgttccttcatggcagccttcccactattgggtactctcaagatgggagataatcctatttgcmtgagtagtagatagctactacttcccagagtagtaga

SEQ ID NO: 518867 - DNA, 624 bp, Homo sapiens
atgactgcctgaggtggaaggtataaactaatctccctgggatataacaagtatttaaaaaaggattttctacaatgaaaatggttttctttaagacatttccaaatactgaatatcaaggccaaattaattccatgagaaactaatctttcaattattatctctgccactcttcattctttcattaaagagatttttaaaaaagtatacagaatttctctttcattaataatatttaccgtgcccatcagaactccactaatgggccgggcacggtggttcacacctgtaatcccagcactttgggaggccgaggtgggscaatcgcctgaggtcaggagtttgagaccagcctggccaatatggtgaaaccccatctctactaaaaatacaaaaattagccaggtgtggtggtgcacatctgtaatcccagctactcaggaggctgaggcatgagaatcgtctgaacccgggaagtggaggttgcagtgagctgacatcgcaccactgcactccagtctgaaaagagcgtgagactctgtctcaaacaaacaaaaacaaaacaaaacaaaaacctccactaatgaaaaaggtggggaaaaacaatgtgtggttactaatcaa

SEQ ID NO: 518868 - DNA, 553 bp, Homo sapiens
tttgtttatccctccccagcactaagcatctgtgggatcttggccaaatagagtcctgattatagggaaatctaaatctcttcytgataacccaaaatcctggttttttttagtaaaaacatttaaaattacattttttcaaatttgagttggacttatagcaagtgaagctctggaaatcattttttttttaacagaatcaactactaaatgcatttaatagaaatataagaaacccaggatttttttttttcagacggggtcttgctctgtttgcccaggctggagtgcagtgacactatcacagctcactacaacctcaagctcctgggctcaagccatcctcccgcctcaagccatcctcccgcctcagcttccctagtagctgggacaacaagcatgcgctgccatgcctagctaattttttttttttgtaagtttctgtagagacgggggtctcactgtgtcaaccaggctggtctcgaactcctggcctcaagcgatcctcctgccttggcctcccagaatgctgggatgacatggatgagacacc

SEQ ID NO: 518869 - DNA, 617 bp, Homo sapiens
ctgctagcaaaataatgatcactttaagattctcacagtctccccagcttccaagtctgagaatgtgggggtgagggaggagacaaggaggaggaggagtatagaaataacatgttaataaccagatatgaataattgcagagatgttgaggctaatgatagaattcaaaaactcaatcaagaaaagcaaggacagcctcctttatagaatctctctgaatgcattcacatgcactgatataaacagtgatcaagaatgctctaacagcttgaaaaattgcaccatcaggaaacaaattttgataagcctcagattctttaaggaaaattaattttgaygtggacattagttaaattcaccagctattcatgaatgttgccttgatgtttaacccatatgaaacttttaagccagtgttgtccagcagaacttgctgcagaggtgattttctgttgcactgttcattagttatatgtggccattgagcaattgaaatgtggctactgtgactgaggaactgcatttttaattttgtttaatttcaattaatttaaatttagtgacatgtggctagtggctaatttattagacagaatagcgtaagctgtcggctgac

SEQ ID NO: 518870 - DNA, 530 bp, Homo sapiens
cttaaaatcacggcattcctgaatcaggatatacattcatttaaggatgacctgggggcttttagcttttgttaacataaaactattcattactttcatattattgtggcaggcacagggtcttacagaaaaattagtaattctcaactttagctaacatttactgagtgcctatcacataccaggaacttaacactcattatcttgcacaactcttagtgtgtggtagatcaccatagaggagtatttgctccttctccacctccatgggcagagtgtactttcctacccgttggctgtgagtgtcccctccactgcgggtgtgtctgtgagacttgctttggttaaggaatgttaaccggcagcgagtgtgatgcggttaaaggcttgaaggcgtttgcacaatmgaagtttctcttgcacttctccttcaccaagagaacatttctgactagctactattctccagcagaggacttgagacacagggaccagagttccctccaaagctgagcctcctcacttgaggg

SEQ ID NO: 518871 - DNA, 530 bp, Homo sapiens
cttaaaatcacggcattcctgaatcaggatatacattcatttaaggatgacctgggggcttttagcttttgttaacataaaactattcattactttcatattattgtggcaggcacagggtcttacagaaaaattagtaattctcaactttagctaacatttactgagtgcctatcacataccaggaacttaacactcattatcttgcacaactcttagtgtgtggtagatcaccatagaggagtatttgctccttctccacctccatgggcagagtgtactttcctacccgttggctgtgagtgtcccctccactgcgggtgtgtctgtgagacttgctttggttaaggaatgttaaccggcagcgagtgtgatgcggttaaaggcttgaaggcgtttgcacaatagaagwttctcttgcacttctccttcaccaagagaacatttctgactagctactattctccagcagaggacttgagacacagggaccagagttccctccaaagctgagcctcctcacttgaggg

SEQ ID NO: 518872 - DNA, 480 bp, Homo sapiens
aatgcatattcattttattggagattcagaatttggaacgtacacaagatgggaagaacacagaagtaggctttcctaaaggtgcgtgtgtagcccaaggttggaaagatgaggagagtaacctaggaaaaagtactaagtaaatattgcaggaaggggaaacaaccatgcaaaggctctgtggaagcaaaaagcagaatctgttttgggaacttagacaagggcagctggcagatgtgcagaaagcagaatttacttcttcttttaatttttattttatttatttattttttttttaccattttaagtctgcagttgagtagtgttaagtacattcacagtgttgcacagccattcycaacattcatctccagaactcttttcatcttgcaaaactgaaactctgtaccaattaaacactaactcaccattcctcttttctcccagcccttggtaacgaccatgccactttttgtcttt

SEQ ID NO: 518873 - DNA, 602 bp, Homo sapiens
tgtgtgccaccatgtccagctaatttttctattttgagtagttgagttttcaccacgttggccatgctggtctcaaacccctgacctcaagtgatctgtccgcctcaccctcccaaagtgttgggattgcaggctagagccaccacacagycggccagaatctccttcatttctaaggctgaataatattccagtatacaccacgttttgtttattcccttgtctgtgcatggacgcttggcttgagaaagcagaatttactttctaaagtcacctatactgaaagaggcagagttgacataggaagccagttggtccaaatctagagtctaagcactttgcttttcacttttctcattctattgtgcttcaggctaatgagatatgtagatatgtgttacatatgtaaatgagttacaatctgtgcagcctttagagcagtgcctggtccagagacaaaactatagaaggatcagttcaaattattattaattattattgtatgtacagaacactcaattaagggcatggccaaaatccattctgcactctgatgactcattcaaatgctcagcagacagggagggagagaggacggaaga

SEQ ID NO: 518874 - DNA, 614 bp, Homo sapiens
tagtcaaggtgtacatcgtgttttcctttgcgtttgcaaagaaccaagactctgtggtcaacgaagtcaaactcagccaggattcagaagctggctctctttccatagcaggcacaatctgttttgaatacagatccaatcgcagcgggaaccaaacaccttcagagcaggtgatgtggcgctggccatggagtcagcaaatgcaacatctgctgatatggccaacttggctgccctattgttaccaggcccactggtttctcaaaggtcatacctgatcaggaccataatgagccaatgatcaatttccctttcagccttcatgagtccttgagggctggctctttagggatagaaagcttggccatttctggaagttgcctwtccttgtgggatttcacataagagaaagaggaactatgagctctttccagagaagcactcattcaggtcaggcaacaccagggcgagcttacgtcgcccattatgcctggtctgctagttcatagaatgatgtgaccatagatagcctgattcccccagctcacctccatgccaggccatccctcctctctattcccagaacattttattttgatgtctaacgtggccct

SEQ ID NO: 518875 - DNA, 550 bp, Homo sapiens
ttataaaaggcagtggtgaggatttcagctaaaaaaagattcgttgtttcaaaagcccagcctgaagtaagacagtgccatagacacgaccacaccagagggcaggtggttcacaaagggccttgcattcttctttgctcttgtttactttacatgagggcaaggagtctcagaagcgtaagatataatactacactagacaggcaagcagacctaatgtgcaaagtctcatgttggctatataggtagtttatatgtcagttccaattatgaatacattcctcagcaactagagttttctcattcattcttactgaactgttagggcatgtggcagcccagagctctgtcaaaatgaattgtcccccttgaaaagttggcaatgcaaggaagtgacaacctaatgcatgttagcactcttgataacaggacccagaggagacggcgaagcaacaattggrtatgtgtctgggcactggctgttgttcctgcctgggttcaaatctcctctctgccgcttatgatctgtgtgcatttacaagtttgttag

SEQ ID NO: 518876 - DNA, 637 bp, Homo sapiens
tgtttatcactaagcaagtcatatctctaccctcagcctcattgtctaaaatagaaactatctttctatttttcaacagtgttgcaaagatcrgagatggggttatttttggcacattggggatactccctaaataacagctaacgttaatattatgaataaaatattaaaaacactactgttataaagttccaaaattatgcacactcaggacacaacagcaaataaaactcaagaaaactgtggaaaacaccttcttattaacggttgagccattaatgagtgaattgaaatttgaaatgtctagagaaatgatggtacaaaatgcagtgaccacattcttgaaaaattcatacctatttcagaccaaaatcactcattctaaacttccagtctttttcttcttgttcatcattgtatgaaatacaacataaagcacccttctaggtatgagcaataatgcttcagagacgtaatgcctataatttagttttaggataataacaattgcaaaaatggcttgtgaatgtctttctaacttagatttgaatggctttcacctccaatcagaagacaggattgaaaagaaaaatttttcctcttttaagtagcaacagagaggattatatacctggga

SEQ ID NO: 518877 - DNA, 610 bp, Homo sapiens
aagaaatcttttgtttaacatggtgactayagttaatgacatgtatcatgttcttgaaaatcactggaagagtagattttaagtgttttcactacaaaaatgtatatcagataatacacgtattaattagcctgacttcgccattccacaatatatacatatttcaaaacgtcatgttgtacatgataaatgtataccatctttgtcaattcaaaaagttaattcgttattatttttttaaagaatcacccagtgtcctaagttccctaaaagaaggaaacagagtagccagagaaactgcagctctcttggtgcctgattctttggtagaatgacataaaggtcatacacagcatgaccctccctggtaaatacgttcacataaaatgccctgggtacataaaaaattctgaaaattcagtatgacgtccttcaagagtctaatggtaaaatgcactcctctaaatgcttgctcagtgtctgctgtgtacatagttatgatccccgtccctggggtatatactcttagtctttgccttcaggtagtttactttcttggagggaggggataaaaactaactaaagcagagacaaggtaagtgtaatcaca

SEQ ID NO: 518878 - DNA, 577 bp, Homo sapiens
gaggcgatgaagcaggaaactcttgtggttcacttaggaaggatttcacttagaagacacaaatgaagaaatggctttatatcattaagctggctttaaagcatttaatcattgtgtcagcatccatggtcaccagtaaacaattaatataagcatcccacgctcccaggaacagcaaaaaaagcatttgttttactcttcagtgttatttttcacctaatggctaatccacaaatgtctactaagtgaaatcatgcttcacataccatttagaaacaccacatttgaattttaaaaacaaaacataaagatacttctctcgaaaatcaataaaaggcttgaaagacatgaagaagcagattttcccagaggaaacacaactggttcaaaaccctawgggaaaaaaagggggagggattcttagagttaccaaatacgtgcaaaacaaataggttctattttttataaaaatggcaattggaaaggattttataatgcttctcttcattattaaaggagatttagagaaagagtctcttaaacactactgttgagagtgtaaattggttgaaccttt

SEQ ID NO: 518879 - DNA, 625 bp, Homo sapiens
aaaccaataggcaagtagtagatctcattgtggttttactttacatagtctagattgctaaagaggttgaacagcttttcctatatttattggacatttggatttcctcttttgtgaggtacctgttcttttgccactttttaaattaggttgtaattttctcattaatttgtaggtgttctttatgtgttgtaaatactagtcttttttgtttttttgttttttgttttcattgcaaatattacctcccattccctggcttgtcttttcactttgttaatggtgttttrtgctaaacagatatttctcttttttaatgtagtcattctttcagtctccctctttttggttagtgttttttttgtgtgtgtcctatttaagaagaagtctttccttatcttgaagctcaaaggctaccctctatttcccgcctctttaaaaagctttggagatttattttattttctatttaactgtttaatttacttgtagttgcctcttgtgtatgatgtaagttgttttttctataatggatactcattggttccagctttctgtcactgtttctgtggggccaccactgtcataggttaaacatgtatgtgataagcatgcagggacctgt

SEQ ID NO: 518880 - DNA, 609 bp, Homo sapiens
gcaaacttcagcctggatctgaaatgtgagtgtggagacccaggctgcttggcaattgatgggaggagagtcttcaacgactgagaaaaaccaggaagtcctgtcgggactacttgtgagagtggcttttactgtttaaaaaatgtaaatgttcttttcaaactctgtttatcaattcagggagagttttagaaacttggagggacatttacaaaagaaagtagtcacatgcrttaccaaaagtaattgaatgccatacatggtatgtaacctttgtcccgatggctccaactcgtccttttttattattgcttcatgctaaaaattggtgctcctaagggcaattgtacagattctcaccttctcctccacccgcaatggtcctggaatgcagtgaactctgcttcgataagctttgtggaatgttcctgtctcttggctgactgtcatctctcatgacttgctgctttcagtggtcccacctcaagcattattccccttctcttgttctgctctgaatctgcgatggcccagaaaactaaacgaccagatttgtcacaatagtgtgtagagcaagaatgaataggatataattgaggacctgaggaa

SEQ ID NO: 518881 - DNA, 609 bp, Homo sapiens
gcaaacttcagcctggatctgaaatgtgagtgtggagacccaggctgcttggcaattgatgggaggagagtcttcaacgactgagaaaaaccaggaagtcctgtcgggactacttgtgagagtggcttttactgtttaaaaaatgtaaatgttcttttcaaactctgtttatcaattcagggagagttttagaaacttggagggacatttacaaaagaaagtagtcacatgcgttaccaaaagtaattgaatgccatacatggtatgtaacctttgtcccgatggctccaactcgtccttttttattattgcttcatgctaaaaattggtgctcctaagggcaattgtacagattctcaccttctcctccacccgcaatggtcctggaatgcagtgaactctgcttcgataagctttgtggaatgttcctgtctcttggctgactgtcatctctcatgwcttgctgctttcagtggtcccacctcaagcattattccccttctcttgttctgctctgaatctgcgatggcccagaaaactaaacgaccagatttgtcacaatagtgtgtagagcaagaatgaataggatataattgaggacctgaggaa

SEQ ID NO: 518882 - DNA, 578 bp, Homo sapiens
cccttcttctcctcctcctcccgcacccccaactcccgcctgtttggcctcaaacaaagagaaatacstcaagcccggcctattaattcatacagatttggcattgtttatgttctcatgtggaccacattccaaagcatcaaaataaaacagctcgagtgtagctttcagctccagagctcatgatgtatttcatttgccacggtccgagccatgttaacaatgcctttcactttcttatggcctaaaatgattttctttctgcaagggccattttgagagagagagagtggggacagagtgagagagaaagagggagacagcgaggacagaagaaaagaaaaccacttctctttccttttcagggtatcatttgcaatttaaagctaacctgggcagtgcagcaacaatggcactgcccttaaaatggtctcggccgggggccgcatgccgaatgagggtgatgtcgagctatttagctctttgtctttccataatatctacttaatgcagttcaatagcagtggattgttagcggcattaaggattctattaagttcttcccaaagccctgctat

SEQ ID NO: 518883 - DNA, 453 bp, Homo sapiens
ccttgaccttggacttgccagtctccagaaccatgagaaataaatttctgctaagtatccagtctacggtatttttttatggcagcccaaactggttaatacattaacctatcagagtgctctattcttgtttatttatgtgtccacctcctcaatgagactctaacttctttagagtagatcccatgatttgttggctttgtataccagggcttagcacagtgcctggaatacagtggatrctcaataagtgcttgttaaacaaacaaatgggtggacacagttgcacatggcaagagagccctgggccttttctttttttccccccccccattgtaataacttttacttatttattttatttttttattattattatactttaagtttcagggtacatgtgcacagtgtgcaggttagttacgtatgtatacatgtgccatgctgatgtgc

SEQ ID NO: 518884 - DNA, 571 bp, Homo sapiens
acctcagagctttctccagagtgatatctcaagtcatatgtatcatccataackatacaagtgggcatgctggtgcattctcctgccctgctccagaatgtgctcctgttcccccaagggccatggagaagcctaggaggccctgggtgtgtgtcggctgtcatgtttttctttttatccccttggcaagcttttgatcgatggcattggatcaaaacatatcctcttccaatattctgcttcttgtggactgacgttcatgatcctcccccttcaaataagaacccggtacacccagtcctctctccattcaccttaggactccaaaatccagacaagaaaccacctttttgcactcaattaaaacaagctgctttaaccataaattaagttataatgcctgtgcccaccagaggagccagcaaggtaccccttgcccttgtcataaattaactcgttgatcaaattttaaatgaattataaaagttgaaaattaaatctggctaaattaggggcttcccctgttattttaatgaagcggaagccaccagtggcttagatcagagctgtg

SEQ ID NO: 518885 - DNA, 571 bp, Homo sapiens
acctcagagctttctccagagtgatatctcaagtcatatgtatcatccataactatacaagtgggcatgctggtgcattctcctgccctgctccagaatgtgctcctgttcccccaagggccatggagaagcctaggaggccctgggtgtgtgtcggctgtcatgtttttctttttatccccttggcaagcttttgatcgatggcattgratcaaaacatatcctcttccaatattctgcttcttgtggactgacgttcatgatcctcccccttcaaataagaacccggtacacccagtcctctctccattcaccttaggactccaaaatccagacaagaaaccacctttttgcactcaattaaaacaagctgctttaaccataaattaagttataatgcctgtgcccaccagaggagccagcaaggtaccccttgcccttgtcataaattaactcgttgatcaaattttaaatgaattataaaagttgaaaattaaatctggctaaattaggggcttcccctgttattttaatgaagcggaagccaccagtggcttagatcagagctgtg

SEQ ID NO: 518886 - DNA, 571 bp, Homo sapiens
acctcagagctttctccagagtgatatctcaagtcatatgtatcatccataactatacaagtgggcatgctggtgcattctcctgccctgctccagaatgtgctcctgttcccccaagggccatggagaagcctaggaggccctgggtgtgtgtcggctgtcatgtttttctttttatccccttggcaagcttttgatcgatggcattggatcaaaacatatcctcttccaatattctgcttcttgtggactgacgttcatgatcctcccccttcaaataagaacccggtacacccagtcctctctccattcaccttaggactccaaaatccagacaagaaaccacctttttgcactcaattaaaacaagctgctttaaccataaattaagttataatgcctgtgcccaccagaggagccagcaaggyaccccttgcccttgtcataaattaactcgttgatcaaattttaaatgaattataaaagttgaaaattaaatctggctaaattaggggcttcccctgttattttaatgaagcggaagccaccagtggcttagatcagagctgtg

SEQ ID NO: 518887 - DNA, 466 bp, Homo sapiens
ggagcttgctatggagatgtgaagaaggttacccaacaacctgatttggagtctcaagcatgtatgaagcactttccatgtacccagcacttcagtgataagaggagggagaaccaggaggcacaagtttgaaacaaagcagttcctaccatcagggggctcagggtagtgggaagtttatgtcccakattggaatgggggaagcatggtcaaagaggggcagcttaaatgctctggaaacagggatgacacaggcttgccctgccctgggggatcccaagacaattttctagaagaaccatcatctgagttaagacttacaagagaagctgcagtgaaaacttgaaaacaacgttgggtttttttttttcccctgagacactgagaactgaaagtttctgtgattaaaagacaaaatgttgcatttaattctgagtctcccagttcagtcacgaggggtgggcca

SEQ ID NO: 518888 - DNA, 466 bp, Homo sapiens
ggagcttgctatggagatgtgaagaaggttacccaacaacctgatttggagtctcaagcatgtatgaagcactttccatgtacccagcacttcagtgataagaggagggagaaccaggaggcacaagtttgaaacaaagcagttcctaccatcagggggctcagggtagtgggaagtttatgtcccagattggaatgggggaagcatggtcaaagaggggcagcttaaatgctctggaaacagggatgacacaggyttgccctgccctgggggatcccaagacaattttctagaagaaccatcatctgagttaagacttacaagagaagctgcagtgaaaacttgaaaacaacgttgggtttttttttttcccctgagacactgagaactgaaagtttctgtgattaaaagacaaaatgttgcatttaattctgagtctcccagttcagtcacgaggggtgggcca

SEQ ID NO: 518889 - DNA, 568 bp, Homo sapiens
gccctgctcctctggagatgttgatacttcccaggttcctctccagagacgacctgctgtcagcctgccatgatccttggcacaggtttagccaagtccacagatggtgggttcagagactctgggtagggagagagtcactctttatttgggggcagagaagaatctgttcttatttaagcatcaatcagggctgttgatggggaagccaaggggacttcacggtcccttctgtaactgggggaaggggcaaggcatggaggaggaaacagcgggtgcgaagaccctgccataggagcgagcctggaggagcggagagagacttggcatagctgaaaaacaggaagctagaggaggcagcaggagaagacgccagaggataacaagagaagataggctgagtgctgctcactcacacactcactcaggtcggccgcccaggcctctcaacaagccacatggtcagttcgagcatcttcctcccaattgatagatgaygcagaggagagggttgctaggacctgcccacgtcacacagccagtcattggcaaagctggagtttgaagc

SEQ ID NO: 518890 - DNA, 515 bp, Homo sapiens
atttggatgtttttagttaaaaaaaagacacatgattatattgaaataataccatgcttaatgtagccacccacagttcacgtttttgccaacgtttgtaattggtgtatatggaacccaagaatcagagaataacaacaaccataatgataaagctttattgatcccttgctgtgtgccaggcataaagcaggctccacactcccggtctttatctccaatttgaagggcttatggccccaccccgccctgccccaccctccccagcagcctcttgctgcacgcatgaacctttcgctttgggtgcacagaggacagctcacgcacatgtgtccaccagccgtttcccagctccatgaatttgtggtgcattcccaggttgaggcagtgagcaccctgcacaggtkgggaggcttgtagaagtatgaagtgccttgacttcaatggaaggtggtgatcatcatttctctatcaccaatgggatgatgtgctttggaaaaggctttggaaattgc

SEQ ID NO: 518891 - DNA, 454 bp, Homo sapiens
cctgatctcaggtgacccccaacctcagcctccaaagtgctgggattacaagcctgagccactgtgcctggccttccttgcctttttcagctcctagaggccacccgaatcrtttagctaataatcccttccttgatgatacactccaacttcttgtttttctttatttctaaaaagcggttctgtaactctcaatccagagatgttaaaaatgtttctaggcacggtattagtaaatcaagtaaatttcatgtcctcttaaaggacaaacttccagagatttgaatataaatttttatatgtgttattgattgtcgtgtaacaaatggcccccacaaattagtagcttaaaatagcatttatgatgtcactgttttctttgccttttcattaatgttctgtacagacctatgtaaacaacttttgtatatgcatataggatagcttttttgag

SEQ ID NO: 518892 - DNA, 643 bp, Homo sapiens
gtcactgttttctttgccttttcattaatgttctgtacagacctatgtaaacaacttttgtatatgcatataggatagcttttttgagggtatacagctgtatacaaaagcagctgatattagttaagcttgtgtcaactastttttttgacttgtacatttggtactttttctggagggtgttgattaaagttgtatgtgcttagtatatgagaaaaaaactgcttctggctctgggcctctcacaaggtggcaataaaggtgttggcaagggctttagtcatctcaaggcttaactggagcccttgtgtacatgaatgtgcagagtgtgactcagtttccaagctcactcatgtggctcttggcagaagacataagttctttgtgacatgggcctctctgtaggacagcttacagtgtgacacctggcttttttcagagtaactgagcaaaaagccagagaggcagagcccccaagattgaagccacggacttttttttgagacagaattttgctcttatagcccaggcttgagtgcagtggcgtggtctcagctcactgcaacctccacctcctgggtgcaagcaattctcctgcctcagcctcccgagtagctgccacagactttttatgacctaatct

SEQ ID NO: 518893 - DNA, 643 bp, Homo sapiens
gtcactgttttctttgccttttcattaatgttctgtacagacctatgtaaacaacttttgtatatgcatataggatagcttttttgagggtatacagctgtatacaaaagcagctgatattagttaagcttgtgtcaactactttttttgacttgtacatttggtactttttctggrgggtgttgattaaagttgtatgtgcttagtatatgagaaaaaaactgcttctggctctgggcctctcacaaggtggcaataaaggtgttggcaagggctttagtcatctcaaggcttaactggagcccttgtgtacatgaatgtgcagagtgtgactcagtttccaagctcactcatgtggctcttggcagaagacataagttctttgtgacatgggcctctctgtaggacagcttacagtgtgacacctggcttttttcagagtaactgagcaaaaagccagagaggcagagcccccaagattgaagccacggacttttttttgagacagaattttgctcttatagcccaggcttgagtgcagtggcgtggtctcagctcactgcaacctccacctcctgggtgcaagcaattctcctgcctcagcctcccgagtagctgccacagactttttatgacctaatct

SEQ ID NO: 518894 - DNA, 643 bp, Homo sapiens
gtcactgttttctttgccttttcattaatgttctgtacagacctatgtaaacaacttttgtatatgcatataggatagcttttttgagggtatacagctgtatacaaaagcagctgatattagttaagcttgtgtcaactactttttttgacttgtacatttggtactttttctggagggtgttgattaaagttgtatgtgcttagtatatgagaaaaaaactgcttctggctctgggcctctcacaaggtggcaataaaggtgttggcaagggctktagtcatctcaaggcttaactggagcccttgtgtacatgaatgtgcagagtgtgactcagtttccaagctcactcatgtggctcttggcagaagacataagttctttgtgacatgggcctctctgtaggacagcttacagtgtgacacctggcttttttcagagtaactgagcaaaaagccagagaggcagagcccccaagattgaagccacggacttttttttgagacagaattttgctcttatagcccaggcttgagtgcagtggcgtggtctcagctcactgcaacctccacctcctgggtgcaagcaattctcctgcctcagcctcccgagtagctgccacagactttttatgacctaatct

SEQ ID NO: 518895 - DNA, 611 bp, Homo sapiens
tgtgctgttgccatgcctcctatctcataggaagagaggataataactgaactacctgccaggtagagattaaatccmtgaatacacacgaaatttcttggaacaacgcttgccccataaaaagtgctaacaatattcattaaatagttgggagtgttgaatggttttcatcctggttggaagtttttgtcaaggttggggataactgtctatttagtgagttctcctagaggctgtgctggaaaccctgcctcctgattctctcctaatgttattggggtggtaggaagctggctgaaggctgacaggaaccctactctctgtattatacataagctttccgttgatgagcagtagctacatgtttacaactgttagtctgctgacaatgcaggtaattgcacatcattttaatgtatgtatatttcatgtaccttactttacttaatcttctccattgtttaattcctaattttgcttctattgtaaatgatgagatgaacatcgttgtgtgtcaatattttttctataggtaatttccttaggacacatgatacttgaagtggattgattgaaaggcagcatagtctactaattaactcagactggag

SEQ ID NO: 518896 - DNA, 613 bp, Homo sapiens
atgtatattcagaaggagagaatagaaagaatgatggaaagaaagaatccaacagatagcggctgagattttytccagaattaaagaaaatcttgaatcctctaagaaagtccacagagggcaaagcacaataagaaaaaccatatatactataaaatcctgagcatgcaactaaatagataaaaggaaatacaccaaagtgtcagtaatgtttacccatggtgataggatttggagagagatttttatcttctttaaatttcaatgtatttcctaagtgctctacaatgaaaaggcattatttttatatgtctgcggaggagagaagcatttgtcatgtcaaatacacatatacagataaacagtttttttaaaaatctgccctcaaacgacttacactctggcagaagacatgaggcttgcataggaataacatagaaaacgaaacccaagtgataactggcatggatggatatagctaaaatctgagcctcgtcttttcctgcatggagcaattaggaatatggggagaagtgatggggggtgagagggttaaggacactgagcagaagtgtaaagatctagcccatattctgggcttaccagggactat

SEQ ID NO: 518897 - DNA, 613 bp, Homo sapiens
atgtatattcagaaggagagaatagaaagaatgatggaaagaaagaatccaacagatagcggctgagattttctccagaattaaagaaaatcttgaatcctctaagaaagtccacagagggcaaagcacaataagaaaaaccatatatactataaaatcctgagcatgcaactaaatagataaaaggaaatacaccaaagtgtcagtaatgtttacccatggtgataggatttggagagagatttttatcttctttaaatttcaatgtatttcctaagtgctctacaatgaaaaggcattatttttatatgtctgcggaggagagaagcatttgtcatgtcaaatacacatatacagataaacagttttttwaaaaatctgccctcaaacgacttacactctggcagaagacatgaggcttgcataggaataacatagaaaacgaaacccaagtgataactggcatggatggatatagctaaaatctgagcctcgtcttttcctgcatggagcaattaggaatatggggagaagtgatggggggtgagagggttaaggacactgagcagaagtgtaaagatctagcccatattctgggcttaccagggactat

SEQ ID NO: 518898 - DNA, 624 bp, Homo sapiens
ttcttggagtctagctgcatccgtgggatttgaccattcaaccacaggtttggcttctctgagccaactatttcttatttttggcttaaacctctttgggattttttttctaccatttatgtctagaagagtgtcttgtattaggcaataggacactcttagcagtccaaagaagggaagagctggagtgaaattagctgggtacggtggcatgcggctgtagtcctagcttgagcccaggagtttgaggctgcagtgagccatgattgtgccactgcactccagcctgggtgacagagtgataccttgtcttaaaataaaataaataaaaataaagagacccagcaagttagtgacttaggcagcttagagagcacctcctaatccttccacctcagtttacaactaaagttcaacatcatcaactaccttgtctcaggtatccaaatgatatggtttggctctgtccctacccaaatctcatcttgaattgtagctcccacacttgtgggagggacccagtggtaggtaaytgaatcatggggcaggtctttcctgtgctattcttgtgacagtaataagtctcacaagctctgatggttttataaaggggagttgccctgc

SEQ ID NO: 518899 - DNA, 495 bp, Homo sapiens
ctgctgcaggtcttcggacgcccctagaatctgtcttgatgtgaagtgggggtgggggtgggagggtcgtggccactggccctggtgagaaccaggtcttgcctctccaacccagaaatgaatggaaatgccttttgccttgtttctgaaaatggtgtacacaggagcactttggtgtgtgtgtgccaggaagcgctcagaaaactgagaagtaggctgtggggtggtggtggtggcggtggtggcatgtttggagatttacgagtaccatggggcacagaggtgggcccaggagcactggagacatatgcttcctattttcacaatgccagttttacctgattgttttgtgggaaaatgtccattttttcctcttatggtaagtgactaaaactatttctaaaaattattaaatgtgggtaggttctgraagaaaatgcaaagtttttaggtaaagcacaaaagggcagaaaaaatgtcatgcttcctctgact

SEQ ID NO: 518900 - DNA, 532 bp, Homo sapiens
aattcaaatttaacctgggcttcctacattttgtttgctaaatctggcaacgccagtcagtgaaaaataaaattcacttcacagaaaacccacagcatggctaatgtccatgagaatacctttaaagaaacacggcccttgatccacacagacatacactacatattataamtgcaggtcaaaattcttcctttaatgtgattcatgttattttaatgacttttaggtcaaactcagattcccagttacaggtgcccttggctagttttatctgtgtaacatttgaggctgcatatgtgatcatggtcttgggtttcatctgagatgttagaagccatgtctcttgaggtacttggctcgtgcaaggacatcattgcagaagtcacagctcaggtcctggctgcttcggacatagccagcacccccactgtaggcacagagtccacctgaaatgcatgagataggttaatgctgacctagggtactcagcagttaactctgattctctttactaactacctaacaggaggca

SEQ ID NO: 518901 - DNA, 685 bp, Homo sapiens
ttgtctatttttccctcataaaaaaatcttatagctatttttacttccatcatatagatgaagaaatggtggttcagagtgtaaacagcttacccaaggccacagagctgaaatttaagctggtctgtgcaactttttcttacgcatatgttcagctaggarcattagatgtgaagaaacccagtacttagattttagaaagttttattcttaatggagaatatagcttttgtaaaattttaaatgaaattaggtacaaacttgaatatagttagcattcatacatcagatttcattggtgactattggagaggctaaaagcacccatgaagaaattcagatgggaccaagcagggagtaatttgccagtctcaaaaatgctgttttaaggagcagttagacttgtagttatggaaattacagtgtagaatggtggacttttagcatcagtctttagcattaggcttgtaagagatgctctctcaagtggcatccctgacgctggtctcttactcttcatagtgttgtccagtgtttaccatcttattagttccctattgtctactaataagaatccaaattccttagcttgacattcaaggttcccccccacccacagcccactcatgtgagtcatctcattaaaagatcctacagtgttgtttcatcgtatgtttgaaagaca

SEQ ID NO: 518902 - DNA, 353 bp, Homo sapiens
ggatgggaggctccttctcacagtatgagaggctgcactcacaccasctgctcaagtgaccagcccccttcccaacccgtccctcctacccgacacaatctcccataatctcaaggttgccacatgctgcatgactagcagactagcattcctagacaaagtctgtaaactgcagcctccagcagcgtgtctctccctgcaacagatatcaaggggttagtttccactgttggaatatagacccacactgcacatccagcagggcaccctgccccagcatacttctctgtgggatgatgggagaatggagaagacctgcggtctcttccctcgataattcttccagtttccca

SEQ ID NO: 518903 - DNA, 608 bp, Homo sapiens
gctggctactctgggaaactgttttgcacattgactgagattactaagattagttccagctcacaatttcatcatttgaacatcaaggttaaacatcagaacatttcgcttcttcccgtcaaggcttgttgcaatgtcattatcttatgcaataagaagagataaattataaatacctatattctatggctcagaaggagtggattcattttagtgtgtggtatatggattcaatcttactagttcccaatcccacctcatatattactctttgttcaatacttttatctcaaatacaattcattgttcaattagcaaatgagagactgcatgtagtaattgtatcatatttaaagaaaattgctttgtacaggtatttagagaatcaaactagggagatasagttctcactatgagatgagatgaaaacgttgacaccagttctatcaggcactaaataaatatcaaggcaaaacactaaacaagaccaacttatcttttataaagtaaagggacaacagactcaatccataggtccttattttctcccccactgtatgttttgatattttcttgccaaatggatttaagggaatgtggatggagac

SEQ ID NO: 518904 - DNA, 379 bp, Homo sapiens
cacaaagtctcatttttgtctcttttgcttatgatacatcccaagcacctagaagacagactggcatacttacatatgttcagtgaacattyatttactattttattttaatttttttgacacagagtctcactctgttgcccaggcatgagtgcagtggcatgatcacgactcactgcagcctcaacctcctgggctcaaacaatcctctggcctcagcctcctgagtagctgggactacatgcatgtgctaccatgcccagctaatttcaataatcatttattgaataaatttctgaaataaaactttgtacaactagcaaggattgactagtggagccagtatccttcactttaagcagaaagaagatctgatttt

SEQ ID NO: 518905 - DNA, 470 bp, Homo sapiens
tgtcaaccaactttaagcgtttcgccccagtgaacttgttgtggaagtcttctctttcacagtgtgagaatgacagggctggatcagacaatagccccgagcatgactaamctgccctgggtgtgttttcggtcatgcgaatatgaacattggcattgagataagcagttctgcccgggccaggactgttcttcctactgtgtctcaaattcctttggagggtttccagcaggaaaatcactggaccctgaattgacactactcttaaccagcacattctgtgctggcattttagatctaactatagatctaaatgtagatgacactttgaaagtcattctctttgagaggcaacactttcccccttctttcctcctcttagacttttcatttctcctttgccttcctttaaccctctacaacacacacacataccctctgcctgggttccaaagctagcctcactgacc

SEQ ID NO: 518906 - DNA, 622 bp, Homo sapiens
tagttgtcttgggtgcccatgtaattgaagaaagaaagaatgcaaaaatattatatttttccaattctggcactaaaaaaataagattatgcaggaaaaaaaaaagactttcaagtcaggttatttccttgagagatttcccaaatactctgtctcctctttaacataccatagtcccagcctggaggatctagcttacagaattttcctgtgggctagagaagaaacctttactccctatgacagcaaagcttcaagacctgctgctacatggcagaagatacgacatcacaaaatagacaacccacccgttttttccccaaaggatggtgggaagaaggaagcagaatggaaaagaactaggaaagccaagtacagagatgatgtgtgttccaagcaccacccaccttaccccacccctgtcccgcccagcttagaggactgaagagaatgcagaattaggcatgggtagggctgcttttgtcctagttcccttgggactggtcggggacaggctcataggctgttctgcaccacccagagagaagctgtgtcacttggcagtacagtaggycaggagaagattgtggtggccccacgtggctctgtggtatttatatag

SEQ ID NO: 518907 - DNA, 591 bp, Homo sapiens
ctgtatattctggtcaggtcatatcttctgttttgtttcagacactgcatttaaaggacattaaaaaaaaaaaaaaacaatggccggggsgagtgggtcacacctgcaatcccagcactttgggaggcagaggcaggcagatcacctgaggtcaggagtttgagatcagcctggcccaacatggtaaaaccccgtctctactagaaatataacaaaaattagccaggcatgtgccaccacgcctgtagtcccaagctactcaggaggctgaggcaggagaattgcttgaacctgggagatggaggctgcagtgagctgacatcacgccactgcactccagccttggtgacagagcaagactccgtcttgggggccggtgtaggggaatagttgggccaggcttcctagcactttggtaggccaaggcaggaggatcacttgagcccagcagttcgagaccagcatgggcaacatggtgaggccctatctctacaaaacacttctaaaacaaaatttagaaaattagccaggtgtggtggtgcatgcctgtagtcccagctactcaaaaggctgaagcaggaggattgatta

SEQ ID NO: 518908 - DNA, 591 bp, Homo sapiens
ctgtatattctggtcaggtcatatcttctgttttgtttcagacactgcatttaaaggacattaaaaaaaaaaaaaaacaatggccggggcsagtgggtcacacctgcaatcccagcactttgggaggcagaggcaggcagatcacctgaggtcaggagtttgagatcagcctggcccaacatggtaaaaccccgtctctactagaaatataacaaaaattagccaggcatgtgccaccacgcctgtagtcccaagctactcaggaggctgaggcaggagaattgcttgaacctgggagatggaggctgcagtgagctgacatcacgccactgcactccagccttggtgacagagcaagactccgtcttgggggccggtgtaggggaatagttgggccaggcttcctagcactttggtaggccaaggcaggaggatcacttgagcccagcagttcgagaccagcatgggcaacatggtgaggccctatctctacaaaacacttctaaaacaaaatttagaaaattagccaggtgtggtggtgcatgcctgtagtcccagctactcaaaaggctgaagcaggaggattgatta

SEQ ID NO: 518909 - DNA, 362 bp, Homo sapiens
tccctgaggtctttcaatggcttcgattgccctgcgaatcagtactaaattcctatactacagtgctgcagggaagtctctcttgattgccctcagggctcctccacctaggaaacgtgctcagcctcgctggtgcacaaccaggccacttgtatctcagaattttatctctattaaggacgcctgaacatcttccttcatggagccggctgggctatctcttgtccctcatccaaaagaatcctaaaggccatctcatccacaaagcttttaaggatgtttaaacaccaaragattcctaccagtcatcaaagaacttcttccccatttataaccacacctatttgttccataatggacag

SEQ ID NO: 518910 - DNA, 594 bp, Homo sapiens
aaacaaacatatgtcaaagagcttatttagctcatcagttaatgatggaggcagtaaaatgtgaaaaccagtccaaggagcatttgaggagctaggtatttatatgtaatttcataaagaaatgttaggacaggtttgctgggttagatacaaaactagttaatgtccttcaggaccataaactataacctttgtgtaactaattgtctttagtcagataatctcatcctggtgagtgkgtcattctttccctgtaagatggagttagatttctttttgtccatattttgtgatgtgatatgtagttggactctagtaggtggccttgtttccctcatgtcagagtttggagacagcatgttgtgcatggcccttgccctcatgtggacaactgaatgcacctcccagagatgttgggggcatggtggtaagaaaccagtgtaaaaacctcagcacgtggtggtgtttgttcactccctgaaatccctttggaaaaaagggcataaataagtgagtgaacgaaagatccacacattttcttcaataaatgatgactgcttttatcatgaggctgcttgacccactcgcctggca

SEQ ID NO: 518911 - DNA, 594 bp, Homo sapiens
aaacaaacatatgtcaaagagcttatttagctcatcagttaatgatggaggcagtaaaatgtgaaaaccagtccaaggagcatttgaggagctaggtatttatatgtaatttcataaagaaatgttaggacaggtttgctgggttagatacaaaactagttaatgtccttcaggaccataaactataacctttgtgtaactaattgtctttagtcagataatctcatcctggtgagtggrtcattctttccctgtaagatggagttagatttctttttgtccatattttgtgatgtgatatgtagttggactctagtaggtggccttgtttccctcatgtcagagtttggagacagcatgttgtgcatggcccttgccctcatgtggacaactgaatgcacctcccagagatgttgggggcatggtggtaagaaaccagtgtaaaaacctcagcacgtggtggtgtttgttcactccctgaaatccctttggaaaaaagggcataaataagtgagtgaacgaaagatccacacattttcttcaataaatgatgactgcttttatcatgaggctgcttgacccactcgcctggca

SEQ ID NO: 518912 - DNA, 557 bp, Homo sapiens
tgatggaggcagtaaaatgtgaaaaccagtccaaggagcatttgaggagctaggtatttatatgtaatttcataaagaaatgttaggacaggtttgctgggttagatacaaaactagttaatgtccttcaggaccataaactataacctttgtgtaactaattgtctttagtcagataatctcatcctggtgagtgggtcattctttccctgtaagatggagttagatttctttttgtccatattttgtgatgtgatatgtagttggactctagtaggtggccttgtttccctcatgtcagagtttggagacagcatgttgtgcatggcccttgccctcatgtggacaactgaatgcacctcccagagatgttgggggcatggtggtaagaaaccagtgtaaaaacctcagcacgtggtggtgtttgttcactccctgaaatccytttggaaaaaagggcataaataagtgagtgaacgaaagatccacacattttcttcaataaatgatgactgcttttatcatgaggctgcttgacccactcgcctggcaggtca

SEQ ID NO: 518913 - DNA, 505 bp, Homo sapiens
tgtgcccccttcccaccagcacagcctgcgcatccctcagcccctcctctgtgccctcaccctgggaccgccctacatgtgtcctgggctgtactgtgccctttggagaaggcgccctgctgtctgtggtgctgtccctttcctgcagacaggactggcctggctggggtgactgagcccggggtaggtcgttgtcccactctgcttcagtttaacttcctgtaagaaggagttagtgaccctccatcagcgggactgacctgaaacaatgatgtggcgaacctcacgtgcccgctagcctcagcgtcaggaaggtgctgctctttgaccacaaacgtagaggctgggacagtgcggcctgtcagtgcgccgctccataggtgagagggatgatgatgtaatgcatctgcgctctctgctcagtctcgccaggctgaaatcagggtgctgsctgagtttgcgtctgcaggctctggggatgaatatgctttgaagctcattcagg

SEQ ID NO: 518914 - DNA, 607 bp, Homo sapiens
ctggctacccccttgctttgaggcttggcatatggttggcatatttctctagttcctgccactgatgccagtctcccctatctttaatttcactggtcactttagagaatattggaaggaggaggtttgttaactgggtccactgkctccatactatcattttgcccaggagtttcccgatcttggctcactgaaacctctgccctctgggttcaagtgattctcctgcctcagcctccctagtagctgggattacaggcgtgtgctaccacgcccggctaatttctgtatttttagtggagacagggtttccccatgttggccaggctggtcttgaactcctgacctcaactgatccacccgcctctgcctcccaaagtgctgggattataggcatgaaccactgcacccagccaaacacttgttgatagtggcatcttttaaaatttttttaatttttaattttttaattatttatttattttttagaacagtgtctcactctgttacccaggctggggtgcagtggtatgatcatagctcactgcagcctcaaactcctaggcttaagcgatcttcttgcctcagcctcccccagtaataggca

SEQ ID NO: 518915 - DNA, 607 bp, Homo sapiens
ctggctacccccttgctttgaggcttggcatatggttggcatatttctctagttcctgccactgatgccagtctcccctatctttaatttcactggtcactttagagaatattggaaggaggaggtttgttaactgggtccactggctccatactatcattttgcccaggagtttcccgatcttggctcactgaaacctctgccctctgggttcaagtgattctcctgcctcagcctccctagtagctgggattacaggcgtgtgctaccacgcccggctaatttctgtatttttagtggagacagggtttccccatgttggccaggctggtcttgaactcctgacctcaactgatccacccgcctctgcctcccaaagtgctgggattataggcatgaaccactgcacccagccaaacacttgttgatagtggcatcttttwaaatttttttaatttttaattttttaattatttatttattttttagaacagtgtctcactctgttacccaggctggggtgcagtggtatgatcatagctcactgcagcctcaaactcctaggcttaagcgatcttcttgcctcagcctcccccagtaataggca

SEQ ID NO: 518916 - DNA, 655 bp, Homo sapiens
gtgctcttgttattagattaggcccacaggaaaatctttcttttgactgactcaaagtcaactgattagacttcttagctacattggcaaaacccaatttgccatataatgacacataatcatggggtggtattccgtaatactcacaggttctgttcacactcatagggagggaatcatgcaaggtgtgtacatcaggggatgtgaatcttgagggccatctttgaawtctgcctaccacatttcaataattttttttttgagacagagtctcactctgtcacccaggttggagtgcagtagcacagtcttggctcactgcaacctctgcctctctggttcaagcaattatcttgccttagcctcccgagtagctggaattacagatgtgcactgccatgtctggctaatttttgtatttttagtagagatggggttttgccatgttggccaggctagtcttgaactcctgacctcaagtgagccacctgccttggcctccctaagtgctaggattacaggcatgagccactgtgcctggcctggaccccaatgatttatagcccttccaaacattccctagaatctaatcccattcagacatcattccaagtttaaaatctcatcaggtaaatcaggcccagatttggatgag

SEQ ID NO: 518917 - DNA, 655 bp, Homo sapiens
gtgctcttgttattagattaggcccacaggaaaatctttcttttgactgactcaaagtcaactgattagacttcttagctacattggcaaaacccaatttgccatataatgacacataatcatggggtggtattccgtaatactcacaggttctgttcacactcatagggagggaatcatgcaaggtgtgtacatcaggggatgtgaatcttgagggccatctttgaattctgcctaccacatttcaataattttttttttgagacagagtctcactctgtcacccaggttggagtgcagtagcacagtcttggctcactgcaacctctgcctctctggttcaagcaattatcttgccttagcctcccgagtagctggaattacagatgtgcacygccatgtctggctaatttttgtatttttagtagagatggggttttgccatgttggccaggctagtcttgaactcctgacctcaagtgagccacctgccttggcctccctaagtgctaggattacaggcatgagccactgtgcctggcctggaccccaatgatttatagcccttccaaacattccctagaatctaatcccattcagacatcattccaagtttaaaatctcatcaggtaaatcaggcccagatttggatgag

SEQ ID NO: 518918 - DNA, 634 bp, Homo sapiens
tgccccagcccaggtcagcctccgactggccacaaagaaacctgagccccaggttgtccgtcagctctgctctgtctaaccatctatgcttattgtagtttatttttcgttttaattttattccaaaaagggcaaaattattactttagttggcctgcaaataagagttaaatacttattaagttgtaaaaaggagtatgttataaaatgaattctaataggcttcttccctcaaaagaagcaatttaatgaatacagtttgacttctgttmaattaataatgtgcccaatcactcctgctttgcaagaagtgactatatgtagatgatattattgtaggaccacaatttttcctgcaattaactgcatatatttcctgacagactaatttatgtatgaatgctttttaaaagcaaaggcattttgcatgtaattgtattcctttttaatccatctgttgataaatttgcgtgtgtctctgtttattggctaatgcctccctctgctctaggacgacaggcacaggagtcaaaatattttggggatgaaataaataataaagggtaattgaaggccagatgtaggctgctgggaatgtctccatgggtgtggtgaatcccacagtagaactttt

SEQ ID NO: 518919 - DNA, 634 bp, Homo sapiens
tgccccagcccaggtcagcctccgactggccacaaagaaacctgagccccaggttgtccgtcagctctgctctgtctaaccatctatgcttattgtagtttatttttcgttttaattttattccaaaaagggcaaaattattactttagttggcctgcaaataagagttaaatacttattaagttgtaaaaaggagtatgttataaaatgaattctaataggcttcttccctcaaaagaagcaatttaatgaatacagtttgacttctgttaaattaataatgtgcccaatcactcctgctttgcaagaagtgactatatgtagatgatattattgtaggaccacaatttttcctgcaattaactgcatatatttcctgacagactaatttatgtatgaatgctttttaaaagcaaaggcattttgcatgtaattgtattcctttttaatccayctgttgataaatttgcgtgtgtctctgtttattggctaatgcctccctctgctctaggacgacaggcacaggagtcaaaatattttggggatgaaataaataataaagggtaattgaaggccagatgtaggctgctgggaatgtctccatgggtgtggtgaatcccacagtagaactttt

SEQ ID NO: 518920 - DNA, 566 bp, Homo sapiens
agtagcttagggtgccctcctgtcagggaatttgcattttattaggataattgaatactttgtgacccaaataaatgggaagctccgcggccacayagcctctgccaaaaggaaggaccccaggttctccttcagccatgaatgagactttgggatggtctttagcccagaaacacgacaccctgcagggcttctggggactcaggaaccagccccctggactctcagacggggaagtgcctctcccaacccctctcagaggcccccgtttggctttccatgctggagggaggcccccatcctgaccacagcccagactcccatagcccgcaccccaggggttcgcctaaaccccagatggcctccaagattcaggcgccaggcgaggggacagggcagggatgtgaggaatggtccttctcaggaatgtcaaattctcaaggacccctcttgctcaccaaggctcacccctgtccgccggcaggggagacacccctgtcacaggctgtgctcctcgcctgctggccccagtgtctgaatcactacctctcagcactgttagacac

SEQ ID NO: 518921 - DNA, 566 bp, Homo sapiens
agtagcttagggtgccctcctgtcagggaatttgcattttattaggataattgaatactttgtgacccaaataaatgggaagctccgcggccacacagcctctgccaaaaggaaggaccccaggttctccttcagccatgaatgagactttgggatggtctttagcccagaaacacgacaccctgcagggcttytggggactcaggaaccagccccctggactctcagacggggaagtgcctctcccaacccctctcagaggcccccgtttggctttccatgctggagggaggcccccatcctgaccacagcccagactcccatagcccgcaccccaggggttcgcctaaaccccagatggcctccaagattcaggcgccaggcgaggggacagggcagggatgtgaggaatggtccttctcaggaatgtcaaattctcaaggacccctcttgctcaccaaggctcacccctgtccgccggcaggggagacacccctgtcacaggctgtgctcctcgcctgctggccccagtgtctgaatcactacctctcagcactgttagacac

SEQ ID NO: 518922 - DNA, 547 bp, Homo sapiens
aggacaggagccaggaccctcaggagcttggcagtgggagtgggctgcccttctctctgagtgctgtccttaatgtgactttgtctctgatttcaggtcccggtgtttaattcctgataccaattcctgggagagaaaattgggttcctccagcttcgattaggtgttctcttgaggacctatgagcagttggcgrggtcgggggagaatcacatggctgcccagtgctcccaggtgtacagaaattcctagcagggtggaagcctggtgacaggggaaccccttaagagttgtctgttgtactcagctaatctttgtgggcaggaaaaacaatttgctatttgaaatcacagcagcctgtagccacttctgaatcctaaggaagtctcagaattcctctttggaatagatgagttttttgactgtgaatgaaagacaaacaccagggaaagacttggaaagtgtaggaatgagaaaaaaaaatctaaactgactttatcaataaaacaagaatttggaggttgccggggactggactgggtaaaga

SEQ ID NO: 518923 - DNA, 426 bp, Homo sapiens
ctgggagagaaaattgggttcctccagcttcgattaggtgttctcttgaggacctatgagcagttggcgaggtcgggggagaatcacatggctgcccagtgctcccaggtgtacagaaattcctagcagggtggaagcctggtgacaggggaaccccttaagagttgtctgttgtactcagctaatctttgtgkgcaggaaaaacaatttgctatttgaaatcacagcagcctgtagccacttctgaatcctaaggaagtctcagaattcctctttggaatagatgagttttttgactgtgaatgaaagacaaacaccagggaaagacttggaaagtgtaggaatgagaaaaaaaaatctaaactgactttatcaataaaacaagaatttggaggttgccggggactggactgggtaaagaagctc

SEQ ID NO: 518924 - DNA, 600 bp, Homo sapiens
acatgtcagaattattggccaaaaagatacatttccttattaaccggttttcatcttaatattagaattatttaatttttgcatcaaatgctaaaattatttgacaataaccamctattttatttggaatatagattcaccttcaaaaatcacaaggcctttaaaggtgagtcacagtgatagagtttgtaatgaaaaaaaaatactgaaccctgatgagtttatttattttttggccataagttcctttactagttttcctgtatttttactttctctccaaacaaggtattaaactcagttaaaaggaacagaataaagattcccatgtctcctgcaaaccttaccattactcagttttattaacctatattctctatttgagcctttaggggaaaagtgattcaaaagagtatatgaatgacctccgagttcagaactattgtgaggaaaccagttccgctccttatctcaggaagtctgacctctaaaacttccactgcaatatatatccctggagggtggcctttgacaatcccaaaggcccttcccatcccaccaaccaatatcaacaagaaacgttgaccttttcagctcagt

SEQ ID NO: 518925 - DNA, 666 bp, Homo sapiens
cagaggactccatacacttaacaagaatgagctatgcaggagagctggggtagttttttaattcttttcaatggatattaagggctgctggtattcagaagaaacaaaaagagctgtatggtccaaaaagatttcttggagaattttgggctggaaataagccttaaagaatgtgtggcaagtgagtaagaaagaagagggtgtctcaagcaagrgatgtttttccttgtgtctctctcctcactccccatcttacctactcttttatggtgaaactgggcaaacaaactgatcagtgaggcagagtagatgagttttcaagtttgggaatctgattgttggtttggattgctgtttgtcacccacaggctctgtgttcttgacccaaatttcaggtttgtcatctataaaataaggatgatgatgtcacttatctctgagtttttcagaggatttgttgtgatattcttaattaattcaacacatgtttttgagcccttagttcttggttctctgctaggcttggagaatgtagaagtggcacaatggatacatctttgtcctcaaggagcttagagtccagcaaggaaggcagatgcaattacataacatgcttcccagagttcctgggtcatagcaagtcttcagttttatattggtacgtat

SEQ ID NO: 518926 - DNA, 666 bp, Homo sapiens
cagaggactccatacacttaacaagaatgagctatgcaggagagctggggtagttttttaattcttttcaatggatattaagggctgctggtattcagaagaaacaaaaagagctgtatggtccaaaaagatttcttggagaattttgggctggaaataagccttaaagaatgtgtggcaagtgagtaagaaagaagagggtgtctcaagcaagggatgtttttccttgtgtctctctcctcactccccatcttacctactcttttatggtgaaactgggcaaacaaactgatcagtgaggcagagtagatgagttttcaagtttgggaatctgattgttggtttggattgctgtttgtcacccacaggctctgtgttcttgacccaaatttcaggtttgtcatctataaaataaggatgatgatgtcacttatctctgagtttttcagaggatttgytgtgatattcttaattaattcaacacatgtttttgagcccttagttcttggttctctgctaggcttggagaatgtagaagtggcacaatggatacatctttgtcctcaaggagcttagagtccagcaaggaaggcagatgcaattacataacatgcttcccagagttcctgggtcatagcaagtcttcagttttatattggtacgtat

SEQ ID NO: 518927 - DNA, 595 bp, Homo sapiens
ctttattcatcccaattatggcttattatattaaaacastatgatagaagagaaattacaatagtaggagtcagaaagatttgtccaaatctttctctaccaatattgaactgtagttactagattaattaaacacataaaattaaatttttcatcttgtttatcctgtagcaaaaggagccaacgggaacaacagcgatattttcttcccatttgtgtctgcatgcatgatctgaagcttgattccctgccagtcactagaaacacaggcatttctaccacactccttctaaagcatcatgacacaacgccttgtaactttcagatgtcctgacatgatcattgagattaaacataagaacactgctttcaggaagtcactttattttcccacttggaatgaagagcttcttgattccatatgcaaatttatgcatacagcatgtcaatttatggtctctagattctctgataatatctagtagccttattggtaatgaccattgttgctgtggggtttcactgagcagatctggacaataaaacctgtggccaacatgttttcaactggcaaatctgaagcactgccaggcta

SEQ ID NO: 518928 - DNA, 595 bp, Homo sapiens
ctttattcatcccaattatggcttattatattaaaacagtatgatagaagagaaattacaatagtaggagtcagaaagatttgtccaaatctttctctaccaatattgaactgtagttactagattaattaaacacataaaattaaatttttcatcttgtttatcctgtagcaaaaggagccaacrggaacaacagcgatattttcttcccatttgtgtctgcatgcatgatctgaagcttgattccctgccagtcactagaaacacaggcatttctaccacactccttctaaagcatcatgacacaacgccttgtaactttcagatgtcctgacatgatcattgagattaaacataagaacactgctttcaggaagtcactttattttcccacttggaatgaagagcttcttgattccatatgcaaatttatgcatacagcatgtcaatttatggtctctagattctctgataatatctagtagccttattggtaatgaccattgttgctgtggggtttcactgagcagatctggacaataaaacctgtggccaacatgttttcaactggcaaatctgaagcactgccaggcta

SEQ ID NO: 518929 - DNA, 646 bp, Homo sapiens
ggctggtggattgggttgattcccaggttcctggacagcatgctggggcagcaggggcagcagtgggcagggcacacctgtcctaaggtttcagaatggcaactgtgtggacccacctcattccccctaaaagtgcatggcaggtgcatagaaggtctgctactggagggggcagggttgctgtcagtggcagcagccccaggcaggtggctctcaagatctggggagcacacacttttgctccctttgtcctgggggcggcttccccaatgcactgcaccatccattcatcaaagtgcctatttagtttgcctattgagcaatccagcacatatctctctttatatgttcttcattttattacatgttgtcctttactgtccactaagaattaaagagatatttagaaaggctaagtgctagatagattgatagagagatactgcttcatttaatttcattttgaaaataatactgtaaggaaaatactatccgcattttaagtttgaagaaaaagactcagagcataagtaaattttattttataagtgaagctttgattttattttatctggctgactrcaatgctatttctcttctatacattgcatcaacatggattaaattgggaatagcctcttatagt

SEQ ID NO: 518930 - DNA, 475 bp, Homo sapiens
ctgcatgactcctaaaccgtaatttctaatcttgtggctaatttgttaatcctacaaaggcagtcaagtaccccggcaagaaggagatttgttttgggaaaaggccactttcatctttgttttaaactataaactaaattcctcccaaagttagtttaacctacgcctaggaaggaacaaggacttcttaaaggttagaagatggagtcaattaggttagatctctttcactgtcttagtcataattttgcaaaggtggtttcatacctaatttataagttaaactttatcataggtatgtgtgtacaggaaaaascatagtatctataggattcagtactatccatgatttcagtaattcactgggagtaacggaacaaatccctggcagataagggggcatactgtatttctatctcaaggaaaaaatctatccgatatcaaccacattgaatttttttccctataatctcct

SEQ ID NO: 518931 - DNA, 582 bp, Homo sapiens
gaagcttgcctaaggcagtgagatatgtatatgtggaaacatgagatgcctctctcactagctgtgttgcttgggaaatattggtgcttggctgcctgaaaggcaaaaggtagtctggctcaatagcaaaaagrgagtcacagtttaatcagacgccaaaaaagaacaacaacaaaaaagactgaaggctatcaacatcacccttttcttgatatttggatttagttgaataagactggatttcggaacactatgcaaatttcagttcactgttctgaaaaacatctttctctgcagaccccaagattccataggctttcttagaaggctctaaggtagtaactgcatgtaatatctcagccatgccagaacccaccctcatgaccgaatgaaatcaattacaggcatgtctatgaaaacaaggtgttggagaattgaactaagttcaaaaagctcgcacagagggctttttggcctatccccattctcttgtaatcagttaagtatcttacagacattccgcacatctattgagcctgaatactgctgttatcatctcaaattgcagattcaacttggcag

SEQ ID NO: 518932 - DNA, 590 bp, Homo sapiens
gtggcattctgagaaaaaagacagtgtatgtgagttatgcccagataaatggccgcatttttacctgtgagaaacagtaaataataatttgtccatttgacaytgaatttactatttaaattctgtagaagacatagcgtaattatagagttggagtatatttccatataacaacattaagcattgaaattatatgcttattaatgaacatctataaggcatgtatgtttattaagttctatttgtatatataatataaaatcttctttttcttgctggtgtcttttgtgttttcatagaaaaactcccacactcattaaatagctgtctattatgatatctttgagagaaggcggctgtatcttagcctccccactgagtgaagtctcattataatttgtctctttatgtttccaaaatgctgggctcacatgcttaactcattaatgagactggaacgcatctcataatagctggtttgtcgcactaaagccacacagagtttaaagaatgttgcagtttaatccattggtgcaggaaatgcatttgcaatgtagttggccaattggggcaagattgataaaagaaag

SEQ ID NO: 518933 - DNA, 590 bp, Homo sapiens
gtggcattctgagaaaaaagacagtgtatgtgagttatgcccagataaatggccgcatttttacctgtgagaaacagtaaataataatttgtccatttgacactgaatttactatttaaattctgtagaagacatagcgtaattatagagttggagtatatttccatataacaacattaagcattgaaattatatgcttattaatgaacatctataaggcatgtatgtttattaagttctatttgtatatataatataaaatcttctttttcttgctggtgtcttttgtgttttcatagaaaaactcccacactcattaaatagctgtctattatgrtatctttgagagaaggcggctgtatcttagcctccccactgagtgaagtctcattataatttgtctctttatgtttccaaaatgctgggctcacatgcttaactcattaatgagactggaacgcatctcataatagctggtttgtcgcactaaagccacacagagtttaaagaatgttgcagtttaatccattggtgcaggaaatgcatttgcaatgtagttggccaattggggcaagattgataaaagaaag

SEQ ID NO: 518934 - DNA, 425 bp, Homo sapiens
aaattgtcctccaaaaatgtatcaatttattcttaaaagaacagggcagacaatgttggctgggtgcagtggctcatgcctgtaatcccagcactttgggaggtcaaggcaggcagatcacttgaggccaagagttcaagaccagcctgaccaatatggtgaaaccctgtttctactaaaaatacaaaaattagctgggcgtggtggcacacaactatagtcccagctactcaggaggctcaggcatgagaatcgcttgaagccaggagstgggggttgcagtaaggcgaaatcaaaccactgcactccagcctgtgtgacagagcaagactgtgtctcaaaaagaaaaaacaaagcaaacaaaaaagatttaaaggtagatgatgtttttactttcacacccttgctaatactgcatgtcatca

SEQ ID NO: 518935 - DNA, 532 bp, Homo sapiens
gacaagagcagcagagggtcagattcagagagagatttagaatgctgctggcactgaagatggagaaagaggccatgagacaaggaatgcaagaagctgaagaaaagcaagaaaayggattcttcaatagaatctctagaggagacgcagagccactgatatcttgattttggtccagtgaaaaccgtgtctgatctccaggactgcaagataatacatttgtgttctcttaaaccactaagtttgtgttaatttgttacaacagcaataggaaacaatgcccttattatccagtgatccctctcctagggataaatccagtgaaactgtttcactggtcgatgtaatgatcttaaaatatatcataaattctttgaccctactcctttaagaggtggatcctaattcctctctttggtgggctggacttagtgactcatatctaataaagagaatacagcagaagcaatggtgtgtggcttctgagtctaggtcataaatggcctttctgttagaatcattgagggaagcc

SEQ ID NO: 518936 - DNA, 429 bp, Homo sapiens
caagctagtcccttggcttagaaggaccttctctccctttacttcccattgacatcccatctacctrtggaggacttctatctgcctgctccctctttgggtaatgaaattagtaactctaagttttctttgacaatctacccttctcatgcaactcagtccatgtggtttgtgtggaaatagttacagaataggtaaataatccacacttggccagtcagagcctatattcacctacccatagtgatttgttcaaagatatgcaggtgaccccagcaggcctactaccatcagcccaggactgttgctagcaattctgggaaagggatctatttccactgagatgctagtttggcagaaggtaagcctacatttgtgccaacctgagaatatgagttaagccaataggaaggcacatagagtcccaag

SEQ ID NO: 518937 - DNA, 429 bp, Homo sapiens
caagctagtcccttggcttagaaggaccttctctccctttacttcccattgacatcccatctacctgtggaggacttctatctgcctgctccctctttgggtaatgaaattagtaactctaagtttyctttgacaatctacccttctcatgcaactcagtccatgtggtttgtgtggaaatagttacagaataggtaaataatccacacttggccagtcagagcctatattcacctacccatagtgatttgttcaaagatatgcaggtgaccccagcaggcctactaccatcagcccaggactgttgctagcaattctgggaaagggatctatttccactgagatgctagtttggcagaaggtaagcctacatttgtgccaacctgagaatatgagttaagccaataggaaggcacatagagtcccaag

SEQ ID NO: 518938 - DNA, 502 bp, Homo sapiens
agaatggagataaagaagagaatgcaaagaaatgaggctgggatgataggcagtgactrgaacaaatgaaaggctttgtagatgatgtgaagggtttaagacttgatccaaagaactatgagaactactgaatggttttaagatggatacaagttattcttctcacatgcttactttgctatgaaatgggtagggagtttctcatatatataccttgaaatttgcccataaaattcataatctagtcctgaaaaaaatatttatttatccatctatttagtcaatgaacatttattgagaggtttcagttgggaataaataaatgattgagagattaaatgaatgaatgagcctgtgtcaagcaatctgattggcactggagagacacaaacacaagattcctcctcttgataagctcacagtctagtggggaagagagacacacaaaaaacagacttccttgttaacccagagaaatatgagcaatgtgctttaaaagtgt

SEQ ID NO: 518939 - DNA, 626 bp, Homo sapiens
caaatttattagagaagccagatctattagaatcaattatgtagatttagataattttgatatttccatgtatgctatccaaagacacatcttaaccagatttgtgtgtgttgactttgcctgcagtgtagaatggatcctgtcatctgtttactgttggtgggtattgaactatattgatgttccaatccattgcatggctccatgaacaaaatttgaatctggctcaagccgggtgttggatgggtggcagaagcagaggaagggtgttagcagagctgaagcaaggaaagagagaaggaaatgctaggtgtgctaagaactgccatgttgttgcttggctagagcattgggcaaacggagggcagtcctgagaggtgtgtcccagagccatgagcccgtcctcaaggcctgagctcctggctgggagttgctaacttygttcaggaggcaattgagccagtgaccggttttaaacagaaagaaggataaacacactaggcatggccagcacctttgaattgttttccagaaaccaaggtttggcctggcttccaacatttggcagaatgaaactttggagaaggaaaggaacagtggaggcccatggctcagattatgtgctt

SEQ ID NO: 518940 - DNA, 619 bp, Homo sapiens
agtctaccactctcattttgatagtgatgaaaaccaaacccagagcaatgattaaatgccattccacgaaactcacacaagtgtctgactagaacttgactctcctcayttccaaattaatagttagtattaaaatgataccaaagaacctcacttttttaaaagagaaaaaaaatggatgattatggcttaagagatttttctcttaacaacaataataaaagttttttagctagaaatcatgaaacttgaactagcatgtcccaaacatcaaacagaaaaaggctgctcctgtggaaagaatgcaaaggcaacatggcactaagaggctgatgattcctgcaaggacaaagtctcagaatacaagtgacaaactgtgttcgcacagtttcctaggaacttaaagcactcggtagacaattttttttatcacaaataattcttacattggacttgttattactgattccatcttactgccatggagacaaaaactgaaagagaagtgtccggtttgtgataatgaaggctgtagtgcatacagcttaggggctgaggagctgcctcaacttctgttaagatggcttgcccagtggcggtcgcctgtagtccctcccag

SEQ ID NO: 518941 - DNA, 643 bp, Homo sapiens
ttctaatattttctagtatagttatctttatttcagttggttaagtatcaattttcttatctaatatcctgaagcacttctctctaccacctgtcttatttttatccatctctaggtataaagtttttgataaagaaaagtgtcattagacactaccttctctttatcaaaggttttccagtacgttaataaggcttctctctgggaatgttttacaaatttcaaattggataatcaatttaaaatatatgcaatccagcaaagagacagcaaataccactaacgctcttcacttggtttggccaaatcactcacctgggaaaaagtagaaatacaccaaaatgcatttagaaaaatgtctggactctcagagccccagtgtttccagacaaacwctgacagttttagcttttcctattaccaaggcaaaaggttttgcttttgattctcagctttacaggtttcttttacctttgtcaacctaagttttccatatttgttaacctcttttaaagacatgccatgtacagtagcgcttcctggctagcatgcccatcttgttccccagcccactgtgcaggccttgatcattctttaaatcccagatcctagttccctcttccatgaatcttcccagaccttc

SEQ ID NO: 518942 - DNA, 695 bp, Homo sapiens
atacgtggtattttattgtacatttaattccaagaattttcactccttctcaagaagatataacaaactggaaaactatgaaaatgtatttggtgaaagcctaggagtgatattctcatttaagctgtttccayttttttccctcttcagattttgaagcactgtctttaaaactgtaacatacccagaagggttggcagaattgggactggaataaaataggatacaatttgtaaaatcatcttcatatatttgaataaggtatgcttccccctctcaaacttactctgtaaaatggctcttatagcagttgttaacaccatagtgtgaatatgaggcaatgtgctatctctctgagtaatatttgcattttggatctcatttctaattgtggaatgaaataatctgttccagataaaagaattttaagtttaagcccagaaattatttttaagctctacttgatcacctttttttggtagcttgaagggaagactcacagaaaagtattttttcttgagagaatattctcttcctgccaattttgctttacaaaactacattgttttacattatgtatgttaatcaatgcacttggagactgtagggagctggaaggacttagagctggaaggactttaaagtttatcgaattcaataccctcatccagagtttttaaaataataaatctaca

SEQ ID NO: 518943 - DNA, 544 bp, Homo sapiens
agaaagagaatgcagatctgtttgggctagtatgctaaatttagctaatggttaatttggtccatcctcaagataagatggaagaaagatatattaataagttgaacaggtatgaaaaagatgggctagggacactcaacagcttttaagttctcttgaaattcacttccataaaaacagtttcattgtttataactatttgacagaagattacctctagctccaaaaggaccaatttttagtgaaagcaaaatactaacatccattaatgcagataactaaaatccaaccactatgcaaatgatggtgtttaatttatctgccatgcccaatttttgctgaaattattctgtccacakttccctgcatgagagctagcactaggctgctttgtgcataaggatgtccactgattcaaccagcaatgaagacaacaagcccaccaggaaccagggagctcctttctgagagaggtggttgtgatccctcatggatcataaatagagtcagaatagggaccatgttggatcatgcccagaactgc

SEQ ID NO: 518944 - DNA, 514 bp, Homo sapiens
agaaagcctctcaagtaagagcctgctctactttgagtggatgttttcatgaagtcaaaatgccttgatgagagaagagcatgctctatagtttccatgtgttcaatcctcaaagtgcttaaacttttaaagaaaatgtttcygggtaaggaaatgataaaaggccttaggtgtggagagataaagatgaattttgaaattcagaaataaattaagtcgaaaaaattgaaaaaaaatcaaatttattttgtctttgtttgccctaaacacatgaatagatataatctgatgaaagcagtgccaagtactccagcaatagcaccaccaccataaagaaatgacatctaattctgtaagttatttgggtttttaatttatgtaaacactatctgttagtatacttcaccttgaactataatttattgaacaattaaaaatgccaagatactagtcaaggagatctggagtagaagttctagtagacccctctagctatgctggagatagttgcaat

SEQ ID NO: 518945 - DNA, 556 bp, Homo sapiens
caatgtaagtttatcatggaagtgggtaccccaytcatggctaaaaagtcctactgacaagcctgatgagtaaagagacagccatacacttttgtttttatatatgtacatatttatttttgtttttaagttttaaagcaagccatatactctttagaaaaattttaagaaagtagaaatatatgaacactgaaacaaaaataattctacatcccccagcctagaaacattcactgctaacactgtggcatacagcagacacttgaaacttgtgagtggacatactgagcacatgaaaaatggacacattcacccatcccaccatagcctataagtcacctctgaaaatagagtaaattatagtggaaaatttaagtgcccacttcagagcactaaaaattccttttaattttttacttgatgagtaatttttgcattctctggaatacaggcagaaaaagcttcatgagttagtttttgtcactttcagggtagaaaaaatggtgaactcattcatcaggttcccaacttccataagaaccatccctccatcgct

SEQ ID NO: 518946 - DNA, 612 bp, Homo sapiens
gaaaactttttgaactgtagagactgaatttgacaaagagactgtatctttaagaatgagtttcaactagggtatatggaagctggtgtgaaagtcaaattgcaagacgtgaaggaatgagtgagtgaaaaagaatgcaatgcatggaggccggccgcggtggctcacgcctataatcccagcactttgggaggccaaggcagacggatcacaaggtcaggaattagagaccagcctggccaatatggtgaaaccctgtctctactaaaaacacaaaaattagctsggcatggtggcatgcacctgtagtcccagctactcaggaggctgaggcagaagaatcgctttaacccaagaagcagaggttgcagtgagccgagatcgtaccattgcactccagcttgggcgacagagcaagactccacctcaaaaaaaaaaaaaaaaaaaaaaaaaaaaaaaaaaaaaccatagtgcatggaaacaactaactgatgaaattttgcaccgagagagggagaaagagaggcagaaaatgagcaaagacaagagagagctttctgtttttatctcttggtaatgaaaataaaaacttatgtaaacaggttgggtggg

SEQ ID NO: 518947 - DNA, 613 bp, Homo sapiens
  misc_feature (1)...(613): n = A,T,C or G
gtcccttttgaatgtcttcattttagcaatggcgccagtaagtgggcttgtagccaagaacagagaagccaccacaataagtgctgaagtgcagtttcatccagtgggatgtatacacatacaaaaagctgaaaaaaagtcgcatgaagcagaactccatgatctgaagtcaccagtaacagtgggctggcagacttgctagctttaagygattcttataagtaaaattgtaattatgcctttcagaaaaacatggagacatgaaacaagagtttctggcattctatttcaagtcgttctcatttccatgccattccgtattctcaattaggtctttcccaagactttgattacttccctttttgaagcgttgggggagagtagatttagtggttctagcattaaaatcttatcccttcacacgtatccatctttaaagttattctggaagcnatcagccagagagaaccagcactgaaagccaaagagaagtggcactacctgctttgggcagggactcacagccccttgtctctgttgctttccagatttataatcttcaaaagcaccagcttcttgatttccaatctgatgggatttagcctgattcaaa

SEQ ID NO: 518948 - DNA, 648 bp, Homo sapiens
  misc_feature (1)...(648): n = A,T,C or G
nnnnnnnnnnnnnnnnnnnnnnnnnnnnnnnnnnnaaattaattctttatgatcagtgctatctggaatcaatactaaatgaattcataatgataagatacttaaaataaagagttaccacaaaaacaataaaaagaccatcatcatcccaactatagcacactaataaagttttagctcaataagctggtgctatccatgacaatcaatggcagatacttaatttatttctgcttgtctctgtcttgcttttcctgtaagcgctgtgtaaagcatgctgctttgattctactgtaaattgtgtagggagaaagaaatacagtactcttattattcaataattttgctgtagcatttactttgcatatcacctctgccaaagaactcatggcaaattatacacaccaatctagttccaaatggattcctttttgtctctatttcctcttcatgagaaccatgtaawcttttctgaatcttctttcctctgtcatagataaagatatttgtagtatgtatagggttaaagactagaagatggctacactggtctttacattttcactttttcattttaataatgccaaaagacactgtgtggatggaaactaatgactctattatatctatcctttactgtgcattaaa

SEQ ID NO: 518949 - DNA, 655 bp, Homo sapiens
ctgcaaatccaatttttccttagggtttcagaaaatgtgagttattgatgtataaaaaatcaaaagtatagaaggatatgtgttttggttgataggtgcagcaaaccaccatggcacatatatacctatgtaacaaacctgcacgtkctgtacatgtatcccagaacttaaaataaaaaaaaataataataaaaagaaaaaaataaaataaaaatggaaattagaagtgtacccccttgttcagccatttccagaaaaatagtatatttcatgtacttaccaataaagctattttgatgatcacataagaaaatgtaagtatgcaaaaccatatataaatataaagcattattgtgtgaattatttaaaaagggtaaacttccagtaaaaattaaaactttttgaacattaaatttatttttattactaatgtatatattttccaaagaaggttattaagtaagatatttgtttctcagagacttagggggaaaaattttgtctttaattagaggccaaaaattatgtttccactctaacaagtggtcagattatattatttcctgtatgtctaagaatctggcaatgaatttcattttcctatgaatttttatactctttagtaatactctgtaaactacttttgttttatttt

SEQ ID NO: 518950 - DNA, 600 bp, Homo sapiens
cggcttcattatgacccagttagatcctttcttactgtgttatacattcagacagatcaacatttattcttatctttctccagtgcataattataaactgaaaaagcaagatattaaatattattaaatattaaattactatttttcttatatttgtgtcagtattaaagtgacatcttgccatagttataaacttccayaaacagccaaaatgatttttctccatgtttagtttggcttaatgattgtttgagcaagaacactatctggattttgccctgatggcaaaagttagaaatggaaacaacttagttgtctacagaaatgctgagtctagacatcaagcttggttgtattaccaggaaaaaggataaaaaagatattgatctaatactagctcgagactgggatccccagcatatatgcaggattataatttgttgttattgagtgattgaatcacagaactgaaaaagagagaacaaaattgtgtgaactgggcaatgtatagctccaaaaaagtaaagaaaataaaataagcaattgtgtcttagccatcttcataatctatgaacaagacatttaaatagactactatat

SEQ ID NO: 518951 - DNA, 653 bp, Homo sapiens
tgttgtctagaaactcaaggaagaattttaagtttaaaaggatagaagcattcgctaaggataaagttaagctcagattcaagccattcaatgaaatcggaracaattgcaaaacaactatggtgaagaatgactgacaacccctgttacggtttgaatgtgtccccccaaaaacatgtgttgaaagtttgatccccagtgcaacagtgttgagagagtggggcctagtgagaggtgactaggccaagagggtaaagtgaatgaatgaatgccattattgcaaaagtgaattgattgtgaaaggcagaatttagcccccttttacaattgctctctctgtgctttttatctcatgatgacacagcaagaagcacctcactagacgatggcccttcaatcttggatttttcagcctccagagctgtgagaagtaaatttctatttattaaaaattacccagtcccaggttatctgttatagcagcacaaaatgcacagactcccaccataagagaaagaggcagttttttggaggaaaagctttgagcagatcttataagatgtcagccctaaaagtaagccatgtgataggttctctttagagaaacaatgtgagttaccaaaaagcaagctttttgcaaagggtagtaatcg

SEQ ID NO: 518952 - DNA, 653 bp, Homo sapiens
tgttgtctagaaactcaaggaagaattttaagtttaaaaggatagaagcattcgctaaggataaagttaagctcagattcaagccattcaatgaaatcggaaacaaytgcaaaacaactatggtgaagaatgactgacaacccctgttacggtttgaatgtgtccccccaaaaacatgtgttgaaagtttgatccccagtgcaacagtgttgagagagtggggcctagtgagaggtgactaggccaagagggtaaagtgaatgaatgaatgccattattgcaaaagtgaattgattgtgaaaggcagaatttagcccccttttacaattgctctctctgtgctttttatctcatgatgacacagcaagaagcacctcactagacgatggcccttcaatcttggatttttcagcctccagagctgtgagaagtaaatttctatttattaaaaattacccagtcccaggttatctgttatagcagcacaaaatgcacagactcccaccataagagaaagaggcagttttttggaggaaaagctttgagcagatcttataagatgtcagccctaaaagtaagccatgtgataggttctctttagagaaacaatgtgagttaccaaaaagcaagctttttgcaaagggtagtaatcg

SEQ ID NO: 518953 - DNA, 653 bp, Homo sapiens
tgttgtctagaaactcaaggaagaattttaagtttaaaaggatagaagcattcgctaaggataaagttaagctcagattcaagccattcaatgaaatcggaaacaattgcaaaacaactatggtgaagaatgactgacaacccctgttacggtttgaatgtgtccccccaaaaacatgtgttgaaagtttgayccccagtgcaacagtgttgagagagtggggcctagtgagaggtgactaggccaagagggtaaagtgaatgaatgaatgccattattgcaaaagtgaattgattgtgaaaggcagaatttagcccccttttacaattgctctctctgtgctttttatctcatgatgacacagcaagaagcacctcactagacgatggcccttcaatcttggatttttcagcctccagagctgtgagaagtaaatttctatttattaaaaattacccagtcccaggttatctgttatagcagcacaaaatgcacagactcccaccataagagaaagaggcagttttttggaggaaaagctttgagcagatcttataagatgtcagccctaaaagtaagccatgtgataggttctctttagagaaacaatgtgagttaccaaaaagcaagctttttgcaaagggtagtaatcg

SEQ ID NO: 518954 - DNA, 596 bp, Homo sapiens
atgcatatgttaactagctcaggttaggcatttcacagtgtatacatgcttcaaaacatcattttgtagccttttctttcctttaacttcaatctttcaatattaaggcaagcagttcctggaaacctttacatctcgcctgcaagaagcacagctttgaatcttatcaagagatcagaaattctggtaaactgtttgggtctttaaagtccaggaagtgccggtctctggctagtgttccaggaatgatgacatatatgcagcagttstgagaacctacagatatgtgggcacttttctcccctctgtaactaacatataacctaatttcctaatgctaagtctattaggccgatgttccttagaccctttgcttgagtctttaaaactgaatttgacaaagcatttaaaaattataacaatggaaaaatattccataccagaaattagagtattacctacaaaatctttttcaattctcatttcatgtgatttaaaaactggccttatgtgatattcataatagactttttttcgaataatgaaagactgcacattttgttagaatcattattttgacagtgtatggatttcat

SEQ ID NO: 518955 - DNA, 667 bp, Homo sapiens
ctggaaaagttaggttagttcaaaagggtaaaattaggtaagtgagatcatggaattaaggtcttagcacaatgaaaaaggagaactttggaaccataaaayagtagaaaaatgacaagaagtagaatgtcatggaattgctttgcaagcgaaattaatatggctatgtaccaaaaatgaaagagcaagaacatattctatattttttgagcttcttaaaagcattctaactatcatagctcttgtgagcgatgcaacaatacaaaagaggaaggaaggtaaaggaggagaaaagaaataagaaagtcatttttaaactctgttcagtggccttgggagtcaaacacataaactatgcaaacaatttcctaaatttggtgagatcacctactttatttcactatcaattctgggcctctcttggccaccacttttatgcttttgtttcatattttatgaaagttttattttgttatctaagtagtcagactttaaatggaaaaataaattagcaaataaagaaatgtgttttatttacttttcttttctcacttctctcatattctctctccctcttattcactcttcctaaaaaattagacatattcatttcttcttccaaaaaataactaacaatttactctatcacttatagaactaatcccag

SEQ ID NO: 518956 - DNA, 667 bp, Homo sapiens
ctggaaaagttaggttagttcaaaagggtaaaattaggtaagtgagatcatggaattaaggtcttagcacaatgaaaaaggagaactttggaaccataaaacagtagaaaaatgacaagaagtagaatgtcatggaattgctttgcaagcgaaattaatatggctatgtaccaaaaatgaaagagcaagaacatattctatattttttgagcttcttaaaagcattctaactatcatagctcttgtgagcgatgcaacaatacaaaagaggaaggaaggtaaaggaggagaaaagaaataagaaagtcatttttaaactctgttcagtggccttgggagtcaaacacataaactatgcaaacaatttcctaaatttggtgagwtcacctactttatttcactatcaattctgggcctctcttggccaccacttttatgcttttgtttcatattttatgaaagttttattttgttatctaagtagtcagactttaaatggaaaaataaattagcaaataaagaaatgtgttttatttacttttcttttctcacttctctcatattctctctccctcttattcactcttcctaaaaaattagacatattcatttcttcttccaaaaaataactaacaatttactctatcacttatagaactaatcccag

SEQ ID NO: 518957 - DNA, 650 bp, Homo sapiens
ttagttcaaaagggtaaaattaggtaagtgagatcatggaattaaggtcttagcacaatgaaaaaggagaactttggaaccataaaacagtagaaaaatgacaagaagtagaatgtcatggaattgctttgcaagcgaaattaatatggctatgtaccaaaaatgaaagagcaagaacatattctatattttttgagcttcttaaaagcattctaactatcatagctcttgtgagcgatgcaacaatacaaaagaggaaggaaggtaaaggaggagaaaagaaataagaaagtcatttttaaactctgttcagtggccttgggagtcaaacacataaactatgcaaacaatttcctaaatttggtgagatcacctactttatttcactatcaattctgggcctctcttggccaccacttttatgcttttgtttcatattttatgaaagttttattttgttatctaagtagtcagactttaaatggaaaaataaattagcaaataaagaaatgtgttttatttacttttcttttctcacttctctcatattctctctccctcttattcactcttcctaaaaaattagacatattcatttcttcttccaaaaaataactaacaatttrctctatcacttatagaactaatcc

SEQ ID NO: 518958 - DNA, 618 bp, Homo sapiens
taaaactaccagaaacttcagattcattataaatctgaaaatgaatttgtcaatgttcgatcttattaccttatttatatcagatagctatttagagtttacaaaacactttcacaaaagattttctatttgatataatcataatatatctgagatagaatttttgcattgaaattgccttatgtgtaggttaaaatagtcaaatattgtcaatttygtattcttcaacataatgatacccattttagagaggagtaaacccaggcataaaaaataattttaaaaaacccttattactaatatatggccaccaaattcatttgcaaaattaatagacaaaagtcacatcatcaaagccttttctattaaattctcaacaacaaaaaataaactagaaatgaatatccttcattgagggtttgagtacattacaaagagcaagtatttcatataaagtaaattgcttttgtccatgccttgatttgtttaaaaagataatttcaaatctgaaattccttgcctgtcagtgggttaaatgtctgctcttcctcctagaacctctgtcactcaatgaagagttgtaataagtggaaggtacccatactgcagcttatttct

SEQ ID NO: 518959 - DNA, 618 bp, Homo sapiens
taaaactaccagaaacttcagattcattataaatctgaaaatgaatttgtcaatgttcgatcttattaccttatttatatcagatagctatttagagtttacaaaacactttcacaaaagattttctatttgatataatcataatatatctgagatagaatttttgcattgaaattgccttatgtgtaggttaaaatagtcaaatattgtcaattttgtattcttcaacataatgatacccattttagagaggagtaaacccaggcataaaaaataattttaaaaaacccttaytactaatatatggccaccaaattcatttgcaaaattaatagacaaaagtcacatcatcaaagccttttctattaaattctcaacaacaaaaaataaactagaaatgaatatccttcattgagggtttgagtacattacaaagagcaagtatttcatataaagtaaattgcttttgtccatgccttgatttgtttaaaaagataatttcaaatctgaaattccttgcctgtcagtgggttaaatgtctgctcttcctcctagaacctctgtcactcaatgaagagttgtaataagtggaaggtacccatactgcagcttatttct

SEQ ID NO: 518960 - DNA, 618 bp, Homo sapiens
taaaactaccagaaacttcagattcattataaatctgaaaatgaatttgtcaatgttcgatcttattaccttatttatatcagatagctatttagagtttacaaaacactttcacaaaagattttctatttgatataatcataatatatctgagatagaatttttgcattgaaattgccttatgtgtaggttaaaatagtcaaatattgtcaattttgtattcttcaacataatgatacccattttagagaggagtaaacccaggcataaaaaataattttaaaaaacccttattactaatatatggccaccaaattcatttgcaaaattaatagrcaaaagtcacatcatcaaagccttttctattaaattctcaacaacaaaaaataaactagaaatgaatatccttcattgagggtttgagtacattacaaagagcaagtatttcatataaagtaaattgcttttgtccatgccttgatttgtttaaaaagataatttcaaatctgaaattccttgcctgtcagtgggttaaatgtctgctcttcctcctagaacctctgtcactcaatgaagagttgtaataagtggaaggtacccatactgcagcttatttct

SEQ ID NO: 518961 - DNA, 593 bp, Homo sapiens
tgcattagttatttttgatttagtgctttrgatttcttcaggacaatgtgcttttcctttgtcactaaagtactttgatccagtaatcttgagaccatgatagagtacatgcatgacaatggcatacgtgattcaatcctttgggaagaagatgtagtcatatcccaagtgagtgtgaaattgtattcctccctctctcactttagtatgagacaaatatgcttgctgcctcatttttaattgaaaacttttagaatatctagcaaatgttttgaaagagaatgcatagagacccctaaataaaatttggagagtctgtagagggaaaatgttatacagtacaacgttgtggggatttggaaaagccctaagacctttcttttcttattccttttcagtttagaaggctttattctctcttttaggacaattgagtgaaaaaaacttacggatgattttaacaggtcacaaatatgtttcctggttttgaacaagggcgtctatattatctcaaaattgtgttaaagatggagcatttagcaaccaggaagacaatgagtgtaaaacacaaaattaactcatcaagttactgt

SEQ ID NO: 518962 - DNA, 565 bp, Homo sapiens
agaggcaattctatttttatcattttatttcagtatttattgaaatcaaatttttgaaatatttcttaccttggtattttatgatctatgctgaagtacatgtcaacagtggctgtatttgagagcctgcttcatccatttgatgccaaaaaaaaaaggtaactctaaatatctttttaaggattatatgattcacttatatgactggaaaatttcaaaacaacttaggatttgtgaacatcatccagagtgcagtagcattcttaaaaataaataaataaagcctctttttctttacaataaaggcaataaacataattggttgtcaataaaaggggaattatttaaaagacttgttttaygcagtgtcactgcttggctgctcactcagtgtggttcattatattggcttgtctcacttgtggcagcaacagaattcaatcttggcttcatttacagattgactaattaaattgggatataagtacatttgcagaagctgggccatagcacacacattctctctctctcttaaaaagttcagctggtgattgaaaacaagagg

SEQ ID NO: 518963 - DNA, 565 bp, Homo sapiens
agaggcaattctatttttatcattttatttcagtatttattgaaatcaaatttttgaaatatttcttaccttggtattttatgatctatgctgaagtacatgtcaacagtggctgtatttgagagcctgcttcatccatttgatgccaaaaaaaaaaggtaactctaaatatctttttaaggattatatgattcacttatatgactggaaaatttcaaaacaacttaggatttgtgaacatcatccagagtgcagtagcattcttaaaaataaataaataaagcctctttttctttacaataaaggcaataaacataattggttgtcaataaaaggggaattatttaaaagacttgttttacgcagtgtcactgcttggctgctcactcagtgtggttcattatattggcttgtctcacttgtgrcagcaacagaattcaatcttggcttcatttacagattgactaattaaattgggatataagtacatttgcagaagctgggccatagcacacacattctctctctctcttaaaaagttcagctggtgattgaaaacaagagg

SEQ ID NO: 518964 - DNA, 565 bp, Homo sapiens
agaggcaattctatttttatcattttatttcagtatttattgaaatcaaatttttgaaatatttcttaccttggtattttatgatctatgctgaagtacatgtcaacagtggctgtatttgagagcctgcttcatccatttgatgccaaaaaaaaaaggtaactctaaatatctttttaaggattatatgattcacttatatgactggaaaatttcaaaacaacttaggatttgtgaacatcatccagagtgcagtagcattcttaaaaataaataaataaagcctctttttctttacaataaaggcaataaacataattggttgtcaataaaaggggaattatttaaaagacttgttttacgcagtgtcactgcttggctgctcactcagtgtggttcattatattggcttgtctcacttgtggcagcaacagaattcaatcttggcttcatttacagattgactaattaaattgggatataagwacatttgcagaagctgggccatagcacacacattctctctctctcttaaaaagttcagctggtgattgaaaacaagagg

SEQ ID NO: 518965 - DNA, 576 bp, Homo sapiens
gctaaatgtttagctcccacttctatgtgagaacatgtggtatttggtttcctattcctgtgttaatttatttaggattatggcatatgtatcccctgtatctaaaataaaatttgaatttaaaataatagtaacatagcaaaaagttgggtagggggacttgtttgagataagacaatacaactaaaaraaactcacaaaattgtatgtaaatttcttagaaagactttggagtatgtcaaccagacaacactaagaatcgtgactggtggaactatcagtgcaataaagaagatgacctagctctgtcattttactgctaaaacagcaatagttttaaaaatgacttaatgcctgttgacttatttgaacatgaaatgaatggaatagtctctcttattgtgtttcctcttctccgctagattcagtctatagttcaggttttatttggtctatagttattcttaattggttgctgaaatttaaaaattgaacagcaatgtaaaaatccagattcatactttatctttaaaatttctagaaagcaagggtctgaattattcccaaaacaataat

SEQ ID NO: 518966 - DNA, 654 bp, Homo sapiens
gcctttaagtaaagatgattatcttcaatactttggtggacctgatttaatcaattaaaagaatttaagagcagaactgtgatttcccccgaggaagaagttccacctgtggattacsgcatcagctcttgcctgagagttccagccttcccttccggattgcctgccctacagatttcaatctaactagccagactcacaagtgcctaaggcaatttcttaaaagaaatctctctatatttatatatcttactggctctgtttccctgatagaattttgactaatacagtatccaaaattcttttggagaccacttctctgccagtttctgtctacttgatttgggtaaaactccaatctgagtctatctcagaacttgagagcttcaggtaggaattttttttttttttttaactattggacccaaatgaaatttgagccattaaatttccttttttttaaagcttatttgggtgaagttttctaacacaactaaaaactactcattttataaatattcatggttgaggcaaatggtaactggaacacctaccatcactacaagaaaaacagaagtcaaatgttctactgtcaataagtgtattgaggccattctaaataaattgtattatctgtcatgaacctagtaagca

SEQ ID NO: 518967 - DNA, 654 bp, Homo sapiens
gcctttaagtaaagatgattatcttcaatactttggtggacctgatttaatcaattaaaagaatttaagagcagaactgtgatttcccccgaggaagaagttccacctgtggattaccgcatcagctcttgcctgagagttccagccttcccttccggattgcctgccctacagatttcaatctaactagccagactcacaagtgcctaaggcaatttcttaaaagaaatctctctatatttatatatcttactggctctgtttccctgatagaattttgactaatacagtatccaaaattcttttggagaccacttctctgccagtttctgtctacttgatttgggtaaaactccaatctgagtctatctcagaacttgagagcttcaggtaggaattttttttttttttttaactattggacccaaatgaaatttgagccattaaatttccttttttttaaagcttatttggrtgaagttttctaacacaactaaaaactactcattttataaatattcatggttgaggcaaatggtaactggaacacctaccatcactacaagaaaaacagaagtcaaatgttctactgtcaataagtgtattgaggccattctaaataaattgtattatctgtcatgaacctagtaagca

SEQ ID NO: 518968 - DNA, 408 bp, Homo sapiens
gtgtctggaaccagaatatgggttccctttatcaggaagtgctctaccctggtgcttgcccaaagatggcaagatggagcaggaggggcggatggctgaagcctgctatgctgaagtgggcaagtgcctgggaggccggaagccacctgtgatgggagctcagggtgacaagatgctcctatgggtttgtagtatttaaggccagaaaargagttcaactgtagtgaagttcttttagggctggaaggaactagaaataccaaatagcaacttgtgcaaattacttttctgtataaataacatatggcctgtttcttttaaagttgctggattttcaaggccactacattaaagcaagggccaaggcacgagtgagggcttcacacatagatccccaggaataaagca

SEQ ID NO: 518969 - DNA, 513 bp, Homo sapiens
ctggctggggcggggtcctggtgacaacagagtggagtggaagaggctgaagtgatggcaggggaggtttcccttcctacacctttggtatagtacaggccttgccccatagtagatattcaattagtaggtaaataaacatagatcataaatgagtcaatgaataaatatatctttatttttctatttctcacttcttgccttctctaaacacatttcattttctcttttccctgttttcaaagtggaaagcttggagttgtgggtctgagtttcacgatccctcttggagcatcttcaagatgcatgccctgtaaattgatcgctttgaaacctgatccagcagagctcaatttttgaaacygtatttgagagccccatgatatatgattctctgggaaaaaaaaaaactctcaacttgaaacacatacactgagattttttttcctcctatctttttacgtcattggaaagttaacaacccacttgttaacttcaccttaccaaacagca

SEQ ID NO: 518970 - DNA, 415 bp, Homo sapiens
gctgtaatttaagaagctttctggagcatcaaaatgggaaactaagaaagctaagatgagggaggcgtgttttccattttcacaaagtggctgtgcctctctccatccctgtggcttctgcccacagccaaatcttcatgggatctgcaggcgtgttgaaactcctcacaagtacacctcccccrgggagcagcaccaagccacaggcctgcctgaactgtgcctctgctgatgaacagcctctgctgcagtcactctagaattttttttttttttgccttttataaggaacacacacagtgtaataaccatctggcccctttatttctcagtggagctgcgtgtgttcagtgctgaccttgctggccctgcatttggctggaagcaatcctcttattaaatcagaaaccagatg

SEQ ID NO: 518971 - DNA, 433 bp, Homo sapiens
ctgtgcctgagttctcctgctctctcccaatacttgcaactccctcaaggcagtaagctggagcaatcataggactcatcacatttgggtttcagttgccagggatctctgtccttgtttgcttaaggccttatgcccaaacactgttacatcatatatttggtccatttgttattgtttcttatgggaggataaatctggctcctgttactttatcttggctggagscagaaatcccaaagcatcacttctgtactgtaattcttggtatgtttatgtgccactagaacactttagttaaactctcactaaagtttatgttctgtatccaaatagcagcaggaactatcattctcttcatatctaccacgtgacaggcattgatgtattcttcccaggttttatggacaatcctgtgatatgaacattgtta

SEQ ID NO: 518972 - DNA, 536 bp, Homo sapiens
ttgccccagctacagcatcccattcattcggacacgctgcctccctcacccttttctgcatttgaaatatgtctttcttctacaataatcatgatttttatttcttaacagttcataaaacagatgtcttacagttaatagtgtcaatttcaataaacagaatccgagccttgattttattatatgtaaaatgctaaagatgatacttaactcacagaatccataagagaaaaagcaagataacatgtataatacatatgccaaaaaaacacagatgttattattgcatattataatcatcgagtatctgcaattgatgtgtcagactagcttaaagcccacmgtgctgagagtgacattttttaacaaatttactgttaacctagacttttgctttgtcactcttgaacatagtcaatcatccattgggttgacaaatggtctccattttccacacatccatccacccatccatctattcatccatgcatccatccagtcactccattaatatttgttatcttttcactttcttt

SEQ ID NO: 518973 - DNA, 638 bp, Homo sapiens
gagcagttttagccccagttttcctctcatttgctgtgtgactttaggtaaatcgcccgtcctctctgagcttcttttctctaatctttaaaatgtgaatgttaacagtacttacttcacagcgcactttcaaggatcagagacaactctggaaggaccacgtacatgtattgtcacacagtttgcaggtgacagaggaagtgcccattagcactgtgtggtgcatgtttggggccatctgagatgccctgtttccatctgcactgactctccaaggccgaggatcgtactgattccaagggaaatctgggagcaaggctgtgtgcacaaytttatattctgtgcccagaacaaaggctcctggcagaggagctgagtgggagctgaaacccagcccgcgtgccccttgccaagccatgctccctggagcagagctgcatctgtctacgggagggggcaccattttgcttacccaaaagggccatctgcacaccacaccaagtgcctgtgggatgacatccaggtgggaactgggcagacaggaggtgccttctcctaatttgtataaagtttctctatgggctagtggcagccgagctcctgaacactgaaacaactcctgaagttcacattcatgg

SEQ ID NO: 518974 - DNA, 479 bp, Homo sapiens
ggaccacgtacatgtattgtcacacagtttgcaggtgacagaggaagtgcccattagcactgtgtggtgcatgtttggggccatctgagatgccctgtttccatctgcactgactctccaaggccgaggatcgtactgattccaagggaaatctgggagcaaggctgtgtgcacaattttatattctgtgcccagaacaaaggctcctggcagaggagctgagtgggagctgaaacccagcccgcgtgccccttgccaagccatgytccctggagcagagctgcatctgtctacgggagggggcaccattttgcttacccaaaagggccatctgcacaccacaccaagtgcctgtgggatgacatccaggtgggaactgggcagacaggaggtgccttctcctaatttgtataaagtttctctatgggctagtggcagccgagctcctgaacactgaaacaactcctgaagttcacatt

SEQ ID NO: 518975 - DNA, 600 bp, Homo sapiens
gccactttaatcctgggtctgggaatcaagtccttacctggatagccttcctggtgcctgcccacctgagcgtgtgcctgggtcagctcacctccccagcctcttagagcacgacccattatgatgctctttcctctctggctggacctccctgctgagaacgtatggaccagcattccctctggacactattcagtctggcagacagcacctcctttccccagagtcgccgacctgtctcgtctgccctgcttaggtcactaactcactctttcaaaaaggactgatgtagggcatcacctcttcttcatccagcatgtcacagggcaggcaagaggaccttgtcacagaggtgttgcctgttaggtcctctggaagcagatgtgaggaggcactcactgtgccagagggttatcaggggtagacaccggtgaacaggaggacmagcaggcaggactgagcagacaaggaacccaagctgcactgcaggcccagcaaagcctcgtcagccccctggggagctctggagtggatttgtctagcagaactgggccacgatggctgagttgaagcccttgccttgatcactcattgaaagtg

SEQ ID NO: 518976 - DNA, 652 bp, Homo sapiens
ttcttcaaaagtgaaaactgaatctcaccttctcggtagacactaaaccagaaagcgagtttcagatctatattttgaagtgtttcgtgaagcactccactggaaatagagatgcctttgctttttaccaaatgcacagagtagccggtttctaagctctggaggtgatcctgtttttttcagggatgtggttccaaggggtaacattgagctttataaggaattctcttacaaatgttgttttcccaataactaatggtcccattcaaacctgagtacattgccttttaaatttctaagtggtttaataatagaaccgctccattaactctgacacatgcttgggaatcaagcaaagaaatgaagagacggctrgaaaaacaagcaaccgcagccgtgtgcgctcctgagtcctaaatgctagcgagctcagcggctgagattttatatcaaaaagccatgaccgggagctctttgtctgtgtgggtcacagaaggatcgtcctaacttctctgctcctcccaagccagccccctccttccctacagaaaggccatcctccactccctcccgtcaccgcacccactatctcctgctttcttcccctaagagttcaggcgtccctcctgctgtttcaaacactccctggcct

SEQ ID NO: 518977 - DNA, 652 bp, Homo sapiens
ttcttcaaaagtgaaaactgaatctcaccttctcggtagacactaaaccagaaagcgagtttcagatctatattttgaagtgtttcgtgaagcactccactggaaatagagatgcctttgctttttaccaaatgcacagagtagccggtttctaagctctggaggtgatcctgtttttttcagggatgtggttccaaggggtaacattgagctttataaggaattctcttacaaatgttgttttcccaataactaatggtcccattcaaacctgagtacattgccttttaaatttctaagtggtttaataatagaaccgctccattaactctgacacatgcttgggaatcaagcaaagaaatgaagagacggctggaaaaacaagcaacckcagccgtgtgcgctcctgagtcctaaatgctagcgagctcagcggctgagattttatatcaaaaagccatgaccgggagctctttgtctgtgtgggtcacagaaggatcgtcctaacttctctgctcctcccaagccagccccctccttccctacagaaaggccatcctccactccctcccgtcaccgcacccactatctcctgctttcttcccctaagagttcaggcgtccctcctgctgtttcaaacactccctggcct

SEQ ID NO: 518978 - DNA, 555 bp, Homo sapiens
aggctttagctttctctaggaatagcacaagaggcaaggcattttttggaagaggatcagggtgggtttgcaattccagagaagtaagggtgaggtgaaagggaagtgagtccagaaaagggggaaagcaaacacaaagcaatgcayggctgggccggccacagctccctaagaaagatggagctgacttcacagtcacatggatgtcactggggaagccatctgaaccactgcattacagaacaacccattagggtggtggtgggagatgtgctggaagggcaggaaattcatcagccagccccttctgctctcctggctctcactggttaaagctcaccctcatggttggtaacttctccatgaggctatgttgaatcactgagtgcctctggggaaaccagaaccatgcactgtgttccatttgagaccagaagctgtaggaggagccaggtcatgttctgctgtaggagctgccagccgttcccaggcaggtgggctcagctcaagcagcctctgtgctagaggcaagtctgtacggtacagtctggggcc

SEQ ID NO: 518979 - DNA, 470 bp, Homo sapiens
gcatgctggaggctggagcaggtgggygctctggctgccatccaacaaatggccccacgcggaggctgggcaaatccggaggggcaaatcaggacagattccatctccatatgttgtggctctattttggaaacgctgatcagcttgttacacctgtaaccatggatccctgccattcaccagtggatattttgaatgcatgaagttgatctcacgagttttctaaaccattgagctgacaggtgtgggctgtgacctgccacactctcctgcttggcacctggtgagagccagtgctcagatggaaaccacccttcttgcagcccctcctgaggaatcctccccatttcacatgggacagtctttgccaagtcagtacttaccattcctaactctgaggtgcagacctgcaatttgaaagccctacgaggaaatcagcgttgttgcaattgcctttactgtgctcaaaa

SEQ ID NO: 518980 - DNA, 481 bp, Homo sapiens
gaaaacagagcaggtgtgtgtctgggtgtgtccccttatggaaarggaggccacctcccgaagtttggtgtgtttcagacgggaaggagaaggcacggccacaatttattgagaactggaagtttgatttaagggggggggcgtttcaaatgaggaaatctgatcagcactgggtaacagccatgatgcaacagtcagtctggacatggtagacagaggaaggtgaggattttgaggcaaagaattcaaagactacctgttgatgttttccatcagagagtagatgagtctttccagaagttcctataagaactatcaagccatctgcctgggcttgatggtgactcctgggaaaataaagtcgtgctgatgaagacaggaataacatcaagtgaggttcatacacacagtagggtgttttggctttcagtgtccatgcccagtgtggggtagatgctctggttcttactggttggagtgg

SEQ ID NO: 518981 - DNA, 553 bp, Homo sapiens
tgtccgagtacctgcagggttaagttcaaattgcatcctagtctgagcttaatgggcttctaaatacccattcattcactcagttattcaaatatttatcgagctcttatggcacatgtgtsgaaatgcacacacacacacatacacacaccaccctaggtgtggggacagggttcatattctagtagataatatgttttttgtaaataataattaacagtttggggtaatgaccttaacaagaggggtatatgtattatacaagagtggtgcttcctgaatttctccacagggggcgctgaggggcggcatctggttggaagagggaggggctgcatttgcctagaagcccagccttcactcactcaggtttgcatcggggtgtctgatgaatctccctcagcagatagagccccaatagctactcctttgtatcgtcatgaaatacaaggtgctgtggaacccgggagtttgcagatacctgggcaggcccaggagaggctggtgcattaaaattataccgctgggatttagagagatcaatgtcattgaa

SEQ ID NO: 518982 - DNA, 553 bp, Homo sapiens
tgtccgagtacctgcagggttaagttcaaattgcatcctagtctgagcttaatgggcttctaaatacccattcattcactcagttattcaaatatttatcgagctcttatggcacatgtgtcsaaatgcacacacacacacatacacacaccaccctaggtgtggggacagggttcatattctagtagataatatgttttttgtaaataataattaacagtttggggtaatgaccttaacaagaggggtatatgtattatacaagagtggtgcttcctgaatttctccacagggggcgctgaggggcggcatctggttggaagagggaggggctgcatttgcctagaagcccagccttcactcactcaggtttgcatcggggtgtctgatgaatctccctcagcagatagagccccaatagctactcctttgtatcgtcatgaaatacaaggtgctgtggaacccgggagtttgcagatacctgggcaggcccaggagaggctggtgcattaaaattataccgctgggatttagagagatcaatgtcattgaa

SEQ ID NO: 518983 - DNA, 479 bp, Homo sapiens
gcaacctgcctgtcccaggagcttgcgggctagctagacctttgctgcctagaagaccctcttgtgagtcccctccctgggctcagcaacccgggagggcatgacttctggctgggtcttagggctggagccttggtgtcctcttgtcttctttccttgtgtgacttggttttccagtctgtgaaatgcggtgggtgcatccaactccaagcctgtctctgccctgggtcctggagcctggaggacgaatgaggtcatgtttttctaggagctagagcatcttggatggagaaacctcggcaaagacaaaggcccattgtcccccttccccggccttctgccagctccytccccagtcaccagaggaggccagccctgcccaccccacagcccccagaggctgccaggcgccaatatggggtaactcagcgccccctcccttgccattggttgacgatgcctggaatcccaccatcaga

SEQ ID NO: 518984 - DNA, 487 bp, Homo sapiens
ttcccataagggatacttttggttaatttaatatcttatagaaacaatgctaatgactggcttgctgttaataaatacgtgggtaaatctctgttcagggttctcagttctgaaggctgtgagacccctgatttcccccttcacacctctatatttctgtgtgtgtatctttaattcctctaccgccgctgggttagggtctccctgaccraactggtctcggcagaattcctcttgctgggatataaacctgtatcctcttgttctgtccccagagaagagatgtcacaagtctgttcatgtattggaatactattatttatcttttcggcagacttattttctgcaagttgttttggcttttcttctataactgcatctgggtaacctggcagtgcagagccaggccctgggcttcaagacagggacacaccaagtctcagcacacagacatgtccccactctgctacccagcagcctagggagt

SEQ ID NO: 518985 - DNA, 589 bp, Homo sapiens
gggtgtggtggcacgcatctgcagtcttagctactcgggaggctgaggtgggaggatcacttgagcacaggcagttgagacttcagtgactcgtgatcgtgtcactgtactccagcctgggtgacaaagtgagaccctctctctcaataaataaattaataggcacctccttgtagttactggcctcctctcctttgttcccccctctccctcactccaccctgttagtctgaatgttagtcattcttcaagacacatgcagaaagtattccctgatcccttccaggctccacacccaacagcatggcctaaatgcccggctccttcctcggtgctccatcttagctcacattccttaccacactgttttgaaagtatcttgactgycccttctcctcaactggctaacttctagagagcagaaacatgactgcttggaaggtcattaaaaattcaaatcctgaacatttcttaatcctgcggatatgaatcagtgactcttaaaagcaaaatgttatttatcattaaatattaacaatataatcacattttcttgcatctctggcaagtttcttggtacaacaatttt

SEQ ID NO: 518986 - DNA, 482 bp, Homo sapiens
acttaccttttcgtctgttccagccttgagcttgttagggaaaaggactagactttatttatttcactgagcttgttggggaaaaggactagacttgatttctttcatgtaacctagagcagttgctgaatgagcatgagaggatcccatttgaaatctgtagtgcatgaagagccgtccatcctgtagctatgtgagacctcagactgatttggcrtatttagtctctaggtctaaaatctttagatcctcctgaattaatggagtaataaccttcaggtatagagaaatcttggagaatatctagatcattctaatcctctcttgaattgcagactccagcgggaggaagaagaggcctttgccagcagtcagagcagccaaggggcccaatccctcacattctccaagtttgaaggaaagaaaaccaacaagaagacccgcaaggttaccacagtgaagaaatcttcagtacgtcttcc

SEQ ID NO: 518987 - DNA, 482 bp, Homo sapiens
acttaccttttcgtctgttccagccttgagcttgttagggaaaaggactagactttatttatttcactgagcttgttggggaaaaggactagacttgatttctttcatgtaacctagagcagttgctgaatgagcatgagaggatcccatttgaaatctgtagtgcatgaagagccgtccatcctgtagctatgtgagacctcagactgatttggcatatttagtctctagktctaaaatctttagatcctcctgaattaatggagtaataaccttcaggtatagagaaatcttggagaatatctagatcattctaatcctctcttgaattgcagactccagcgggaggaagaagaggcctttgccagcagtcagagcagccaaggggcccaatccctcacattctccaagtttgaaggaaagaaaaccaacaagaagacccgcaaggttaccacagtgaagaaatcttcagtacgtcttcc

SEQ ID NO: 518988 - DNA, 482 bp, Homo sapiens
acttaccttttcgtctgttccagccttgagcttgttagggaaaaggactagactttatttatttcactgagcttgttggggaaaaggactagacttgatttctttcatgtaacctagagcagttgctgaatgagcatgagaggatcccatttgaaatctgtagtgcatgaagagccgtccatcctgtagctatgtgagacctcagactgatttggcatatttagtctctaggtctaaaatctttagatcctcctgaattaatggagtaataaccttcaggtatagagaaatcttggagaatatctagatcattctaatcctctcttgaattgcagactccagcgggaggaagaagaggcctttgccagcagtcagagcagccaaggggcccaatccctcacattctccaagtttgaaggaaagaaaaccaacragaagacccgcaaggttaccacagtgaagaaatcttcagtacgtcttcc

SEQ ID NO: 518989 - DNA, 482 bp, Homo sapiens
acttaccttttcgtctgttccagccttgagcttgttagggaaaaggactagactttatttatttcactgagcttgttggggaaaaggactagacttgatttctttcatgtaacctagagcagttgctgaatgagcatgagaggatcccatttgaaatctgtagtgcatgaagagccgtccatcctgtagctatgtgagacctcagactgatttggcatatttagtctctaggtctaaaatctttagatcctcctgaattaatggagtaataaccttcaggtatagagaaatcttggagaatatctagatcattctaatcctctcttgaattgcagactccagcgggaggaagaagaggcctttgccagcagtcagagcagccaaggggcccaatccctcacattctccaagtttgaaggaaagaaaaccaacaagaagacccgcaagrttaccacagtgaagaaatcttcagtacgtcttcc

SEQ ID NO: 518990 - DNA, 418 bp, Homo sapiens
gctgcttttggatcaaacgattggcttaagaccctttaactcgaamacctgtcacatcctaggatccgcgaaggactgaaacagagtttctgaagcgtccctcggcgcagtggctccgctccacctcccattcgcgcttccaccgtggcctcggctccaggagtcgccgcggtgccggctacgccctcccgctgctgcgcatcgggagccggaagtagggactgagccacagactaggaaacgttggtttctccggggctccccagcgccccagctttagcgcggaggctaccctcttctatttgctcttgggcgtcagagcggcaccctactctgtgtaagcctttggatcccgctcgcacttcctcccgtcatcagccaaaggcccggaagtgatgtttgcgcgccgtggttacgg

SEQ ID NO: 518991 - DNA, 518 bp, Homo sapiens
cagctgcttttggatcaaacgattggcttaagaccctttaactcgaacacctgtcacatcctaggatccgcgaaggactgaaacagagtttctgaagcgtccctcggcgcagtggctccgctccacctcccattcgcgcttccaccgtggcctcggctccaggagtcgccgcggtgccggctacgccctcccgctgctgcgcatcgggagccggaagtagggactgagccacagactaggaaacgttggtttctccggggctccccagcgccccagctttagcgcggaggctaccctcttctatttgctcttgggcgtcagagcggcaccctactctgtgtaagcctttggatcccgctcgcacttcctcccgtcatcagccaaaggcccggaagtgaygtttgcgcgccgtggttacgggcgtgcgctggcggtgcgggtggggcggggcaagcagggggtgtgtgtgaggctggagcggactggggaaccagacctgccgagcgacgtgggcgagc

SEQ ID NO: 518992 - DNA, 561 bp, Homo sapiens
agagcttcccaaagtggacaccagcggggactattcctgatgtcccacccaagagaggaagatgagctgaggcgctsttgctctgcccaaatgcatcccatgtgcattcacgtgtcacccattcaaaataacatggcattcttggaaccttgtatctgacatgtaagaccagcctacacattggggtgggtgcaggggctcacacttgtaatcctagcactttggaaggctgaggtgggcagattgcttgagcacaggagttccagaccagcctgagcaacatggcgaaatcctgtctcttcaagaaataataataataataataattggctgggtgtggtggtacatgcctgtagtcccagctactcaggaggctgaggtgggaggattgcctgtgcccaggaggtcgaggctgcagtgagttgtaataaggccactgcactccagcctgggcaacagagtgagacccagtctcaaaaaaaaaaaagtctacaccgtcattggtcattgtctccttgggtcatctggcctgtattgtatttaggatcatttgtattagga

SEQ ID NO: 518993 - DNA, 561 bp, Homo sapiens
agagcttcccaaagtggacaccagcggggactattcctgatgtcccacccaagagaggaagatgagctgaggcgctgttgctctgcccaaatgcatcccatgtgcattcacgtgtcacccattcaaaataacatggcattcttggaaccttgtatctgacatgtaagaccagcctacacattggggtgggtgcaggggctcacacttgtaatcctagcactttggaaggctgaggtgggcagattgcttgagcacaggagttccagaccagcctgagcaacatggcgaaatcctgtctcttcaagaaataataataataataataattggctgggtgtggtggtacatgcctgtagtcccagctactcaggaggctgaggtgggaggattgcctgtgcccaggaggtcgaggctgcagtgagttgtartaaggccactgcactccagcctgggcaacagagtgagacccagtctcaaaaaaaaaaaagtctacaccgtcattggtcattgtctccttgggtcatctggcctgtattgtatttaggatcatttgtattagga

SEQ ID NO: 518994 - DNA, 646 bp, Homo sapiens
ggaactgctgggtcctgggctgattctgtggttagttttttgaggacccactaacagcgactgcatcatgctatattcctccctgcagagtgtgccagttacgattcctcagcattctcgccagcacgtttttgttgtgtgtgtgtgtttagttacggccatcctagagggtgcgtgcatggcctctcctagcctccacatgctccactcatgtggctgcgactaaagcttccctgtgttcacggacatcatgaagatcaaacgaacatgagagtgtttggaaaatggtcacaggttagactgaatatgaggtgttgttgcttctctgaaaacaaaaggtgggcaccgtggctgctcgggggatggggcagccacatggggcagttgcacacagcagaggcccagcagcccctaaccctgcccggtgcagcctcctcctaccactgccggggctctcctgccctcaggagactccrgcaagtgactgcactgcgaagagaggaccagccaccagccctcagcatccaagggaggaattaattccgaatgaagaggaaaccaagcagtgaggcaggctaagatttccagaagaatttaatctgcagtcaggttaggggcgtggccttcccccatggccaggggggca

SEQ ID NO: 518995 - DNA, 580 bp, Homo sapiens
gctggcctccagctttctctcagaggaggctcatgttgttgattttgctttataaattatcttttgctcaaataaaatgctctcgagatcatagctctgtatttttggcgggtgtaggcggacagggtcttgctctrtcaccagggttggagtgcattggtgcaatcatagctcactgcagcctcatcctcctgggctcaagtgatcctcccacctcggcctctcaagtagctgggagtacaggtgcacgccaccacacctagctaattatttttttggagatggggtctcactatgttgcccaggctggtctcaaactcctgggctcaagggatcctcccacctacttcccaaagtgctgggattacaggagtgagccaccacgcccgactaccgttctgtattttaaactcaccacacagaatggtacttagagtattcgtagtggcgatggccatttctgtcactggctgacaggagcccccgctctgtgccctgggcccccacagaagtctgataatgaacgcaggtgatacgggcagcggctgctctcgtctgatggcagttctggtgtgatggc

SEQ ID NO: 518996 - DNA, 628 bp, Homo sapiens
tctggcaggtgttccagaaaggggccacacagcaaggggaagggacgctggcaggggcaggccacagtgagtgggagaggcagcggccaaacgtcccagcccccgtccttggagggagctggcccgaccccgttccccgtgagcgcagcagactggcgcatttccagctcacttgtgaggaatttctgtttctgtctccagtagatagatgtggctttcttgtgtttatcgccaagggagacaccaggagttgggcctgcagccacgtcttcccrggggcacgtgcaggacggccgacagccagtgccgctgggactccagggtttaacttgtcagtgtgatgtcatcatcggtttccacgcgcacagcccttgctcggtgacctcctcgcgggcctggtgcgctgttcgccccttgcctagcctgccgtacctgcagggagtcgccgatgcccggggaacttcttcccagcctgggttatggccgggggtggagctcgggctgcagaaagtggcttcgcggccaagcagaatgtggcaaaagcaatgctttgtggatgtcctgagatacggcgtgaggcaggacactcttcagttggtcccatgacagccacactgacttagcaaca

SEQ ID NO: 518997 - DNA, 628 bp, Homo sapiens
tctggcaggtgttccagaaaggggccacacagcaaggggaagggacgctggcaggggcaggccacagtgagtgggagaggcagcggccaaacgtcccagcccccgtccttggagggagctggcccgaccccgttccccgtgagcgcagcagactggcgcatttccagctcacttgtgaggaatttctgtttctgtctccagtagatagatgtggctttcttgtgtttatcgccaagggagacaccaggagttgggcctgcagccacgtcttcccgggggcacgtgcaggacggccgacagccagtgccgctgggactccagggtttaacttgtcagtgtgatgtcatcatcggtttccacgcgcacagcccttgctcrgtgacctcctcgcgggcctggtgcgctgttcgccccttgcctagcctgccgtacctgcagggagtcgccgatgcccggggaacttcttcccagcctgggttatggccgggggtggagctcgggctgcagaaagtggcttcgcggccaagcagaatgtggcaaaagcaatgctttgtggatgtcctgagatacggcgtgaggcaggacactcttcagttggtcccatgacagccacactgacttagcaaca

SEQ ID NO: 518998 - DNA, 511 bp, Homo sapiens
cggtgggctgtccgggtgattctgaggcctgcgtccctgagctacaggctgttgaggtgattctgwggcctgtgtccctgagctgtggggtgtctgggtgattctgaggcctgcgtctctgagctgtggggtgtccggatgattctgtaggcctgcgtccctgagctgtgggctgttcacgtgattctgaggcctgtgtccctgagctgtagactgttcgggtgactctgaggcctgcttctctgtgctgtgggctccccaggggattctgagggctcttttgcttgtggcccttctgcttggcatgcatactcaggcctgcaacatagcacgtggtcctgatccttcttcgtaatgtgtattttactggttggttgcttgttgttcataatttttattatatcatcttttagagaatgctcgatttagagaaaaaaggatgagttttggaagcagccctaccaatgttctttctcttgtttcttgttgtgtggttttggccaaacgatca

SEQ ID NO: 518999 - DNA, 511 bp, Homo sapiens
cggtgggctgtccgggtgattctgaggcctgcgtccctgagctacaggctgttgaggtgattctgtggcctgtgtccctgmgctgtggggtgtctgggtgattctgaggcctgcgtctctgagctgtggggtgtccggatgattctgtaggcctgcgtccctgagctgtgggctgttcacgtgattctgaggcctgtgtccctgagctgtagactgttcgggtgactctgaggcctgcttctctgtgctgtgggctccccaggggattctgagggctcttttgcttgtggcccttctgcttggcatgcatactcaggcctgcaacatagcacgtggtcctgatccttcttcgtaatgtgtattttactggttggttgcttgttgttcataatttttattatatcatcttttagagaatgctcgatttagagaaaaaaggatgagttttggaagcagccctaccaatgttctttctcttgtttcttgttgtgtggttttggccaaacgatca

SEQ ID NO: 519000 - DNA, 511 bp, Homo sapiens
cggtgggctgtccgggtgattctgaggcctgcgtccctgagctacaggctgttgaggtgattctgtggcctgtgtccctgagctgtggggtgtctgggtgattctgaggcctgcrtctctgagctgtggggtgtccggatgattctgtaggcctgcgtccctgagctgtgggctgttcacgtgattctgaggcctgtgtccctgagctgtagactgttcgggtgactctgaggcctgcttctctgtgctgtgggctccccaggggattctgagggctcttttgcttgtggcccttctgcttggcatgcatactcaggcctgcaacatagcacgtggtcctgatccttcttcgtaatgtgtattttactggttggttgcttgttgttcataatttttattatatcatcttttagagaatgctcgatttagagaaaaaaggatgagttttggaagcagccctaccaatgttctttctcttgtttcttgttgtgtggttttggccaaacgatca

SEQ ID NO: 519001 - DNA, 625 bp, Homo sapiens
tggttgcttgttgttcataatttttattatatcatcttttagagaatgctcgatttagagaaaaaaggatgagttttggaagcagccctaccaatgttctttctcttgtttcttgttgtgtggttttggccaaacgatcaaaacaatcaaatctctgggtcttggcttcccccacggcaatgaggctggccggatgtagggagtgaggcrtagaggatgagctcctactactgcacaggaatgtcccagcctgctgccagctccttggggaagcagcaagatgccacccaggtgagctgcttcctccgcacctatgagaggcaggaagtggcaggtaacatggagctgctggagacccagccccagggaccccctgccaatatctgagtgaacagttcttgcaagctaggaaggctggcccgaggatggcagttgtatctggcatttcttggagtgtctccagtttattttggaatacaggttttggcaaaagttcaaaatgtcaaactcctgaggctttcagttgtcctctccctccggctccagtgtcgagtacccagtgagctgttgagagagaaattcttaaatgtaccgcagcgttcagctcctcagtgggttcggaaac

SEQ ID NO: 519002 - DNA, 484 bp, Homo sapiens
aaacaatcaaatctctgggtcttggcttcccccacggcaatgaggctggccggatgtagggagtgaggcatagaggatgagctsctactactgcacaggaatgtcccagcctgctgccagctccttggggaagcagcaagatgccacccaggtgagctgcttcctccgcacctatgagaggcaggaagtggcaggtaacatggagctgctggagacccagccccagggaccccctgccaatatctgagtgaacagttcttgcaagctaggaaggctggcccgaggatggcagttgtatctggcatttcttggagtgtctccagtttattttggaatacaggttttggcaaaagttcaaaatgtcaaactcctgaggctttcagttgtcctctccctccggctccagtgtcgagtacccagtgagctgttgagagagaaattcttaaatgtaccgcagcgttcagctcctcagtgggttcggaaa

SEQ ID NO: 519003 - DNA, 565 bp, Homo sapiens
gtgtgtcttctgtgctccctctcaatcttatacaaatgttaccaatattcttattcatcagtaattattttttattttttatttatttatttttttgagacggagtctcgctctgtcacccaggctggagtgcagtggcaagatctcggctcactgcaacctccgcctcccggattcacgccattctcctgcctcatcctcctgagtagctgggactacaggtgcccaccaccacgtctggctaattttttgtatttttagtagagacggggtttcactgtgttagccaggatggtcttgatctcctracttcgtgatccacccgcctcggcctcccaaagtgctgggattacaggtgtgagccaggtaattatttttgagattcaactatgttcaaggcactgtgatagttccagggaatgcagatgatacagtgccaaacaaaacagatgcctacatcaccagtctttacagagaagagtagtgtgtttgcttacctcctcccactagacaatgaatacctaaaaaaatggggcctgcctctgatttctatgttcccaatcac

SEQ ID NO: 519004 - DNA, 340 bp, Homo sapiens
ttatttatttatatttatccatacttatctctatttgtccctgcaggcctcttcaggtccattcaggtctcttcaggtctgtgtttctccctgattgtccctgtttgggtgccacttgtgacagactgccatggttactacttgagacygtcattacagcagttactactgttattgcttgagactgtcattatagcagttactactattactgcttgagaccatcattacaagactgaacaaacagatgaacgtagaaatgaaaacttaagacaaaagaaactgttttaaaggaaggggggaaggggaagaagagagctccctacttctagtgagcgaa

SEQ ID NO: 519005 - DNA, 540 bp, Homo sapiens
tgggggaagtgcagaaaatttcatagtacctgcttatccagtacccatccaatgttatttatttgtaaggctaccataatacagtaccagagactgggtagcttaatcaatagtaagtcattttctcacaattctggaagctaagagtctgagatcaagggcacrgcaatattatttctttatagccctctttcttttgcttgtaaatggccaccttctccgtgtgtcctcacatagtcttccctctgtgcctgcttctgtggtttaatctcctcttcttataaggacagcagtaatattggattggaatctatgcccaatgagctcatttaagcttaattgcctcttcaaagaccccatcttcaaatgcagtcacattttgaggtacacattctgacattaggacttccacatataaatttgggaatagggtagacacaattcagcctgtaatagggacattggcctgtctttgagccaggagctctccagaggaagaaaatatctggtggtcagcataaatgctttccagcctttctg

SEQ ID NO: 519006 - DNA, 533 bp, Homo sapiens
tcactggggcaggtctggtgctggagtccacagcaaagttaggtgctcactttaatcttcttttcccacacaaagggtatctctctctctctgtctccatgctatactgcctgggcttaggggagaggtgacatacataatgtgatactatctttcctaatctcttaatgcgtcttatttctgtgctccatccaggtgctgtaatagctcacctggatttcttagttcatgtgaaggtatttttgtgcacagatagttattcaaattkatgtttctatgagggggcgagtgctggaagttctatccaccatcttgctgacgtctcctatgaggtgatttttttttttaaaaaaaaaaagctctcaaacaaaccagcattttctctaaaatcattctgactgattatattaaacacagtttaaggtgaaggcccagcccatgagccacagacacatagaactgctctcatatctatggagctgggaccatagagccaaatgatgctgatgtagctccaattatcttagcctcag

SEQ ID NO: 519007 - DNA, 533 bp, Homo sapiens
tcactggggcaggtctggtgctggagtccacagcaaagttaggtgctcactttaatcttcttttcccacacaaagggtatctctctctctctgtctccatgctatactgcctgggcttaggggagaggtgacatacataatgtgatactatctttcctaatctcttaatgcgtcttatttctgtgctccatccaggtgctgtaatagctcacctggatttcttagttcatgtgaaggtatttttgtgcacagatagttattcaaattgatgtttctatgagggggcgagtgctggaagttctatccaccatcttgctgacgtctcctatgaggtgatttttttttttwaaaaaaaaaagctctcaaacaaaccagcattttctctaaaatcattctgactgattatattaaacacagtttaaggtgaaggcccagcccatgagccacagacacatagaactgctctcatatctatggagctgggaccatagagccaaatgatgctgatgtagctccaattatcttagcctcag

SEQ ID NO: 519008 - DNA, 641 bp, Homo sapiens
  misc_feature (1)...(641): n = A,T,C or G
tgtgtacttaaggaggacatttgacacaaatgagccaaatgaggttcttatctccaaatgtganttctagtcctaaacactgcttatctcctactgccaattctaactgaaagcatgtaaacttgacacctatgaagaggtcacatttttcctttatacagaaaagcagagaaaattggcctatagacacccagagaatcnaacatagnagatcatncagcctctgaaagaaagccccagaagaaaatacttgccttagttactctaggacttccagtaaattgtcccagtccctcatcaggtcaacaaaccatcttgcctttcaggttgtgacagagctctttaagatatttatgtattttatgtaatgcaatttaagtagatgtctgctattgtcaatctgaaggggcataaatatatgcccatttagtctacataatttttcataataaagttcattgatattattgatttcctaacagcrctataatgccttgagtttattctgtatttagagaactccatgcaaatttcccaaagtgctatatgaagacacatcactgaagaaatatcttctactctcagggacgttacagtctaataagtgattgaattaaatatgaagaaaaacaaaatatttt

SEQ ID NO: 519009 - DNA, 664 bp, Homo sapiens
tatctaatatacaaatagaataatgagaagaattatttaattatcttcatagacaccaaaatgctttgaatgaaattaaacacctattcctgaaaaaacaaaaaataattaataaaataaaaatctatggatactcaacacatacatcagaccccaatttgatattttactcagtggggaaacctagaaaaaccaatgctaaagctaatataatcaatgatggtatattaggattttctagagaaacagacccagtaggttatatagagatatataggaggagatttattataggaattggcttatgtaattatgaaggctgagaagtcccacaatatgtcacctgcaaactgtagaatcaaaaaagctggtagtgtaattcgtcttaagtccagaggcctgaggaccagaggagccaatgatgcaatgtccagtccaaggctactcatgtattagtgctatcagatattaaaaacatattctaaagcctctatacttaaaacaatatgacattgaggaataaatagataaaaaattttataaatagactcaaakccacctaaaaattttgtttatggtaaaagtggcatcttaaatcatggggatacatgaggtgcaataaataatgttaaagcaactaaatagaatttgaaaaagaaaaaat

SEQ ID NO: 519010 - DNA, 550 bp, Homo sapiens
gttctaaatgagttctttatattcagcctctagaaacttgtaattacatttgagccaggacatgtgatacyagaagatataaagctatttagccccaactgccacttgaattcaggcaaggcagttcagtaggatcagcggaacacacaagaaaatcactgccattaatcatctcttaaagtagaactgaagaaagcttttctttaaaaacaaatagatttactcttttttcattagtcctgggctttaaaaataaattgtgatgaggttgcattttcagcagcaattgatcttttctgtcttacattttatatcttgctaggtgatgttaggaaattttaggcataaatactgttatagcagttctctttaaaaagtggaggctcaagaagaaagttaagaaacaccctaattttcaacaaccatgaaatcaagtgtgggttgctccaagaatttctccccatctctagctacaaaagcatgctctaggagaacacatgtatgcccaatgaaatagtttagatatttgaatatgaacaatctttaaata

SEQ ID NO: 519011 - DNA, 468 bp, Homo sapiens
tgtgaaaccgaggcagagcctcccgggtatgttkttgttgttgttgtttgtttgtttgtttgtttgtttgtttaaaggcatgatcggcctaaaactatctctggggaccaacatgaaatctaatagtgtacaatttaatatatataaaacatagttcatcttggaatagtgtctacaattagagctatttaacaagaagtcagcaactagcaaacagcgttaagagcttagcttcgggcaagtttgccagatctcccacataactgcagcccactcccaggactcaggaacgctgatgtgtcaccttccttcccatctgtcccagggaacactcatcctccatgaaaacgtggcagtagccgcagaactccctctctgcctctcctcttctctgcaaagaaccttaacttaaacgggaaaacagcagaggaagaaagaggaattgatgggaacagggcaaacatgagc

SEQ ID NO: 519012 - DNA, 468 bp, Homo sapiens
tgtgaaaccgaggcagagcctcccgggtatgttgttgttgttgttgtttgtttgtttgtttgtttgtttgtttaaaggcatgatcggcctaaaactatctctggggaccaacatgaaatctaatagtgtacaatttaatatatataaaacatagttcatcttggaatagtgtctacaattagagctatttaacaagaagtcagcaactagcaaacagcgttaagagcttagcttcgggcaagtttgccagatctcccacataactgcagcccactcccaggactcaggaacgctgatgtgtcaccttccttcccatctgtcccagggaacaytcatcctccatgaaaacgtggcagtagccgcagaactccctctctgcctctcctcttctctgcaaagaaccttaacttaaacgggaaaacagcagaggaagaaagaggaattgatgggaacagggcaaacatgagc

SEQ ID NO: 519013 - DNA, 502 bp, Homo sapiens
agctgtcttattcaaagacattgctctctatttcagggtaaaatagaaggtctcagtaatataagaacacagataaagtttctggttgtattacttttttttttttttttgagacagagtctcgctctgtcacccaggctggagtgcagtggcatgatctcagctcactgcaagctctgcctcccaggttcatgccattctcctgcctcagcctcccgagtagctgggactacaggcgcccacccccacgcccggctaattttttgtattttttagtagagacagggtttcaccgtgttagccaggatggtctcgatctcctgayctcgtgatccacccgcctcggcctcccaaaatgctgggattacaggcgtgagccaccgtgcccagccagattgtattacttttgtgaatattttaatcattttctaacttcaagacagaactttgacgttcaagtttttgtactttcaggatactattcagcattccttcagctatc

SEQ ID NO: 519014 - DNA, 576 bp, Homo sapiens
actgtgctgtttaagaattaaataagataatacagaacactcagaatagtgcctgacacataggaagcatttaatctaaggcagctatagtgatgatgatggaaagaggagaaacaactgttctgactttgtctatagaagggagtagtagaaaatggtgttagagttgataagttctctctaggaaaacaaagaaaaggaaaaggaaacggtgtttgggggaaatactattggcttagcacacctagagcataggatattcaccctgaaacgagatcatgaagagctccttcaaggagcttagacatcaactgataaattaacaaagagggaaagagctacaagtagaaattggaacctttggatgtatcaggaagagaaaaatgagcaagaatctatgctttgggttcctgctcctgagagccaggacaataaatatgacaagatgtgtgaaagaaagatgagattagaggctttacaagtacagyagtccccactttatctgagatttcagttacctgctgtaaactgcagtccaaaaatattaaatggaaaactccagaaacaaacaatcct

SEQ ID NO: 519015 - DNA, 589 bp, Homo sapiens
cgaaagttgtaaaaggagccttgtagagatttcttatgaactatcagggaaaataaccccagtctcatagagagtggcaaggcatcaactgtcacaactccaaagatgccaaaagtagacaagattcagtgkatcagagcaagacagatttttattcacagcacagcaatcagcaggaggatcagcattgtagtgtaggttccctgtccccaaatcccacagggcgatgtgataggcacagatggtgactgtgcacacagtgggatacactgtggctgtggaacccagggtcaagagcttggtaccttttgtagaaagcagaaagcaagctagtcctcctttccctgggagtgacctgccatagtagtcacattgtggtcaccttaacctatttaattgtctctgtaaccagctacagaaactgttcagtgtcagtggatagttaggtcttggaatttggcatacatggcaattatgtgcagggacattcagaacccatggcagactgtttcttccaaaagaagcaatagaatagatgccgaaaaaaatgctttgataaaattaatcaccaagtagttataaaaatagc

SEQ ID NO: 519016 - DNA, 589 bp, Homo sapiens
cgaaagttgtaaaaggagccttgtagagatttcttatgaactatcagggaaaataaccccagtctcatagagagtggcaaggcatcaactgtcacaactccaaagatgccaaaagtagacaagattcagtggatcagagcaagacagatttttattcacagcacagcaatcagcaggaggatcagcattgtagtgtaggttccctgtccccaaatcccacagggcgatgtgataggcacagatggtgactgtgcacacagtgggatacactgtggctgtggaacccagggtcaagagcttggtaccttttgtagaaagcagaaagcaagctagtcctcctttccctgggagtgacctgccatagtagtcacaytgtggtcaccttaacctatttaattgtctctgtaaccagctacagaaactgttcagtgtcagtggatagttaggtcttggaatttggcatacatggcaattatgtgcagggacattcagaacccatggcagactgtttcttccaaaagaagcaatagaatagatgccgaaaaaaatgctttgataaaattaatcaccaagtagttataaaaatagc

SEQ ID NO: 519017 - DNA, 559 bp, Homo sapiens
aaagaggtgagttttgagctagactctgatttgggattgtgaaggggtgggagacttgaactgatagcggttatggaaatggggaaagtgtataactgctccattagtctattgtgagaaccacagttarcagtagacctaggtactaggatttggggggcatttgtgggctggtatctgggctagccattcctggatgggaatagccattctgtaggaggctgagatctgtagaatagacaggccattggaagataggacctgacaacagtaggatcaagtgatttctgtttactctttttgtgttctttcttttgccatttgtatcattgttttctttatcctttgctgcttgctttctgctcccattgttgcaacagggacatatgaatatatgtgggtatatgataaacctcctgcaccacccttcagtgttcctttgcttttgcacatgaaattggttgataacgacttaaattagcctttgggcagctaaaatcaggaaaggtccaagactatacttcgggatgatatgtttgtaaaggaaacactaagcaaa

SEQ ID NO: 519018 - DNA, 634 bp, Homo sapiens
aaaaggagccaggtcacgcgatgtactaactcaagtacactactgagagtttttacaaataggttaagtgaatatcattattcaaacacaaggaagtgtcccatactgaagctaatcttgtttctgagctatttgtaggtacactgagagaaagtggagtttggcttcagttgtctacagaaagggtcaagagaagcaaaacataycctcaaagcaagcccagaaaaaaaatgatagattagtactcatcagtagaggtctaatctcttctgaactacaaattttagtttccactatagcctccttatcacaaggtgatagaaataccaagagaatgaaggggaaaatgcaatatttaagagcttcatcaatttgtaaaatatcagtaaataaaagcaatttaaagtggtcaccagttcctttggtatctttttttttttaagctaaaaaataatcctgtaccatcaggattccttgggattgatttgcaacctatgtggttctacagtatacacgtgaacaatagctcattgtaactgtgatttaaaaatacataaacaagttgccataaatagatcagtcaagtaaatcactctgtggccaaattctgttatctcagctacaaagtaaggca

SEQ ID NO: 519019 - DNA, 577 bp, Homo sapiens
caaataggttaagtgaatatcattattcaaacacaaggaagtgtcccatactgaagctaatcttgtttctgagctatttgtaggtacactgagagaaagtggagtttggcttcagttgtctacagaaagggtcaagagaagcaaaacatatcctcaaagcaagcccagaaaaaaaatgatagattagtactcatcagtagaggtctaatctcttctgaactacaaattttagtttccactatagcctccttatcacaaggtgatagaaataccaagagaatgaaggggaaaatgcaatatttaagagcttcatcaatttgtaaaatatcagtaaataaaagcaatttaaagtggtcaccagttcctttggtatctttttttttttaagctaaaaaataatcctgtaccatcaggattccttgggaktgatttgcaacctatgtggttctacagtatacacgtgaacaatagctcattgtaactgtgatttaaaaatacataaacaagttgccataaatagatcagtcaagtaaatcactctgtggccaaattctgttatctcagctacaaagtaagg

SEQ ID NO: 519020 - DNA, 686 bp, Homo sapiens
aaccctcagtgtcagcagacatatgttcaccggttatgagtaaaattcgacaaagtgggagaaagggatacaagggaagggaagaatggggagatggaaagcatttacttcttattctgaacctcatttttctctccttcccacatccaaatatacacaaatattcatataaaatattggctacttcctttctagtcaatagggacttccaaaaagaattacgatttcaagaattattttgagaaagcagccaggtaattagcaaggcaagcttaagaataagtgaagtacaacctcaaatatcttttattttaaatgtggaaacggaaaaccacagacactgcgacttaagctgaggaattttccatatcacctcttcttctatcctatcaaaaaatcaaacacctgtctgcctgcttgagttcagattagaagtttggtggtcaagttcaaggctgtttccacaaaatcacatgtttacagttaaaagcattctagaaaaagtagaacaaacraaagtattccaggcataagatatggactaagagatcttccaactagaactttgtttgtttttttaaggcggagtctccctctgtcgcccacgctggggtgcaacagcacgccttcgcctgcaaactccgcctcccaggtccaagtgattctcgtgcctcagccttccgagc

SEQ ID NO: 519021 - DNA, 635 bp, Homo sapiens
gtggcaacccgctccgacccgttttcatagtgtggaagctttattcttttgctgtttgcaataaatcttgctactgctcattctttgggtccacgctgcttttatgagctgtaacactcactgtaaaagtctgcagcttcactctggaaccagcgagaccacaaacccaccggaaggaagaaactgcaaacacatccgagcatcagaagtaacaaactccagacagggggcctttaagaactgtaacactggccacgagagtccgcggcttcatttttgaagtcagtgagaccaagaacccaccaattccggacacagtacttgctgcctctctatatcatctcctctgaaggcaggtatttgcctacacagtctgctgagtactaagtgcaacacacactgcaggggcttcccagagccctactcggattcaggtggattcttatgcagatggtgaaaarggtcaaaagtttgaactgggaatcaattgctgtaagtttctctatgatattctcccagcaagatgtcttccttgtaataacttgggagaacgttgactccagggtaggagagtgttcctgaggagtcggcacactttatggctggccccaggccgtgggtcagaaaaatccaca

SEQ ID NO: 519022 - DNA, 656 bp, Homo sapiens
tctcaagatcccaagagaatcaaaaggttgaagtgtgaatcaatttgtatgaatttctcataaatcctgtcaacaagatgtcaacagctgtctttatcgtcatacatttgggaggctgttgcctccaggatctgacagtggttaccaaggagtcagcaccgtctattgctggccccacgcagtgggtcagaaaaacccacaactgggcagacaattgagttcatcccagaaaaccatccattgaaggtgctgtggaaagtcagtgaagttcattcaatcatcaagattctagggggttctgtgtcccgtactgaagtcagaactctcacactgttacgccttagtcttcttgcagttcatctacacacatctaaaatgaagtcattgctgtttctgcaactgtagaagtaaagatgtatttacaatttaaaggatggtaccmttttactggaaagcaacgtctcaatcttatgttgacacattcacctgagtgttaaacatccactcaaaagagtgttgccaaccttgactaaaatagtcattgtgtagaacagtttgaaattaacatgaaaatggaacagacagaacagaaaggtctcagatcctttgtccacccttttcttttcttaaccccattttcagtggtgtggtccatg

SEQ ID NO: 519023 - DNA, 544 bp, Homo sapiens
gtgaggagctgggagggagacagacagggcctctggtggcctagtccctccataggcctggggctggtggtggccactcaggtcaggacaggggtccaggatggggctgtgctggacyggccaccgggctgcttcctcggggtttcccgagccaggccccaggtggtcatgctgctgcaggcctggggggttccgggtgctctaccaactccaacaccgtggccatgaacaggagggtggacttcccgaaaaataagctggcccaccagtgacctgggtcagccttggggaaagccggtgggtgggggatggcttccccagggcacttggtattgccacaggagctgctgctggaagtggaacccaggcggcctgggcggcgacccctctctggccttggcacacgatcacaggtggtggggtcaggggcactgggccacggagcccatttgcagaggagacctggggaggctgctccatgatcaagacacaggcgcacaagagatgattatgcatttttaaccttgttttattaatatggtat

SEQ ID NO: 519024 - DNA, 544 bp, Homo sapiens
gtgaggagctgggagggagacagacagggcctctggtggcctagtccctccataggcctggggctggtggtggccactcaggtcaggacaggggtccaggatggggctgtgctggaccggccaccgggctgcttcctcggggtttcccgagccaggccccaggtggtcatgctgctgcaggcctggggggttccrggtgctctaccaactccaacaccgtggccatgaacaggagggtggacttcccgaaaaataagctggcccaccagtgacctgggtcagccttggggaaagccggtgggtgggggatggcttccccagggcacttggtattgccacaggagctgctgctggaagtggaacccaggcggcctgggcggcgacccctctctggccttggcacacgatcacaggtggtggggtcaggggcactgggccacggagcccatttgcagaggagacctggggaggctgctccatgatcaagacacaggcgcacaagagatgattatgcatttttaaccttgttttattaatatggtat

SEQ ID NO: 519025 - DNA, 536 bp, Homo sapiens
ggtaggtagttgtacgtgttggcttggctaggctgagtcaaacactaatctaggcgctgctgtgaatgcaggtgctttgtagatgtggttaatgccacaatcagttggctttgagtgaaggagattaccctgaaaatatgggtgggcctcctacatcagtggaaggccgtaagagcaaaaaccggtttcccagagaaggaattctgcctcaaggctgcagaattcactccccrgagctgccagcaacagatttcaggcctgccagccccccgcagacacgggccaagtccttcaaataaatctgttggttctgtgttcctggagaaccctgactgatggcaatggttaagagaatgggctttgaggtgggacctgggttcgagtcctggccctgccatctggtagctgtgggagatgaggcaagtccctcccctccttgagtgtccactttctcatctgtaaaatgggggtggtcatggacacgcctcatggggtgaatgccaggacacagaatggcctcagtggctgtcatgaca

SEQ ID NO: 519026 - DNA, 678 bp, Homo sapiens
acagcagccctaggcctgctgcatgcacagccccacagtgacggacagcaacagaaggggtgggaccaacatggaagggggcagggacagtaagggagggggtggagccagggcctctcacctgtggggctggcgctgagccggtgggccggctgcaggtgctggatgcyggcagggtcctggctggggacgtggagggtggtggcctgagatgccggcgtgtgaagcccggactcactggaggcctcagtgtctgaggtgaagacctgggggagcagagcagcctcctgagcccgggggatgtgggggtgaggggctctgtcacaggccaagggagggccagcaggcctggaccttacctgcttggtgggcgtgaggctggccagggcgctcaggttggtggtgtcggtgatgagcatagtctgcgggagcaggcccgtgtgggtgtactgggccacctcgggcttgtggctgtagagggctggccgcaggggagagaggggcagacgtggcagacgtgcctgacagccctagtcccaggcctcaagactggggaaaggggggcatggggcctgctgaacagccagactgggcagcagttggagatccagggctgattttcaaaactggaggctccagataaagggacagaccctctccccattacagggaactgct

SEQ ID NO: 519027 - DNA, 636 bp, Homo sapiens
ggacagcaacagaaggggtgggaccaacatggaagggggcagggacagtaagggagggggtggagccagggcctctcacctgtggggctggcgctgagccggtgggccggctgcaggtgctggatgctggcagggtcctggctggggacgtggagggtggtggcctgagatgccggcgtgtgaagcccggactcactggaggcctcagtgtctgaggtgaagacctgggggagcagagcagcctcctgagcccgggggatgtgggggtgaggggctctgtcacaggccragggagggccagcaggcctggaccttacctgcttggtgggcgtgaggctggccagggcgctcaggttggtggtgtcggtgatgagcatagtctgcgggagcaggcccgtgtgggtgtactgggccacctcgggcttgtggctgtagagggctggccgcaggggagagaggggcagacgtggcagacgtgcctgacagccctagtcccaggcctcaagactggggaaaggggggcatggggcctgctgaacagccagactgggcagcagttggagatccagggctgattttcaaaactggaggctccagataaagggacagaccctctccccattacagggaactgct

SEQ ID NO: 519028 - DNA, 636 bp, Homo sapiens
aataataaacctttggaaaatcatagtataataatctagcaaaactgttgaatatttttattgacaagatacaaatagaactatttatcttcataacctttgaaactgtatcaatattgtatattctaatattagatgttacatatgagttatgcctatgaacaatttggaaactataggctatttttttttttttttgagacggagttttgctcttgttgcccaggctggagtgcaatgacgcaatctctgctcactgcaacctcccggggttcaagcaactctcctgcctcagcctcctgagtagctgggattacaggcatgcrccaccacgcccagctaattttgtatgtttagtttagagagacgaggtttctccatgttggtcaggctggtcttgaactcctgacctcaggtgaggagtccaccctcctcagcctcctaaagtgctgggattacaggcatgagccaccgtgcccagccactatagacaatttttaagctaatttaggtgccaatatagcaagttttaaaaatttagatatttgagataagcaaggcttttagtaaccttttattttctttcattgttgtctagaaaaattcatactaccagaacatagtaggtgtccaatc

SEQ ID NO: 519029 - DNA, 555 bp, Homo sapiens
aaggtgaaacaaaaacataagaacgtatggtactttgtacccagggagaaaaaaatttttcatttttttcttctgtctactttgtttttcatgaattagtttattaatgaaaaattgagggaaaactgtttttaaaataacaccatatattaggtcctaaaaacaacttataattgctgcatcctgccttaaatttaattcaataatgaaattattttctatacaggatttcttctgttctacacagtgatgattgctggaatattttgcacrtaattttaaagcatacagctttcttccacactcatcctccaaacctaccagcacacagagtttcaacttgttgctgagttctgttttaacatttctggaatgaaaaaaaaaattcaacacaggataattttagacatttcttttggatggatttattctttgaagtatctgtttccctggggctagacttttttagacatttcttttttagccttccccctgccctttctcatgaaggtttttccatatggttcccaggttgggactgggtctctaatcttt

SEQ ID NO: 519030 - DNA, 568 bp, Homo sapiens
agctgatttttgtatttttagtagagacggggtttcaccttgttatccaggctggtcttgaactcctgagcccaggtaatccacctgccttggcctcctgaagttcttttagattcaagggtacatgtgcaggtttgttacatggatatatttcatgattatggggctggtatatgaataatgccctgtcacccatagctcatcatttwaaaaaaattactttccacttgaatcaggagcacatagatgaagtgagccacagacccttgaggccagttatatctccttctgcctgacctgccatgcttaggtcgtctccaggcttatggcttgcctttctccatgtactattttaggctttggcaacactagactctactgaagttcttacaatgcactgtgacctccctcatccctagccctttactcagtgtatcagtcagtgttctctagaggaagagaaccaacaggatagatagatggtagattgattgatagacagatagatagatagatagatagatagatagatagatagatagatatatagatagatgatagatgatag

SEQ ID NO: 519031 - DNA, 494 bp, Homo sapiens
tttttgtatttttagtagaaacagagtttcaccatgttggccaggctggtcttgagctcctgacctcaagtgatcctcccacctccgcctcccaaagtgctgggattacaggtgtgagccactgtgccaagcctgttttttaagaagcttatttcaagaaatatataartgtggcctaaaaaacacttgtggtgacattattgagctggcatctagttctatacctgtggttgcaacgaagacctttgccaagtacctctctaaagccaaaacttcagttcttaaacaaaattactaattcctcctttcaacactacgaccctcttctaactaatatcttaaaatggtttttctttttctggtctcaaaatgtgagcaaacttgaacattactgacattggaacaacatatagacttctttttcttcaagccacaatgctgagcttaaatctcttcactctacacctgccataaaggggtctgtggggaagaaa

SEQ ID NO: 519032 - DNA, 641 bp, Homo sapiens
tatgaccacaaaggaagtcatttcgtatggttactatgacagctccaaaagatggaaagaccattgaagactgatccttgatgatgtcactgagccactgagatcatgagccaccacctctattcttggtgttaagggagattttaaatcttcctattgtttaagccaatgttcactgggtttctattatttgcatttgttaacacgtcaatctgcacatgagtsgtgtatctcctgaaggctttcatattgggactattaacgtgaatgagtagaaatagtcttgggtcacacttttccccaagaactttgtaaatattgcttcattttcatctgacatcaaaatctgaggctagccagatttctcctaccatttctctttgaagttcaataatgtatccaggacatttcctgatgttgagtgttgtatatcagttttccctggaacacagtgagaatttctgatctgcagatttaattcttttatttcaaaaacatttcttgtatctctgaaaatagtctaatgttgaaggtctttcttgcaggaatatcaactaaccctttttgtaaattgctcaggtgtctcactctttcctctctacatttactgtaattgagtcaggtttctcctctaagtcagt

SEQ ID NO: 519033 - DNA, 641 bp, Homo sapiens
tatgaccacaaaggaagtcatttcgtatggttactatgacagctccaaaagatggaaagaccattgaagactgatccttgatgatgtcactgagccactgagatcatgagccaccacctctattcttggtgttaagggagattttaaatcttcctattgtttaagccaatgttcactgggtttctattatttgcatttgttaacacgtcaatctgcacatgagtcstgtatctcctgaaggctttcatattgggactattaacgtgaatgagtagaaatagtcttgggtcacacttttccccaagaactttgtaaatattgcttcattttcatctgacatcaaaatctgaggctagccagatttctcctaccatttctctttgaagttcaataatgtatccaggacatttcctgatgttgagtgttgtatatcagttttccctggaacacagtgagaatttctgatctgcagatttaattcttttatttcaaaaacatttcttgtatctctgaaaatagtctaatgttgaaggtctttcttgcaggaatatcaactaaccctttttgtaaattgctcaggtgtctcactctttcctctctacatttactgtaattgagtcaggtttctcctctaagtcagt

SEQ ID NO: 519034 - DNA, 584 bp, Homo sapiens
  misc_feature (1)...(584): n = A,T,C or G
tgtgtcaaatatagacacatccccacaaagaattacacactcttctggcgggctggttagaccctgctccaagatgccagggaaaggacggtagccactcttttgccttatttacaaggttgtttagaaattatttttctggccggtcatggtgctcacacctataatcccagcaygttggtaggctggggcagatggatcacctgaggtcaggagttggagacctgagccgcaacatggccaaaccccatctctactaaaaatacacaaattagctgggcatggtggcacgcgcttgtagtcccagctactcacgaggccgaggcaggagaatcgcttgaacccgggaggcagaggttgcagtgagccgaganattgccactgcactccagcctgagtgatagcttgagactctgtctcaaaaaaaaaaaaaaaggaaaagaaatgatttttcttcatagagtattagaaagggggaaatagcattaccattacttatagatgatattattcacacacagacaattcaagggagccactgagaagccttcagtatttgttatgggctgaattgtgtgcccccc

SEQ ID NO: 519035 - DNA, 460 bp, Homo sapiens
ggctcttgaggctgacccgagtacacccagggtggaacccgccagggccacgagggtgcagtggggaggggtaggaccttcccaagcttgccctggtgtggctatgagaggcattcgagatgcattgagtgatgatttgcccagcagccgcaccctgagkttcttcatccctcatgccctaatgggccaggagagaagccactttgctgtgagctgccatggtgatagggcttgctgtagccctggtccacccaaggctggccatcaagatggccccctgtgttgacaccctaccaaactggccttgggaccgtgggcatgagggatgccacgtgctaagccccatgcccagccctctgggatctggagcaggagccctgagctgacgcctggccctgcagcaggaccccaggccccctccttccccctctgaacggggaagatgttcctagagaggtca

SEQ ID NO: 519036 - DNA, 548 bp, Homo sapiens
actgagcaaccaacgcagagccctctgcatcccagagggctgctccaagaggacgctgtgccacatagtaggcagggcagccccacactgcaaggacgctcagcagagccacaccggcacatccgccagccttcatctctgtgtcctgccgctgctgctstctctggcaccagcgccacattgtatgggagaagcaaactgactccactttctctggttttgtctagcctgggatgataaagcaaaaatctgactttcagctcgctagaggcgactggaagcctgctctgggttggggaggttctcagcttatctcagcacaggggacttggcatccacaggaggtaggggaactgggctgccagccgtgccctgattctattgctgcgtgacaaaccaggccagacttcagtggctggaaacagagggagcttggatttgctcttaaacctgaagtttgggcagggcttggagagggcagctcacctctgttgcactcagtcggggtgacgtggaggctaggggccaggatctgtggagactcagtc

SEQ ID NO: 519037 - DNA, 548 bp, Homo sapiens
actgagcaaccaacgcagagccctctgcatcccagagggctgctccaagaggacgctgtgccacatagtaggcagggcagccccacactgcaaggacgctcagcagagccacaccggcacatccgccagccttcatctctgtgtcctgccgctgctgctgtctctggcaccagcgccacattgtatgggagaagcaaactgactccactttctctggttttgtctagcctgggatgataaagcaaaaatctgactttcagctcgctagaggcgactggaagcctgctctgggttggggaggttctcagcttatctcagcacaggggacttggcatccacaggaggtaggggaactgggctgccagccgtgccctgattctattgctgcgtgacaaaccaggccagacttcagtggctggaaacagagggagcttggatttgctcttaaacctgaagtttgggcagggcttggagagggcagctcacctctgttgcactcagtcrgggtgacgtggaggctaggggccaggatctgtggagactcagtc

SEQ ID NO: 519038 - DNA, 548 bp, Homo sapiens
actgagcaaccaacgcagagccctctgcatcccagagggctgctccaagaggacgctgtgccacatagtaggcagggcagccccacactgcaaggacgctcagcagagccacaccggcacatccgccagccttcatctctgtgtcctgccgctgctgctgtctctggcaccagcgccacattgtatgggagaagcaaactgactccactttctctggttttgtctagcctgggatgataaagcaaaaatctgactttcagctcgctagaggcgactggaagcctgctctgggttggggaggttctcagcttatctcagcacaggggacttggcatccacaggaggtaggggaactgggctgccagccgtgccctgattctattgctgcgtgacaaaccaggccagacttcagtggctggaaacagagggagcttggatttgctcttaaacctgaagtttgggcagggcttggagagggcagctcacctctgttgcactcagtcggggtgaygtggaggctaggggccaggatctgtggagactcagtc

SEQ ID NO: 519039 - DNA, 516 bp, Homo sapiens
ggggtgagccttctggagatgagaggtcacctggagagtgaaacccaccctagacagctaccgaccagaggacctggccagctcagtragagcccagcagagatgagggtactctgctgcagatcagcagaactgttcgtctctggcggatgtgcgagaaatgactcacggttgttgtcttaaccaccgggctctggggcgtgtgccacccagcactagctcaccgacacactgggtgtcacagactctgctactagctccagcttctggtttcttctcctgccaaacgtttcctacctcccactcccccgaatcaaatcctacctctgggcacagccgctcctaagagcccccgttctctgtgctgtgcctctcccttctcgagatgtcccctctctgacgtcccctcccaggtctgctttcaaatccattctcattctccaggaggctcctcggtgtcacctcctcatggaaggcctccctttctgtccagcagaactggccagcccctcacac

SEQ ID NO: 519040 - DNA, 628 bp, Homo sapiens
tcctggaaatgggctgaacctgtcccttactcgacccacagaatgcagggaagtgaggcgtgccagttctgagtgtaggcgccgcagattgcagcaccatcgtgaggacgagccggggtgagccttctggagatgagaggtcacctggagagtgaaacccaccctagacagctaccgaccagaggacctggccagctcagtgagagcccagcagagatgagggtactctgctgcagatcagcagaactgttcgtctctggcggatgtgcgagaaatgactcacggttgttgtcttaaccaccgggctctggggcgtgtgccacccagcactagctcaccgacacactgggtgtcacagactctgctactagctccagcttctggtttcttctccygccaaacgtttcctacctcccactcccccgaatcaaatcctacctctgggcacagccgctcctaagagcccccgttctctgtgctgtgcctctcccttctcgagatgtcccctctctgacgtcccctcccaggtctgctttcaaatccattctcattctccaggaggctcctcggtgtcacctcctcatggaaggcctccctttctgtccagcagaactggccagcccctcac

SEQ ID NO: 519041 - DNA, 559 bp, Homo sapiens
tttcacggtgcattaattctcccaatcttcaagctattacagaatcagaggctttgcagacgggggtctgtattttgtccctttgatggrccacctgccaggtgtaactcaaatagctttagaatctagccctaagacatgggtggtattctctgtgctcattcagttcaaccattataaggtgaggtaacttcactattttcttccaacagatgcaaagacagagatcgagaaataccgtgcccattgctcttacaggctggcaataaatggctgccaatataaagaatgcaacattttttttaattcctcattttaccgtgtctagagagattaccaacacctgtgcttctattaggtcgcactgtgcctattaagaattttacattatttctgattactcaactctactaaggcaatcaactgagtccacttgcttgccaaacaggaaatgactgaaaaaaaggcaaatacaaggacagcaaatcctttgagccatcttattaggcactgaagagccattttgatggcaatcttcctttcctttactggaagcaga

SEQ ID NO: 519042 - DNA, 559 bp, Homo sapiens
tttcacggtgcattaattctcccaatcttcaagctattacagaatcagaggctttgcagacgggggtctgtattttgtccctttgatggaccacctgccaggtgtaastcaaatagctttagaatctagccctaagacatgggtggtattctctgtgctcattcagttcaaccattataaggtgaggtaacttcactattttcttccaacagatgcaaagacagagatcgagaaataccgtgcccattgctcttacaggctggcaataaatggctgccaatataaagaatgcaacattttttttaattcctcattttaccgtgtctagagagattaccaacacctgtgcttctattaggtcgcactgtgcctattaagaattttacattatttctgattactcaactctactaaggcaatcaactgagtccacttgcttgccaaacaggaaatgactgaaaaaaaggcaaatacaaggacagcaaatcctttgagccatcttattaggcactgaagagccattttgatggcaatcttcctttcctttactggaagcaga

SEQ ID NO: 519043 - DNA, 500 bp, Homo sapiens
tgagccctacagtagtaatctgaatagatccagcaaggcatctttggggttctagctcctgtgttgaggtatagagcatacatctcccagtccacttgtcctttgaaacaagctctcatgttcctgttgcagaagtgaagtacttacctactcagagtgggcagtctgttttgcctcccctctaattggacaacatcacctcctgaaataaagcctctgatctaaatttgaagtaaaagtaatgatccctagaaataagttttaattccctcatagaagtttccaagtctaaatgtttkaatctcctactaatacctacttcaatttcaccattacctgtattaaatatattacattttataaacttgagctgtagatacatgtgtaaagtgaagccctaaatttttaaataagtaggccaaagtcatattcatagctggcatctggacggttctagaactctagaatttcaccacactgtggcaggccacttccatttc

SEQ ID NO: 519044 - DNA, 500 bp, Homo sapiens
tgagccctacagtagtaatctgaatagatccagcaaggcatctttggggttctagctcctgtgttgaggtatagagcatacatctcccagtccacttgtcctttgaaacaagctctcatgttcctgttgcagaagtgaagtacttacctactcagagtgggcagtctgttttgcctcccctctaattggacaacatcacctcctgaaataaagcctctgatctaaatttgaagtaaaagtaatgatccctagaaataagttttaattccctcatagaagtttccaagtctaaatgttttaatctcctactaatacctacttcaatttcaccattacctgtattaaatatattacattttataaacttgagctgtagatacatgtgwaaagtgaagccctaaatttttaaataagtaggccaaagtcatattcatagctggcatctggacggttctagaactctagaatttcaccacactgtggcaggccacttccatttc

SEQ ID NO: 519045 - DNA, 617 bp, Homo sapiens
aaaggaggctattggagatgtaaggcacaaagtcaagagagattttaatgtgagataaactacattaaaacattggtagatgggagtaatactaatggagagagaatgaggatgttggagagagaatgagcatgttggagagaataaggataaactcaagagtgaagtcaatgaatgagtcaaaaggaatagaaactatttcaaatggacagggaggctttagttrtaagcctggacagttagcctactttagtttgagaatgcaaattatttgtggaaagaagtcagtaggaatatttgataaaaggaaaacaaaactgattcttattttaattatttttctttgaattattagaaaagatcactagctgaatatatgacttggggggaaatagtaaaactttcagagaatttttagggtagcatagtaaatagtaagcagtagactgcgtcaggaatttatggattaaatgagtgttcatttggaatttatgatcacaagcataaattgaatttagtcagtagggatttgtgattttctgtagcaatgtctcactgactgggtaaaattagttttggaattttgatgaaagagctcaaggtaggggacatggagg

SEQ ID NO: 519046 - DNA, 535 bp, Homo sapiens
gctaaatataactggtatgtcctgtgtttagattttttaaattaatttttaaaatttggttaatattataattgttattttttcatgagaaatatgccattatactggatccattcttgtaatccataatccacaattatgccgtgtgttttcttaatatgtgtgcaaaatgagtacattacagtttcttatattacattacattccaattgaaagaatgaataagaaagatattttattttatttttctaaaacagacaaatatagaagaatggaaggcaatttaccaactgctctgccctgtttttgagtaaggaaaggataacatatgcaatttttaaaatttattttctaaatccattagttaatatattgttagcttccattagaacaactgccacccctatttacttctgatgacaatgstttattgaattggaaagaaatggatattccaatcaatgtgaagcagtaactaattaaaatagtctttatggcttattgtagaagaagcatagatatggaataattactg

SEQ ID NO: 519047 - DNA, 518 bp, Homo sapiens
ctgtagcaactccaattcacacctataaagaagcacaggtggtactgtttttgcaactcagttcattcatatgcaatacaatttaatgctcatgataaatttaaattttaagtttaggggcgtatttttccttttgggaaaagcacttcaaactttcaaccttgtacagatagatagccagcattatttttataactcattttatattgctagatatcacattactatcataacaaakcatggctaaaatactttttacaaatatgtcatctattttaaataagcacatagtgttttatttaagtaatatatagtgatctcaaataaaatttgttttctctacagaatttcttctacagataaggcacatgtaaaggtctattattcctttcagtgaattactcagatacactttttagattaaataatatacatattttaaagtgttttatatttctatattgtcttctacaaagattgacatgttccctcactaatacataaaaattcccattgtc

SEQ ID NO: 519048 - DNA, 683 bp, Homo sapiens
tgggtcttgtaatactttatataaaaatatgacagcatccctaacattgacagttgatatgaaattattgattgattagtttctaagttaaatgttttcaccaaactgatttatatctatggcagtatcaggcagccacacatcaacaacaataagactctgactcaggttgaatcttaagaaaaaataaaaaagagtaatatataggtggaaagatggaagtttgaaaaagtacacaggcatagaacatactgatcacatcttagtcacaccataagagctttatttaaaggaattaaattcaatgaagagatccgtgtgaaggcctcttaaacaggtaagtaagagcttaatgtatacttctacaagaaggttggcatagcaaaattcaggaattcttaggaagatgataattaagaaataaagctatttcttatcaatataacacccaatcaaaccaacaacatgaatgatatacctaggtggtcatggatagataccgaatatattggccacgtatgacagatgtggatcacatgggtacacactgagcaagtcacatagtgacaaagttttgaggagatcattcactcaacaaaagtaacatttatatttttagtaaaaatttacactttctgamgttcagcctttcattatagtgatatattcccttgctcttatga

SEQ ID NO: 519049 - DNA, 495 bp, Homo sapiens
aattcctgaatccagttttcaaacatacactcacggtcgtgaggtagaggagttagtctcctcgaatttcagtcagttatgtgagaaggtacttggttatcatgtgggcatcttcatttggccatctcctgggtaaatggcagagatatatgatggttaatgattattcagagccatgttatgctagaatggttagctaagtgaataatgtatcttatctctaattttttttcttgacccttcaacattagctccctttgctattaagaatgctatttgcagagatggtgtagtcttaagatttggatttgtgggctttgaagtttcctcagcacaataagctctttttctactgtgtctacttttgccacggsgcactgctcattgtacaaccagcatgctgttccctgagtgaatcttcctgaaagtctgtaaaaagggaatctgaggaaacagagcccttcatcaaaaggtttctgcatgagcgcacattca

SEQ ID NO: 519050 - DNA, 495 bp, Homo sapiens
aattcctgaatccagttttcaaacatacactcacggtcgtgaggtagaggagttagtctcctcgaatttcagtcagttatgtgagaaggtacttggttatcatgtgggcatcttcatttggccatctcctgggtaaatggcagagatatatgatggttaatgattattcagagccatgttatgctagaatggttagctaagtgaataatgtatcttatctctaattttttttcttgacccttcaacattagctccctttgctattaagaatgctatttgcagagatggtgtagtcttaagatttggatttgtgggctttgaagtttcctcagcacaataagctctttttctactgtgtctacttttgccacggcscactgctcattgtacaaccagcatgctgttccctgagtgaatcttcctgaaagtctgtaaaaagggaatctgaggaaacagagcccttcatcaaaaggtttctgcatgagcgcacattca

SEQ ID NO: 519051 - DNA, 634 bp, Homo sapiens
ttttgatgacgtgtcaatgaaaacaaaattcttcctttattattttacatgtttaatgattgagataatattacacagaactgcttcttgcttgcacttttaaatacgtgtttcttcttcatatcctcatacttttagtgcttgatgttttaggacgtatttacattgtgataagacctttgggctgacatcatcatgttacgatactaggtagggagtagggtattcctggagccatttctacattggaatgagtagcaccaacttaattatatattaagttatgwtttttggctatatagtctttgaccatttatccatatgacaataatttgtaatataattttctataaagaatatggtattataaatgcaaaatatattcaatgaaatccaaaataaatgtatcttcttcaacttaactttgacttgctcagataccaaaaatatatgcagcttctccaatagtatttgacacagggcaagtgtgatagcaaatgctctacctactggctggttacaagttctaaatttgggaatggagtgatgaaaagaaaccatctccaagataatgagatctgaagaaaattatgacaggaatattaagagtttgtttaccagccatcctaagaaa

SEQ ID NO: 519052 - DNA, 491 bp, Homo sapiens
atactcaataggcaaatagccatcatactaacctatagtaaactactagttaacaacagcttaaatgttttcttacttcttgacaaatggtccttctactctgtcttgataactaaattgctgcaggaagtgattaggcaaacagtgtgatttggaccaccaaaagagtagaacctacagtttttataggaaaagacatttataattagaatcatctaataaaattaaataactaagattaaatattagaaatcktatatccttatcaactttctttttgaccttagttaactcacaattgtcccatgttatcagcatccttatctgtaaaatcataagagctatgagttcatctgcaagttaagattgaaataaaccaattaaggctgggaaacaagatggttacccaaacctaattttctaaattggcagtgtattgaatttacattcttgttagcttctttattaagcagtttttattttgccttcat

SEQ ID NO: 519053 - DNA, 489 bp, Homo sapiens
tgcaagcttggtttccttatgaagaaaagatagttgtttcaaagtgttggatcaacagctcagaaatgaagccaagagccatgaaggatcattcccagggaacagtactagggccctataaaaaaaatctagcagaggccgggcggggtggctcacgcctgtaatcccagcactttgggaggccgaggcgggtggatcacgaggtcaggagatcgagaccattctggctaacacagtgaaaccccatctctactaaaaatacaaaaaaaaaaaaaaatctaccaatatgtgcccagctaggtctctgaattgctgcacgccagtaactgctgcactcattctggttcccactttttgaatagcagtgtctattactataatgacactattgtatatgaartttgcatagggcagataacttgtcttttttagttcataggctgttaagttgagaggaatattgtcaggggagttgttctcagcaaaccc

SEQ ID NO: 519054 - DNA, 640 bp, Homo sapiens
tgcagttgttgtgggatctaggctgaggaacaagccgagcctgtgcaggcgcttggagctgcgccgctgcatcacagcagccaaagtgcctgactgtgtgctgtggccagagcccgtgctcactcgctcacacacccctcgccgctctgttcctggctcgaccacagggtctagtagcagcaagccagcacacgctgccaggccgcgcatgtccgagcaaagcaagggtataggtcgcactggccttctacagaagtagcatagttgccacttctggatggtgaagtagtgctgaaaaaatcctgtgtcaattctcgattctcaactgcaatttttaaaagctttctttaactatagtcacccttttggcaaagaaaagataaatgattgaggtgatggatatcccgattaccctgaattgatcattayacattgtatgtcagtgtgaaaacatctcacacaccccataaatatatacaaattttatgtacccattatggtaaaaaataaaaacacaaaaaatacaaaaataatcatttagactctaaaaaatttgctgttgctacacatttttgttagcatttgctgctcttagtgttttggatttcagccattctcatagtcatgtagtagtatctaa

SEQ ID NO: 519055 - DNA, 552 bp, Homo sapiens
tttaaatgcagccagtcaataaaataaaaacacctaagaacatgaaattgtctggctttattagaggatgatctgtacatgaagcattcttaaggaagatgcaaacttgcactgaatattttcatggacaaatattttgtcttttaaagtcattatttcctttctcttcctctattcagccacttaattagcaataatattaaatgcctttggcagaaaaccctgtaaaaatttgtgttagatatcaaatagaattaaatttggaatacatagttaattgctaagtgaaaatctccatattatagtttagcagtgttctgatattgaaaatayggtctctgtcataaaaaagtttataggttaggtgcagtctaagtatatttgtttttcgaatatgtaaataacttggtaccaattatgaaaagaaataagataaaaagtcacaaaaacaccaaggctcgaatttattcctgtataagtattaattacacatggtgtcgtactactaaactttaaaatgagatactattgtgttgttttatttcaaataca

SEQ ID NO: 519056 - DNA, 203 bp, Homo sapiens
tgtcactatttgtatttttatgtatctctgaaatgaaaaccttgcctatctgttattcaatgtataggagacagatctatacaactacaaatacctggaatacgaaggaagatttacttagtgtggkaagtaattgacatagtttttatcaagctcagtgttttttgtttgtttgtttgccatggctgagaatgaagaataaa

SEQ ID NO: 519057 - DNA, 620 bp, Homo sapiens
aggttggagcgatgtgtctacaagccaagaacaccaagggtttccggcaaccaccagaagctacgagagagatcatggccctgctgataccttgatttcaggcttctggcctctagaaccttgagagagtaaatttttgttgctttaggctactctgtttatggtactttgttgctgcagccctaggatactaacacagcttgtcttagaacttctcaattccctctccacttattactctaatcagcataaccaatagaattgatatttccttttttaaaatttaaagtttcaggatacatgtgcaggacatgcaggtttgtgacataggtgaacgtgtgccatggtggtctgctgcacctatcaacccatcacctaggtatggaatgagaatcgatatttcttagaaggaaagaagagcatctgtggctacctggatgctgatatttttgtcccactcatgtaatttagactatttgactacatgagctygtctttctaaggattcaatcattcacactactcagcttggtttaggggatattgataagaatacacactattctcaggaagctttcagtttagggggaagagacaatggaacacacaaataaaactta

SEQ ID NO: 519058 - DNA, 387 bp, Homo sapiens
ctgtgcctcattgatatgatttgtgtcccataggtatattggtcactaactgggatctgagtgcctattgcccagtattgggcaaaccatgggcaaccactgtattttggaatgtgttatgatggttgaatgtatttaggtgggaagctgggaaaggcaatttaaagatctttgtgagaaaacatgaaggatatggaaatttgttggtcaaacttaacaacaaataaattctaaaagtagctgatcacaagattcacaaactgaccaatctggttctgtcctctcacttttcccacaacccagccaagactgactggcctatcatgycttcctcctcttaagtcaagcagtgaaggatccaaaaataaagtcccggagcaccatcag

SEQ ID NO: 519059 - DNA, 475 bp, Homo sapiens
aagtgacattttcttgtcaaatcccaacttttacccatcaaaggcttggggagaaagggaatccattgcaatgagttggttctgtagatagccctgmagaatcctggggggtgtttcacacgccagagaccaggatgggttgcggaaagcagttaactaccaagtatagtaagggaggcacagtaactcacctggaattgactttgcaagctgaagactgttttcaactgtgactgtgccattaggattaatgcaattcatacagttggctagcacatcagataaatatgatgaattgtccttatatccttagtccagtgagaactggcttttccatcacagcttaagctatacacatagagaggcaaaaaaaaaaaaaaaaaaaaaaaagaccttacagttttgtttattgtgcttatcacaagtgctggaaactcacattttcattgctaatagccctctttgaaagtttgtt

SEQ ID NO: 519060 - DNA, 421 bp, Homo sapiens
agctgatctttaatgtgctctactgttataatacccttgggcaaagtcagtttccaataggaaaatagacagcttctgggtacccctgtggaagctgcacaaacacaaacagactggcaccccagcctgcaatacctggtgagctctgctctgtccgaatcacagaagggtggcagaatatataacctcaaagcatgcyactttggcataaggattatgttgaagtaaaggctcttgaaaaatagcagatacaagaagagcactttgaccttcctttttcttcctaaaagcaggagataaatctccaggggaaagttgttgtccctgtattgggaggaagaaacattcttatcaccagagatagggagtcaaggtcaagagacatccgtaccaaaaaactttgttaaattaaccttatctg

SEQ ID NO: 519061 - DNA, 591 bp, Homo sapiens
tggttttgttggtgctgctaagcgcatcctcctggcccatccacttagtatttatggcatcaactaaggattgaagacgcgagattagaataaatgtaaatcttagtggatataagatttttgatgaaaatgtttaaacggtacttgtatgccacacaagaccgatggcaattttcatgttggtcgtaatgtttataaatttaggtatataaatgaaggagaaacgtagagtagaagaaaaaaagatctctgtctttacatataaaagggctgaaacaaataattactctttatgctttgtcagatggtttatagtttattatgatcaatgtaatctcattttttcaagctkttttttagcaatcccgaagtgcaggaagatacacgctgttgcaaaactgttaaatgactgaatcaggactccaagccatgttttctgacttcaagacctgtatttaaattcctatagtattcttggaaaatactagactcagggatgttttcacagagtaatatgttttgaaaaatgtgtctgcgaaactgccttaaaacttgctatctcctgcaagtcatctggagttcaccagaagt

SEQ ID NO: 519062 - DNA, 501 bp, Homo sapiens
gaaaggaacttgagtctgggctggctgcttctagtcgccatgtggtgcactcttcttatgcacttacctggccttgtggagaggtttgcatttgaaaggctgagggatctgttgggcctcctgtggagcctgtgattctctggagtatttgactgtgttctactaaataaatttgtacatgtcgagaaggagccaagctggctggcctttaagttttcagtgctgagctggaggtggcccccttggaacccagccaaggtctggccaagacccagaccaggccggttggcaaggaggcgacatcatgtcctgccacagcaatgagacctgstagtgagtcgtgggctcagatgggcctgggacagatatggcctctccctgaccctgagcctaagccacccactcaaggaagcatttcagggcccaggtggctgtgaccttctttcctctgttctccttgacacccattttgccatggttacctctcagggctctggaacc

SEQ ID NO: 519063 - DNA, 605 bp, Homo sapiens
acagctgaaaggaacttgagtctgggctggctgcttctagtcgccatgtggtgcactcttcttatgcacttacctggccttgtggagaggtttgcatttgaaaggctgagggatctgttgggcctcctgtggagcctgtgattctctggagtatttgactgtgttctactaaataaatttgtacatgtcgagaaggagccaagctggctggcctttaagttttcagtgctgagctggaggtggcccccttggaacccagccaaggtctggccaagacccagaccaggccggttggcaaggaggcgacatcatgtcctgccacagcaatgagacctggtagtgagtcgtgggctcagatgggcctgggacagatatggcctctccctgaccctgagcctaagccacccactcaaggaagcatttcagggcccaggtggctgtgaccttctttcctctgttctccttgacacccattttgccatggtyacctctcagggctctggaacccttggctgagttctgctgaacagccatgcaagacaagactgagaccaaaggaggcttggccctcgtccccttcaggcgcggacgattgtccttggaag

SEQ ID NO: 519064 - DNA, 605 bp, Homo sapiens
acagctgaaaggaacttgagtctgggctggctgcttctagtcgccatgtggtgcactcttcttatgcacttacctggccttgtggagaggtttgcatttgaaaggctgagggatctgttgggcctcctgtggagcctgtgattctctggagtatttgactgtgttctactaaataaatttgtacatgtcgagaaggagccaagctggctggcctttaagttttcagtgctgagctggaggtggcccccttggaacccagccaaggtctggccaagacccagaccaggccggttggcaaggaggcgacatcatgtcctgccacagcaatgagacctggtagtgagtcgtgggctcagatgggcctgggacagatatggcctctccctgaccctgagcctaagccacccactcaaggaagcatttcagggcccaggtggctgtgaccttctttcctctgttctccttgacacccattttgccatggttacctctcagggctctggaacccttggctgagttctgctgaasagccatgcaagacaagactgagaccaaaggaggcttggccctcgtccccttcaggcgcggacgattgtccttggaag

SEQ ID NO: 519065 - DNA, 384 bp, Homo sapiens
acctcgtgggcccagaaccctcacttccagcggagccaggccagccttgctgctgtccaccgtgaaggactgcaggacacgggctcggacgcctgagcccagcccggggccggcaatcttgaccttgctggggtccacaacatccttcacaggaaccctgaaggggctgcctggaagagaggttgtgggattctgagcacaagctgggaattggagaccaccttgtgcacacccagaatagcactgctgctcccccgggacctcggccrtgcaggcctcggtcagctccccctgcctcactgtgtgcactgctcatgtgcctactcattgttgtcaaccattctcacagaacacctactacgtgcagatgttgtgccacgtgct

SEQ ID NO: 519066 - DNA, 350 bp, Homo sapiens
ctgcgctcccgcggtttctttaaacgcccagatgggcaacgacgcgcgcggacgagggcggggttgggttcaggtctggtcacatgacctggcctgaggtgctcgcggcccccaccccaccagtgggcgtcccccccacgcgtggtcgaccatcattggtcggtggtgaggccaatagaaatcggccatctgggaacccagcgttccgaggcgcakcctaacatagtgaaccgacgaaggtccaatggaaaaagacggccatgggcatagaccaatgacaaagtggcaggggcgggcccaagggctgggtcaggttggtttgagaggcgggtgggtataaaagtgcaagg

SEQ ID NO: 519067 - DNA, 448 bp, Homo sapiens
cagcgatgcctggtagggctgggggctgctcctgtgtctccccaggtgagcacacccctattcactgggccctgcttcagcctgcagcacccttcaactcccaggagctgggcttgccactctgctcaccttgtggagctccatctgcctttcctccccaattcccccmctccctgcactcgtctcttcccacaagagccctgtctccttttcctagctattcccatctgaggccatctttattcatttagtttttagagacagggtttcactctcacccaggctggggtgcagtggcacacaatcacggctcactgcagccttgaccaactacaggtgcgtagcaccacagccaagtttttgtatagatggggtctcgctttgttacccaggctgtgacaagaggagcctcccacgtggtgtggatgaggaggcagatggcagggcc

SEQ ID NO: 519068 - DNA, 448 bp, Homo sapiens
cagcgatgcctggtagggctgggggctgctcctgtgtctccccaggtgagcacacccctattcactgggccctgcttcagcctgcagcacccttcaactcccaggagctgggcttgccactctgctcaccttgtggagctccatctgcctttcctccccaattcccccactccctgcactcgtctcttcccacaagagccctgtctccttttcctagctattcccatctgaggccatctttattcatttagtttttagagacagggtttcactctcacccaggctggggtgcagtggcacacartcacggctcactgcagccttgaccaactacaggtgcgtagcaccacagccaagtttttgtatagatggggtctcgctttgttacccaggctgtgacaagaggagcctcccacgtggtgtggatgaggaggcagatggcagggcc

SEQ ID NO: 519069 - DNA, 516 bp, Homo sapiens
taatcttcgatacctgaaaactgctttcagaaaaggagctaatattatctrtgtacattgtagttaagttgcgtttaagcaccaacttaaaaaagctatttgtggaatcacagcttttgtccttgaaatatacttttaagcattttagagaaagtaaaggtagggaaacacgttttggggaagaaaagttgtcctggttttgctgagaacagtatgtagacagtcatcttctcatccatgtgagaatctgtctctgcctggatacaagggagacacctctccctgcagtcttcccatgctacattcagtcctccctcctctcatctttccctgattgtgtagtgagtttcactgggttctctgaaagaatctttgaattccattctaattctcaaaaattgtgcttctgtgatatgcaagagttggtggggttccaccatgaattccaggagaggccataggtaagctgtggtcacttgctgtcatcagcactgcagggatcccacacatatcctg

SEQ ID NO: 519070 - DNA, 516 bp, Homo sapiens
taatcttcgatacctgaaaactgctttcagaaaaggagctaatattatctatgtacattgtagttaagttgcgtttaagcaccaacttaaaaaagctatttgtggaatcacagcttttgtccttgaaatayacttttaagcattttagagaaagtaaaggtagggaaacacgttttggggaagaaaagttgtcctggttttgctgagaacagtatgtagacagtcatcttctcatccatgtgagaatctgtctctgcctggatacaagggagacacctctccctgcagtcttcccatgctacattcagtcctccctcctctcatctttccctgattgtgtagtgagtttcactgggttctctgaaagaatctttgaattccattctaattctcaaaaattgtgcttctgtgatatgcaagagttggtggggttccaccatgaattccaggagaggccataggtaagctgtggtcacttgctgtcatcagcactgcagggatcccacacatatcctg

SEQ ID NO: 519071 - DNA, 516 bp, Homo sapiens
taatcttcgatacctgaaaactgctttcagaaaaggagctaatattatctatgtacattgtagttaagttgcgtttaagcaccaacttaaaaaagctatttgtggaatcacagcttttgtccttgaaatatacttttaagcattttagagaaagtaaaggtagggaaacacgttttggggaagaaaagttgtcctggttttgctgagaacastatgtagacagtcatcttctcatccatgtgagaatctgtctctgcctggatacaagggagacacctctccctgcagtcttcccatgctacattcagtcctccctcctctcatctttccctgattgtgtagtgagtttcactgggttctctgaaagaatctttgaattccattctaattctcaaaaattgtgcttctgtgatatgcaagagttggtggggttccaccatgaattccaggagaggccataggtaagctgtggtcacttgctgtcatcagcactgcagggatcccacacatatcctg

SEQ ID NO: 519072 - DNA, 581 bp, Homo sapiens
tgcgatctgtgcatgggggagtaaatcttgtttctggctggatggggagactctcagcttcctrcaacaaaactatgaatattcactcagagaaacaagagatttggcttggtagtgtttgagggctcccaggccccagccagagtcctccgtgagtctgagggataaaaatgaagaaggctttgggagtttcattcttgattttctcttgggagctgtgctgtgagttgctgggctctggaaatatgaaaaagagcgagtgtagtatcttatttaaaagtctggaagttatagaaggttggttaaggcctcagtgctcacctgtgggggctgtgaaaagagagcatatcttctaaaagctgtcagccatgaatgaatgtcatctgtctgtgcttctctgtttaaacaggggtgaacagactacatacgccggagcagagtccttcattcctgagtatccaggagggaatgcatgccattcttaactgtttatgtgtagggggaactttctttataacctctgtctccaaacagaagtgaagaataatgcaccatctctcatatgtgaagaagctgaattt

SEQ ID NO: 519073 - DNA, 581 bp, Homo sapiens
tgcgatctgtgcatgggggagtaaatcttgtttctggctggatggggagactctcagcttcctacaacaaaactatgaatattcactcagagaaacaagagatttggcttggtagtgtttgagggctcccaggccccagccagagtcctccgtgagtctgagggataaaaatgaagaaggctttgggagtttcattcttgattttctcttgggagctgtgctgtgagttgctgggctctggaaatatgaaaaagagcgagtgtagtatcttatttaaaagtctggaagttatagaaggktggttaaggcctcagtgctcacctgtgggggctgtgaaaagagagcatatcttctaaaagctgtcagccatgaatgaatgtcatctgtctgtgcttctctgtttaaacaggggtgaacagactacatacgccggagcagagtccttcattcctgagtatccaggagggaatgcatgccattcttaactgtttatgtgtagggggaactttctttataacctctgtctccaaacagaagtgaagaataatgcaccatctctcatatgtgaagaagctgaattt

SEQ ID NO: 519074 - DNA, 472 bp, Homo sapiens
taagaccatttaattaagctcttaaatttttttgatatttcatttcttattttccaaatttatgaaggtctttctttggtgcaaaagaattgagaatgcatacttgtttttataaataattcaagtactatattttttcctaaagtctaaaaatttttgtattctgaattatatctggatttaagagtatgttaaggcatagtaggactattcaaacactattttttttagtacrtaaaacagagctgattagtttttaattttctctatttttttcatttctgactttttgcttcttttaaatgaaacatgtattttggtatttggggctgtgtttggagacccttaaatcttccgggaaatcatgtatttcttagaatgctgccaacacccttaagtgagaatattctatttatgatcttattcttatttaactaagaggtgttgcttctactactatagaggattgaag

SEQ ID NO: 519075 - DNA, 625 bp, Homo sapiens
gtagagagtcaggaagaaaaagttttgctttctgctttccatgtgctcactcatcaggatcctgcaccatgggaggcacctgcagtgcacagtgccctgcagtttcctccagaacccccccattttagggcgattctgtgaaagagatcctgcagtgagacacctccctgtgaacagctttccccagtgtcctagaggatgattttctgccatgttctagagggtgratttctagcaagttctgctgggacagcaccacagcaacttccctttcatccagtgagccacagctgtttcttttcaataagatctgggtctcagccctgagggtggggctacaggcctcttccctggttatcctaccctgccctaggagtagaggctgcaccttatgtctgctattcctacaggaataggaatagcagaatttcttttcttcatattattcattctcttgttactctaatactctgtttattaatccttaaatttttttctgttgaaattctatggtttctctttcctgattggactcgacttagacatgcaccaaggacttcaagcaactggagagcatcttccatctccccgcccactcctgcctgagatatcaaagtagttttct

SEQ ID NO: 519076 - DNA, 625 bp, Homo sapiens
gtagagagtcaggaagaaaaagttttgctttctgctttccatgtgctcactcatcaggatcctgcaccatgggaggcacctgcagtgcacagtgccctgcagtttcctccagaacccccccattttagggcgattctgtgaaagagatcctgcagtgagacacctccctgtgaacagctttccccagtgtcctagaggatgattttctgccatgttctagagggtgaatttctagcaagttctgctgggacagcaccacagcaacttccctttcatccagtgagccacagctgtktcttttcaataagatctgggtctcagccctgagggtggggctacaggcctcttccctggttatcctaccctgccctaggagtagaggctgcaccttatgtctgctattcctacaggaataggaatagcagaatttcttttcttcatattattcattctcttgttactctaatactctgtttattaatccttaaatttttttctgttgaaattctatggtttctctttcctgattggactcgacttagacatgcaccaaggacttcaagcaactggagagcatcttccatctccccgcccactcctgcctgagatatcaaagtagttttct

SEQ ID NO: 519077 - DNA, 487 bp, Homo sapiens
ggcatggtgacacatgtctgtgatcccagttacataggaggctgaggcagggagtattgcttaagcctgggaggtcaaggctgcagtgagccgcaattgcaccactgccctccagtctgggaaacagagtgagaccctgtctcaaaaaaataaataaataaaaataaaaataaaaggtagaatgttaaaatgttgaagatagtttatatgtatatttataacttcatattgttttttgtgatatgtcttatataataggaaaataaaattgacctttatattaatattctaaggctggcataacaaaatatcacagactaggtgacataaacaacataatttattatctcacagttccacaggctagaagcccaagatcaagttgtcagcagggttaatttcttctgaagtttgcagatcatgttgmcttttcattgtgtccttacacggtcttgcccctgagggtacgcatgtctgtgtccaaatt

SEQ ID NO: 519078 - DNA, 481 bp, Homo sapiens
tgacttgaaaatgaggtccaaggtaagcatgtggcactatctttcaggagaaaacgttccttgcagtgtagtcccttgcctgtgagggggcacagcttctgaaaacaaatacatctcctgctaaaatcttaggttcatgttcagcattttattgagatgacaatattttttatgctatgcagttaagaattgaggatgccagaggttttaaagatggaattttcaccaggtccagcgattacaacactcgtaatgtttggtaagtttggggaaaataatatgcctgttaaaatttggatttttaaaatttgttatgtcagtataataaccacaattttgtccaattcaaactcagggtgatatgcagctttttatttctgaggaggaagcagtggagactcagggacctggatagaaagttagtggccttctcagaaggagctctccctattgtaaactsttcctatgccaccatggtgaa

SEQ ID NO: 519079 - DNA, 629 bp, Homo sapiens
caaagtaaaaggggaactctttcaaattcgtgattttttaaaaagcatcttggactaggggaaaaggcatgaaatttggaacaggaaatggaaatgccaggctcagttctgctaatcctggctacatagggacattgtcagtgtagcagccttcaatttcctcacttgaaataaaggatatggatcaatgagcccaaaatattacttaatccctaattttattagggaaaaaaatcactgggcacttgtggaagaggaggaaggctgcacagttttagaaggtctcatttgtcctatgtgcagccctcccaagacatcagtgggtctttaaggtgcatgaggtggctcttaggttcctctaattcttgtataagaagcagtagattcattaagcattagaattggaagaggtcctaggactctcaaccaagcttttcattttagagctgaggagtaaaaccattgcataataagacagacaattttctgaatctttggagtgatagtgacaaatatctggatctgatttcaccatttattagttgtatgattcccaagcttcaatgtctctattaggcaaaatgggartttataagaaagtaacaacttttccccatccaaaggagaga

SEQ ID NO: 519080 - DNA, 623 bp, Homo sapiens
ggatctgaaatgatggcagaggtatctctgctgttcttcctcttgaaggagtatttatttaatgcccaggacctttttccaaatggtcctttggagaatgaagtcatgagacaaagccagagggcagggactactgttcattctgtccaggcatcctagacagtcccttgtgcatgttcatgggtcagtctactcttaataacatcccagaacttccctcacataaattcagaagggccagatgtaatatgaagagtcctggtttccagttgcggactacttggaaaaagactgcacaggtgcatacactccctgccgaaaaaaaaaaaatgtgtgtatgtgtctgtgttgtctcacaataatctggtcacgttaatataagtaaatctttttcattttaatatagtcttcttgaaacccacatctccaccagccacatctctatatttctcatcccttcatcatcaaattacttgaaagaattgtctggactcattctcttaatttccattcttcagtctcattcaaacctggcccctgttagcattactccaagggaagttctcactttaacaccagyggttttggtattgataaggctatcagatatttttcagtactca

SEQ ID NO: 519081 - DNA, 582 bp, Homo sapiens
tactttttcttcaattaatatataaamaaacctgcattgacatggttaaattcctggactctcagttcttagggatggactaaatggctgatatcatcacttaaaaaagtgtcttgaatttgttggagcttatgttgagaaataaagtttatattttttaattgttaccttttaattccatatttctataaactttttgaaacccccttataccttgatctgaaaaatctgccttgatttgagggtctggggataatctcgtttttctcctcagggattatgtgtaatgttaaagccacaaaagtagggcagtgctgaaacaagaagtgaatataccctgttcccactctaccactggaggaaatgaggacacaatctggtatcaacagtttgataaccatggctcacagtatctgattggaggtttaaagaacgaggtgaccagtcaaatggcttcactgcctgtattagtctgttctttcattgctataaagaaatacttgagactgggtaatttgcaaaggaaagaggtttcattggctgttcaggttccgaaggttgtacaggaagcgtgttgttggt

SEQ ID NO: 519082 - DNA, 546 bp, Homo sapiens
ctgttggtattctaaatatcactgtccccacaaatggttgaacaagtaatccaaagacaaaaattcaataaaagtcatgcttttaaatatacaaactaaaaatcaaatctctacaggccaaaactctttgtcaagaaaatcgacaatagtggagaagacctggacagttcttgaacatcttttctgcagctttggctgcataaggaccaaaaggggatggggggtggggagaggggaggaaaataaaattattcccatagatttaggaaaagatagattgttacacagccataataagtagccaccagaaccagttttatacctgttcaactgattaacaactcgtctcaatgaacatgcttttgcaagccaactaatcaatgtcagctcctggcttctgaaagtcagccagtcagtgcccctgagtgccaagcaatcagcaatagcctcaccctagtgaytctgtttctgcagataatgttaactcatttacacctctgaagtttgccaatccctgaattccatgcttccccaaaacccagtata

SEQ ID NO: 519083 - DNA, 616 bp, Homo sapiens
tttaagtaggaaagtatttatacaaatcatagtcatctgtgattattatagtcctttggatagaccccaagtcttttgcatcaatggctcttgctccaaccattgtgtccttccacctctcgctgaggcacagtcctgttgtgattgatttagttgaggcttrttgttacgtttctgcctacaacggccatttggcaattctcagcaaaatatgtgaaaatgttatcctgaagcaagatctgggagtaagagatggcaggttgaggagataatagcagaaaatctaaggacttgcctaagtgtcaaaactcagaagatagcagacatcaaaaaagctgccaaaatataatgctcagatctcagaaacccttgcaaagctctgtctccagctacacccattctgctccacccacccacttccaaacagatgaattagactgacagggagcaaataggtagcaaggtttttcgtaatgatgcctgtggtagtgctttgacagcacaactcttctttggaaagggaacacaactcatcgtggaaccaggtaagttatgcattttactacagctcagtgtgtatatttctttagggttgttgtagcgtagtcctgaatga

SEQ ID NO: 519084 - DNA, 640 bp, Homo sapiens
attatccaactaaatcagaccaggattaagagatactcttaaataaacaaggagatagggtgtttattttatggacaagtttcttttgtaacttgtaactcccttgaaagtcagccagagtatgtctcaaaccaaagtcaagatagtgagcaagaagtgttgcacttatgaagggaggtgagtgagcaatgcatgtggtttccaaccgttaatgctagagttatcactttctgttatcaagtggcttcagctatgcaaggaaaccaaacaggggaagttttctcaagcaggttgaaagcaggttccaagaaagccctttgaaaaatgtctaatcctttcaattgtctagaactaaagccaaaaacataaggaaccagattcttaggaataagtttcctgccctgagtgactgaaacagaatcagtcttttagttgagcttctcagcagaggaaacggggagaatgatgatggtagtgatggggggtttctctgaatagttgattttctaggaaaaccatgatcaactttggtccatttacaaagccgtgatcagcagaaacttcctgactagcaatcgcyccctctcaaccagatataaccagttgatctggcagtagctctgctgctgtgaacctcaca

SEQ ID NO: 519085 - DNA, 592 bp, Homo sapiens
tcaacaggaccacggtgacccagttacatattcttaatccttacaacatcatcaagcagttgctgttttccccactttacaagtgaggaaactgaggtgtagcaagttaggaaacttgtcctgagttttaaactcaagcctacctgccccaaagcctgagctcttttaaattaactgcaactgctgaccagttagattaactaattacttaattaataagataacaacctaacaggctgtaaggtaaaaaagtaatcagatttgttctataggtcccctcccttttcgggaatagctatacaattgtataattttatgcttcccctgggagagtgggtggagccctggctcccagcccrtgatggaagggtcttggcagtatttgtaaagcagtctgtgggggtgtaactcagggcggatctgaaaagctggtctttggaaagggaacgaaactgacagtaaacccatgtaagtctgaataatgcttccaaatttctccctggaaccctgatttccaaattttccattctgttttataacccaggtccaaaccacagcagtcccattaatggattccagtgcaaaacaactg

SEQ ID NO: 519086 - DNA, 548 bp, Homo sapiens
gtggttagccatcaagttcccatgtgcagaagtgccttgctcagcaggggcaaaatcagcacgtctgtggcaacagcaacaatgaataatatatgatgttaaatcccaggggttcmgcagtctccactgaggtcttatcaaattaaagcttcaaggggattcatatgaacatcccaggagactcaaggactcagtcgcttttcagagggtgggcagccaatgctagggaccagacagtaggcttttttctttggtttcttaccggaagcacactagggcggggctctgcagtgggttttccagaatgcagagaagctgggagcccctctcagcacttggtcagcctcttaggggactgagaactgtaacaactcctaccctttaaaacattgacgaggtcagggtgtttgacagcctaaccaggcaaagaaaatatctgtgcaaggctagcattcttccagagctctggacagtaatcgtatgccagattttccatgcagtggactctagctgcaggaactatatggcaaggctggagtccaaggaac

SEQ ID NO: 519087 - DNA, 548 bp, Homo sapiens
gtggttagccatcaagttcccatgtgcagaagtgccttgctcagcaggggcaaaatcagcacgtctgtggcaacagcaacaatgaataatatatgatgttaaatcccaggggttccgcagtctccactgaggtcttatcaaattaaagcttcaaggggattcatatgaacatcccaggagactcaaggactcagtcgcttttcagagggtgggcagccaatgctagggaccagacagtaggcttttttctttggtttcttaccggaagcacactagggcggggctctgcrgtgggttttccagaatgcagagaagctgggagcccctctcagcacttggtcagcctcttaggggactgagaactgtaacaactcctaccctttaaaacattgacgaggtcagggtgtttgacagcctaaccaggcaaagaaaatatctgtgcaaggctagcattcttccagagctctggacagtaatcgtatgccagattttccatgcagtggactctagctgcaggaactatatggcaaggctggagtccaaggaac

SEQ ID NO: 519088 - DNA, 548 bp, Homo sapiens
gtggttagccatcaagttcccatgtgcagaagtgccttgctcagcaggggcaaaatcagcacgtctgtggcaacagcaacaatgaataatatatgatgttaaatcccaggggttccgcagtctccactgaggtcttatcaaattaaagcttcaaggggattcatatgaacatcccaggagactcaaggactcagtcgcttttcagagggtgggcagccaatgctagggaccagacagtaggcttttttctttggtttcttaccggaagcacactagggcggggctctgcagtgggttttccagaatgcagagaagctgggagcccctctcagcacttggtcagcctcttaggggactgagaactgtaacaactcctaccytttaaaacattgacgaggtcagggtgtttgacagcctaaccaggcaaagaaaatatctgtgcaaggctagcattcttccagagctctggacagtaatcgtatgccagattttccatgcagtggactctagctgcaggaactatatggcaaggctggagtccaaggaac

SEQ ID NO: 519089 - DNA, 558 bp, Homo sapiens
tgggagtggggtttagggacgcgggtctctgsgtgcatcctaagctctgagagcaaacctccctgcagggtcttgcttttaagtccaaagcctgagcccaccaaactctcctacttcttcctgttacaaattcctcttgtgcaataataatggcctgaaacgctgtaaaatatcctcatttcagccgcctcagttgaacttctcccctatgaggtaggaagaacagttgtttagaaacgaagaaactgaggccacacagctaatgagtggaggaagagagacacttgtgtacaccacatgccttgtgttgtacttctctcaccgtgtaacctcctcatgtcctctctccccagtacggctctcttagctcagtagaaagaagacattacactcatattacaccccaatcctggctagagtctccgcaccctcctcccccagggtccccagtcggtcttgctgacaactgcatcctgttccatcaccatcaaaaaaaaactccaggctgggtgcgggggctcacacctgtaatcccagcactttgggaggcagaggcag

SEQ ID NO: 519090 - DNA, 558 bp, Homo sapiens
tgggagtggggtttagggacgcgggtctctgcgtgcatcctaagctctgagagcaaacctccctgcagggtcttgcttttaagtccaaagcctgagcccaccaaactctcctacttcttcctgttacaaattcctcttgtgcaataataatggcctgaaacgctgtaaaatatcctcatttcagccgcctcagttgaacttctcccctatgaggtaggaagaacagttgtttagaaacgaagaaactgaggccmcacagctaatgagtggaggaagagagacacttgtgtacaccacatgccttgtgttgtacttctctcaccgtgtaacctcctcatgtcctctctccccagtacggctctcttagctcagtagaaagaagacattacactcatattacaccccaatcctggctagagtctccgcaccctcctcccccagggtccccagtcggtcttgctgacaactgcatcctgttccatcaccatcaaaaaaaaactccaggctgggtgcgggggctcacacctgtaatcccagcactttgggaggcagaggcag

SEQ ID NO: 519091 - DNA, 606 bp, Homo sapiens
  misc_feature (1)...(606): n = A,T,C or G
attagtctgatcaagctgccataacaaaataccacagactgggtagtttaaacaacagaaatgtatcttcttacagttctgaaaactgagagtccaagtccgaggtgttagcagggttgatgtcttgtgaggctcctctttggtttaaagacagtccttcttactgtatcctcacatagcccgtcctctgagtgcaagcagagagagagatctcttcttcttataaggccatcaatcctatcagattagggccccacatttatgatctcttttaactttaaaacccatctctaaacatagtcacattgaaggttagggcttcaacacacaaatttggaagnggacacaatttagtgcatatcaaggactaaatcagtcagcaagcatcctttacttctttcagagtttctcctctggagagaattatggaattatagttctcaccagcacccrttgttatatgtaagaaaaaaacaaaatttgggagagaaaatggctttcctgaagatcacagagtaaacgggaacagagacagtagcaaaaaccaagtcttcggtgcactctccttttggtctggccttggctcagagagttactgctccacag

SEQ ID NO: 519092 - DNA, 606 bp, Homo sapiens
  misc_feature (1)...(606): n = A,T,C or G
attagtctgatcaagctgccataacaaaataccacagactgggtagtttaaacaacagaaatgtatcttcttacagttctgaaaactgagagtccaagtccgaggtgttagcagggttgatgtcttgtgaggctcctctttggtttaaagacagtccttcttactgtatcctcacatagcccgtcctctgagtgcaagcagagagagagatctcttcttcttataaggccatcaatcctatcagattagggccccacatttatgatctcttttaactttaaaacccatctctaaacatagtcacattgaaggttagggcttcaacacacaaatttggaagnggacacaatttagtgcatatcaaggactaaatcagtcagcaagcatcctttacttctttcagagtttctcctctggagagaattatggaattatagttctcaccagcacccattgttatatgtaagaaaaaaacaaaatttgggagagaaaatggctttcctgaagatcacagagtaaacgggaacagagacagtagcaaaaaccaagtcttcrgtgcactctccttttggtctggccttggctcagagagttactgctccacag

SEQ ID NO: 519093 - DNA, 612 bp, Homo sapiens
cgagttgttccttttgactaaagaattggtcactgagttgtgttcatccttatggcttcttatccaacccttgcgtggggagcaaaagtctgctctcttctttgatgtcctaaaataagacctgtcttccgattcaggtcaaacagggccagatggccagagcccaacataattatttgttgcggttgctgaaaagagttaagtgtttcttctgaacggtgaaggctggcagcaggcagatctgatttttccttcttctgcccactctcttcctcctacccaaagtctcccctcacgtgaccagcccttcctgtgaagtcgaggtgataaactcaagagagaaccagcgcagagaggagatggcagcattaaggagagacaggggtgtcctactggctggagctaaaatccacctcagaggccaggtgcactggcacacacctgtaatcccaacactttgagaggctaagacaggtggatcgtttgaggccaggagttcaagaccagcctgggtcacatggcaaaatcccatctctgctaaaaatacaaaaattagccaggcgtggcagtgtgcaygtgcatgtagtcccagctactcaatactgaggctca

SEQ ID NO: 519094 - DNA, 616 bp, Homo sapiens
agcagtggcatggtctctgcccactgcaacttctggctcctcagttcaagcgattctcctgcctcagcctcccgagtagctggaattacaggcgcacaccaccatgtccagctaatttttgtatttttatagagatggggtttcaccatgttggccaggctggtcttgaactcctgacctcaggtgatccacctgcttcggcctcccacagtgctgggattacaggcatgagccactgcacccgaccctatagtcaatartaatttaatcgcacattttaaaataactaaaagagtacaattggattgtttgtaacacaaaggataaaggtttgaggtaatggataccccattttacatgatgtgattattacacatcgcatgcctgtatcaaaacatctcatgtaccccataaatatatatacctactatgtactaatgaaaattaaaatttaaaaaaattaaaaataatttgcaagatcatttttaataattatttttcatttggggtgcattttcaccatcaaggccccagggtttccctgccctagatgagggtctggatccagggaagggtgtcccaccatctggagcatcctgtctctacacatgttggc

SEQ ID NO: 519095 - DNA, 616 bp, Homo sapiens
agcagtggcatggtctctgcccactgcaacttctggctcctcagttcaagcgattctcctgcctcagcctcccgagtagctggaattacaggcgcacaccaccatgtccagctaatttttgtatttttatagagatggggtttcaccatgttggccaggctggtcttgaactcctgacctcaggtgatccacctgcttcggcctcccacagtgctgggattacaggcatgagccactgcacccgaccctatagtcaataataatttaatcgcacattttaaaataactraaagagtacaattggattgtttgtaacacaaaggataaaggtttgaggtaatggataccccattttacatgatgtgattattacacatcgcatgcctgtatcaaaacatctcatgtaccccataaatatatatacctactatgtactaatgaaaattaaaatttaaaaaaattaaaaataatttgcaagatcatttttaataattatttttcatttggggtgcattttcaccatcaaggccccagggtttccctgccctagatgagggtctggatccagggaagggtgtcccaccatctggagcatcctgtctctacacatgttggc

SEQ ID NO: 519096 - DNA, 616 bp, Homo sapiens
agcagtggcatggtctctgcccactgcaacttctggctcctcagttcaagcgattctcctgcctcagcctcccgagtagctggaattacaggcgcacaccaccatgtccagctaatttttgtatttttatagagatggggtttcaccatgttggccaggctggtcttgaactcctgacctcaggtgatccacctgcttcggcctcccacagtgctgggattacaggcatgagccactgcacccgaccctatagtcaataataatttaatcgcacattttaaaataactaaaagagtacaattggattgtttgtaacacaaaggataaaggtttgaggtaatggataccccattttacatgatgtgattattacacatcgcatgcctgtatcaaaacatctcatgtaccccataaatatatatacctactatgtactaaygaaaattaaaatttaaaaaaattaaaaataatttgcaagatcatttttaataattatttttcatttggggtgcattttcaccatcaaggccccagggtttccctgccctagatgagggtctggatccagggaagggtgtcccaccatctggagcatcctgtctctacacatgttggc

SEQ ID NO: 519097 - DNA, 616 bp, Homo sapiens
agcagtggcatggtctctgcccactgcaacttctggctcctcagttcaagcgattctcctgcctcagcctcccgagtagctggaattacaggcgcacaccaccatgtccagctaatttttgtatttttatagagatggggtttcaccatgttggccaggctggtcttgaactcctgacctcaggtgatccacctgcttcggcctcccacagtgctgggattacaggcatgagccactgcacccgaccctatagtcaataataatttaatcgcacattttaaaataactaaaagagtacaattggattgtttgtaacacaaaggataaaggtttgaggtaatggataccccattttacatgatgtgattattacacatcgcatgcctgtatcaaaacatctcatgtaccccataaatatatatacctactatgtactaatgaaaattaaaatttaaaaaaattaaaaataatttgcaagatcatttttaataattatttttcatttggggtgcattttcaccatcaaggccccagggtttccctgccctagatgagggtctggatccagggaasggtgtcccaccatctggagcatcctgtctctacacatgttggc

SEQ ID NO: 519098 - DNA, 515 bp, Homo sapiens
taaaaaacaggatgggccaccagccacctcctccaactcaacaacattctataactgataactccctgagcctcaagacacctcccgagtgtctgctcactccccttccaccctcagcggatgataatctcaagacacctcccgagtgtgtgctcactccccttccaccctcagcggatgataatctcaagacacctcccgagtgtgtgctcactccccttccaccctcagcggatgataatctcaagacacctcctgagtgtctsctcactccccttccaccctcagcggatgataaactcaagacacctcccgagtgtctgctcactccccttccaccctcagctctaccctcagctccaccctcagcggatgataatctcaagacacgtgccgagtgtctgctccatccccttccaccctcagcggatgataatctcaagacaccttccgagcgtcagctcactccccttccaccctcagctccaccctcagcagatgataatatcaagaca

SEQ ID NO: 519099 - DNA, 515 bp, Homo sapiens
taaaaaacaggatgggccaccagccacctcctccaactcaacaacattctataactgataactccctgagcctcaagacacctcccgagtgtctgctcactccccttccaccctcagcggatgataatctcaagacacctcccgagtgtgtgctcactccccttccaccctcagcggatgataatctcaagacacctcccgagtgtgtgctcactccccttccaccctcagcggatgataatctcaagacacctcctgagtgtctcctcactccccttccaccctcagcggatgataawctcaagacacctcccgagtgtctgctcactccccttccaccctcagctctaccctcagctccaccctcagcggatgataatctcaagacacgtgccgagtgtctgctccatccccttccaccctcagcggatgataatctcaagacaccttccgagcgtcagctcactccccttccaccctcagctccaccctcagcagatgataatatcaagaca

SEQ ID NO: 519100 - DNA, 257 bp, Homo sapiens
ttacagatctggtttacaaggccctccatggtctatttggtgcttctttgttccccagatttattatctgttggcttggtcactatacatgccwgccatactgaacatttttcagttttctgaaaacatacttttccttctgtaagaagcagaacttccagaaaagactcaactgtgttactgtttaaagacagctgaagcatcactttctctttaaagcttttcctgacccctgcctcctttcccagatacaaagg

SEQ ID NO: 519101 - DNA, 257 bp, Homo sapiens
ttacagatctggtttacaaggccctccatggtctatttggtgcttctttgttccccagatttattatctgttggcttggtcactatacatgccagccatactgaacrtttttcagttttctgaaaacatacttttccttctgtaagaagcagaacttccagaaaagactcaactgtgttactgtttaaagacagctgaagcatcactttctctttaaagcttttcctgacccctgcctcctttcccagatacaaagg

SEQ ID NO: 519102 - DNA, 623 bp, Homo sapiens
ctaaaagtgtctccagacactgccaggtgtcctctgtgggggttgcagtctccttaggttaacagccacagctctaaactgacagttgtacgtgttgcattatatatgtttacctacatcctacatgcttctaaaagatgttgtatgaactagtaggatgaggttttatcacaaggtaagtaaatacaagctctgcttttctttgtataaattaatgccaggaatctgaattaaatatcttgtttttgtaagcagtgacatcccatttaggtaatttttattgaaatatgcatcaaagaaactcctaagaaaatatacttaagtacaagttggtcagcttgcctcttaaaataaatgtgatgtctttattttactcatgtaggaaagaattgtattyactaagtctaagaaagtggcttctgtctaaatttgccgtccgttgaggtagaaggcaaatttggagttttcttgtttagaaaaaaaactacagatgactactgtgcacctgaaaacagcactcagcttcactaacgagacatgcaagctagaatcaaattgctgttttgttttgttgcctgtcgtgattgttagctgaaaccaaatcacaaggtctttttctccct

SEQ ID NO: 519103 - DNA, 623 bp, Homo sapiens
ctaaaagtgtctccagacactgccaggtgtcctctgtgggggttgcagtctccttaggttaacagccacagctctaaactgacagttgtacgtgttgcattatatatgtttacctacatcctacatgcttctaaaagatgttgtatgaactagtaggatgaggttttatcacaaggtaagtaaatacaagctctgcttttctttgtataaattaatgccaggaatctgaattaaatatcttgtttttgtaagcagtgacatcccatttaggtaatttttattgaaatatgcatcaaagaaactcctaagaaaatatacttaagtacaagttggtcagcttgcctcttaaaataaatgtgatgtctttattttactcatgtaggaaagaattgtattcaytaagtctaagaaagtggcttctgtctaaatttgccgtccgttgaggtagaaggcaaatttggagttttcttgtttagaaaaaaaactacagatgactactgtgcacctgaaaacagcactcagcttcactaacgagacatgcaagctagaatcaaattgctgttttgttttgttgcctgtcgtgattgttagctgaaaccaaatcacaaggtctttttctccct

SEQ ID NO: 519104 - DNA, 605 bp, Homo sapiens
ctggggaggccaaggcgagtggatcgcctgaggtcaggggttcaagaccaacctggccaacatggtgaaaccccgtctctactaaaaatacaaaaaattagccgggcgtggtggcaggcaccagtaatcccagcttcttgggttgctgaggcaggagaattgcatgaacacaggaggtggaggttgcagtaagctgagatcacaccattgcactccagcctgtgtgacacagcragactctgtctcaaaaaaaaaaaaattagaatggtcctgatgtggagctaatggaccctatggcctgtgtgtgagtaggaggtatgctaccatctgaaatttagtgtgttttaagtctactagtgtttaaaactatcaaaacaatactaatggctttcgcttattgagcatatactatgccctgggactgctgctaggcacttagtagacatcatgtctttgaatcttctcaacaacctagaatataaatatcagtattttcacaagttttatgattgaggaaactgatacattaaactaacctgcccatagtcacacagctaggtcatcaggaaagcttgaacttggttatgaaatctgttccatggctt

SEQ ID NO: 519105 - DNA, 546 bp, Homo sapiens
agatatcaaaaatatttcaacatgtaatcatttatacaaaattattaatgaaaaaagattcttgaaacattgtaccttcttttttgaactccctcttcaaaaccccccgtgcgcatattttacacttctagcacatttcaattcgagttagccactttttaggtattcagtggccactcagtggcaatgagacttcagatagcgttatgttttcttgcatatttatccttattgctttcttctatatgtctttcagcattttgtcagggaaaagaaaacagctttcagagataatactgttaacattttgtatgtcattctagaccttttttctatgcaatatacctataaaaatacatatgtatatgtaacaaaatgaactattttgtggtgtatttttttttgtattggatagcacagygggtctactcgaagagatgcttgtttgcaatctacaacaataaattctggacttgctccagaatttatttggcactctttgtggatttaccaagctatttttaaattggacaagcagctttctcg

SEQ ID NO: 519106 - DNA, 657 bp, Homo sapiens
tgaataacctgaaagacaatgggtagctatggcaaattaggctctgygaactcgcctgcaggttgtagtggttaatattactgtgcccacctagcagagctgtggaagtgattgaatgaggcacatgcttgggaatacctctaaagccaggaagcctagagaaatagtaaagtgatgtgaagaatttgtacaaatggctcctaagacttttgccagctcaaaagttctctgacagaccactcttacctcttattaggacagggatcttagtaaatgtgaggaagtaaaaagagaggaagggtcttagtgaaataggaaacgcaataggtaatcacaatgattttcgggcattgtaataggattctggctaatggctgtgctgttattcagttaagcctctgtggaattgaagttttccttcctactcttcccaaaagatggctgaatatgaaaaaaagaaagctgctacagtgtatgtgtatctatagaacacacttaatgtttactttttatcactttcccgaaagctgttaactttaaagtgcttggaaatgtagtttaaaaattaatattattgaaaagcatgctagcattatttaatactagaagttgacacatctaattaatgttggtgccagattgtaacttttttgtttg

SEQ ID NO: 519107 - DNA, 415 bp, Homo sapiens
ccatggacaggccggcggcggcggcggcggcgggctgcgagggcggcgggggcccgaacccggggccggcgggcggcaggaggcctcctcgggccgcggggggcgccaccgccggctcccggcagcccagcgtggagaccctggacaggtaagcggggcccgggctgccccggcctcccgcgccccgactcccgagggccccgcgcgaggccmgcccgccccctccccgcgcgctgcgcagggcctggcggtggcggggtgggcggcccctcttcatcccctctgggccctcctcccccccacccccggaaacctcagcgccccatccggggactgctgccctcggacctgctgcgggccgcgcacctggctcacttccgccccgagagccccagctcctggaaccccgggaggg

SEQ ID NO: 519108 - DNA, 617 bp, Homo sapiens
cttttgggtcgagactatggggtttttactttttagaattctattttatgtcctgtgattgcatattagctataattgtttgttttgttatgtaactagttattttacatctttatgtctaccttcaaatgattgtatgctgcttcatgtacaggataagaaccttatagtagtatactcccatttgtcccctcctaccctttatgctgttgttgtcatccattttacttttacatatgttataaaccccacaatatattgtttttgtttttgtttaaacagttatcttttaaggataatgataataatgccttagtctcctacagaagcacttgccaatccactccctgccaacttctctggcctcatattcgactgtcctcactgcacccattgatccaggcatactaacctctaacarcttatcactgtgcccttcctcccttccttctcttactccccctacccactttcctattgagttaagttgatccttttctgaacttccattgtaatactttgtgtccacattgttattttagcttttgtcaacctctagtgcagggatccccaacccatgggccgtggatcagcactggtccatggcctgttaggaa

SEQ ID NO: 519109 - DNA, 623 bp, Homo sapiens
gcgttgggaaggggtagtgaataatcccagaggactttcaggtttaggggctcagacagtagagtagatggtagggccattccctggaaagggtcacagttgaggaagagyaggtttaggggagcaaaagaccacaggtttgagttgacgtgttgcatgtgtggtgtatagcgcatttgagtgtagttgaggagggaggcctaggctgcagcaggagagatcagaattgcttgaggtcccagaaagacaacaagtggtcttgagtgtggacctaatggcccaggagggaggccagacaggtgggaagaaaagcactggcatatggagccctgaaaaccgaaggactagagtgtttctagaaggagacagtggacaatgatgtgaaatgctttcaagaagccaaggaagatgacagccaaagtgaactcattgtatggagccatcagggggtcatcggtgacctcggcaaggggtggtttcagttccatggtgactgaagaagccagactagaatgagcagtgggatgcctggaaggtaacaagtggagacagtgcatatgatggaggcaacactttccaggagttgagaaagtttagcggcaaaagacaagatgctaaggggg

SEQ ID NO: 519110 - DNA, 623 bp, Homo sapiens
gcgttgggaaggggtagtgaataatcccagaggactttcaggtttaggggctcagacagtagagtagatggtagggccattccctggaaagggtcacagttgaggaagagtaggtttaggggagcaaaagaccacaggtttgagttgacgtgttgcatgtgtggtgtatagcgcatttgagtgtagttgaggagggaggcctaggctgcagcaggagagatcagaattgcttgaggtcccagaaagacaacaagtggtcttgagtgtggacctaatggcccaggagggaggccagacaggtgggaagaaaagcactggcatatggagccctgaaaaccgaaggactagagtgtttctagaaggagacagyggacaatgatgtgaaatgctttcaagaagccaaggaagatgacagccaaagtgaactcattgtatggagccatcagggggtcatcggtgacctcggcaaggggtggtttcagttccatggtgactgaagaagccagactagaatgagcagtgggatgcctggaaggtaacaagtggagacagtgcatatgatggaggcaacactttccaggagttgagaaagtttagcggcaaaagacaagatgctaaggggg

SEQ ID NO: 519111 - DNA, 591 bp, Homo sapiens
ctgcaggcacagggcatggcaggaggaagctcttcagcgcctgcctcagatctcctcatctccacatcccccttggagcctttgccctcaccctctcctctcaatggccacatttgccaactacacggtgccaccctgcagggtttttgtcggcaacccattccatctcttgcccaaagaaagggaggagggttgagctgtaggccattcacctctgggacctgttctgagagagggtaaggctgggactgctaggccaccttcctggctcctggagatacaagagtgaggaggcaggtctgcagacaggctgcccaaacctgttgaattcagggaggtagtgacaagatgtgacaggcgaacagggacaatggctggagggctccagcaggggctagggacaggtattcagggcatcgggcttggtaaataacattaacaaggcagcaacttgagcaggcaaattggtaatgcagacagggctccgtgactrtgctggctggctgcctgtgagtcacctctgtggatcgatttaattgctgagcacttggatatgcaatgtgcttagagaggctgagttgaagccccgcc

SEQ ID NO: 519112 - DNA, 549 bp, Homo sapiens
aaagaactcaggccctgaagaaactcagaagagaaatacctcgtttggttaaccayaaagttccaaaggggcctacagtgcaatgtgaccacagaactagctgccacagtagttggctgtacagtgtagaatgaaggaaataatgactcccctctgatcagacaatattcacagacttgagctcagttttgggccccacacttgaactgggctgggtaaaacctggcatatgcagaaaaaaactactagatggatggagaggagaaaaatgtgaaagaactgttcagcgtggagaagagcggattcctggtggagcatggccatcctcttgaggtctctgaaagtctgtcctgtggaggaggacccacagcttgccaactcctgggccctagaaggaaaccctaagatgaatcatcaggatgcaagttggaggaaacaattggctgcctgaggggtgggttttgtcaacataaaaatgtgtcttctgtgctccctgctcccaataacacaatggacttcacaaaggcattctagctgtgagtacgaaga

SEQ ID NO: 519113 - DNA, 549 bp, Homo sapiens
aaagaactcaggccctgaagaaactcagaagagaaatacctcgtttggttaaccataaagttccaaaggggcctacagtgcaatgtgaccacagaactagctgccacagtagttggctgtacagtgtagaatgaaggaaataatgactcccctctgatcagacaatattcacagacttgagctcagttytgggccccacacttgaactgggctgggtaaaacctggcatatgcagaaaaaaactactagatggatggagaggagaaaaatgtgaaagaactgttcagcgtggagaagagcggattcctggtggagcatggccatcctcttgaggtctctgaaagtctgtcctgtggaggaggacccacagcttgccaactcctgggccctagaaggaaaccctaagatgaatcatcaggatgcaagttggaggaaacaattggctgcctgaggggtgggttttgtcaacataaaaatgtgtcttctgtgctccctgctcccaataacacaatggacttcacaaaggcattctagctgtgagtacgaaga

SEQ ID NO: 519114 - DNA, 549 bp, Homo sapiens
aaagaactcaggccctgaagaaactcagaagagaaatacctcgtttggttaaccataaagttccaaaggggcctacagtgcaatgtgaccacagaactagctgccacagtagttggctgtacagtgtagaatgaaggaaataatgactcccctctgatcagacaatattcacagacttgagctcagttttgggccccacacttgaactgggctgggtaaaacctggcrtatgcagaaaaaaactactagatggatggagaggagaaaaatgtgaaagaactgttcagcgtggagaagagcggattcctggtggagcatggccatcctcttgaggtctctgaaagtctgtcctgtggaggaggacccacagcttgccaactcctgggccctagaaggaaaccctaagatgaatcatcaggatgcaagttggaggaaacaattggctgcctgaggggtgggttttgtcaacataaaaatgtgtcttctgtgctccctgctcccaataacacaatggacttcacaaaggcattctagctgtgagtacgaaga

SEQ ID NO: 519115 - DNA, 613 bp, Homo sapiens
ctgcagattcaaacaatgagctctgtgtattagatttcataggaaaattgtgagtgcacaaacctatgtgaccaatagatgccgtatcagactgggcaccagagctcctgctgggagtcttctccaagtagtggcaagaactgcaactcaagaataagggcaactaaattagcatcccagagttagaaggtccttttgtttaaaccagtagtttttagcccatgatcttttacaagccctgcatgcaaactggctcctgggttcctcagtcactgaatgtcaaatgcggtgagatgctgaggtggtgctgctaaagttagaatgctcaaagttgccaattaattctgtgcaaaaaggtatttacttcatcattctccaccttaggccctgcctgatgttctcgagtttctgtcagtctggggcctccttagaagtaactgctggcctcaggcttggaaacaaagcaatcacttagagcaaagttactagcctatttgttggacascaactggctatatttatcctctatttttcccccaccccctctcaccccgtattagtctccaattgctgtgtaacaaatttccacaagtgaagcagctataaatagcac

SEQ ID NO: 519116 - DNA, 527 bp, Homo sapiens
aggaaaaagattggaaaaaataagcagagcctcagggacctgtaagatgaaagctaaggttcaaacacatatgtaattgaaatcttagaaggagaggagagagaaaatggggtagaaaaatatttgaagaaatggtcaaaatttccccaaatttggtcaaagatataaatgtatagattaaagattcaagaagtacagtaaacccctaggaagactgaaacacacacacacacacacacacacacacacacacacacacacacacacwctctctctctctctctctctctcctttacctagcatattatagataacccactgaaaaccaaagttaaaacctattagtaggtgggtgcaatggagtgtgcctatagccccagatactcaggaggctgaggcagaaggattacttgaatccaggagtttgaggccagcctgggcaacgtagcaagaccttgtttctaaaaaaaaaaataattaattaaaaaaacccaaatctatgagtaattccatctacttcataagc

SEQ ID NO: 519117 - DNA, 550 bp, Homo sapiens
tgcactccagcctggcaacagagcgagactccgtctcaaaaaaacaaaaacaaaacaaaacaacacaacaacaacaaaaaacagcctctgccccggcagaactcacagtctagtgggaaagatctacaagcagagaatgataatatggcccaagagctgctgggacagaggcactcagtgggcatatagcggcaggtccctcttggccaaggctgaccctgggcagcagtaatccctacctgctctataaagagggaggcagacatgcaaatcaatgagctcagwggttggcaaacttgagtgtgcatcaacatcccatggagggctcgttcaaatgcagattcctgggtgtcagaccagagtttctgattcaataggtctgggatggggccagaccattcatgtttcttacaagtccccatgtgatgctgatgctgctggtccgggaaccacacctcatcagctccccagactgtcaggccctgggacagaaatctgcaccagaagggaagcaccccaaggggaaggaggacagcaggcttggggaagt

SEQ ID NO: 519118 - DNA, 247 bp, Homo sapiens
gctggggaacgggcggccggtgcccgccgggggctgcgcggctggtgcccgccgggggccgccgcacgggcaaacttcgctcccgggcttggcccggcgccgcgcggkcccgcaggctacgccgctggctctgcgttaacatggccgtcgcggacgcccggtggcccgggggggcgcgggccggccgcccccctctcgcctcccgcccgcccggcgccgccgccgccgctaacatggctggcgcggc

SEQ ID NO: 519119 - DNA, 636 bp, Homo sapiens
gatggggttttgtgatgtctaagcccctccctgcaggcctaccattggctgggtaatggcttgctggccaatcaaagcttaggggtgtggctcatcattgtcctggaagggttatatatagggaggccaggtgacccagagaagacagttgrgagatgctgatgtggtgaagatggccagtaaagcacaagcctccaacccagttgtcgagggacaaccacccacaacaccaaagaggcgaagaagaggaaggccccctctcaaccaagattcagaagccctctgaaggtgagtggcgcacccaggctcctccttgtcttccccttgattcctccctgccttcccctctactcctccctcccaagacgccttaccctgtcctcgcctggcacaacccccacctcagcctgtacccttctcatgaagcccctgttcccacccctcccccatcctcttcccccaaaccaatgcccttctgtgatctccctgttgtccttccagattcccaagacaacccggaagggaaaagagagtctttgagggagttccaggaaaaaagccactcccgaaagaccgccgcttcaagaaaacctgaggaagggagagggccaacgctatccagccactctgaccagc

SEQ ID NO: 519120 - DNA, 255 bp, Homo sapiens
aggaactcaatcaaaaggagccacagcaggaccaggaaagtgaggagacttccaccatctccagcgtctccctggacagccagtaatttcagggcaagttcaaaggactagatctatctgagaggtctccataggtctaaccccagagaaatagccaaaagggtctatggtacattttacacacmacagggtacccctcatggtgatgaaaataaaatgaacctgttgtaaaatgatttgagtgtctgcatgttc

SEQ ID NO: 519121 - DNA, 611 bp, Homo sapiens
cctcttctcaaagttgaaataaagtaaaataaattaggagaaacctaattagaaacctaattgctaaagggtttgtttccctactcagacttgccctgatttaaaaactgtatttacagaatgttcacagccatgtaaaatagactggaaagaaatactctaatgtggcaatgtttccctcagagtggtagaattatgcttgtgttgtctctcctttctattttgtaaatttggcactctttaaaaaagaaacctaaaataaatttccttttaaaaaatgaaattctaaaaagaaacaagaagcctggctcgttcccagcattctaaaggggaatgattgtagagctccacaaaactggccaaggagctacatagtgatgaaagggttttgatctctttgggaagtattgtagggaacagctttgctggcactctcacagcccctttcctgtgtggagattgggctgtgggacctttgtcytgagtggtaaatgcccagcatgccgccagaagccctagctgtggtcactccctcatggagcaccttttcggtctgaggctgataattgtcctgcttcttatgtggtaagctgtcaggactgtgggctgcc

SEQ ID NO: 519122 - DNA, 416 bp, Homo sapiens
gaggcattttccatctggtatctgggagaaagtatgggagacaggacggggcctgatcctaaattaggaaatatgtggggtttgtctttggtgtctcccaccttcctttctttattgtcttttgcagtaccctaggcacatagcaccytcctgctggtcttaggtgcccacagcccttgattgctgcctgacctacctcttcaaagctgtcctggatcctaaattaactccttcacctcctccatgtattcctctgtgggatggtgaatggctttgggtaggcagtggaggtcagcattgtgatcacacctgagaatggtcatggcaaaggtctgatggctcacagctctaacagagcctgattcttctttaaaggagaaggagtgtctctagcccatctttcaccacctttcttc

SEQ ID NO: 519123 - DNA, 638 bp, Homo sapiens
tcagttttaaagcagtacctacatctcaagaagaagcaagggggcggaaagtaaagagctactaaatgtcatttttaaaaagcccactaagctgggaaaattaatatggatttcagatacccctgttttcggaacatctgtcttggcataaagcagagtattttactttgaaatatcagtgaaatataatttaagcttgcacatccacacacatgcacagacatatgtaatcaacagatatctgtttcacaaatagggaagataggcagcaataaagtattaaaataatttccatgttggaaaatcaataactataaaaccccacagggttcttctctgaattaatgagtaatcacagcctccatgaaatacactacattttatgtaaatgaaattgttgcaaatacatgaaaaaataaatataattagaaattcatgatgtcaaagaaaattattttttaatgtatgcctaaaaagctattgtgatggaaaagtgacagtttcttttaatgtcagagcaatttctaaaaccaaatgaataattcttataattaaaatgacrtacattttagataaaatccatgttatttcactctaggcattaatacagtaaggtaggtttgactgcagagtcccca

SEQ ID NO: 519124 - DNA, 616 bp, Homo sapiens
gcctccattggacaggctttgggagtactggctccagtgatttgggtggttttgcactgatttctcatccagcaagcaaacctcaacaccttcagactgtccccagcaaccagaatattatcgtttcagagtttcgagggaccatagctgtcagcctgtctgtccaccctgcctggcgctggccttagttggaggatggttgcatttggaccagagcagaggcagatatctcattcctccaatgaaatacgagggcttgtgcaacaggcttcttatctcatctccacctgatcccaggagcctgattcctttccagggagcagcagatgagacttttctctttccarcaccagtgtgtgtgagcgagtgaatgagtagggtttaatggtgattaaaggcgtggtcttcattttgacaccttttgttctataacaagcctgacaaccatgaacctacttcttgccagacagaaaagtcattcccgtgccttgcccctgagcctcctcggaaatggcagagctgcacatgaggaattatgcttcctcgaacagcaacatatgagtcgtgcctcttccctaacaccgctttgcagtttgtgactataatctaatgaatc

SEQ ID NO: 519125 - DNA, 577 bp, Homo sapiens
gagcatagagaaatagagtaagtagagtaatcatggcaatagttttttgggtgtttttaaaatgcttactaagtatcagccttacattatctcatttaccttcacatttttttgacgtaggctgttgtcatcccaatttacagataaggttgttgagttttccttaatcgtagctttatacttattattataccataccacctgtcactcagatttattcctagggataactataatttgaaatgagatctctgactccacaggctctgtytttttttcattccacaacagagaattattccctaaaatgcagagtcagaaagataggttgcaggcagattttagaatacttctattactaatcaaagactataaaaatatactttacagtaaacaaaggagaaaatcaaatgtctgcaaagtagtaacatgatatacatgctaaaacattgaaataggaaaaaatattgggggaagtaggattccttagcacttactgaaggaaagatccagataagaaatgtaaatgtaccaggcttggtggctcacacctgtaatccctgcactttgggaggcc

SEQ ID NO: 519126 - DNA, 577 bp, Homo sapiens
gagcatagagaaatagagtaagtagagtaatcatggcaatagttttttgggtgtttttaaaatgcttactaagtatcagccttacattatctcatttaccttcacatttttttgacgtaggctgttgtcatcccaatttacagataaggttgttgagttttccttaatcgtagctttatacttattattataccataccacctgtcactcagatttattcctagggataactataatttgaaatgagatctctgactccacaggctctgtctttttttcattccacaacagagaattattccctaaaatgcagagtcagaaagataggttgcaggcagattttagaatacttctattactaatcaaagactataaaaatatactttacagtaaacaaaggrgaaaatcaaatgtctgcaaagtagtaacatgatatacatgctaaaacattgaaataggaaaaaatattgggggaagtaggattccttagcacttactgaaggaaagatccagataagaaatgtaaatgtaccaggcttggtggctcacacctgtaatccctgcactttgggaggcc

SEQ ID NO: 519127 - DNA, 577 bp, Homo sapiens
gagcatagagaaatagagtaagtagagtaatcatggcaatagttttttgggtgtttttaaaatgcttactaagtatcagccttacattatctcatttaccttcacatttttttgacgtaggctgttgtcatcccaatttacagataaggttgttgagttttccttaatcgtagctttatacttattattataccataccacctgtcactcagatttattcctagggataactataatttgaaatgagatctctgactccacaggctctgtctttttttcattccacaacagagaattattccctaaaatgcagagtcagaaagataggttgcaggcagattttagaatacttctattactaatcaaagactataaaaatatactttacagtaaacaaaggagaaaatcaaatgtctgcaaagtagtaacatgatatacatgctaaaacattgaaataggaaaaaatattgggggaagtaggattccttagcacttactgaaggaaagatccagataagaaatgtaaatgtacyaggcttggtggctcacacctgtaatccctgcactttgggaggcc

SEQ ID NO: 519128 - DNA, 548 bp, Homo sapiens
aaatttcattcaactttttattcccttttcccctaggtcccagacccttgctcataataagcatgtggatgactcgaattgaattrtaagagtgaaagactcttgtgaaagaagaatcattaagactgtgtgaatttaaaaagagaacgaattcaagagaacatgctttgtaagtctgggaaagagaacgtgcacggtacaagggcggtaacatgtgaccaagaagagaagagtaaaatgaactcactagccaattacattcgagtgatctgctacttagaatgcatgattgaactcctaggtggtcttatagccactgcgtacttttcctctgccagactttgaaagcactttgaagacagggtgtcatctaaaggttggtgatttgtattgagttcccccaccctagaactggcaggcaccattctctctgataaatatcacaggaagaaatcagagaattgtattttcctttgaaatagttggaagatatatagaaaagcctaatgtggttttctcagttggaaattttccaggacataaggatg

SEQ ID NO: 519129 - DNA, 548 bp, Homo sapiens
aaatttcattcaactttttattcccttttcccctaggtcccagacccttgctcataataagcatgtggatgactcgaattgaattataagagtgaaagactcttgtgaaagaagaatcattaagactgtgtgaatttaaaaagagaacgaattcaagagaacatgctttgtaagtctgggaaagagaacgtgcacggtacaagggcggtaacatgtgaccaagaagagaagagtaaaatgaactcactagccaattacattcgagtgatctgctacttagaatgcatgaytgaactcctaggtggtcttatagccactgcgtacttttcctctgccagactttgaaagcactttgaagacagggtgtcatctaaaggttggtgatttgtattgagttcccccaccctagaactggcaggcaccattctctctgataaatatcacaggaagaaatcagagaattgtattttcctttgaaatagttggaagatatatagaaaagcctaatgtggttttctcagttggaaattttccaggacataaggatg

SEQ ID NO: 519130 - DNA, 548 bp, Homo sapiens
aaatttcattcaactttttattcccttttcccctaggtcccagacccttgctcataataagcatgtggatgactcgaattgaattataagagtgaaagactcttgtgaaagaagaatcattaagactgtgtgaatttaaaaagagaacgaattcaagagaacatgctttgtaagtctgggaaagagaacgtgcacggtacaagggcggtaacatgtgaccaagaagagaagagtaaaatgaactcactagccaattacattcgagtgatctgctacttagaatgcatgattgaactcctrggtggtcttatagccactgcgtacttttcctctgccagactttgaaagcactttgaagacagggtgtcatctaaaggttggtgatttgtattgagttcccccaccctagaactggcaggcaccattctctctgataaatatcacaggaagaaatcagagaattgtattttcctttgaaatagttggaagatatatagaaaagcctaatgtggttttctcagttggaaattttccaggacataaggatg

SEQ ID NO: 519131 - DNA, 602 bp, Homo sapiens
accagcagtgtccagtttcttcacaacatttccagaacttgttatttccttttctttttcttttttcttttcaaaaatatgatgatgatgattactgtttttatagccatcctagtaagtgtgaatgatatctcattgcggttttgatttgcatttccctaatgactaaagatgttaagtgtcttttcttgtgcctatgggcaatttgcataccttctttgaaggtaatatttattttatttgattgtgtttttagagtcgctrttgactttagatttaagctggtgtactgtgatgatactaaaggaaattgagattgagattaaacttctcttgggcgatttgttgtggctagtgtttttagtgcagtacttctgagacatttttggtatactgtagaagagagaaataagtaatttattgatatttctgggaattagatttttttttacaaagagaagagagatataaataagaaacgggaagatgaggaagaaatctgtggtgctgacttgaattggagttattaatgcaaacttaaggttttaaagattatatatttcctaactttatccagagaagggtctaaaaaacaatacaaa

SEQ ID NO: 519132 - DNA, 531 bp, Homo sapiens
cccacacagttcatcaatttacaagccagtctcctccagaaataccctcacagacataccaagaagtgttgctgtaccagctatccaggtatgccttaatctagtcagattaacacctaaaattaaccatcaaactaccagcgggaacacacagaggtctgagctctgatgaggagkctcctgtgaggtgaactaatgtgacagagcataaaacaatatacaaattgtattgatcctgaccttaagactttttgaaaccttcccagatgtcaggtggctcttttaacagaggccagcactgtaggctgacatccagttatccagagtttgagaaaagataaaatctagtaaaaggtacttagaggcaaatttgaggagatgagttataaaggacaccagactgccacgagaatgtcccttagactacataaatattagaaacaattaaaacagcatacaaatgaggaattgtatcctaatgggaataaaatatgcagagaggaatgcattttctttctaataacctgcaaa

SEQ ID NO: 519133 - DNA, 591 bp, Homo sapiens
ctgttcactggtgcatttattttggatttgaccatctggggaatgggtgtggcctctcctggcctctccctccctggggcccaggcagggagaatgtctcagaatgacttccttgagagtcctgctcccctttcatcaatgcacagatacagaagacccctccgtcatgcagcatctgccatgagcatcggcctcctgtgctgtgcagccttgtctctcctgtgggcaggtggstcctgggcagagccccttgtgtgaatttcaaggcccagcgccttcccattggggctgcagcatcagctttgttctccttctctgcaggtccagtgaatgctggtgtcactcagaccccaaaattccaggtcctgaagacaggacagagcatgacactgcagtgtgcccaggatatgaaccatgaatacatgtcctggtatcgacaagacccaggcatggggctgaggctgattcattactcagttggtgctggtatcactgaccaaggagaagtccccaatggctacaatgtctccagatcaaccacagaggatttcccgctcaggctgctgtcggctgctccctcccagacatctg

SEQ ID NO: 519134 - DNA, 585 bp, Homo sapiens
gtgtaacttaaagcttgtatgtggtgaagattttttaacaaataatatataatgaaaatgtcaataacgctctcaaatccaatcccaccttccactggtcaccaatattaacactctggtgtgcttcttttcacctctcttttctgtgttcatgcacacctttctacccaagtacacctacagaaaatgggttcacctgtacactttacctgtcacatgcatactcttttctgttaatataccctggtcttattgttccagattggtcaatatagatctaacttgctcctattagctgcttcatattgcataatgagggtagacaggtacaattgtgctctattgtctaattcctgaattctgccagatcttttctaaagagactgaatggcctctttaggcttccaggttstcctcaccccagcccccagttgatgattccagcatttccatcactcatagtcctggcaggtttgagagctccattggtttctcctgcatgaggagacagggagggataaaaggatagacctttatcaaacctaccagacactacacagtatctcagttcgtcctcctaaagca

SEQ ID NO: 519135 - DNA, 650 bp, Homo sapiens
ttttttttgcatatgattgcagtttcaaatagataaaataggtagaatgttatgaggtgatatttatgagatgttagctgacaattatttagaggtgtttaaggacctaaattcagagtttccagaatcaaaatgaatctcaagtaagacaaatagtcaagtcatagggaaattgtataacatgagggacaaagagaagattttgaaagcagtcagaaagaaaagacagatacctcccataggaatagatggagaacaacagtaagtcaagatagtggttaaaaataaccrttagctcaatcgtcattctccttcattagaggtgagattgattaaaaaaaaaacttttatacgtggaatatgaaaaaccaccactgtgagtttgctaccaagttatcttttctgaattacagttaacaaaggtgggaaatgatcccaaagaaaggcatgagggcagttcatgagggaacgcatgtgaggggacagtcctgttgggcacgtgtgactgggggaatggaggaggctggggcatgaatggggatggcagaggggaccctgacttgcaggaaagacaatgagctcacccttttgtgttctatgttaggggcactgttggtacatcctacaggacatgcctagcagacagaaga

SEQ ID NO: 519136 - DNA, 650 bp, Homo sapiens
ttttttttgcatatgattgcagtttcaaatagataaaataggtagaatgttatgaggtgatatttatgagatgttagctgacaattatttagaggtgtttaaggacctaaattcagagtttccagaatcaaaatgaatctcaagtaagacaaatagtcaagtcatagggaaattgtataacatgagggacaaagagaagattttgaaagcagtcagaaagaaaagacagatacctcccataggaatagatggagaacaacagtaagtcaagatagtggttaaaaataaccgttagctcaatcgtcattctccttcattagaggtgagattgattaaaaaaaaaacttttatacgtggaatatgaaaaaccaccactgtgagtttgctaccaagttatcttttctgaattacagttaacaaaggtgggaaatgatcccaaagaaaggcatgagggcagttcatgagggaacgcatgtgaggggacagtcctgttgggcacgtgtgactgggggaatggaggaggctggggcatgaatggggatggcagaggggaccctgacttgcaggaaagacaatgagctcacccttttgtgttctatgttaggggcactgttggtrcatcctacaggacatgcctagcagacagaaga

SEQ ID NO: 519137 - DNA, 435 bp, Homo sapiens
cactggactttgacagaggggaagtctagaaccatctggggctgtcttcagatcggacaccagagttaagagagcctgtgtaccctacagcactgcagatagaagcatcatggtgttggcagtggggaggtactagagtgtgtaagtggttagtggcctacaaccagaagacctgagttttgagaaaattattcccatcacaagatgtagcagagacagtgatatggatatactagaccagagagctctgtgaggagctctgtgaggagctgtggcctaatcatgcatcaggccacgtttgtgtccataggtcatgggcwgtgctgggtggccaccatcatccatacagagagggcagtcagcagcgtgaggtggttctgcctgctgtggtctcaccccaggcatggaaagcaagagccctgggtggagctgaag

SEQ ID NO: 519138 - DNA, 435 bp, Homo sapiens
cactggactttgacagaggggaagtctagaaccatctggggctgtcttcagatcggacaccagagttaagagagcctgtgtaccctacagcactgcagatagaagcatcatggtgttggcagtggggaggtactagagtgtgtaagtggttagtggcctacaaccagaagacctgagttttgagaaaattattcccatcacaagatgtagcagagacagtgatatggatatactagaccagagagctctgtgaggagctctgtgaggagctgtggcctaatcatgcatcaggccacgtttgtgtccataggtcatgggctgtgctgggtggccaccatcatycatacagagagggcagtcagcagcgtgaggtggttctgcctgctgtggtctcaccccaggcatggaaagcaagagccctgggtggagctgaag

SEQ ID NO: 519139 - DNA, 512 bp, Homo sapiens
gccaggagcagagaccatatgggtgaaggtttatgacttgactgtaggttgaaggttgcagcaggtagagggagaattgcaggcagagggcagagtcactggctggcaggggcagtggcatcatcagttgactctactgacatctaggatttatgtccccaacacacaagctgaaaaacctccccacaatttccccatttttccctgaccctaccatgaccaccagactcctcagtggtgtggccttttgcctacttggggcaggtaagatctttaaagccttttccttggctcaccacatcccagcytaagcctttacctcaggtctccattattggggtccctccttgggcactcatcttccttctatcataaacctcacagaagctgggacaatcaaatccttaagataccagagaacaaaggcagtacatgaagtggcacggagatgcctgagactgtcatccatgactacatgtgtaggtgttaataggagctgaacctggtgtaca

SEQ ID NO: 519140 - DNA, 227 bp, Homo sapiens
gggccacagtgggctgcctgtcctaggcagagacacagcaacattctcttaagctgaaattaagcataaacccacttcaccaataatcatctgagggcacagtccctgcctccttccttggggattttaaaacacacatctctctgaccaaacaggtaggtgagatctgactttaaaggggggaaaktgggatgaattggggtatcaggaatgaatcccaagtgttt

SEQ ID NO: 519141 - DNA, 562 bp, Homo sapiens
tcagcccctaacaaactcccaaggtaatctgaagaatactgcaagaaaagaaaacttcccctatgaattcattgcaagaaataaatggcccatccctcaacatacatacatatctacccatgttttggcagttttagattcagagcattttgatttagggaatttttgcatctgtctagtggctgtagaggagttttgcgctttgtgacactgttttgtagttggtttttccatggctgctccacatctaaagcaataaaagggatttgaattgcaataatttgccttctctctgtcactcacagtgccctgacttggttgccaascttttgagaaaaatcacagttatacacacactttctgtgctgatacctgccacccctctatttgctttctgataaatatgccctttccctggaattctactcaaatgccagtctgtgactgactctggtgcctgtctttcccgtgtgttatatgacagcccttcctgcataagaagccctgccccttcagagaaacgtgctcggaactcagtctcctcactcttcccccagccagc

SEQ ID NO: 519142 - DNA, 505 bp, Homo sapiens
aggaccagcagtggaagaggagtgacactggtrcacttcagagctatttatgaggtagaactgccaagacttggcaattagcttaagggagtgtttcttatttccacaagaacataataagcactatgaaaggtcatgtttgtcttgttcgtggtttcctccccattgcctagattgaatagtgcccagtgcatagttggtgctaaataaacatttataaaataaattaatcgcactggattcagggatctccagcctgggccttttccctgacccagaggaatagacccttcagcaacccaaacgtctcaccttgccggctctcaaagacttctgctctctgcttgctctcctgtactatccaaatcatgatgcaagatccttctcccttggaatctttctgaagtcctcacctcagctagtctcagttatttccagcccaagcctgtgctgatgaatgactatgtgtttgtgtgtgtgtgcgtgtgcccatgtgcgtatgtgc

SEQ ID NO: 519143 - DNA, 587 bp, Homo sapiens
ttgaccagggcttccttcacccttagctttctctccccctagtgtagtcagagactccaaaggcagtcccagagtgttgtgccaaaacaaatgcacatcaggctattgtcatcaggagcccttgtcttgttctgtttgttttaagaagacataagtgaaataaccaggtttccgaagagagggcagaattgggtttgtccccagggaaaatgaggtttctccaccatggctgttctccccatgcagcagcggccaggggtccccagcagctctttgctcagtgcccctgmtgctaggcctgatgcttcctatgtggtcagctcagatgtgcaacccttctccatttttattatttgagcaatataatcattattgcttttgttacccaaaatcttataatcacccatttaagagtaatgtaggaatcatttttctcttttatttgatgaactaatctttctggttggctcttgaggtgggaggggtgggcaatggggaccagcctgcttcatctcactctttcctaggcctgctccttaggcacgtgccccacaaatcccacctccgcaggttggaaaaggggccca

SEQ ID NO: 519144 - DNA, 504 bp, Homo sapiens
gacctcctagaaatactgtcttgctccaaagaagggacagcttgtggtggtgtgcrtgtgtgtgtgtgtgtgtgtgtgaagggtgtgcatttccagcatcgaaatatgagctttgcactagttgtgtatctccaccttccctgtcagttgtaacttcctactctttggcagcccggccttgataacatattgcctcaaatctcagtgctgcttctgctctgctggtaggcctaggaatcaacggcaagtaacgacctactatgtggaggccgtgagaaagatttctgaatgaagtccacctgcacatggactttattgcaactacaccggctgctgagatggtgggagggatttgactttttctcattcttgattgaatatcaaacagatgacagggtagccaggtttgagatcttagatggtgagtaaggaaggatctagagaacacaatgtccaagctcaggttctagggtgctgaaagcctggagtacagcagagtactgg

SEQ ID NO: 519145 - DNA, 623 bp, Homo sapiens
tcttatgcaggtagtccagagtcaatacattaagattaaacactgacctatagggccatctgtgggtttccaatagaagaatgacaagatatagcttacattttaagaggctcgttttggctgctgcatggaaaatgaactgayggggataagggtggaagcatgggacaagcaggagctatgaccatggtacaggagagaaaatagtggctggaccaggatagaatcaacaaggttagagagaaacagatggatataggccatatgacagaggtggagccaacagaacttgctgttgagttgaatgtgaggagtgagagggggaagaactgaggatgatgccattattatgattataactaccaaagttacaagtctattgtagtcatcccatagtacaatacttatgaaagggaacaggtaaatacaaaatcaatttttcccatcataataatttaagtaactgattgcaacacattgatttccttaaatcaatagctgtgtccatcatcatgactgaatcaattgtttaaatatcattcctcagacaaaataccttgtttatgaagtgtatgacttctttcagagaagtctacttcaaattgtttcaaactgttcataaa

SEQ ID NO: 519146 - DNA, 471 bp, Homo sapiens
attcttatgcaggtagtccagagtcaatacattaagattaaacactgacctatagggccatctgtgggtttccaatagaagaatgacaagatatagcttacattttaagaggctcgttttggctgctgcatggaaaatgaactgatggggataagggtggaagcatgggacaagcaggagctatgaccatggtacaggagagaaaatagtggctggaccaggatagaatcaacaaggttagagagaaayagatggatataggccatatgacagaggtggagccaacagaacttgctgttgagttgaatgtgaggagtgagagggggaagaactgaggatgatgccattattatgattataactaccaaagttacaagtctattgtagtcatcccatagtacaatacttatgaaagggaacaggtaaatacaaaatcaatttttcccatcataataatttaagtaactgatt

SEQ ID NO: 519147 - DNA, 617 bp, Homo sapiens
atctctttaaacattcagttttttgagctgggtgtggtggtacatggctgtagycccagctacttgggaggctgagccaggagaatcacttgagcccaggagttcaaatgcagccagggcaacatagtgagaccctgtctctagaaacaaaacaaaaagttcatcttttgcaagccttcaaccactccccgctatttcctctttagattacctggcatcttacttcacagagaaaatagatgccaccaggtgggaatttcctcaatttccagcccctaagcctacaagcatgtgtacccatctccttcagtccacttataacagaagaaatttccttccttctgtctaatccaatcctgggacatattccctggatcccagtcctcaagaactcactcattgaatcatctttgcactcttgtattttctcttctttctaccagatttttccaaacagcatttaaacatgctcaagtctctcctgtcttacagaaacaaccactctccttaatttcacacacacttttagctactacccaagctctctcttcccctttcacaaacttctcaaaaaagttatatacagtcatcttctctactacctcaattccagttcc

SEQ ID NO: 519148 - DNA, 617 bp, Homo sapiens
atctctttaaacattcagttttttgagctgggtgtggtggtacatggctgtagtcccagctacttgggaggctgagccaggagaatcacttgagcccaggagttcaaatgcagccagggcaacatagtgagaccctgtctctagaaacaaaacaaaaagttcatcttttgcaagccttcaaccactcccckctatttcctctttagattacctggcatcttacttcacagagaaaatagatgccaccaggtgggaatttcctcaatttccagcccctaagcctacaagcatgtgtacccatctccttcagtccacttataacagaagaaatttccttccttctgtctaatccaatcctgggacatattccctggatcccagtcctcaagaactcactcattgaatcatctttgcactcttgtattttctcttctttctaccagatttttccaaacagcatttaaacatgctcaagtctctcctgtcttacagaaacaaccactctccttaatttcacacacacttttagctactacccaagctctctcttcccctttcacaaacttctcaaaaaagttatatacagtcatcttctctactacctcaattccagttcc

SEQ ID NO: 519149 - DNA, 506 bp, Homo sapiens
agcccacaagaaacacgcctttaagccaggggtgctcaaacttgttcccaagacgatggtgacatgctggggtggggagaaaccactgctatgccttcttcctgaccgaccagttgttttcatttatcaatctgagaatccatcgaaggtgatatcagggtgacataaatgaggcacttcctgtgacaaacttaaggcgacacttgctcccattgttgtacaaggctgaccttgcatttacatgggcttgagagcgcaccaccttgaattttgtgtcccaggtatatctcttgccctgtcccagtccaggccatggaacacaygtacagaagaaaccacagagtgatgtacccagcaatcaggggcctgccacctgagtccctccttcaggggtggaccaccccaaccctgactgaccctagccagggttttccgtgaagcttgccccaaacacttctcatccacttattcctgaggctaaaataaaaatcgtagccagaagcagt

SEQ ID NO: 519150 - DNA, 397 bp, Homo sapiens
ggcaactcttcagggaggccctcctccaggtggtgactcagaaacaggctgctttcctagatgctctgctctttcctgagatcttctctgcagtcagtgtttgggtccaggaaaagagaaggcaggagggatcgtgccagaggtcttctaggggacagacctggaagtgggatagattatttttgtttatcttccgttggctagacccagtcatgtcggtctactttarctgtgaaaggaagatagaaagtctgtctgagtgctcaagaggaaaagaaaactgagttcaagggagcacgcctaactttacgaacgtcctccttttgacttttttcctctacctaagacattgtgaaaatatttctgttaccgatttagaaagtttagtgatgttctt

SEQ ID NO: 519151 - DNA, 563 bp, Homo sapiens
ttctgtctttgggatctaggctgggctatgaggatcccatttttcacttttttgcagatgctcttggccttgggctccattgccccatcaaggcccaatcaaacacagacttaagaccatttcattgttctggttgaaggattttcaagaaaccaagtaactaaagtgagaggtaacctaaagaacatacatggacgtaagagattttgatgtgtattttctaccaaccccagtagggaaattggaagctyctaccatagttataagatgtaattaacctgctgaataaaaccttgtcttcatttttccctgggtttccattttgcagaaaatttgggaaaaaaatccaattttcagagcctattaaaaaaaaaaaactaagtcacgtattcatttttttttatcttgggaaaaaatgtctctatcagaattcaggctctcacgggcataggccctgtttattcctctttgaattcctaacatcgagcacaatgtctggtgtggcacaggtacttagtaagcgactgtgtgtttgaggatgtttgttgtccaaattacttaca

SEQ ID NO: 519152 - DNA, 653 bp, Homo sapiens
ccttctattaaaccagaaatgaagaacatttgcagaaatgtacaacaatgccatgcttcccattaattattttgttcttgctttagaatatgtcacttttcattgaaaaatgttactcatgattttatgtaaaaggtttattgttgttacttttaaatayatattttaagtgttttttagttttgatttctaatatggcaaaaattggtaaaatcacatacacaagggcttttggggatcctcaaaactttttaagagtgtaaagggatccagagaccaaaagtttgataaccactaaccaaaaactttgacaaccatcatcttgaagggtccttggactttctggaatttggatctcccttgccttgttcagttttctctctttttagccatctcgtacttacagccatttcagttcctatgtacctgacttattaattatgcttattgtttaccatgtgtgttcccctcccatataaactccatgaggactgagatatttgtccatgatgttcatcagtgcatcccaggctgcctagaactgggcctggcccttagcaggcacttgtttttggatgggagggaggagaagggaggggagagggcaagttctttcagtgtctgtataatggacagagcaaggtgtaccacct

SEQ ID NO: 519153 - DNA, 653 bp, Homo sapiens
ccttctattaaaccagaaatgaagaacatttgcagaaatgtacaacaatgccatgcttcccattaattattttgttcttgctttagaatatgtcacttttcattgaaaaatgttactcatgattttatgtaaaaggtttattgttgttacttttaaatatatattttaagtgttttttagttttgatttctaatatggcaaaaattggtaaaatcacatacacaagggcttttggggatcctcaaaactttttaagagtgtaaagggatccagagaccaaaagtttgataaccactaaccaaaaactttgacaaccatcatcttgaagggtccttggactttctggaatttggatctcccttgccttgttcagttttctctctttttagccatctcgtacttacwgccatttcagttcctatgtacctgacttattaattatgcttattgtttaccatgtgtgttcccctcccatataaactccatgaggactgagatatttgtccatgatgttcatcagtgcatcccaggctgcctagaactgggcctggcccttagcaggcacttgtttttggatgggagggaggagaagggaggggagagggcaagttctttcagtgtctgtataatggacagagcaaggtgtaccacct

SEQ ID NO: 519154 - DNA, 555 bp, Homo sapiens
ctcagcacaaggggcaccccgcttctcacgtctcatgactgcatggtgtacagtgtggtcagttcagcctttatgtctaacctctgtccttctccaccctgtggggtgccgctgacctgtggggtgttgaccacaaacagattcctaccccatgtttcttgggggttcatcccatggggatttccagaaggagactggagtttcactctcctgcctcccctgatccctgctttttttttttttttttgagacagggtctcactctaacactcaggctggagtgccgtggtatgatctcggctgactagcaacctccrcctcctgggttcaagcgattcttctgcttcagcttcccgagctgctgaactaaaggcacgtgccaccacgcctggctaatttttttatttttagtatattttagtagagacggaatttcaccgtgttggccagcctggtcttgaactcctgacctcaagtgatctgcccgccttggcctcctaaagtgctaagattccagacgtgagccaccgggctctcctgcctcccttttgacca

SEQ ID NO: 519155 - DNA, 580 bp, Homo sapiens
aaagctggggaaatcagataggtttccttgttgcaggtgtgttcaaaggagggttggagcatcttccactgacttcacctctatgaagctcctctcctgtcttcgtagtgagaacagagatggctgtaagtcaaacacgcccggaaaaggcattcgtrgaccagaccatccatgcactgtgttaactgaccacttagggcgagcagcattacaggcctgtagttgtggaggcaggagctacagggacatttctgatgtggctccagccctccacgatggtatgatccagttgaacccagaatcccagcacatgtggaccagtcaggaagcaactgactgagagcggtagaggacccaaatttcttcggaggtatttacttcgttgagaaaacccacagggcagctccaatcccacatccctggcatcctgtggcttatgggcgtggggccacttgcctgttggaggcgtgatgcatgatccccagtatttgctctgcaaggccaggcatgggctcaccgagaaacaacctcgcctttgtgttgtcctcctcctggacaatccatgggacaggccagccct

SEQ ID NO: 519156 - DNA, 665 bp, Homo sapiens
atttacctcttgataggaggaatggcaaagtcacacggcaaaggggcaggcacatcagaataggagagaytgatggctatattttgtaagccctcctatggcaacaaatatttctaggttgttggttaccagaacgtaatgaagcctaacctgactgaacattcaaatcactaaactttgggtgccttttaaagccatcaaactaatatgtaacagctgccttcaaaagaaagggcctttctttcatgagtttttcccagtatttgttgagctacatcaacttggcacagtgtggcagaattcattctctcttcctgcttaagtaataaaactcccaagttttctgggcccacagagtatgttcttaaggagaagtgtttactcctcaatgtataaaacttcttcccttcccaccagctggaatgtggacagaatggtggactctggaacagccacctagatcacaaaatggaagtcacatgtggatgatgataaagaaacaaaattaaagaggccctgctctccaatcctgtagagctaataggattgacctggaccacttatgctcagaccatttaagctgctgttattctagcttggttataacaaagccaaaccatgtctaactgatatacctagcaagaaatcaatgtgagagccaaagg

SEQ ID NO: 519157 - DNA, 635 bp, Homo sapiens
ttcctcaaaacagccccacctcctctccccacctcacatttccacaaagtttataccagcacatgaattatctcacttcagccttctaacgaccctgtagggtgaactctgtgtatgttactctacaagtgagaaaactgaagctcagagctccaggtcacgcagccaggaagtcagtcttcccccgaagaccccaggaagaagtgctgcggggattccacgggtgggaggktggggacggcttctggcctggccacgaggcccaggtgtcctggctacccaggcgagggagtggttcaccagggagtggttcacctgcagctcctcctccaggccgcgaatctggcggttgttcagctgcagcgcgtgggacttgaacccattccggcctgtggagctgagagtcacattgagacccctctcctcagtggtgtgggaggcaatccagtaggcagacagggcatccagggcaatcaccgtgtcctagggaggttgagccaggactcaagcaagcccttggtctgaggactacccacccccgccagagcccggggacggcccctacttgggtactgcggaatcccccttggaagctgccctgacgggtgagccaggccgcagcctggtctgccatc

SEQ ID NO: 519158 - DNA, 578 bp, Homo sapiens
gtatttataacctataaaaagtttcctcttatcatcatatctgctttattaacttcaagggtttttctgcagaagttctctcattttctttttgcactgggattttgtccttcatagttctaaaagaaatatcccattttctccctttcttaaccctcaggatagaagaagtagtatcttctcacagtgtgtgaagactcattctcccaaaagatgagcacaaaggaatagatgctgagaatatcaatgcctgtgacatttgctgtctcccataatgactgccatgggaggacttgggaagcrgactgcaatctgatctcaagtcttctgactcacactctattttggactgcttttgtcttggatctggagtatagaaacacctatttcgtggtcggtaggcagtttaacaatcacatacacaatgaagcaatcagaaaggtgagcaggtgaatattctctttcagaggataaattactttttctaggaaaatgattattggctgacaatgaggtggtaatttacttccctctagactataataaacaaaaatacaaagtaggacaccattttcaac

SEQ ID NO: 519159 - DNA, 229 bp, Homo sapiens
agtacctacttaattccttcagcatcagcttccaacaatccattgttctgtctatgataaaaaataaagatgtcagtctcggctccagraacaaaaaataaacttgggagaggaagagactagcaaggagggcttccccttcccctctagtgcccatcacagttactgccttctgaccccacgtgcagcctgagtcctcaaccttggcagctcactaccaactgatcag

SEQ ID NO: 519160 - DNA, 506 bp, Homo sapiens
acccacttctgacttccacctcaaaattctaaatatagtacctttatgaggtgtcttacttctgagccaacttgattcttacacagcctatcccattttgttctggttcattgtgggtctaagggcaatatttttttttctgccataaactgctttcttgcactgttacttttacaaatcacattagctaaaaatactgcattttattctcttatatcattctctctctaaggcaggatacttcackcttcactgtatttttataactctcatctggtatttttttatgtctgttttctgctcttatctccatcaagtttagataacagtcaccaacttcttgatgactctaagcttttactggaactttgggagattacatctatgtaaggttcgatgttactctactaattaaagatctctttctattgcttccatcagttttcattccttgagattaagccaatagttgcaagggtggtgagattcagggcagtgataattct

SEQ ID NO: 519161 - DNA, 645 bp, Homo sapiens
gctggtggtgctttgtgaagctgataatttctgcaaggcaaggggatgaggaacacagataagccatatcatcatgatcattgtttttagataccactgcctggacactttctatgttctaggagctgtcctgagcattttatatggactgtctcattaagccatgattatctccccattttatagatgcagacactgaggattagaaagtttaaaatccttgttcaaaggcacccagcttttaggcggtatgaattaaaaagtggaatccatagccttcactcttaatcatttactatattyctttccacagtaaaagaaaagtgagatgtaaggaaagggaataatctaagaagtcgagagacaaaagcgaatgagtcatgcctctgaggaagaaggtaacgagtttatgagctagatagagagtcttccaaaggctaatttgtgcttcatgaatagagaaaggtttttaaaaggaagaaagaaaggggcctaaaagggaaggagttacatttgatcagtcaaatactagacaagaaagtaattcccaagatcaaattccaatttcagtttgaatgcagggcaagtggcagggtttcatttggtgggcatcaccaaagaaatggataccgaattctgatttga

SEQ ID NO: 519162 - DNA, 645 bp, Homo sapiens
gctggtggtgctttgtgaagctgataatttctgcaaggcaaggggatgaggaacacagataagccatatcatcatgatcattgtttttagataccactgcctggacactttctatgttctaggagctgtcctgagcattttatatggactgtctcattaagccatgattatctccccattttatagatgcagacactgaggattagaaagtttaaaatccttgttcaaaggcacccagcttttaggcggtatgaattaaaaagtggaatccatagccttcactcttaatcatttactatatttctttccacagtaaaagaaaagtgagatgtaaggaaagggaataatctaagaagtcgagagacaaaagcgaatgagtcatgcctctgaggaagaaggtaacgagtttatgagctagatagagagtcttccaaaggctaatttgtgcttcatgaatagagaaaggtttttaaaaggaagaaagaaaggggcctaaaagggaaggagttacatttgatcagtcaaatactagacaagaaagtaattcccaagatcaaattccaatttcagtttgaatgcagggcaagtggcagggtttcatttgstgggcatcaccaaagaaatggataccgaattctgatttga

SEQ ID NO: 519163 - DNA, 645 bp, Homo sapiens
gctggtggtgctttgtgaagctgataatttctgcaaggcaaggggatgaggaacacagataagccatatcatcatgatcattgtttttagataccactgcctggacactttctatgttctaggagctgtcctgagcattttatatggactgtctcattaagccatgattatctccccattttatagatgcagacactgaggattagaaagtttaaaatccttgttcaaaggcacccagcttttaggcggtatgaattaaaaagtggaatccatagccttcactcttaatcatttactatatttctttccacagtaaaagaaaagtgagatgtaaggaaagggaataatctaagaagtcgagagacaaaagcgaatgagtcatgcctctgaggaagaaggtaacgagtttatgagctagatagagagtcttccaaaggctaatttgtgcttcatgaatagagaaaggtttttaaaaggaagaaagaaaggggcctaaaagggaaggagttacatttgatcagtcaaatactagacaagaaagtaattcccaagatcaaattccaatttcagtttgaatgcagggcaagtggcagggtttcatttggtkggcatcaccaaagaaatggataccgaattctgatttga

SEQ ID NO: 519164 - DNA, 508 bp, Homo sapiens
ttaagatgcccaaatgggactacattttcttagtcctcttgatgtccattttggcactggaataaaggaaccctgagtggctgcagccaagtcccactgagacgcagggagcagcattagatgcaaggcaggtggtgggagacagagggcacagcatatcagcgatgcaccctgggaaatgattaggtttgagcacaacaggtatagacctcaaagcccagaatgttgattgacttgtcactctgggctggrcatggagtttcgtgttttgtatcacctatgccgttcaattcactctgaaactctatgaagctatcactaatttcttaattttacagattcaggaactgttaattgattctctgtagttcgggaagtagctaaggaaacataaacctgattgattctgttgtttaagattcaagacagcatggccatgatcttgcctgatttcaaaagcggagaggacaccccatgaaattcctctggctccccagtatactgtccc

SEQ ID NO: 519165 - DNA, 525 bp, Homo sapiens
attttctgtgtcaaagaaaaacatatatatggtatattattttttaaagtcacattcttcttatagagatgtgctctttgtatacatttttttccccttggcaagtgggtaaacgggattccgggaaggtaactgtcttgactaaagttagcagagtctggcatcaggtggaccgcacaggacgkccacttcttcttttgtttttttgttttgttttgtttgagacggagtctcaatctgtctcaccaagactggagtgccgtggtgcgatctcagctcactgtagcctccacctcctgggttcaagccatcctcctgtctcagcctcccgagtagctggaattacaggcatgcaccaccccacccggccaattttgtatttttagtagagacgagcctttaccatgttggccaggctggtctcgaactcctgacctcaggcaatccacccacctcagcctcccaaagtgctgggattacaggcgtgagccactgcgcccagccaggacggccacttctaatcca

SEQ ID NO: 519166 - DNA, 525 bp, Homo sapiens
attttctgtgtcaaagaaaaacatatatatggtatattattttttaaagtcacattcttcttatagagatgtgctctttgtatacatttttttccccttggcaagtgggtaaacgggattccgggaaggtaactgtcttgactaaagttagcagagtctggcatcaggtggaccgcacaggacgtccacttcttcttttgtttttttgttttgttttgtttgagacggagtctcaatctgtctcaccaagactggagtgccgtggtgcgatctcagctcactgtagcctccacctcctggrttcaagccatcctcctgtctcagcctcccgagtagctggaattacaggcatgcaccaccccacccggccaattttgtatttttagtagagacgagcctttaccatgttggccaggctggtctcgaactcctgacctcaggcaatccacccacctcagcctcccaaagtgctgggattacaggcgtgagccactgcgcccagccaggacggccacttctaatcca

SEQ ID NO: 519167 - DNA, 443 bp, Homo sapiens
ggggcagctggtgcagggagctctggccaccgcaacaccccacggcttcgggggaccacaccaagccccgccatacttctagactcccagagtcctagattgaaaagcgacaggaaagtgagtccggaagtggagaaaggtgggggactcagcccagaaacccacttcagaatgacaccttgaccgtgtccagaagagctcactgtgcaggggcccctgctccctttggggcagaattcagaggagcttgtcctcatcgcacctgcttgtgagcacttcgtgggttggtttttttaatgcagctcttctgacttttctgcttttgatcggtattcaccagccacagcactcgctacgtgaytcacccttttatctctcgagtgctcttgcctgtgtgttgctctgtgcgaagtggaatcttagagcatcttgacacacactca

SEQ ID NO: 519168 - DNA, 549 bp, Homo sapiens
cttgggaatggggtcccacaggaggaaaaggccagaagggaggaggaggatgccaagaggagggcagaggacgacctgaagaagaagaaagcgctgtcytccatgggcgccaactacagcagctacctggccaaggtgtgtgccgctgctgggagcacggtggtagccttcagtgtcgtacgccctgtgccctcctgagaccaggcccctctctttgggcctgtccgctgcaggctgaccagaagagaggcaagaagcagacagcccgggaaatgaagaagaagattctggctgagagacgcaagccgctcaacatcgatcaccttggtgaagacaaactgaggtgaggagtgggtgttgtggggctcacgacgggtggcccctgcaggagctgccgactgctcctcaggctgccaaggaccgtgctccccagtggctgcaggaggactccaggggcctggcctgcctttggggcttattcaacgaagcctcaccacttcctctgccccagggacaaggccaaggagctctgggagaccctgcaccagc

SEQ ID NO: 519169 - DNA, 549 bp, Homo sapiens
cttgggaatggggtcccacaggaggaaaaggccagaagggaggaggaggatgccaagaggagggcagaggacgacctgaagaagaagaaagcgctgtcctccatgggmgccaactacagcagctacctggccaaggtgtgtgccgctgctgggagcacggtggtagccttcagtgtcgtacgccctgtgccctcctgagaccaggcccctctctttgggcctgtccgctgcaggctgaccagaagagaggcaagaagcagacagcccgggaaatgaagaagaagattctggctgagagacgcaagccgctcaacatcgatcaccttggtgaagacaaactgaggtgaggagtgggtgttgtggggctcacgacgggtggcccctgcaggagctgccgactgctcctcaggctgccaaggaccgtgctccccagtggctgcaggaggactccaggggcctggcctgcctttggggcttattcaacgaagcctcaccacttcctctgccccagggacaaggccaaggagctctgggagaccctgcaccagc

SEQ ID NO: 519170 - DNA, 549 bp, Homo sapiens
cctcacagggagaagctggtcctccaggtctgcctgggcccccggtgagtgtccctggctggggagacagcctttttccagtctggagagaaagggggaactcagaacagaggggtcattgatatcctgtctcatcctgccggagcccgggttgcctgaggggaggcctcagagggcttggagcaggcctggagccagcggggcggaggggagtgtgggctcagcctctgcacatgttcagggcagggcctggctttgaagctttctttggaccagcgccaggcaggcgggaccggggctgatacagcttcaggtcccccaggcctgaggtcacctggagccctcccaccttcttcagttccwggggttgagggtcctggggctcagagccctgtctgggcccactgggggtccgacagagatgcctgctggcccttagccagggaggccgaggtgaccagacgaaggtgttacagatgccactgagggatggggcgggcagccttcctgggccagcaaggtgtgggcaagcaggacacacgagcccca

SEQ ID NO: 519171 - DNA, 549 bp, Homo sapiens
cctcacagggagaagctggtcctccaggtctgcctgggcccccggtgagtgtccctggctggggagacagcctttttccagtctggagagaaagggggaactcagaacagaggggtcattgatatcctgtctcatcctgccggagcccgggttgcctgaggggaggcctcagagggcttggagcaggcctggagccagcggggcggaggggagtgtgggctcagcctctgcacatgttcagggcagggcctggctttgaagctttctttggaccagcgccaggcaggcgggaccggggctgatacagcttcaggtcccccaggcctgaggtcacctggagccctcccaccttcttcagttcctggggttgagggtcctggggctcagagccctgtctgggcccactgggggtccgacagagatgcctgctggcccttagccagggaggccgaggtgaccagacgaaggtsttacagatgccactgagggatggggcgggcagccttcctgggccagcaaggtgtgggcaagcaggacacacgagcccca

SEQ ID NO: 519172 - DNA, 545 bp, Homo sapiens
cctgcttgtctgtgggaggctggagagtacccccaaagggggaaatgtggccttctgtgaggaatctctgggaccctgtccctaatctgggacmatgtctatatcctggcaatatcacagtccctcctgaccaacccagactgggcccagagaaggatctatacccatgtggtgggtggattttggctttcccagggagcaagtttgtcaggggacagagggaggcactcaggttggacccaggaacaggaagggaaaggctggggacagagaggggacctggagctggccctgccccaccaggcccactcatgcttttaccttctggccctttggcgccccccacttcccggccagatacgcagcctgtgtcagccccagtgcagagccacaggcccagcttgggcaggggcagggtgcgtgaagactggggcaggtgcaggctggattgggtttccagaggctatatatataaaggctgccgggagccccagggccgctccctgagggcacaacactgtgggggcccagccaggcccgcattc

SEQ ID NO: 519173 - DNA, 545 bp, Homo sapiens
cctgcttgtctgtgggaggctggagagtacccccaaagggggaaatgtggccttctgtgaggaatctctgggaccctgtccctaatctgggaccatgtctatatcctggcaatatcacagtccctcctgaccaacccagactgggcccagagaaggatctatacccatgtggtgggtggattttggctttcccagggagcaagtttgtcaggggacagagggaggcactcaggttggacccaggaacaggaagggaaaggctggggacagagaggggacctggagctggccctgccccaccaggcccactcatgcttttaccttctggccctttggcgccccccacytcccggccagatacgcagcctgtgtcagccccagtgcagagccacaggcccagcttgggcaggggcagggtgcgtgaagactggggcaggtgcaggctggattgggtttccagaggctatatatataaaggctgccgggagccccagggccgctccctgagggcacaacactgtgggggcccagccaggcccgcattc

SEQ ID NO: 519174 - DNA, 535 bp, Homo sapiens
ctgccagactcctaagccctgcttgtctgtgggaggctggagagtacccccaaagggggaaatgtggccttctgtgaggaatctctgggaccctgtccctaatctgggaccatgtctatatcctggcaatatcacagtccctcctgaccaacccagactgggcccagagaaggatctatacccatgtggtgggtggattttggctttcccagggagcaagtttgtcaggggacagagggaggcactcaggttggacccaggaacaggaagggaaaggctggggacagagaggggacctggagctggccctgccccaccaggcccactcatgcttttaccttctggccctttggcgccccccacttcccggccagatacgcagcctgtgtcagccccagtgcagagccacaggcccagcytgggcaggggcagggtgcgtgaagactggggcaggtgcaggctggattgggtttccagaggctatatatataaaggctgccgggagccccagggccgctccctgagggcacaacac

SEQ ID NO: 519175 - DNA, 535 bp, Homo sapiens
ctgccagactcctaagccctgcttgtctgtgggaggctggagagtacccccaaagggggaaatgtggccttctgtgaggaatctctgggaccctgtccctaatctgggaccatgtctatatcctggcaatatcacagtccctcctgaccaacccagactgggcccagagaaggatctatacccatgtggtgggtggattttggctttcccagggagcaagtttgtcaggggacagagggaggcactcaggttggacccaggaacaggaagggaaaggctggggacagagaggggacctggagctggccctgccccaccaggcccactcatgcttttaccttctggccctttggcgccccccacttcccggccagatacgcagcctgtgtcagccccagtgcagagccacaggcccagcttgggcaggggcagggtgcgtgaagactggggcaggtgcaggctggattgggtttccagaggctatatatataaaggctgcygggagccccagggccgctccctgagggcacaacac

SEQ ID NO: 519176 - DNA, 619 bp, Homo sapiens
ttcctagccagagtgctgagaggactgtgtgaactgcagattcaggaagaggctgagagacccccatgggggtggccggtatgctgaggcttgtatgggagccagatatcccacatcccatggggtggttgcctcctcctgtttccagcctttccagtgaggctgcaggaaagagacacagctaaggcctggagactcgtggcactccgtcagggcatggtaccacagatgagttgtaagcctgcgggacacagcatccaactctgaaagccccttgctcgaataaccctacatcaccgcctgagggcttccatatccttggtctcttcagactgtcatccccaccacaattactccaagaaattactgtcatccccaaatctataactggaaactgaggctcaggaaggagacatgacttccacaaaatcacacagttgggaaactctggagtctgcactcaactggtctgcaaaccgactctcggagacttcaggtgagatgaggtcaggttctcaggccaggtcctgaagtttgacaccttggcgaaatgcactttccttgactcagcaccgcagtgacggcggarcgaagccccgagcagaagggcttttcttcc

SEQ ID NO: 519177 - DNA, 619 bp, Homo sapiens
ttcctagccagagtgctgagaggactgtgtgaactgcagattcaggaagaggctgagagacccccatgggggtggccggtatgctgaggcttgtatgggagccagatatcccacatcccatggggtggttgcctcctcctgtttccagcctttccagtgaggctgcaggaaagagacacagctaaggcctggagactcgtggcactccgtcagggcatggtaccacagatgagttgtaagcctgcgggacacagcatccaactctgaaagccccttgctcgaataaccctacatcaccgcctgagggcttccatatccttggtctcttcagactgtcatccccaccacaattactccaagaaattactgtcatccccaaatctataactggaaactgaggctcaggaaggagacatgacttccacaaaatcacacagttgggaaactctggagtctgcactcaactggtctgcaaaccgactctcggagacttcaggtgagatgaggtcaggttctcaggccaggtcctgaagtttgacaccttggcgaaatgcactttccttgactcagcaccgcagtgacggcggaacsaagccccgagcagaagggcttttcttcc

SEQ ID NO: 519178 - DNA, 480 bp, Homo sapiens
ctgtcgcctgggctagagtgcagtggcgcgatcttggctcactgcaacctccacctcctgggttcaagcgattctcctgcctcagcctcccaagtagctgggattacaggtgcctgccaccatggccagctaattttttgtgtttttagtagagatggggtttcactatgttagccaggctggtctcaactcctgacctcgtgatccgcccacctcggccscccaaagtgctggggttacaggcgtgagccaccgcgcccggccacagatattttcttaaactcatgaggagagagcagattcttgcctcagtgaagtcattgctgtgccatgtgtcctacccgctgtcttcatgcagggaggttggaaatgggggccgcatgtgccctctcctcccatctacaagagttgtggtttcccatctgatccttccactcttgttaggggaggaagggggcctggtatctcaggcagattgtt

SEQ ID NO: 519179 - DNA, 589 bp, Homo sapiens
ttttacaagaaggaaagaaacaattattgctattttttcataatttactatttatgaagtatttaagtgttttattatggatagagttctgtaatgggtgggagggaatatttgagggagggctgggtcttaaggaaaggaatggggaatcaacattattatgaagtgtctctatttgcctctactttgtattgttcagaaatggccaatgcaatataaaagtgttacatggttttaatgtattaaactttaatcagttttttagaaaaaaataaaattaaaaattaaaaaactgtttatatttatgattataacataattttaatgaaaaattacatcaataaatatagtattccacaaatgaccccagaattgcagttgcttcagcatgtgaaaatatttaagaaactctctcagggtcacgacactgaaatgaartgggtttcattcattaagcaatgtgctgagtgcccactctgtgccatgtggtggagaagagaacccagttggaggcaatgacgcactccccctcccacacctgtcctgcggaggtggctgcccccgggacactgagccctgcacatttctc

SEQ ID NO: 519180 - DNA, 505 bp, Homo sapiens
caatatcaataaagttatccctaaggcccattccaacatttagagtccgttaaaaagttatgaaaatgtaccaaggaattacaccagaaagaaattgttcttattgaaaacacaatatggttctgagtttaaaatggaaagcaaaactttaccgaatttatctctcacaatgcctaacaaaatgggttggggrtaggggggataaaaattccaagaacaactattaagataaaacaacaaaaataaaattccaaaactaggaacaacaaaagaaatagaatataatcacttcaccaccattctccaaaattattttgataaagtcacaaaatcctgagatttgtcacttatacctcaaatacaggaataaataaatccagaaatagccttatcttgttattctctcattaaaaattttttaaaaaaactgttgttggagagaaaaatataaagttaagaaactgaataatgggactaactatttaataaaaataaggcttcaggt

SEQ ID NO: 519181 - DNA, 505 bp, Homo sapiens
caatatcaataaagttatccctaaggcccattccaacatttagagtccgttaaaaagttatgaaaatgtaccaaggaattacaccagaaagaaattgttcttattgaaaacacaatatggttctgagtttaaaatggaaagcaaaactttaccgaatttatctctcacaatgcctaacaaaatgggttgggggtrggggggataaaaattccaagaacaactattaagataaaacaacaaaaataaaattccaaaactaggaacaacaaaagaaatagaatataatcacttcaccaccattctccaaaattattttgataaagtcacaaaatcctgagatttgtcacttatacctcaaatacaggaataaataaatccagaaatagccttatcttgttattctctcattaaaaattttttaaaaaaactgttgttggagagaaaaatataaagttaagaaactgaataatgggactaactatttaataaaaataaggcttcaggt

SEQ ID NO: 519182 - DNA, 635 bp, Homo sapiens
aagtacactggagaaaaatcaaatagagaaggaaaatgggagagtgtacaatttttacaaaagatgtggaaggttggtctcaccctatacccagtacctatgttccaagttctgaccctatatccactaccaatactctaagattctgaccatatacccagcacctatgctccaagattctgactctatactcactttctgtgctccaagattccgaccctatacccagtacctatgcgccaagattctgatcctatacccagtacctattctccaagattctgaccctatacccattaccaattctccaagattctgaccmtatacccagcacctatgctccaagattctgactctatactcactttctgtgctacaagattctgaccctatacccagtacctattctccaagattctgaccctatacccagtacctattctccaagattctgaccctatatccagtacctatgcaccaagattctgaccctatacccagtacctattctccaagattctgaccctatatccagtacctatgcaccaagattctgacactgtaccattacatatcctctgtgcaacagtgcagagattaaactccttactctgaatcccagatctgccactctg

SEQ ID NO: 519183 - DNA, 635 bp, Homo sapiens
aagtacactggagaaaaatcaaatagagaaggaaaatgggagagtgtacaatttttacaaaagatgtggaaggttggtctcaccctatacccagtacctatgttccaagttctgaccctatatccactaccaatactctaagattctgaccatatacccagcacctatgctccaagattctgactctatactcactttctgtgctccaagattccgaccctatacccagtacctatgcgccaagattctgatcctatacccagtacctattctccaagattctgaccctatacccattaccaattctccaagattctgaccatatacccagyacctatgctccaagattctgactctatactcactttctgtgctacaagattctgaccctatacccagtacctattctccaagattctgaccctatacccagtacctattctccaagattctgaccctatatccagtacctatgcaccaagattctgaccctatacccagtacctattctccaagattctgaccctatatccagtacctatgcaccaagattctgacactgtaccattacatatcctctgtgcaacagtgcagagattaaactccttactctgaatcccagatctgccactctg

SEQ ID NO: 519184 - DNA, 635 bp, Homo sapiens
aagtacactggagaaaaatcaaatagagaaggaaaatgggagagtgtacaatttttacaaaagatgtggaaggttggtctcaccctatacccagtacctatgttccaagttctgaccctatatccactaccaatactctaagattctgaccatatacccagcacctatgctccaagattctgactctatactcactttctgtgctccaagattccgaccctatacccagtacctatgcgccaagattctgatcctatacccagtacctattctccaagattctgaccctatacccattaccaattctccaagattctgaccatatacccagcacctatgctccaagattctgactctatactcactttctgtgctacaagattctgaccctatacccagtacctattctccaagattctgaccctatacccagtacctattctccaagattctgaccctatatccagtacctatgcaccaagattctgaccctatacccagtacctattctccaagattctgaccctatatccagtacctatgcaccaagattctgacactgtaccattacatatcctctgtgcaacagtgcaragattaaactccttactctgaatcccagatctgccactctg

SEQ ID NO: 519185 - DNA, 576 bp, Homo sapiens
ccataaatatcagaacatagtataaagttacagtgattcaaacagcatgatatttgttcaagaacaaacagactgggagatagaattaggtccccaaacagacccatgtacctataggtacttagaatctgagtaaggtaggggcagggctaaaaagaccaactagaaacagcagctatcagaggcttccatcataaagaaccgtaattagcatgtgaatccttcaccagcaaccaaggtatccaggtcttctcatcagaactgactaggcggctgacatgatccacagcaaggaaggaaaagcagtgtggtgcaacggcccaactgagagctgcacaggacaggggagcccccacctgccagccaagggagacagtgagtgagcatgctacccaactggggaaaacgtcctttttccatggaattgtgcaacccatgaatcagaagatcccacttgtgaacccacgccaccagggcctagggtcccaacccaggagccacgcagaytctcaacagcctctcaactggaatctgcctaagtctgctgagctcccaggggaagaggtgaccagcacc

SEQ ID NO: 519186 - DNA, 547 bp, Homo sapiens
attggacacctgcaaagagagaggcaaacgaaagaacatcctagctttgcaacaaaccacgctcacaggtactcatctagcattgccagagcaagaactcactaccatgagaaggcagcaagccgatgacgaggttccactctagattcaaacacctcccactaggtcccacctgtcaacaccaccatgcccagaccacatatcagcatgagattcagggaggacaaacaaaccccatccacaccacagcaagcaggggaggcaagaaatgggaaaaaattgtcttttaaaaagatttaccattctcatttgtgcatgaagaaagtgttcctggtctgggctctaggaggacggtgctgttggtcttctccacctkcctcttaagtcatcctcccacttctccagctctgctctgggtcctgagaggctggcctctgggagaatcacccaggtcctgttccaggatttcagccagagggaggcaccggccatcagaggtggggagggccttggtttcctctgcttccttccttccagtagcgggttt

SEQ ID NO: 519187 - DNA, 621 bp, Homo sapiens
cccctcacatctaaggagcttgctgcttcatgagttgagcagtagtttggcttgggtaggctgtgtggcacacccttatctcaactatattcagtcaaaaatggtgcctcctgggggcctgatgcatcctgagataacctggcacatgacagattgtcacctctcatcttgttctttctgggcacatacacattgtttagattttgttttgctgtgcataaacagtcaaatgcatgcatgatgtgactcccctgtataccttacaaagcatacacacctgtgtgacttatgttatcctcagtgcttacctgcactgtggggctcttagaggctgatgaactatgcagagaagagaagacagcagagggcaggaccctacggaccaccaagtcttggcaggagggaaattgaagaggaccagacagaaaaaaagaggagcccacagaggatgcttaaagagaagaattgccagaaagtagaaggaaaaacaggagagtgccgggtcccggatcccaaaagaggcaactctgaaagagggaatagtcatcgccaagtgctgcaggggagtccrcagtgactgagtctaagggagctggcatttgacattaggcagcatctaca

SEQ ID NO: 519188 - DNA, 565 bp, Homo sapiens
agaacccagggaggtctcagtggatcatgacgggatctgcagcacgggctaacaagccaggccccagagacacacactgttcccttcccttccacgaagttcagagccaggcgtagctagactactgcagcacgagtgttgggtgggtgggcacaggttctgcctggcaaacgtcacatgcctttaccaaggtggtgaccatgtgagtgagtgccttgtgtttacactttgggtattttcttatttgtgttaaacttcaaaaaatgtgaaaacattcgaaagaagacagtgtctcctgggatctgggcagcaggctgggtctgaactctcgcttacctcttgtggatgttaacacagcctggaatttcctggtttgttagtcaaggaatactttacccaggtgcaatccatctgctttcatttttttagtcagtaaattggactcctttctttttatctgcttgaaatgactaaagcaatgtgtgtgttgtttttagaatggaaggctttgcataackgacactaacattatttctttccaatcatgttgcaagttgcctgcatg

SEQ ID NO: 519189 - DNA, 541 bp, Homo sapiens
gacagttaaggcattctaagtcacaggatgagataggaggttagcacaagatacaggtccttaaaaccttgctgataaaacagtttgcagtaaagaaaccagccaaaacccaccaaaaccaatatggccacgagagtgacctctggtcatcctcactgctacactcccaccagcgccataatagttcacaaataccatagcaacatcaggatgtaaccctgcataaataatgcaccccttgtttagcatatgatcaagaaataaccataataataggcaaccagcagccctcagggatgctctgtctttggagtagccattctcttattcctctactttcttaataaacttgctttcactttactcagactcctcatraattctttcttgcacaagatccaagaaccctctcttggagtctgattgggacctttttcttgtgacagattctgccagtttctgttcttggcaggttccatttctacaaattcctcatctctataggtttaggatcagaatgttccagcaggggagcattaca

SEQ ID NO: 519190 - DNA, 557 bp, Homo sapiens
tggtaggtctataatcatgtcaggaggcaattttgatctgcacttccttgatgattaatgatgctgggcatcttttaatgtgctgatttcccatatatcttcttttgtaaattgtcagttcaaggtagagattttagcatatggtaaatgggtcacataytgggttcaataacgaagatgtggaggggtgggtctagagttttctattttagatgcagtgagattatgctgagctcagtacaaagtgaatcttcccagagaatatcctgatttggaccccaccaaggctactaagacacagttgtgtaattgactgaagcacaagctggccagagcagtgtggagatggagatgccgtctgcgctcaagtctaatgatgtaaggaaaggaggagcttccttatgagagtactttccgttctcagcaactctgagcttaggttggtgatgggcaggagtgagcagagttcaagtttgaattctttgaaaggtaaaagaagcagggatgttctggagatggtgagcaaaatgagaaaagctcagaaacttggtgttgaa

SEQ ID NO: 519191 - DNA, 553 bp, Homo sapiens
attattattcactagcaccctaggtgtgataattgaagtaaatatcttttatacaaacacaagaatgtgtgggttgtttttatttaaagtgctctggcctgaggacgagcagcaaacactgtcattcgaggtccaaagggcacctcaagaatcgccgttcccgaggtcgtcccctttgcacctgtccgcgggtcctcgggygtgtggcttccgggcacacagaaaaccgtgtggttctaggatacatggggatctcgggcactgctctgtcaatctgcatccggttcacaggaagggcttcgccagggcctgcgttcctacttgctgttgtcaccagcactgtttgcctacccttgaaccaagcccttaccctccctggcgtccgcttccttttctgtaaaatggagacaccatctcctgtcatataggcttgctgtggggaaccaggaatggtggccagtgctggtgcggcactgggctggtggtggcagccccaatcgatggcacttaggcgaccaggactacggccagtctcctctgccgtgtggcctgc

SEQ ID NO: 519192 - DNA, 554 bp, Homo sapiens
attattattcactagcaccctaggtgtgataattgaagtaaatatcttttatacaaacacaagaatgtgtgggttgtttttatttaaagtgctctggcctgaggacgagcagcaaacactgtcattcgaggtccaaagggcacctcaagaatcgccgttcccgaggtcgtcccctttgcacctgtccgcgggtcctcgggcgtgtggcttccgggcacacagaaaaccgtgtggttctaggatacatggggatctcgggcactgctctgtcaatctgcatccggttcacaggaagggcttcgccagggcctgcgttcctacttgctgttgtcaccagcactgtttgcctacccttgaaccaagcccttaccctccctggcgtccgcttccttttctgtaaaatggagacaccatctcctgtcatataggcttgctgtggggaaccaggaatggtggccagtgctggtgcggcactgggctggtggtggcagccccaatcgatggcacttrggcgaccaggactacggccagtctcctctgccgtgtggcctgca

SEQ ID NO: 519193 - DNA, 613 bp, Homo sapiens
gcaagggtctcagattcaaggacagagtgactgggaggggagttctgggcctggccctctgacagcgcagacgggggtgctgggyccttccccagcgtgcgtattgtcaggtcagcccctgccatccattctcacgctccccggttcccctggctgtcccctccccttccccgacctgcccagcaccagggagtcagacaccatgtggcttctaccccatggcatttggcagaaatcccccagggctgggggacccaccccaaagggccgcctgctgggttccacctcctgccaccccccaagccaccctcctctacctgctaggacctgcagcaccagccagcggtgccctcccagagggccaggtggattcactgctttccatcatctccagccagagggagcgcttccgtgcccggaaccaggagcttgaggccgtgagtcacatccttctctccctgatgctccttgggcccaaggacacagttggggaacacacaggctttcaggagagagatgtggcacagaccgtaaacctcagggggaagagatttgttctgtgcagtcagggagggcttcctggaggaggtcatgccacactgggctttgaaag

SEQ ID NO: 519194 - DNA, 582 bp, Homo sapiens
ttggctccaccatccaggagagatgccaggccaggagtaggagggataggcagcccgacaggctgagcaattggcagcagctctgctggctaatggggtgagccaagccccggggggaagggccgctgctttctaattaacagcttcatttaaagaaacacaattaaggtcctgggcgcctcccaggccctgatccacaaagtgattgtaatccctcctccaccgccctccggaccatctgctctgcaaactctttccccagccgctgtgaaggtgaacctcacttagtggaattttcgagctggcagggtcccagacacctcatgtcacaaatcgggagagaaaccttcccaccctctgagggtctgcacgggatcccaggaggagcccagcccctcaaggatagtgggcagggatcatgggccctcagtggggactgtccactcagtggtatccgggccaagagagagccttcccctkggctttctgaagtttcagtggaaaatcaatttgcaaatggcagataaatgagagaaaaggcatacaaatttatttatttatttttattttattattttattt

SEQ ID NO: 519195 - DNA, 544 bp, Homo sapiens
tcgcgccactgcactccagccctggcaacagagtgagactccgtctcaaaaaaaaaaaaagaatatttttaggttttatgactacgttttgggaaaaggggttctggtttctgtgacccaccttgggaaaaagggacttttgtttctctggtgcctctggggagaagaggacygagagacaagtaggcaggagaaggtcagagaaaaacttttttgttcgaggctgctgctgaggactttgttttgcggtattgttttctgagccccaacagtggcctggtcaatcacacggtggccacagagccagtgtagggtgggacagagggacatggaggcagagggaggtgaccagagccaggaggcctagatgctgggccatgggactgccagccactgcctggccacataagtagcctgtggtccgagtccaagtcccacggcaggacatggtttccatttcttgtctccacagtgacagtgaggaagacaccgagctctcctgtacccgaggaggctgtctggccagccgcgtggcctcctgcag

SEQ ID NO: 519196 - DNA, 568 bp, Homo sapiens
tgttcactttggtcttctccgctcaaaggagcgtgccccaagaacagggctcaagccagcatctggaagtgcctggcccatcctcggcactcacatgtcagttcactgaatgaataacttccgcaaacacacttgcacctctcttgcctttgttatcggtgtcaaggaggaaatggcatctttgcggatttcttcagtgttctagccccagagtctagcatgacaggcagtgggagggttgtgagtttagatggagtgacagggaagtctcgctttgtagaaatgcacaagaaaggtgatgcatagaaaaccaagtggtgagtaaggaaagggcaaccgcttgccctttctctaggccaaggctcccaggagaaggaagctggacggagtttctgggtcacggcctggcctcggcttccctgacagttcatttctgggaaagccagtgggcaaggttgttagcgactcctgggaaacaggggtctgcagtcrtgcacctgacagggctgggatgggaaccagagactgcacacctctgtctctaagtcacactttgccgttccaggct

SEQ ID NO: 519197 - DNA, 577 bp, Homo sapiens
ttctctgacagtaccagtgctgacagaccttatcttttgattgaaccacatttaacgtttttcttttgagaatccatttattttagtttaattaaatkgacttctgtgttttcagtctattctttctcccaagaaagagaaaaaaaaaataaaacatgctcttcctgtgctttcttgccccgtatttttcaccctcctctttttcccctctgttttcagtgccttccactctaggagtggacagttagaagtcatgtgttcatttccacttgctgagtcatggaatcccagtgttgagtgggtcttagagagactttagttccacgataccattttacagatgaggaaactgggattgagagaggtgaagtcacttgcctagacaaaacagctaataccttatttgaggaaccaagaataaattttttaggccctttcctcattcctaaatgtgttagtgtctcccaatcccatgctcatgtacactgataggttatacttcctatattctaatactattttcccattttacagatgaagaaactgtatcccagtgtgtgaagcaacatggctaccc

SEQ ID NO: 519198 - DNA, 676 bp, Homo sapiens
ggaagcagtctcctattttagacagatatttgtaggtacaagtgacttttcatggccttctcgtaagttcctgtttgatgtgacatctcaaccgcaagaacattggcatatctgctcctyggcacactcatctaccaccagaccactgcagaatggagaaagccagaagggggtgggagtgaaatcaaagctagagaagaacttcaccttccgccaagcctgcagtccccacaagggtaatttctctcatcttggcactttcccacttcatctcataatggcagaaacctattttcaagtctcttatgagcccccacagtactttatacagctctgttttacaaataaagaaatagagtctcagaaagtttaaataacttgcccaaagtcatggacctagtaagcagcatagctcagaggcaagagagcagccaccacttactgaacactcaccctgtaacatagctgtgattattgtctccctcacctttcagatgtgaaaaattgggcttagagagttgcccagtatactctgttagtcagtaacaaactgggattcacagtaagttgcttacactaaatacttgctgaataaatgattgtctctctgggacagggtttcttgaccttggcactattgatgttttgggccagatacattttttatgtggtggca

SEQ ID NO: 519199 - DNA, 482 bp, Homo sapiens
gaataaaataggtgctgccctcttgaaggcccttacacttatgttctagttggagctgaatttataggggaagcacagacagggacacacagtgaacaagataaataagaaaaacagcagttcagatggctctgcgtgccatggacagaaataaagctgggatggggataggaagtgaggggtgggtagaagagttscaattaaatagggtagtctagaaggcctctctgaggaggtgacgcttgaacaaagacctgaaggaagtgagagagggagtcccaaagatacacgagggaaaagcttttcaggcaaaggagcagccagtgcgaaggccctaaagtgggaggtgcctggtgtgatgaaggaagggcgaggaggctggagcgggtgaggggagaggggtggctggggacagatgcagattatgccaagctttggaggccatggggaggacttggcctttactctgagggaaataggag

SEQ ID NO: 519200 - DNA, 581 bp, Homo sapiens
ctaaaaaaaaaaaaaaaaaaaaaaaggctttcctggaataaattactttcttgtctgtctttggtcttttttttttttcagctttattgagatacaattcaatggatttgagtatattcagagtcatgcaacctaacaccacaagctaactgcaggatattttcatcaccctgaaaagaaaccctacacccattaacagttaatccattccacctacagccagcctaggcmaccactaatctttctgcctattctggacacttcatatgaatggaatcatcacgtgatcttttgtgactggcttctttcacttaacgttttcaaggtttatccatgtttagcatatatcagtatatcagtccttctttcttttcactgccaaataatgtttatgggcctaggggtagaattgctaaatcacgcggcagctgtgtttcattagtttgaggaactgacagtctgtttcctgaagtggctgcaccattttacattcccaccaacaatgtatgagggttgcaatttctgcacatcttcaccaacacttgttattatttctctttttaattacagccattctagtg

SEQ ID NO: 519201 - DNA, 581 bp, Homo sapiens
ctaaaaaaaaaaaaaaaaaaaaaaaggctttcctggaataaattactttcttgtctgtctttggtcttttttttttttcagctttattgagatacaattcaatggatttgagtatattcagagtcatgcaacctaacaccacaagctaactgcaggatattttcatcaccctgaaaagaaaccctacacccattaacagttaatccattccacctacagccagcctaggcaaccactaatctttctgcctattctggacacttcatatgaatggaatcatcacgtgatcttttgtgactggcttctttcacttaacgttttcaaggtttatccatgtttagcatatatcagtatatcagtccttctttcttttcactgccaaataatgtttatgggcctaggggtagaattgctaaatcacgcggcagctgtgtttcattagtttgaggaactgacagtctgtttcctgaagtggctgcaccattttacattcccaccaacaatgtatgagggttscaatttctgcacatcttcaccaacacttgttattatttctctttttaattacagccattctagtg

SEQ ID NO: 519202 - DNA, 589 bp, Homo sapiens
tccagttttacgcttatcactgtgtcattatatacaaacaagaatgtaaaagagatagtaatccttgtaaacaggaccatcagttcatttatttgggaaccttatggggtgatgatayaatttctcatagacttttaaagctttttaaatattttttaaagctctactgcttaagaagtttctttaatatttcagaattaaagtcacattcttcttttttctttttagctcacaagtatatcattcgaataagtacaagtattcttgatctcagagacaagttcaatgaatctcttcaagtgaatactactgctctcatcccaaaggaagccaactctgaggaagtctttttgtttaaaccagaaaacattacttttgaaaatggcacagatcttttcattgctattcaggctgttgataaggtcgatctgaaatcagaaatatccaacattgcacgagtatctttgtttattcctccacagactccgccagagacacctagtcccgatgaaacgtctgctccttgtcctaatattcatatcaacagcaccattcctggcattcacattttaaaaattatgtggaagtg

SEQ ID NO: 519203 - DNA, 589 bp, Homo sapiens
tccagttttacgcttatcactgtgtcattatatacaaacaagaatgtaaaagagatagtaatccttgtaaacaggaccatcagttcatttatttgggaaccttatggggtgatgatacaatttctcatagacttttaaagctttttaaatattttttaaagctctactgcttaagaagtttctttaatatttcagaattaaagtcacattcttcttttttctttttagctcacaagtatatcattcgaataagtacaagtattcttgatctcagagacaagttcaatgaatctcttcaagtgaatactacygctctcatcccaaaggaagccaactctgaggaagtctttttgtttaaaccagaaaacattacttttgaaaatggcacagatcttttcattgctattcaggctgttgataaggtcgatctgaaatcagaaatatccaacattgcacgagtatctttgtttattcctccacagactccgccagagacacctagtcccgatgaaacgtctgctccttgtcctaatattcatatcaacagcaccattcctggcattcacattttaaaaattatgtggaagtg

SEQ ID NO: 519204 - DNA, 624 bp, Homo sapiens
aactcacccaatgttatcattgtactaaatataaatgtgcccctaatggttttgacttttgcttaagtttttgagtcctcatgtatgttaggtagtgccatctagtagccagaaatttgggaactggctgggcatgatggctaatacctgtaatcccagcactttgggaggcttaggtgggtggatcacttgaggtcaggagttccagaccagcctggccaacatggtgaaaccacatctctactaaaatataaaaaaatagccaggtatgatggcccatgcctgtaatccgagctaattgggaggctgagatgggaggactgcttgaacctgggaggtggaggctgctgtgagccaagattgtgccactgcactccagcctgggcaacagagtgagaccctgtstcacaaaaacaagaaacaaaacaaaacaaaagacaagaaacctgagaagcgcagtagattcaattatatatatctacttttaatttgctagctctgtgaccttaggaaagttacataacctctctgaactgcaactgtttcatttacaaaatggagataatgatagtttttctctaattggtttgttgtgagataattcatataaagctgatggtgcca

SEQ ID NO: 519205 - DNA, 631 bp, Homo sapiens
aacttgattgccttacaaatgacctgcttcaaggatgtggaaattcctaatttcttctgggaaccttctcaactcccccatcttgcatgttgtgacatcttcaccaggaacatcaacctgtatttccctgctgccatatttggttttcttcccatctcggggacgcttttctcttactataaaattgtttccttcattctgagggtttcatcatcaggtgggaagtataaaccttctccgcctgtgggtctcatctgtcagttgtttactgagtttatggaacaggctttggagggtacctcagttcagatgtgtcatcttccccragaaagggtgcagtggcctcagtgatgtacacggtggtcacccccatgctgaaccccttcatctacagcctgagaaacggggatattaaaagtgtcctgcggcagccgcacggcagcacagtctaatctcaatatcttcttatctgttccattccttttgtagtgtgggttaaaaaaggcagcaaggtcaaataagaatgatatcacagggtgagcacccactgtgacattacgagtaatacctccctaggatataaaaaatactgtcacagagtacacacacatggggtacacccacggtgata

SEQ ID NO: 519206 - DNA, 653 bp, Homo sapiens
atttttgttttgttttgtatttttagtagagacactgtttctccatattgctcaggctggtcttgaactcctgacctcaggtgatctgctggtttcgacctcccaaagtgctgggattacaggcgtgagcaaccgcacccagccaccatttagcattttcattttacatttgttgaagtgatagatttatacacacactgattgctgctttgttatacacttgcatatacataagatgggaaatagaaaagaataaaatgggcagagtatctctaaagtttcacattccgagactttttaaaaatatttgctttctagaaatttgttcaattaagaaactgtggtatacacacacaaagaagtagtattcagcctaaaaaggaataaaatcctctccactgcagaccaaatggatgagattgcaggtctgtgagttaagtgaaataagccargcacagaatgacaaatcttacatgtcctcacatatattcaggaacaagaaagaaaatcttggccaggtggattggctcaggcctgtaatcccagcattttaggaggccaaattgcacggatcacttgagtccaggagttcaagacaagcctggccaacatggtgaaaccccgtctctactgaaaacacaaaaaattagccg

SEQ ID NO: 519207 - DNA, 527 bp, Homo sapiens
tattcacagctctgagctacaaataggctctagagctaaatgccaaggctaatgcaaaacctaatatgtaccctatccccttaggtcctttgtgaccatgtgctttatacctgtatcagttatcttttgctgcgtaacaaaccaacccaatacttaataactattaaaaataactagattttttaagcagttttattatttcttaggagtctttgggtatcctagaaagttctgctgatttaggcaaggctaatctcagctgagctcaatgacatgtctgttgcggtcaagtgatgggatgcttgtgagctgctggtcaccctactattattagcagtacactcagaatgcatcaactgcctttgccttatgcttgaactagttattaccaggaaggccactctgcctccaaaatggggagaaggtacacacttaccccataggtcagtacaaagaatggaaactgatgatgtgtaaaaatatgtgctgawgatcttgtcgtatagaaggagtagcactttgagata

SEQ ID NO: 519208 - DNA, 640 bp, Homo sapiens
cacaactatggggctctatgcctccagccaccacagctaggcagtggtagggcaggttctagatcttaggtgcagcaattttaacccagtgcttttaaaacaacatcagtaactgattatgcatgagacagtactagggttacagtctgctccgagggcttggccaagatttaataatgtaatcctccacaacaacctgatcagctggctatgatttttttcttattttattgctggagaaactgaggcaacagagtgtaaaccacctgcccaaggacacgcagctggaaagttctggagccagcactggctcccaagtagcctggtttcacactcctacgcagctattacacaagctctgacttaggagtgatctgctctaccattttatcagtggggacagcaaacaggagcagagattttattttactttacttaatttttatttttattttattatactttaagttctagggtacatgtgcacaaygtgcaggtttgttacatatgtatacatgtgccatgttggtgtgctgcacccgttaactcgtcatttacattaggtatatctcctaatgctattcctccccgttctccccatcccacaacaggccccggtgtgtgatgttccccttcctgt

SEQ ID NO: 519209 - DNA, 640 bp, Homo sapiens
cacaactatggggctctatgcctccagccaccacagctaggcagtggtagggcaggttctagatcttaggtgcagcaattttaacccagtgcttttaaaacaacatcagtaactgattatgcatgagacagtactagggttacagtctgctccgagggcttggccaagatttaataatgtaatcctccacaacaacctgatcagctggctatgatttttttcttattttattgctggagaaactgaggcaacagagtgtaaaccacctgcccaaggacacgcagctggaaagttctggagccagcactggctcccaagtagcctggtttcacactcctacgcagctattacacaagctctgacttaggagtgatctgctctaccattttatcagtggggacagcaaacaggagcagagattttattttactttacttaatttttatttttattttattatactttaagttctagggtacatgtgcacaatgtgcaggtttgttacatatgtatacatgtgccatgttggtgtgctgcacccgttaactcgtcatttacattaggtatatctcctaatgctattcctccccgytctccccatcccacaacaggccccggtgtgtgatgttccccttcctgt

SEQ ID NO: 519210 - DNA, 618 bp, Homo sapiens
tttccatttttttttcaggtagtttaatatagtcagtgaatcagcagtgagttgtagcaacttccatttctgactatgtaaaaaactaattattttgaaaactctccaggtataagaaacttagacaagctgcataaatctaacattgacttaaatgaacagcaggtttctcaggtaaggaaagccctctgggctctataaaggaagagggggggtgaatacctaacagcaaagatcttgttgatactacctataatttccctgtgacatttgcacatttagggggaaaaaacatagttttaacagcaatgaggaaatggaaggctgttagtcctacacaagtcctacacaagagaagtctgcagaaaagtacaacttcactaaaagattggacctccaaaaaaaaaaaaacagcctttgcaaatacccttgccttcctagcctaagctttgtgtagggattatgtctaaccatagtactggccttgctctggtttgggatttgtagtctyactgtctccagggtccagtagacctcactctagaaaataacatatagtgacttcgcttctaaggacatctggcagaagcaaagacaaataaatcttccctggaggaa

SEQ ID NO: 519211 - DNA, 661 bp, Homo sapiens
tgctcttccaaaaatacgtttaagaaaataaaaagtccaactgcagattaagagaaaatatttacaaaacatatatatgataagggaccggtatctagcacatataagagttcttagaactcgactataagaaaacaaaagtcttctttgccatttacaatgtgcaaaatatttgaacagatacttagtgaaaggagatatatgarcagtcaattagcatattttaaatgtttaatatcattttcagggaaatgtaaagtaaaaccacaatgagataccaacgcatacctcctagaatagctaaaattaaaacgtactgtgaagaactgagacaactaaacttttcaactattacttgtgggaatgcaaaatattaatgaataatttacactttttccatgaggtacattttgatattgcttagtccctatttttctctttctttttctttaatgttggccttacaatattaaatgtatttcagatcctaacaatgagtgcaacctgcagtgtgaaatacattgatccagttagctatataggtatgtctcaaaaatcacagattattattatcaaagtgcagagaatatctcgagtgagtcattacctgccgacatgaacctgcctaaggcaacaaagtgttctgataaagcacaaggta

SEQ ID NO: 519212 - DNA, 584 bp, Homo sapiens
aaattatctcatttatttctaagaaaaatgcctgtccactatcatgatcctcatgtataaacggggaaggtgaggctccaaattatgaagccccttgccctcagtaactttaaggcagcctcaaacctagacctagtgcgtggatacacctgccctttcttctatgcaaaagttcctcaayaaaaggcagattggagaacttccttggaagtaaccattgaagtacgataggggattagaggggtgtaaagaaccttcatgaacatgaagccagagtatcagttgtgttcggcaggagatttcaatgccatccattgaaagcattgagattcagtgttatccattgtgtttggcaggagatttcaatgctcagattctggaaaactgtctgggtgggaagacaggaaagtaaggctggccagaggaaaggattcagtgaacgtcctctaaactttgacatggtatctgagcaaaaaatcttctaagagtttaagttttgaccaaccaataagttttaattgaaattcaagttaaagatgtggatgctgaaaaaaactatgatatctgtaaatccaattcatata

SEQ ID NO: 519213 - DNA, 584 bp, Homo sapiens
aaattatctcatttatttctaagaaaaatgcctgtccactatcatgatcctcatgtataaacggggaaggtgaggctccaaattatgaagccccttgccctcagtaactttaaggcagcctcaaacctagacctagtgcgtggatacacctgccctttcttctatgcaaaagttcctcaacaaaaggcagattggagaacttccttggaagtaaccattgaagtacgataggggattagargggtgtaaagaaccttcatgaacatgaagccagagtatcagttgtgttcggcaggagatttcaatgccatccattgaaagcattgagattcagtgttatccattgtgtttggcaggagatttcaatgctcagattctggaaaactgtctgggtgggaagacaggaaagtaaggctggccagaggaaaggattcagtgaacgtcctctaaactttgacatggtatctgagcaaaaaatcttctaagagtttaagttttgaccaaccaataagttttaattgaaattcaagttaaagatgtggatgctgaaaaaaactatgatatctgtaaatccaattcatata

SEQ ID NO: 519214 - DNA, 567 bp, Homo sapiens
ggggaaaagaaaatgactaatttgtgtgttgcctaaataagcaacaccatccagaagcatctctttccttttccatgcctaaaccatgtctaagtaccggcttgacatggccttaaatgacatgcaactattctttttggtgacagctcccagaggtgacagtgcagtactcgggaggaattaaaagactttccgtaattttctagaatcctaccactttcaggtgagaatgactgtgcccttctcayctgaatctgacagtgatataagtccccatataaggtgatgatcctgcttctctttgcttgagaggcagcgtcaatgccactctgaaaaaaagtagattctaatttgagcatcatgtgtatcattcaccgtctaacttatgatcttttaaactttccctaggaatggcttcagagatggagaacagttatgtgtccagagtggaatcaggccattatgatggattaccatcatttctccctatctctagaaagtctgctccaaaggtcttttctgcagagaagaatgcacagcgtttcaggatgtcaaaaccttaaatac

SEQ ID NO: 519215 - DNA, 602 bp, Homo sapiens
agccagtggcagaaagttgggagcggggaggatgtaatttgggcatctgagacaaaccttagggatggctatccatttaagagattcagtgggttttggagctgtgaaaggaaattaaattttgggaccccaaattcgtttagccaaagagaaaagtcaagctgggaactgggtcacgcaaayctgcctccaccttttggttcctaaacaagatggctacaagatgaaaagctacacgcttccctcatattttgcccacaaggaaattcctggtgagctgttaaagcttccccatggcaatgcaacttgatagcctatctttacaggtgcagtcgctctgcccaccagacacaaatgtataactgaacgttcccctctccattttgtctgtggtatgtaaaatgcacattccccacagttttcctctgccccttttgtttatgtgaaagctgtgtgcttctcaatatctcatcctttcccctttaaatttggagccctcaaaatcaccttcggagaaaggaatagacctgtctcctgggagcatcctcaactttggcaaataaatatcctaaaatgattgagacttgtctcattattttcct

SEQ ID NO: 519216 - DNA, 484 bp, Homo sapiens
ttaagcctagtacccgttagttacttttcctgattctctccctcctcccaccatccaccctccaaaagrctccagtgtgtcttgttactctctctgtgtccatgcgttctcctcatatagttcccacttgtaagtgagaacatgtagtatttgttttctgtccctccgttagtttgctaaggataatggtctccagctccatccatgtccctgcaaaggacatgatctcattctgctttatagctgcatagtatttcatgatatatgtaccacattttctttagtagtttcttaggctctaggaggaaaaaaaaatcatttaaggatcaaagactgatgctgggataaaatgtgtcatggttgactctggcccattctgaagccacattcctgagaattcagcactaaagcatttggaaggcttcgagcttttccagaagacaggtgcatcctgtgagaatcacagcacaatgactcagcctcc

SEQ ID NO: 519217 - DNA, 484 bp, Homo sapiens
ttaagcctagtacccgttagttacttttcctgattctctccctcctcccaccatccaccctccaaaaggctccagtgtgtcttgttactctctctgtgtccatgygttctcctcatatagttcccacttgtaagtgagaacatgtagtatttgttttctgtccctccgttagtttgctaaggataatggtctccagctccatccatgtccctgcaaaggacatgatctcattctgctttatagctgcatagtatttcatgatatatgtaccacattttctttagtagtttcttaggctctaggaggaaaaaaaaatcatttaaggatcaaagactgatgctgggataaaatgtgtcatggttgactctggcccattctgaagccacattcctgagaattcagcactaaagcatttggaaggcttcgagcttttccagaagacaggtgcatcctgtgagaatcacagcacaatgactcagcctcc

SEQ ID NO: 519218 - DNA, 484 bp, Homo sapiens
ttaagcctagtacccgttagttacttttcctgattctctccctcctcccaccatccaccctccaaaaggctccagtgtgtcttgttactctctctgtgtccatgcgttctcctcatwtagttcccacttgtaagtgagaacatgtagtatttgttttctgtccctccgttagtttgctaaggataatggtctccagctccatccatgtccctgcaaaggacatgatctcattctgctttatagctgcatagtatttcatgatatatgtaccacattttctttagtagtttcttaggctctaggaggaaaaaaaaatcatttaaggatcaaagactgatgctgggataaaatgtgtcatggttgactctggcccattctgaagccacattcctgagaattcagcactaaagcatttggaaggcttcgagcttttccagaagacaggtgcatcctgtgagaatcacagcacaatgactcagcctcc

SEQ ID NO: 519219 - DNA, 484 bp, Homo sapiens
ttaagcctagtacccgttagttacttttcctgattctctccctcctcccaccatccaccctccaaaaggctccagtgtgtcttgttactctctctgtgtccatgcgttctcctcatatagttcccacttgtaagtgagaacatgtagtatttgttttctgtccctccgttagtttgctaaggataatggtctccagctccatccatgtccctgcaaaggacatgatctcattctgctttatagctgcatagtatttcatgatatatgtaccacattttctttagtagtttcttaggctctaggaggaaaaaaaaatcatttaaggatcaaagactgatgctgggataaaatgtgtcatggttgactcyggcccattctgaagccacattcctgagaattcagcactaaagcatttggaaggcttcgagcttttccagaagacaggtgcatcctgtgagaatcacagcacaatgactcagcctcc

SEQ ID NO: 519220 - DNA, 629 bp, Homo sapiens
tttcttcaagacaacagctaatttattttagatcaagtctttacaaatcttcccactaacccaggctatcaaacaatgtgctaagctttacaatgaccccaggtcaaacttttcttatgcagcttcctcacgtcactcagccttcatagaagagagttagggccttgccctgtatcaagcttgtacttaagggaatgtggtggctggtttggttttctctatccatactatttaaacgttctccatattagcaamgaggttgtttcactttaccatttgtgtgttcactggagtagcatttttcattgccctcaagaacttttcctttgtgtttacaatgtggcaaacagtttggcataggaagcccagcttccggcctctcttggctttcaaatgccttcctcactgaatgcaatcatttctagcttttgatttaaagtgagagatgtgcaatgaatgattcctcctctcactgaaacaccggagactgttgtggggccattcattggcctaatttcaatattgttatgtcttaggaagtagggaagctgagaaatggtcaatattgttgtcttaggaaatagggaagctgagaaatggagactgggaaatggttggttagtagagtg

SEQ ID NO: 519221 - DNA, 510 bp, Homo sapiens
ttgcaagtctgctgcatacaaatgcataaaatttttaaagcgtcttaagccttatattttatattcataagacataagatcgatggcacaaagtaactccagtgattagaaaactcttctcatgattttgggaaagctgaacctcctatttgagacacactgattacctgattcatgatatcacctaaataaggtaaattatctgaatcttgctgacagtaaaagcttgtatatcataggagcagaaatcctgaatatgacacacaccgcttttgacataccctttctacaagaagtaygtaaatatctgataaaggtcatttattaccaggcttgtgtatttcactctacataatggcgggggtccttttcctaggcagctcagagccattgaatactgccaaatgtcaattttgactcttactctatctaaacccttaacaagaatattagatcagactgatatatttctgtcttgtctcttaaaaattaattgtatattcttcttca

SEQ ID NO: 519222 - DNA, 510 bp, Homo sapiens
ttgcaagtctgctgcatacaaatgcataaaatttttaaagcgtcttaagccttatattttatattcataagacataagatcgatggcacaaagtaactccagtgattagaaaactcttctcatgattttgggaaagctgaacctcctatttgagacacactgattacctgattcatgatatcacctaaataaggtaaattatctgaatcttgctgacagtaaaagcttgtatatcataggagcagaaatcctgaatatgacacacaccgcttttgacataccctttctacaagaagtacgtaaatatctgataaaggtcatttattaccaggcttgtgtatttcactctacataatggcgggggtccttttcctaggcagctcagagccattgaatactgccaaatgtcaattttgactcttactctatctaaacccttaacaagaatattagatcagactratatatttctgtcttgtctcttaaaaattaattgtatattcttcttca

SEQ ID NO: 519223 - DNA, 624 bp, Homo sapiens
cacacagagacccacgagctttacatactctggcccagggcggagcgcaggaagggccccaaaacagatcatatcacaactgttgttctgggagaaagtaaaagtcaaaaaagcattgcatttagttcaggtttcagccaaactgcgagataccacgttatttaagaggcaggcggaggaaggaaacctaccgctttggaagaggcggaggaaatcgctttcttccctgtgactcagccctggaggaatttcccttttgaaatcttgcggtgttgagtaggaccgccaggccggcaagcaggaggcggcctcctcgtaaccgccaggcggcgacacctagggcggcgcggccaggaggcgrgaccccttctcccctcgctgttccccctcgcgccccttctcccctcgcggttccccctcgcgccccttctcctctcacatttccccctcacaagccttctcccctcctggttccccctcaagcgccttctctcctcaaatctccctcagcttccttctctccctcccatttctctccccattcttttacctctcctagtcccgccttccccagcacgatggcacctctctcgccctaaatcttctccccactcctctcaaccc

SEQ ID NO: 519224 - DNA, 427 bp, Homo sapiens
actttttttttttttttgagacagagtcttgccctgtcactcaggccagagtgcagyggcacaatctcagctcactgcaacctctgcctcctgggttcaagcgattctcctgcctcagcctcccgagtagctgggattacaggcacccaccatcacacccagctaatttttgtatttttagtagaaatggggttttgctatgttggccaggctggtctggaactcccgacctcaggtgatctgcctgccttggcctcccaaggtgctgggattacaggcatgagccaccgtgcctggcctgaacttttatacaacaatgaaataattctctattttcaccaatcaagacaaagccaccttataagtgaagaagttctcactctgtccccaaaataaagagagccctagtcattatatagctcaatac

SEQ ID NO: 519225 - DNA, 427 bp, Homo sapiens
actttttttttttttttgagacagagtcttgccctgtcactcaggccagagtgcagcggcacaatctcagctcactgcaacctctgcctcctgggttcaagcgattctcctgcctcagcctcccragtagctgggattacaggcacccaccatcacacccagctaatttttgtatttttagtagaaatggggttttgctatgttggccaggctggtctggaactcccgacctcaggtgatctgcctgccttggcctcccaaggtgctgggattacaggcatgagccaccgtgcctggcctgaacttttatacaacaatgaaataattctctattttcaccaatcaagacaaagccaccttataagtgaagaagttctcactctgtccccaaaataaagagagccctagtcattatatagctcaatac

SEQ ID NO: 519226 - DNA, 427 bp, Homo sapiens
actttttttttttttttgagacagagtcttgccctgtcactcaggccagagtgcagcggcacaatctcagctcactgcaacctctgcctcctgggttcaagcgattctcctgcctcagcctcccgagtagctgggattacaggcacccaccatcacacccagctaatttttgtatttttagtagaaatggggttttgctatgttggccaggctggtctggaactcccgacctcaggtgatctgcctgccttggcctcccaaggtgctgggattacaggcatgagccaccgtgccyggcctgaacttttatacaacaatgaaataattctctattttcaccaatcaagacaaagccaccttataagtgaagaagttctcactctgtccccaaaataaagagagccctagtcattatatagctcaatac

SEQ ID NO: 519227 - DNA, 606 bp, Homo sapiens
catgaacacagatgaggggaagcttgttgaggcctttggagcctgagaagtgaaagtctttgcattaacttgagtttttgacatctgtggagcggccacactgtcaccaatgcccagaggacggaaaataactgctatgctaggaaagcaatgaggagtgttttaagaaaagccaagtgttcacgtcacgtttttcaggcaccagatccctctctccctgaaccaggagatctccgcactttgtgctttgccacacccgccagaagcagctggggaaggactgcgttcaccatatgccttgtctaaagaaaagcaagaggaaagcgggaagctccaaatttccttgctcggatgagacccagccactggcccgtggactggcasaggctaatagaatgcacaagcaggggaacaccagcccaagccactgctggcacccacagaaggaggcgcgggcaggcttctccaggctacactcctcctgtgcaccccctccaagctggggccatggctctgcccctcccggtgaagttccccagtgctcaccaaggctcacaagactgacaagggcagggcaaggggtgaaaagcagagaaggcaggcaga

SEQ ID NO: 519228 - DNA, 594 bp, Homo sapiens
ctgcagacacttatcagacaccggggctgactcacggagaacagcttcttcttctttttttttttgaaacagattctcgctctgttgcccaggctggagtgcagtgcgtgatctcagctcactgcaacctctgcctcccgggttcaagtgattctcctgcctcagtctcccaagtagctgggattacaggcatgcgccaccacgcccrgctaatttttctatttttagtagagacgaggtttccccatgttggccaggctggtctcgaactcctgacctcaagtgatccacctgcctcggcctcccaaagtgctgagattacaggcatgagccagcagcccagcctgaaaaaacgcttcttacaccaacagagtcagctttctctgaacttggctgtttttgtcaagagttcgtttagactttcttctaggatgaaaaatcatgtgtatttgttttacatctaagtaaggagtaatatggagtcagaccaattccattcatttgccgtttcctgtaagatcagcactctgatgtccctggtgcagtcctccctcggatgaccaagggccctcaggcacgtgccctgcgccagga

SEQ ID NO: 519229 - DNA, 605 bp, Homo sapiens
ttccgtctctgttataatggaatgcaaacgcaactgcaatacctaatggggacattgtgaatgctcgcaactgcattccacagattcagatttcccaggatctctaagtgaattccctggtcaataaatagcattccttcctcttaatctgggggaaaaaaaaaaacccctccaaaaataagttgattatttttatatcatatgaatttaacatatgctctcataataataaactgggatacagaaaagtagaaatgacacagtttacaaagtcaacccaattctcatcacctctagaaaagcactgttaatattttcatgtatttcaattatggacactcagggatgtaatcaaatatgacaagagcatgggaagtgaaagagtcttactattccttggctcatttccrctcctcagatggagttcatttgtatttttctaaaatgtttctgcatgtacagaaatacgacatcatatgtaacagtctaaagtgtaatataaacaaatatgtaacatactatagcaaaatatgaatatgtaacatatgatatgtaacagcctatagtgtaatataagcaaacacataacacactatagcataata

SEQ ID NO: 519230 - DNA, 560 bp, Homo sapiens
ctttgctctgttcattggagcattaaatctgaaggctcaggagagtgatgcagtcgggctgtgcgggagtgatgccataaagctcggcattaaaaattcatattgcaggcttgccttagaactcagcactggctgaaaggagaggtggcgaggaaatatgagacaccccactgtctttctggcaattggagacattcctcaacaaatagcacctcgggaagagaatgaaagggcaaacaagccgtgaaggaaatcaatgagttcaattatctcgctcgctcctgccttcctataggaaacttttcattctttgaggtgggttccaaaaagttttttaacgaaatccccgaacaagagccctgggcatccttgctgggtgcctggctgtttggcacctcttttaatttgtttcacaccagcccacggtgccccaaattttccaagtcagatggaaccagatctccaatgcrggccgccaccttggtgtcacagtcagctgggcggggaccgaacaacttgttctcactttaaaacttggatcttgcaaaaatgtggcacat

SEQ ID NO: 519231 - DNA, 572 bp, Homo sapiens
gctgctgtatgggaaaggcagatctttgataatattctcctttattcaagtcattatatcaaacttgccatttgttactcacatctcctttctctatcaaattctcagggaggtctgccaaaatttccagttgtgcttgtggttttctttcttgcattgattatagttttttcttataaattttgactaattgtttggagcagaagtgtaatctcagcttggcttgcaggatttcaagggcaagtcatttctaggaagtgtaggtagcggcatggggaattggtaaagagaaggtaggaaagccagtaaaggatgcgttagcaagcatttgtcattttgagcaactgcagcttaatcactctgggacagttgtgggagccagtgtagaaaacacatttcagagttatactgtccaaagaatgagagagctggtggatttacggaccttctcttattatttaacttgttgaaggctaccaggggtagggcctgcttcatctgtagtctgaatgggctctggcagagaaagatagcattaattttttttttytttaatttcagttgaagtcagg

SEQ ID NO: 519232 - DNA, 634 bp, Homo sapiens
  misc_feature (1)...(634): n = A,T,C or G
cagcacaggcacatgctgcgcacttccaaggcacctttctcctagatgacgtgtgacacagcagccctggtgtgccttggccttgaacaattaggtagggcaccagtaggggcaggaagactgacagcatggaccactacttcctgcgtggctggggcaggaggccctgaaagaagcagctacagatcctgctttccaggtggtctcaccacaggcacagccagttgcctgcaactaagaacactgaagcccggcctgctttgggggcatttccagcatcccctcctatctggaatctcttcccaaaacatccctgtccccagggactgcatagctcctttcacctggtggsccagccctctctgtgtgccactggctccctgccntcctgggtcccaggacctgggctgagtgtgcaactttagcttccatctgcacagggccctctctgcgggctttgccctccctgatggcatgttcttctcctaacccactggagtgaggggcattcttatcgtctccacttacagaagagaagcctctcatacagaaagggtagtttccctttcaggctaaatcttctgattttacctcttatagtgtccattccagccctggcttctgaccagcgtga

SEQ ID NO: 519233 - DNA, 328 bp, Homo sapiens
gctacctcatctcaagggtcacttgagtttgtcctacagccagggcccagggacaggctttgtcttttccttccwttacttcctcccaaggagttggtggctgcatcttgaaatccatctcccttcatctagccacctatttttcaggatgggccataggaggcagtgggcccaggaggacctcagaccctagtgagctgcatttgaacagcaacagtcacttcatcttgctgagccgttggcttgtggtctgattgcttgtttcatttcattcttttgcttggtttgatttttaaagttgacattctcaagggcttacctgtgcctg

SEQ ID NO: 519234 - DNA, 429 bp, Homo sapiens
tgtgatttgggacaaaccacttaatctctctgagaccatgtgtctttatttgcaaaacagattacagggacaaaagcaagttgacgaatgccaggcagctacagcatgcccagcctaaaacaggaacttggtaaatgttgaagactccaccctctgcccaaccttggtcccaggtcccaggagaacaatgttttgcaaacaacacccagcttgggagtgtctggggttctgatttgattttggtctaacgtggaagtggggcttcccccartttttcccaccctggtctgatggcttcctgtagcattcctttcgccttctgcatgcaggcacacagatgagagatctggaaggcaactgacagcagggtgaggtaagaaacctcacctcctgcttatgcatcagagggaactgaaacccagagtggca

SEQ ID NO: 519235 - DNA, 465 bp, Homo sapiens
ttcggaatttcggaaacccatctattcatagatgtccaatcagcatctctccttgaagacctaaagtgagtaaataaaaaaaacttgtaaatttatctgttttaccttaattttytagataccgtcatgaatttaagtcaaacgagttatggactgaaattaagcttgttctggatgcctttgctttgcctttgactaatctttttaaggtatggaatgcatcttggtgatatttttaaattaatattttaaattgcttgaatgtttgtatacatgttaagagaatgctttgaaagcttatttgataaataatgtttagagcatttcttttgaaaaatttcaaacctacacagaaatagagatgctatagtgaactcccatctattattacacaaatttaatggttagcaacgttttattttctctgtcccctttcttaggaatgttataaaagcaaatcccaag

SEQ ID NO: 519236 - DNA, 465 bp, Homo sapiens
ttcggaatttcggaaacccatctattcatagatgtccaatcagcatctctccttgaagacctaaagtgagtaaataaaaaaaacttgtaaatttatctgttttaccttaattttttagataccgtcatgaatttaagtcaaacgagttatggactgaaattaagcttgttctggatgcctttgctttgcctttgactaatctttttaaggtatggaatgcatcttggtgatatttttaaattaatattttaaattgcttgaatgtttgtatacatgttaagagaatgctttgaaagcttatttgatarataatgtttagagcatttcttttgaaaaatttcaaacctacacagaaatagagatgctatagtgaactcccatctattattacacaaatttaatggttagcaacgttttattttctctgtcccctttcttaggaatgttataaaagcaaatcccaag

SEQ ID NO: 519237 - DNA, 465 bp, Homo sapiens
ttcggaatttcggaaacccatctattcatagatgtccaatcagcatctctccttgaagacctaaagtgagtaaataaaaaaaacttgtaaatttatctgttttaccttaattttttagataccgtcatgaatttaagtcaaacgagttatggactgaaattaagcttgttctggatgcctttgctttgcctttgactaatctttttaaggtatggaatgcatcttggtgatatttttaaattaatattttaaattgcttgaatgtttgtatacatgttaagagaatgctttgaaagcttatttgataaataatgtttagagcatttcttttgaaaaatttcaaacctacacagaaatagagatgctatagtgaactcccatctattattacacaaatttaatggttagcaacgttttattttctctgtyccctttcttaggaatgttataaaagcaaatcccaag

SEQ ID NO: 519238 - DNA, 467 bp, Homo sapiens
agccccatcaactgccccagctcaatgataaactcttctcttcttcaaataaaagcacatcctggcttacatggccatcacttctttgtacaattttatatttttatcatctaaarttatagtttagttttacctttaagagtatatttttatcctcatttattccatagattcctgcttgaaatttatattgtctggtagtttcctgtcctttgcattttgcagattgcaccccaaggtgtggtttaatgtatctctatgacctgtattttctgtaaattggtagtttgttatagaggtttgcgtctattcagggttttttttttttttttttttgccatgaggattgatggtactatatcatgtttttcatcaagaggaagaattcaatactagttatttcttttttgcgatgttaattgccattgctgttcagtggctaaatctgttaattcattacaaattgc

SEQ ID NO: 519239 - DNA, 630 bp, Homo sapiens
gcagggtgtgagcctgctgtgggactgccccctcctagggctgggcctgctgactccagggtctgcttcccccacctctgcactccctctgctgcaggcctgagctctccttgcccctggctctcttctgcagagggcctgctctcagctgccacaagagggcgccggagaacggacctgagcagagaggcaggrgctcctctgcaggtcctcccaggcaccaacccttctgggagggaggaaggcttgggagtcctcttagacagatcctcagtcacttccctctgcttgtgtctcaggaagaccacctcctcctactgtcttctgtgctagggatcacttccttgttgagtggaacctgagttttaagaggatcttctgctcctcttcatctggtccctttccttccaaggccccagagaggaaggcatgcagtgggccctagcggtgcttctagctttcctgtctcctggtgagtgcgctgcctacagagaggatcacgggttttgttttattttcttcttttgcaaggagtaccatactaaggaattcctcattatattttgtgttgttcccattgcagccagtcagaaatcttccaacttggaagggagaacgaagtcagtcatc

SEQ ID NO: 519240 - DNA, 422 bp, Homo sapiens
ctgaaatcacttgtgatcttgctgaaggaagtaccggctacatccactggtacctacaccaggaggggaaggccccacagcgtcttctgtactatgactcctacacctccagcgttgtgttggaatcaggaatcagcccagggaagtatgatacttacggaagcacaaggaagaacttgagaatgatactgcgaaatcttattgaaaatgactctggagtctattactgtgccacctgggatgggcacagtgattcagatccgccctacaccacactgaaaacctgccttgtggctgcttctggtacacaagatagagcygccccctctcatttcctgccaccaaatttaccgtgtgctgaacaagagaaacattgcttaactcctgatctcccctgcaatattacactcccctggcagcag

SEQ ID NO: 519241 - DNA, 563 bp, Homo sapiens
gtgccatcttcgtgtcccccctcgaacaccccgtgttggccattcgcagaggcccctggggagggaacttgtgtctgaaggtgcctgagcagagccttggytgtctcatcccatgccccagccacatggcaaagtatgggcactgctccgcccttggggatcatccccaggatgtccaaagtgcactgggatttgggcaagtggcctagtgactccaaaggggctcctctcagcagaaaccagggtgctacgggcctgctgcagggtggccccaggaatgggtagggtggaacagggtgaggactggaatgtggtcagagatgactcagtggttctagcctgggagctgagccctggtgagttctgggatgaggtgacggcctggcgcaagagcacgggcacccagagggtctcccttgcctttgtctattgtgtcatgtgggttggagaaaatcctggtcacccataacccactatccacttagagccctcgagtcttaccgatttgttcttaacaatggcatgagcctgttcctgcctttttagtttaaggcccgtgagcg

SEQ ID NO: 519242 - DNA, 563 bp, Homo sapiens
gtgccatcttcgtgtcccccctcgaacaccccgtgttggccattcgcagaggcccctggggagggaacttgtgtctgaaggtgcctgagcagagccttggttgtctcatcccatgccccagccacatggcaaagtatgggcactgctccgyccttggggatcatccccaggatgtccaaagtgcactgggatttgggcaagtggcctagtgactccaaaggggctcctctcagcagaaaccagggtgctacgggcctgctgcagggtggccccaggaatgggtagggtggaacagggtgaggactggaatgtggtcagagatgactcagtggttctagcctgggagctgagccctggtgagttctgggatgaggtgacggcctggcgcaagagcacgggcacccagagggtctcccttgcctttgtctattgtgtcatgtgggttggagaaaatcctggtcacccataacccactatccacttagagccctcgagtcttaccgatttgttcttaacaatggcatgagcctgttcctgcctttttagtttaaggcccgtgagcg

SEQ ID NO: 519243 - DNA, 563 bp, Homo sapiens
gtgccatcttcgtgtcccccctcgaacaccccgtgttggccattcgcagaggcccctggggagggaacttgtgtctgaaggtgcctgagcagagccttggttgtctcatcccatgccccagccacatggcaaagtatgggcactgctccgcccttggggatcawccccaggatgtccaaagtgcactgggatttgggcaagtggcctagtgactccaaaggggctcctctcagcagaaaccagggtgctacgggcctgctgcagggtggccccaggaatgggtagggtggaacagggtgaggactggaatgtggtcagagatgactcagtggttctagcctgggagctgagccctggtgagttctgggatgaggtgacggcctggcgcaagagcacgggcacccagagggtctcccttgcctttgtctattgtgtcatgtgggttggagaaaatcctggtcacccataacccactatccacttagagccctcgagtcttaccgatttgttcttaacaatggcatgagcctgttcctgcctttttagtttaaggcccgtgagcg

SEQ ID NO: 519244 - DNA, 563 bp, Homo sapiens
gtgccatcttcgtgtcccccctcgaacaccccgtgttggccattcgcagaggcccctggggagggaacttgtgtctgaaggtgcctgagcagagccttggttgtctcatcccatgccccagccacatggcaaagtatgggcactgctccgcccttggggatcatccccaggatgtccaaagtgcactgggatttgggcaagtggcctagtgactccaaaggggctcctctcagcagaaaccagggtgctacgggcctgctgcagggtggccccaggaatgggtagggtggaacagggtgaggactggaatgtggtcagagatgactcagtggttctagcctgggagctgagccctggtgagttctgggatgaggtgacggcctggcgcaagagcacgggcacccagagggyctcccttgcctttgtctattgtgtcatgtgggttggagaaaatcctggtcacccataacccactatccacttagagccctcgagtcttaccgatttgttcttaacaatggcatgagcctgttcctgcctttttagtttaaggcccgtgagcg

SEQ ID NO: 519245 - DNA, 626 bp, Homo sapiens
catggaaggctggttcttgtcccccagcccaagccagtgacctggaaaaaatccacctggatgagaagtctttccgttggttgcacaacgaggaccagatggctgtggagaagctctctgacgggatccgcaagtttgccgctgatgcagtgaagctggagcggatgctgacagtgagtgttgtgtgtgggtacctacatatgccaagccctatgagagcccgggcctgggcgtcggggttcaagctgggcagagttaaaactttggtgagaccccaggtctcattcacgtgctgtccagcaagtggggcctgttgaggccatcccagggtggagggtgcatggcacccaggggtgcccccaggatgcttggtgggtcctggctcctctctggcctgtgtggtgactgtggtattggccaccctgtggccgtggcccccacacagagtgcagaccccacaagggcctccctccttccacatggtgccttgtgaggcttcaaggtgcasaaggtagggtggggagacacagctcgtgctctgtttgtttctaggaacgaatgttcaatgcagagaatggaaagtagcgcatccctgaggctggactccagatctgcaccgccggcca

SEQ ID NO: 519246 - DNA, 578 bp, Homo sapiens
gtttgatatcattaggtttacattgagcttgtatcatccatagaagagtcagggttagaccctctggggaagagagtggacaacaaagataagccacactctactctatatccatgaaaaaatagtaaccatcacagctaccagttgctcaattctacttacttttgtttttaaactttttattagggaaaatttcaaaaatttctgaaagtgaagtagtgcagtgacctcccatacgtccatcacctagcttcaacgcttatgagcaaatggccactcttttttttttttttttttttttgagacagagtctcactctgtagcccaggctggagtgcagtggtgcagtcttggctcactgcaacctctgcctcctgggttcaagcgattctcatgcctcagactcccgagtagctgggattacaggcgcctgccaccatgcctggctaatttttgtatgtttagtagagatggggtttcactatgttggtcargctggttttgaactcccgacctcaggtgattcaccagcctcagcctccaaaagtgctgggattacagacgtgagccatcgcact

SEQ ID NO: 519247 - DNA, 578 bp, Homo sapiens
gtttgatatcattaggtttacattgagcttgtatcatccatagaagagtcagggttagaccctctggggaagagagtggacaacaaagataagccacactctactctatatccatgaaaaaatagtaaccatcacagctaccagttgctcaattctacttacttttgtttttaaactttttattagggaaaatttcaaaaatttctgaaagtgaagtagtgcagtgacctcccatacgtccatcacctagcttcaacgcttatgagcaaatggccactcttttttttttttttttttttttgagacagagtctcactctgtagcccaggctggagtgcagtggtgcagtcttggctcactgcaacctctgcctcctgggttcaagcgattctcatgcctcagactcccgagtagctgggattacaggcgcctgccaccatgcctggctaatttttgtatgtttagtagagatggggtttcactatgttggtcaagctggttttgaactccygacctcaggtgattcaccagcctcagcctccaaaagtgctgggattacagacgtgagccatcgcact

SEQ ID NO: 519248 - DNA, 564 bp, Homo sapiens
ggtttacattgagcttgtatcatccatagaagagtcagggttagaccctctggggaagagagtggacaacaaagataagccacactctactctatatccatgaaaaaatagtaaccatcacagctaccagttgctcaattctacttacttttgtttttaaactttttattagggaaaatttcaaaaatttctgaaagtgaagtagtgcagtgacctcccatacgtccatcacctagcttcaacgcttatgagcaaatggccactcttttttttttttttttttttttgagacagagtctcactctgtagcccaggctggagtgcagtggtgcagtcttggctcactgcaacctctgcctcctgggttcaagcgattctcatgcctcagactcccgagtagctgggattacaggcgcctgccaccatgcctggctaatttttgtatgtttagtagagatggggtttcactatgttggtcaagctggttttgaactcccgacctcaggtgatycaccagcctcagcctccaaaagtgctgggattacagacgtgagccatcgcact

SEQ ID NO: 519249 - DNA, 556 bp, Homo sapiens
atgccgtcctcaggatctgaaacaagcacgtctaagacgtccggctgaggtccggccccaccccctacccaaccatgggagctgtccgggccarcagtgctgtttcgcctttcggcaagaggtcagcgacaacgcaagctctctaccacgaccatggtccgcttccccgacgccccgagcgttcccctttccagcttgttcgcgcttctgtccctcccaaggacactgcagcacgagatgggacggcattcttaggcggcgggagcagaaatcctgcctgagtcagcgcccgcacctcctccacgccggcctgagccaggcctctgcagccccttcctctcagtactcccgcacccctctccctttttggtttctcccaccctgaccacctggccgacccggtaccggtgatttggttctggttccggcttctgctggggttccggctccaggggcgtcctagtgcggctcagggcccccgacgcccttccggcgctcatcccttgattcatcccctcccccttcgccgcctcaccggccccgggctgtggctgcg

SEQ ID NO: 519250 - DNA, 556 bp, Homo sapiens
atgccgtcctcaggatctgaaacaagcacgtctaagacgtccggctgaggtccggccccaccccctacccaaccatgggagctgtccgggccaasagtgctgtttcgcctttcggcaagaggtcagcgacaacgcaagctctctaccacgaccatggtccgcttccccgacgccccgagcgttcccctttccagcttgttcgcgcttctgtccctcccaaggacactgcagcacgagatgggacggcattcttaggcggcgggagcagaaatcctgcctgagtcagcgcccgcacctcctccacgccggcctgagccaggcctctgcagccccttcctctcagtactcccgcacccctctccctttttggtttctcccaccctgaccacctggccgacccggtaccggtgatttggttctggttccggcttctgctggggttccggctccaggggcgtcctagtgcggctcagggcccccgacgcccttccggcgctcatcccttgattcatcccctcccccttcgccgcctcaccggccccgggctgtggctgcg

SEQ ID NO: 519251 - DNA, 492 bp, Homo sapiens
acacagtccctcctccagggagcttacggtgtggtgagagagaaagacagggccataggcatttaaaatggagcacataaagggctcgagagctggaacatatcaggtgctatgggagcataaaggagcattgcctcacctacagttgggggcccgggtattgaagttgatgtatgaatgacgaacaggagctccaactgcaccatagcagccagagaagcatgggagaatgtcagaggcagaggacatgcagaagaatatgcacaggcctagcaatgaggaagaacatgsgtcctccaggcagcccgcgtggttcagtgtagctggagaaaagagagcaagagtgaggtgtgagagacgaagcaggaaagaggagcacacccagaaatgctttgtgagtcacagtaaggagtttggaccttgttctccaggcacaggggagccattcaggggttttaaatggtcagatgcaggtggcagttgggggacaga

SEQ ID NO: 519252 - DNA, 492 bp, Homo sapiens
acacagtccctcctccagggagcttacggtgtggtgagagagaaagacagggccataggcatttaaaatggagcacataaagggctcgagagctggaacatatcaggtgctatgggagcataaaggagcattgcctcacctacagttgggggcccgggtattgaagttgatgtatgaatgacgaacaggagctccaactgcaccatagcagccagagaagcatgggagaatgtcagaggcagaggacatgcagaagaatatgcacaggcctagcaatgaggaagaacatggktcctccaggcagcccgcgtggttcagtgtagctggagaaaagagagcaagagtgaggtgtgagagacgaagcaggaaagaggagcacacccagaaatgctttgtgagtcacagtaaggagtttggaccttgttctccaggcacaggggagccattcaggggttttaaatggtcagatgcaggtggcagttgggggacaga

SEQ ID NO: 519253 - DNA, 511 bp, Homo sapiens
taccgagtgccccctgctgatgttgaggtaaaatgtggcttgctcaataggccacatgtggtgtgctcaataaagattgagtaaactgagctcttgaaaggatggggaatggagaaaatgaatccaaattaggggtgagagaccaaggtggatgctttgagaagggctccctgccagccttagtgtgagctgtgggcgagctcccccagcagggaagagccacttccttgtgtggggcaggtgtcgtgctcagtgccgaggggagatacracagcagttttaccctcaggatagggctggcaaagaggggtcctgtgtgaccatggtgactctttccgacatgtggcagagctcattcatcactcatagcgctacttcctgctgaactcaggtggatttttagttcccctaataatcaatgagagaatacagtctgaaatctatttgccctctctgttccaggaaaggggtcccaggaggaagggagttgcctgatgacagggagcgctga

SEQ ID NO: 519254 - DNA, 617 bp, Homo sapiens
gtttgaatggctctaagtgagtcttcggcagaatctgtctggttttggtatgatatatgtatcttggggaaaatggggagattttgcatgctctgtatctttgactttctttgagaaaatacttgggagtcaatgagttcacataccaaaaaagccttatgcagaatctaactgggtgtgtgtgaaagggggagcggcrgaagttaggaagactgaaggacctcctttatgacagtaaaaaaaaaatcttttaaacttaatttcaaatgaaactttaatgtcaaatgttctggaactgtcacacatcattttgttaacctatacctattaggtataggtataggtctagaatgctgtacaagacgggttaaatgaagtctgtgtgtgtctggtgaatgcatatgagtagttagagatacaccattcaatacttgatttatttgtgcaggttacctatcatggtaacctctggcaggggctcattatttcatataaactaaaaaggaaaaaactatgcctgcaagactgattgattttctgaatcactcacaaagggcagccatgcagcccaaacacacttcatctctcaagttttattttagccttttgccttacaa

SEQ ID NO: 519255 - DNA, 428 bp, Homo sapiens
gcttgaggacttcttttgcattaaaataattaaaattatatgtatatmgttgtatgtttattatggaaaaaaatcaatgcatgtttatttttagaaaaaataaatataaagataggcacaagaaatagtttaaaaaaatcacccacacttctatagttccaaagtaattattgttaactaactatgtatgtacctatgtactcaaatgttcatgtatatacccatagatatgcacacaaagcattttgtgaaatttggattatagtaaccattaattcatagcttgctcttttcactttgcacattctgaagattatttctgttaacaaatacttgcccacagcatttttgtagtatttgtttgctagttttagatagatacttttaagtacagaaaagtgcacacgttacaggtgtgtagcttgatc

SEQ ID NO: 519256 - DNA, 538 bp, Homo sapiens
ttgggggtaacttcctcccaatttcaagtagagtcaagtaagagatctcttccccttgaatgtaacagggagttgggaatgctggaaaactagacctacttttggagagtcttgctgtagtatctcattttcttgctatgagacaatacagartgataatgcagtgagggcatctctaagacaacatcaccaggaagcagcagcagttgagtattgaaggccgatgagaggggaaggctgaacccactcctcctctgcaggatgaacaggacacctgccctcacaggctgctgggaacaccaaattccatgggaaggttttcagccaatcagtccttgctgaggggcctaaacacctgcgttttccacaaaaattggagctctattttcagcagccccatttttttttgattttaccatggctgcctcccatgtgtattccagattgcatctttcagattgaaaaaaattccagagagcatggactgtttcctttgataatctgaccacagcttcttgcaggttcctgtgagtgaata

SEQ ID NO: 519257 - DNA, 596 bp, Homo sapiens
cctttactgtgtattttccctgcctgttcaattgtaggattctgaatggcagagcccctttctgtcatttgtcttttctcttgcattccaatgccaggtaaagttatttttatatattggataaataaaacatgtcatgggcaataataataatttgcttcaagagagtggtaagttgaagctagtttctgagaaaggattgttgaatatttggaaattttgagatctggttgttaaatgactgagaacttcaaattagccatggtgggattatttacactttggaaattggcaaatgctacaaatgaagattttgtttttcctcccagagagctggtttgccagcacagcactgctttaagatgagaaaacctcctgtcattcattcccggagaaaaatgacattgactccccmctgcccgttgttcagaggataaaatttaactatgtttttttgtgtttgtttttgttttttttggttcctggaatatttttttctcaagaaagaataaaaagtaaccctgggctaaagatgggcaactggaaagaatgataatgtttccaggcacatggaacccatcctccttctcctcctt

SEQ ID NO: 519258 - DNA, 595 bp, Homo sapiens
aagtgtttaatttattgttttagtgtgtacattttgaagaaaatgacctgttttgtggccaaatgaatggaaacttctctttattcattatgtgaagaggagattggctctgtacgatcaacacacttgtcgtttctttttgatatgaaagacagtgggacattattttttccaaaagttttgagactgaaagacaaacttttctaaacctacaaatgtgataaagtagacaaagaaaggcaggggttggggtcaggttttctaatgcatcattaaaaaaaagtctatctcttttggactttcttggatgtgctgctcctttgatgactctgatgaggacctcattggggaatggaaatctctggaatgaattttaaaaaaagtgtgtgttttactggcatatttctaaagtccttaaagtacttctgtaataacawtctctatgaaagatcaagtcctacaacagggcaaactgagttttagataatcgagcatgatcctgtaattgatgacgtcattgatcccttttgtgttgccttcactggtcattttcttgttttctttttttttgagatggagtctcgctctgttgccc

SEQ ID NO: 519259 - DNA, 531 bp, Homo sapiens
tgaggcttttctctgccaccggcaggtgggttcaatgactctgaacaaagcattacattcctttgcgtctcagtttctttatttaagaaatgacaacatacycagcttgccagcctagcagttgtggggttctagtgcagtggcttgcgtaccgtccgtaaactgttatgtgagaataaaacatttatcatcatccatttctgctccacaaaacgctttgagtcagtttagttattataaagtgtgaatgtggtgaagatgctgatggatgactgaggagcagccatctccccgcagcctctctcggagtctgcacccacttggcccacagccttggttaggggtctcctgtgtgtgtcagccccgtgagctgagtttttgatgagggtaggggttccttcctctttgggtgccatgacctctatggaccccttattaggagaatgcttttaaatgtataaaagaaaacactctgggttacaaaggaaatcaattacactgatacatagttacccaaatatttttttttaa

SEQ ID NO: 519260 - DNA, 533 bp, Homo sapiens
ctcgtaggtccagccacttctgtgattgcttgttttatctccgtggatggggagggggtccctgtcagggagctggcascccgtacttgttttccgttttgtgtggacatcacacacctttttgaacaaagcaagagtctcactcatggcttcttgtgttctgagatgtacttaaatccttaagcagcgtccgtgtgaacatgggacagcgagaaggcatttggactcctcttctgggccttgtgtattttgtggtgctgaggggagggcagggcgaaatggggatgctgtctttgacatgctgcacaggccatgaggctggctcagcctacactgtagcgcagggaccagggcaggggaagcccttttatctgttgctcctgacttggcggttctgtcctaacagcagcagggtggggactgctgaggattcaagaaaaaccaaagctccaggaaggatctgggccgatgtgaggcccagccaggggctgtgtattgacaaacaaggaccttcagggactatctggtggggc

SEQ ID NO: 519261 - DNA, 533 bp, Homo sapiens
ctcgtaggtccagccacttctgtgattgcttgttttatctccgtggatggggagggggtccctgtcagggagctggcaccccgtacttgttttccgttttgtgtggacatcacacasctttttgaacaaagcaagagtctcactcatggcttcttgtgttctgagatgtacttaaatccttaagcagcgtccgtgtgaacatgggacagcgagaaggcatttggactcctcttctgggccttgtgtattttgtggtgctgaggggagggcagggcgaaatggggatgctgtctttgacatgctgcacaggccatgaggctggctcagcctacactgtagcgcagggaccagggcaggggaagcccttttatctgttgctcctgacttggcggttctgtcctaacagcagcagggtggggactgctgaggattcaagaaaaaccaaagctccaggaaggatctgggccgatgtgaggcccagccaggggctgtgtattgacaaacaaggaccttcagggactatctggtggggc

SEQ ID NO: 519262 - DNA, 302 bp, Homo sapiens
ctgtggtgctgctgggcagggattcaatgcttgggacatgggtgaggatgtgtgtgtgtggtgtgaagggtggtcccgggaagctgcacacacttgggtgcccactgctgggggtagtggtgggtgatgtggggaagctctttgtagagcagtgaatgggaagaggggtgggccagatgtgctgggcaatccctgctggtggtgaacattccattcacatgcacccgtccctcctcttccccatctatycccacacctctttccatttgtctgttttcctcactggtaagcagggcacccag

SEQ ID NO: 519263 - DNA, 601 bp, Homo sapiens
cactgggaaccttttagctgactgcctgctcgatactttttctaatatgttctcatgattacattagatgttgaaaaaagtgattgcaactaaaattattttcatggaaacagtttcaatggaccccgttcatcatatgagatcatatyataattgattgagccaatttgctactgttggatatttagattgtgtccatttttttgcacaattatgctgcagtgaacattgtaaataaatctcggcgcatatctcagatctgttggtgtggatagtgattctccaacatcttgccaaagtgtatcccccaaagagaagctttgaggttttcacctttttcttagaatttcaggagaatgttgctttcttcttgaaagtgatctgatttgttttaatgttaaaataatgtcttcaattactaatccgtgaaatgagtcattaatttagccctacctgcaaaggctttcagtacaatggatgtccagggagatgagccctggggaccctgaggcctcagatctcatctgctacttctcatgttatgcctcgggggtgcctgggtgagaaacaggtcttcgtagagggttgcagaaatggaatt

SEQ ID NO: 519264 - DNA, 601 bp, Homo sapiens
cactgggaaccttttagctgactgcctgctcgatactttttctaatatgttctcatgattacattagatgttgaaaaaagtgattgcaactaaaattattttcatggaaacagtttcaatggaccccgttcatcatatgagatcatatcataattgattgagccaatttgctactgttggatatttagattgtgtccatttttttgcacaattatgctgcagtgaacattgtaaataaatctyggcgcatatctcagatctgttggtgtggatagtgattctccaacatcttgccaaagtgtatcccccaaagagaagctttgaggttttcacctttttcttagaatttcaggagaatgttgctttcttcttgaaagtgatctgatttgttttaatgttaaaataatgtcttcaattactaatccgtgaaatgagtcattaatttagccctacctgcaaaggctttcagtacaatggatgtccagggagatgagccctggggaccctgaggcctcagatctcatctgctacttctcatgttatgcctcgggggtgcctgggtgagaaacaggtcttcgtagagggttgcagaaatggaatt

SEQ ID NO: 519265 - DNA, 504 bp, Homo sapiens
gttgccctatttgttgtttaagaaatgctgacccttttcacaagacrgtgctgaaagcgaagaaagaagttcctgcccctcctaaagccaaagccaaagcaaaggctttaaaggccaagaaggcagtgttgaaaggtgttcacaaccacaaaaaaaagaagatccacacgtcccccaccttccggcggcccaagacactgcaactccggaggcagcccaaatatccttggaagagcacccccaggagaaacaagcttgaccactatgctatcatcaagtttccgctgaccactgagtcggccatgaagaagacaggagacaataacacacgtgtgttcatggtggatgttaaagccaacaagcaccagatcaaacaggctgtgaagaggctctatgatattgacatgatcaaggtcaacaccctgatttggcctgatggagagaagaaggcatatgttccactggctcctgattacgatgctttggatgttgccaacaaaattg

SEQ ID NO: 519266 - DNA, 375 bp, Homo sapiens
cactctgcgtggagaacaatttgccaaagcgttatgtgtaaatgaacaaacaaggaaaagagtgtggagtgctaagtaaagccaggaagggacatgaaggcgaatcctacgcaccctcccaggaaatgggggtttaatcgctctgcccaccacctctcagagtaatcctgaggcacaaaaagaaaaaatgctttgtaaatcattaacagtacacaaacataagatgttagattatctattttaatttcagtttattgcattgttgctgggagaaaacttccttaccattcawcttgttttcaaaggtcttaatctaaggtttgtaaactgaacggctgactgagcagaggttccctagagtgacacagtccaagg

SEQ ID NO: 519267 - DNA, 588 bp, Homo sapiens
ctgacctcccctgagcaagaagaaattctgctgccagattgcttttatttacttgtttgtttgtttgtttgttttttgagacagggtcttgctctgtcccctaggctggagtgcagtggtgtgatcatggctcactggagcctcctaaccttctgggctaaagcgatcctcccacctcagtcccctgagtagctgggactacaggcatgtgccaccatgtccagctaatttttaattttttttgtagagctggggtcttgctatgttgcccaggctggtgtcaaactcctgagctcaagtgaccttcccaccttagccttccaaagtgctggaattacaggcatgagccaccatgcccggcccagactgcctttcaatacaactctttcctgggtctctactcttgatggccaaccctgcagatyttggacttgccagcccctaaaactgtgaatcaatccttaaaatctgtctctctcattcttttcatagcctattgtttctgtttctctggaggacgttggataatacaactagtttgccaaatagaaaactctgggggttttaactgctggaatggggaagttc

SEQ ID NO: 519268 - DNA, 611 bp, Homo sapiens
aggcatctgcctgccttctctgcttttcaccccttgccctgcccttgtcagtcttgtgagccttggtgagcactggggaacttcaccgggaggggcagagccatggccccagcttggagggggtgcacaggaggagtgtagcctggagaagcctgcccgcgcctccttctgtgggtgccagcagtggcttgggctggtgttcccctgcttgtgcattctattagcctgtgccagtccacgggccagtggctgggtctcatccgagcaaggaaatttggagcttcccgctttcctcttgcttttctttagacaaggcatatggtgaacgcagtccttccccagctgcttctggcgggtgtggcaaagcacaaagtgcggagatctcctggttcagggagagagggatctggtgcctgaaaaacgygacgtgaacacttggcttttcttaaaacactcctcattgctttcctagcatagcagttattttccgtcctctgggcattggtgacagtgtggccgctccacagatgtcaaaaactcaagttaatgcaaagactttcacttctcaggctccaaaggcctcaacaagcttcccctcatctgtgttcatg

SEQ ID NO: 519269 - DNA, 539 bp, Homo sapiens
tatgacccaccaaacagtacttgccttgaccattccccatgccttctaatattttattctacccaattctgttttcttttcaacgtcgggtcttattaaattgacttggtgatgcactaatgggtcatgatgcagaatttgaaaaaattacactcagttccttccccaagaagtagaggaaggtcagaaatggaggatggtggggaaggaatggggtgtgtgtttttccagaatagggtgggagggaaatggcctctcacagcccacttgtcagaactgctcccatgtcccgatccgacttcagargtgggaaaacgttgggagctggtgaggtgggtggggaaaatcactgtctgccacacctctcgtttctggcattcagtccacttttgtggccatcgtttgttgtgctggttggctcactctgcccaattcttccttctggttgccagttctcttcatatgtctactcttttactgcgggtcgctcacatctataaatgacggtctaggttgtacagtctcggaggttcaagtgg

SEQ ID NO: 519270 - DNA, 552 bp, Homo sapiens
tcacacaggcaggagtgcagtggtacagtcagagctcactgcagcctcgcagtcctaccgctgagtacttgagactacaggtgtgcaccaccatgcctggctaattttttactgttttttagagatgcgggtcttgctctgttgcccaggctggtctcaaactcctggcctcaagtgatcctcccgccttgatcttcctggacttctgttggataaattccctaggaagaggagagttaacacttcgatagattttatttatttatttattttttagagacagggtctcactgcattgcctggccttaagtgaccctcctgtcttggcctyccaaagtgctgggattacaggcgtgagccaccacacctggactttgatcgatttttggaggactttcaaagtaaaaatgaagaaggtatctgatcttttgataagcccttagtcactagtagatattatattgcatttaattcctgatgcccttcctccacctactagtggtgtcatctttcccacaggaccttttcttccttttaagtctaacccaacca

SEQ ID NO: 519271 - DNA, 467 bp, Homo sapiens
caaggcctgacacatagtaagcaccatatatgtgttccatatttatggaagtagaggcacactatgcatgattgttgctatattgatggtataacattacaaaactagcttttgacttaggcttgccatctctaaaagttccatatattaagaatgtgaggctctgagaggtttattatcttttccagggtcaccaagctagcagaagtgtagccaagattccataagaggttgagcattttcactatacatgtttggtctctcctgcactctcgctctttcycttctgtcaaccatgatacccaagtctccctcaccctaaaaatatctttcctccaccctgcttggacctaaatgttccctatatgccctaaagtttccatcgtctgtctccccctttatttactaggatcccataaaagtaagtggctgatactgagcttttccacatttcctgtccttacagt

SEQ ID NO: 519272 - DNA, 467 bp, Homo sapiens
caaggcctgacacatagtaagcaccatatatgtgttccatatttatggaagtagaggcacactatgcatgattgttgctatattgatggtataacattacaaaactagcttttgacttaggcttgccatctctaaaagttccatatattaagaatgtgaggctctgagaggtttattatcttttccagggtcaccaagctagcagaagtgtagccaagattccataagaggttgagcattttcactatacatgtttggtctctcctgcactctcgctctttctcttctgtcaaccrtgatacccaagtctccctcaccctaaaaatatctttcctccaccctgcttggacctaaatgttccctatatgccctaaagtttccatcgtctgtctccccctttatttactaggatcccataaaagtaagtggctgatactgagcttttccacatttcctgtccttacagt

SEQ ID NO: 519273 - DNA, 625 bp, Homo sapiens
actgtgtgtccagaaataagagactcagggccatagggagtctcactggggagtcatggggcaggagtgatttctcttagggctgaaggactcttgaccctgtggttctgtgcttgtgttgatgtctatgagctaacattgcttttgttgtctcccacccctttccccacctcatcccaatccacataacaactttctttttkgcactcattacaccctaaactgcatgtgcaaaaacaattttccatggtaaaggagcttatgttagtctctgggcaggagcagggccactgatggaaataggataataataggaatccatgaacacgtgcacacacacaaactcacacacacttgccacttgcatttactttccaaaaactaggtgaggtgtctcttgacattagttaaccaaaaataaatggtttaaaatctcactcattttttctggtatcaagggccatttattgctaactgaacaaatgctaagcccagtgaagctgaaaggagcgagtcctcgactgcaacttagtaggggaactttagaaagtcccagcagcaacgggctgatgctcatttctcactaggggaacagcaaggattgagttaggtgctctaattgcaa

SEQ ID NO: 519274 - DNA, 647 bp, Homo sapiens
tcaggtttcagagtcctccatttaatgatctcactctttcttctgccatttccttagccgaatgtttctgcttgacctagtgttgtcttggttttgcagacccctcttcatgggcatcctgtaagtgcctctttcctgaatttctaagcatttggagacttgggcttccacaaaaacactttaaagttgggagaacactcttctcrgctttagcagagatcacagaggaacgaggattccattatccctgctctgcttactaaatgcaggataaagaccgttttgctgagggagaaattatattatttttgcattctcttttcctgaagtgctgactttctggcccttgttgtacatggaaagtgcagtggcgtggagcatcttatataatggagggtagcaaaatatatacctcataaaaagtggatgcctgtgtttagatctctgcacccacggtactgagcatctggatagaaggcagcttaagatagctcagagttcatcttccttcagtgtttccttattactcgaaataatctagattttgtagcactatttaaccatgcctgatcaaaagtaggctcctttagaaacctagttgggtcccctttgaaaagctgtctgtagctcttgtaccctcaaaccac

SEQ ID NO: 519275 - DNA, 656 bp, Homo sapiens
ttccggaaagttctgttcattgaacagtatacttagcatcaagactttttagagagcaatgaaataaaaacaaaaagaaggtttttgtgctctaagtaaggaaacattcatttttgccaggaccaaatgtgtaaaaagaataaattataytttaaaggaaacgggaatttcaaaataacaccaccaaaaaaagggattttttttttcctacacttttagtcaggattccttctgtcaagagtggtaacccggtcttggtaaacaatgtgctcagagaaaaaaaaaataaagtttttttaatttctgaattcaaaataaacatctaagtttccaggaacatttatatttcatttatacgattctttggtcaacccaaggaactcagagctctgtaataatgccacttacttctgatattttgataacaaaaagcatgggtttgttcaacgtaaatgatataccctcaaaatgttaattttctgactactgaaaataaaattggatttcctagaagtgactgtaggttggaataaaacatttagtagatgtctgagaatgttataatcataggatagttatgttgatatttttgtaattaataaaatacattttaaaagtcccatttagaagaaataaggactccatgaaactctagg

SEQ ID NO: 519276 - DNA, 467 bp, Homo sapiens
ggttgtcctccgtgtgtgtctgtgttctcacttccacctcttccaatgacaccagtcatactggattagggctcatcttgatgacctcactttaccttaatcacccctttgtaggccctatgtccaaataccttatcccgaggtactgggggttgggacttcaacatgaattttggagggacatcatgcagcccataacaaaatctgacaatagttgtatatgcacattctgtaacacatagaacctgtatgatctacctgataggtgaccgctgcccaatttcagagccctcagttttggtcatatttgygctggtgttaacaccaggctattatctaaggggtcggcatccgcagtctatcatgttggaaagcatggcagccattaggttggccgttattgtcagatggcttctcagccccctcttgatttagttactgcctatgtcactggtggattcccaata

SEQ ID NO: 519277 - DNA, 467 bp, Homo sapiens
ggttgtcctccgtgtgtgtctgtgttctcacttccacctcttccaatgacaccagtcatactggattagggctcatcttgatgacctcactttaccttaatcacccctttgtaggccctatgtccaaataccttatcccgaggtactgggggttgggacttcaacatgaattttggagggacatcatgcagcccataacaaaatctgacaatagttgtatatgcacattctgtaacacatagaacctgtatgatctacctgataggtgaccgctgcccaatttcagagccctcagttttggtcatatttgcgctggtgttaacaccaggctattatctaaggggtyggcatccgcagtctatcatgttggaaagcatggcagccattaggttggccgttattgtcagatggcttctcagccccctcttgatttagttactgcctatgtcactggtggattcccaata

SEQ ID NO: 519278 - DNA, 523 bp, Homo sapiens
cctctctgagccgggagctgggcccagtggtggaaatactgacgtggtccctgcccatcagtctgcagtgcagaggggaaacacacccaaggctactgtgggaccctggggtgtgctgggtgctggagaaggaccgtgcaggagcttgggcatgtggctataagaaaggacaggtaaacggagacaggggtgaatgaagaatgagacaggtgtggtggctggaacggtgtacccagcagagggaacctgatcccagagggtgcataatgcgcctgrgaccggcagcagccttggggagagggaggcagattccaggcaaaaggcaagctgcaggtgccagcaggaactgtaaaccaccatgtcctgcaagccttggtggttttggctctgctggtgttgacgagacgccaagaaggagattgtagctggagagagacaatcacgttttcagtgtaaactcttattctgcctgaggtgtggaaaatagtcgtgggaacgaggctgaccaacaccagaagcaggg

SEQ ID NO: 519279 - DNA, 523 bp, Homo sapiens
cctctctgagccgggagctgggcccagtggtggaaatactgacgtggtccctgcccatcagtctgcagtgcagaggggaaacacacccaaggctactgtgggaccctggggtgtgctgggtgctggagaaggaccgtgcaggagcttgggcatgtggctataagaaaggacaggtaaacggagacaggggtgaatgaagaatgagacaggtgtggtggctggaacggtgtacccagcagagggaacctgatcccagagggtgcataatgcgcctgagaccggcagcagccttggggagagggaggcagattccaggcaaaaggcaagctgcaggtgccagcaggaactgtaaaccaccatgtcctgcaagccttggtggttttggctctgctggtgttgacgagacgccaagaaggagattgtagctggagagagacaatcacgttttcagtgtaaactcttattctgcctgaggtrtggaaaatagtcgtgggaacgaggctgaccaacaccagaagcaggg

SEQ ID NO: 519280 - DNA, 593 bp, Homo sapiens
ctattttgtgtctgagaaagccttcatctcaccattattttataaatttacttccactcttgcctgtaatcctagcactttgggaggccaaggcagggcaacttcttgagcccaggagttagcgaccatcctgggcaacatagcgagattccatctctacaaaaataaaaataaaaatcagcctgatgtggcggcatgcacctctggtcccagctacttgggaggctgagatgggaggatcacttgagccagggaagctgaggctgcagtgagcgatratcaccccactgcaccccagcctggttgacaaagcaaggccctgtctcataaaacacacatatacacacatccacacacacacacacccaacagcaacaacaaaaatcctgtctactgtcattcttatctttgttcctttgtgtgtaatatgcctttcttctgtagctgcttttgatattttattattgcgctgagcaattttattatattatgatgtgcctttgtgcattttttcttcacgtgtcttgagcttggggtttgttgagctccttggatctgtgggtttatagttttcaacaaatttggaaaatttt

SEQ ID NO: 519281 - DNA, 593 bp, Homo sapiens
ctattttgtgtctgagaaagccttcatctcaccattattttataaatttacttccactcttgcctgtaatcctagcactttgggaggccaaggcagggcaacttcttgagcccaggagttagcgaccatcctgggcaacatagcgagattccatctctacaaaaataaaaataaaaatcagcctgatgtggcggcatgcacctctggtcccagctacttgggaggctgagatgggaggatcacttgagccagggaagctgaggctgcagtgagcgataatcaccccactgcaccccagcctggttgacaragcaaggccctgtctcataaaacacacatatacacacatccacacacacacacacccaacagcaacaacaaaaatcctgtctactgtcattcttatctttgttcctttgtgtgtaatatgcctttcttctgtagctgcttttgatattttattattgcgctgagcaattttattatattatgatgtgcctttgtgcattttttcttcacgtgtcttgagcttggggtttgttgagctccttggatctgtgggtttatagttttcaacaaatttggaaaatttt

SEQ ID NO: 519282 - DNA, 521 bp, Homo sapiens
cttcagccacgtgggctggcgtcgtccagttctttcagagccyggatagaacagaaaggcagaagaaggaggagtttttccactctcttttcttgagctgggacatctgtcttcattaataaagaagtggggaggctgggcactgtggctcacgcctgtaatcccagcactttgggaggccaaggcgggcggatcatgaggtcagtagttcaagaccagcctggccaatatgatgaaaccccatctctactaaaatacaaaaaattagccaggcgtggtggtgtgcgcctttagtcccagctactcaggaggctgaggcagaagaattggttgaacctgggaggcggaggttgcagagagctgagatcgcaccactgcactcaagcctgggcgacagagcaagactccatcataaacaaataaagaagaggggaaaggtggagcctggagagtgggtcaggcaggagcttggtttaggagttttcccagttctaggggagggttcctaaaggttgtccagc

SEQ ID NO: 519283 - DNA, 599 bp, Homo sapiens
tgcagctcaggtcattgcctcatgagctccaagcacacagaccaactccaggccctgtctcctggggtggagaagcatctaacacatggacggccttggctagatttgggttttgaatcacaatgtttaacaccgcaaggcttgagggtcttcaggcaaattactgagcacaactatgaaggcagccactaatagcagcaaaagtgtattcaatatttatatttcttatgagccatctacatggttcaaaagttagcacattcttccttaggctcctgcaggctttgacatacctttatgaactgctccaaggattgggaagtcttcattctcatttgcaaaccgtatatattctgaatacctgctcatatcccatctcgattatctcatcaataatttccatccctctgatttacacctgtaaaagcaactcacttgcttttcccaacctaaagagtgctgtggagtccctggagtagagctactgcaatttygtcactctctgacctgttggaaactcagtttcaccgcagctttacaaggctgcagagtcttatatcttacatgcatattatagccaacactgttgactgattgct

SEQ ID NO: 519284 - DNA, 616 bp, Homo sapiens
gtattggctggggatgaaaaaaggagggcccaagacagtagacagagatggtgcctacatattcccaccctcctcagggtctgccttggtggtgctcaccacacaagtaagtcttccatggataatctgaatctgtgwtccctgctagactttaagctccaggagggcagaggccatgctggccatacccagtcttttatccctagtgctagcacagtgcctggctcatagtagacaaatagtacatgaatgtttaatagaggaacaaataaaccacaaatacatggacctctgagtcttgggaatggggccaatcactttgtcacactaagggtgagtatggcagtttaggggacttctctgtccagagttaaacataaatgcaagagattttctggaattgaagaaaaaatatgtggcttaaagactgcttttggatactgtaacttctcagagaatgaagcctaatagaatctgacaatgaatattgcagttagaaggaaaaagcatatttggggtcaagaagattagaggtggaaaaacatgaaatacaaagagttggaaaaaaattgacaaggggaagaatgggattcaatggaagacaaatgaggagagg

SEQ ID NO: 519285 - DNA, 616 bp, Homo sapiens
gtattggctggggatgaaaaaaggagggcccaagacagtagacagagatggtgcctacatattcccaccctcctcagggtctgccttggtggtgctcaccacacaagtaagtcttccatggataatctgaatctgtgttccctgctagactttaagctccaggagggcagaggccatgctggccatacccagtcttttatccctagtgctagcacagtgcctggctcatagtagacaaatagtacatgaatgtttaatagaggaacaaataaaccacaaatacatggacctctgagtcttgggaatggggccaatcactttgtcacactaagggtgagtatggcagtttaggggacttctctgtccagagttaaacataaatgcaagagattttctggaattgaagaaaaaatatgtggcttaaagactgcttttggatactgtaacttctcagagaatgaagcctaatagaatctgacaatgaatattgcagttagaaggaaaaagcatatttggggtcaagaagattagaggtggaaaaacatgaaatayaaagagttggaaaaaaattgacaaggggaagaatgggattcaatggaagacaaatgaggagagg

SEQ ID NO: 519286 - DNA, 557 bp, Homo sapiens
ggagaggcaacaagagaacctgcggacaggagatggccmccacaggaacagactctgaagggcaggctgccttccaaggaagggaataaagggaggcaacaaactgcagacgaatctgctggaggtccccagacaatatgctcgaagggatgttaaaggtggccttgggtccttgtaggggagaagcagtagtccctgggaatcagaaaatatggcaaccaaggcaacctgtgtaattgccacctatgggagaagaagaatgttccagataaggaagggacagcttcactgtgcctgtgcccgctcagatgacgcctctggtgctgccactgggcatgaccagagttaggggggcaggagatgatgacaggagatacaataacaaggacttggggtgttcagtgtttcctggaaaagagtaaaccaaggaaagtcatctgttgtcaaatcctgggaggactgtcatttggccaaagggttaagaggtgggaggagagacactggatccaggaaggtctattttggtgcaataaatgtaagaacttgtagcagtcaca

SEQ ID NO: 519287 - DNA, 557 bp, Homo sapiens
ggagaggcaacaagagaacctgcggacaggagatggcccccacaggaacagactctgaagggcaggctgccttccaaggaagggaataaagggaggcaacaaactgcagacgaatctgctggaggtccccasacaatatgctcgaagggatgttaaaggtggccttgggtccttgtaggggagaagcagtagtccctgggaatcagaaaatatggcaaccaaggcaacctgtgtaattgccacctatgggagaagaagaatgttccagataaggaagggacagcttcactgtgcctgtgcccgctcagatgacgcctctggtgctgccactgggcatgaccagagttaggggggcaggagatgatgacaggagatacaataacaaggacttggggtgttcagtgtttcctggaaaagagtaaaccaaggaaagtcatctgttgtcaaatcctgggaggactgtcatttggccaaagggttaagaggtgggaggagagacactggatccaggaaggtctattttggtgcaataaatgtaagaacttgtagcagtcaca

SEQ ID NO: 519288 - DNA, 557 bp, Homo sapiens
ggagaggcaacaagagaacctgcggacaggagatggcccccacaggaacagactctgaagggcaggctgccttccaaggaagggaataaagggaggcaacaaactgcagacgaatctgctggaggtccccagacaatatgctcgaagggatgttaaaggtggccttgggtccttgtaggggagaagcagtagtccctgggaatcagaaaatatggcaaccaaggcaacctgtgtaattgccacctatgggagaagaagaatgttccagataaggaagggacagcttcactgtgcctgtgcccgctcagatgacgcctctggtgctgccactgggcatgaccagagttaggggggcaggagatgatgacaggagatacaataacaaggacttgggrtgttcagtgtttcctggaaaagagtaaaccaaggaaagtcatctgttgtcaaatcctgggaggactgtcatttggccaaagggttaagaggtgggaggagagacactggatccaggaaggtctattttggtgcaataaatgtaagaacttgtagcagtcaca

SEQ ID NO: 519289 - DNA, 557 bp, Homo sapiens
ggagaggcaacaagagaacctgcggacaggagatggcccccacaggaacagactctgaagggcaggctgccttccaaggaagggaataaagggaggcaacaaactgcagacgaatctgctggaggtccccagacaatatgctcgaagggatgttaaaggtggccttgggtccttgtaggggagaagcagtagtccctgggaatcagaaaatatggcaaccaaggcaacctgtgtaattgccacctatgggagaagaagaatgttccagataaggaagggacagcttcactgtgcctgtgcccgctcagatgacgcctctggtgctgccactgggcatgaccagagttaggggggcaggagatgatgacaggagatacaataacaaggacttggggtgttcagtgtttcctggaaaakagtaaaccaaggaaagtcatctgttgtcaaatcctgggaggactgtcatttggccaaagggttaagaggtgggaggagagacactggatccaggaaggtctattttggtgcaataaatgtaagaacttgtagcagtcaca

SEQ ID NO: 519290 - DNA, 625 bp, Homo sapiens
gaggcttactggctgtagaaaccccaggctcaccatggatctgccatcacagaggaactgaaggtggtggcactttctgtttggcctcaatccactaatcaagattttttctcatacgggaaagaggctaactcaagataattagagatctcaaagccaayaaaagtaacctaaattacaaaactgtgaataaataaattacaggcctatgaacaagaaaatatttactcctcattctttctctcacgactggggaatgtgaatcagaaaccatgacacccacatataatttagctttgaaaggtgacccctgtccactaccatcaacccccacgccccaattcctgatgagtgtcctgattcctgcaacaccctcatccttagaataaaatatagaaactcttgttgcaaaactgaaaatcaatccatgtttaatgcctcccagtctcctgggcatctcaaggctatggtcaggatttcctattttgcagtgtttgtaaaaaggaaatgtataaaatggtaagacataaaaacagacagttttcctttgagaacttggtaagtcaccatcatcacctcccaaatccagggtagtttaacactcactgactatattccaatgaga

SEQ ID NO: 519291 - DNA, 625 bp, Homo sapiens
gaggcttactggctgtagaaaccccaggctcaccatggatctgccatcacagaggaactgaaggtggtggcactttctgtttggcctcaatccactaatcaagattttttctcatacgggaaagaggctaactcaagataattagagatctcaaagccaacaaaagtaacctaaattacaaaactgtgaataaayaaattacaggcctatgaacaagaaaatatttactcctcattctttctctcacgactggggaatgtgaatcagaaaccatgacacccacatataatttagctttgaaaggtgacccctgtccactaccatcaacccccacgccccaattcctgatgagtgtcctgattcctgcaacaccctcatccttagaataaaatatagaaactcttgttgcaaaactgaaaatcaatccatgtttaatgcctcccagtctcctgggcatctcaaggctatggtcaggatttcctattttgcagtgtttgtaaaaaggaaatgtataaaatggtaagacataaaaacagacagttttcctttgagaacttggtaagtcaccatcatcacctcccaaatccagggtagtttaacactcactgactatattccaatgaga

SEQ ID NO: 519292 - DNA, 625 bp, Homo sapiens
gaggcttactggctgtagaaaccccaggctcaccatggatctgccatcacagaggaactgaaggtggtggcactttctgtttggcctcaatccactaatcaagattttttctcatacgggaaagaggctaactcaagataattagagatctcaaagccaacaaaagtaacctaaattacaaaactgtgaataaataaattacaggcctatgaacaagaaaatatttactcctcattctttctctcacgactggggaatgtgaatcagaaaccatgacacccacatataatttagctttgaaaggtgacccctgtccactaccatcaacccccaygccccaattcctgatgagtgtcctgattcctgcaacaccctcatccttagaataaaatatagaaactcttgttgcaaaactgaaaatcaatccatgtttaatgcctcccagtctcctgggcatctcaaggctatggtcaggatttcctattttgcagtgtttgtaaaaaggaaatgtataaaatggtaagacataaaaacagacagttttcctttgagaacttggtaagtcaccatcatcacctcccaaatccagggtagtttaacactcactgactatattccaatgaga

SEQ ID NO: 519293 - DNA, 625 bp, Homo sapiens
gaggcttactggctgtagaaaccccaggctcaccatggatctgccatcacagaggaactgaaggtggtggcactttctgtttggcctcaatccactaatcaagattttttctcatacgggaaagaggctaactcaagataattagagatctcaaagccaacaaaagtaacctaaattacaaaactgtgaataaataaattacaggcctatgaacaagaaaatatttactcctcattctttctctcacgactggggaatgtgaatcagaaaccatgacacccacatataatttagctttgaaaggtgacccctgtccactaccatcaacccccacgccccaattcctgatgagtgtcctgattcctgcaacaccctcatccttagaataaaatatagaaactcttgttgcaaaactgaaaatcaatccatgtttaatgcctcccagtctcctgggcatctcaaggctatggtcaggatttcctattttgcagtgtttgtaaaaaggaaatstataaaatggtaagacataaaaacagacagttttcctttgagaacttggtaagtcaccatcatcacctcccaaatccagggtagtttaacactcactgactatattccaatgaga

SEQ ID NO: 519294 - DNA, 642 bp, Homo sapiens
agtaaggaaacagagaactagggggtttaagactggaaatgactagacctattccccttgcctctctcctatccctaatgcaaagttctattttatttagtaagtttattaaaaaatcaatattaccataaaagtaatacagtaaaatgatcttcattaatccctaaagtgatgaatctttcccatcccstctcttcccttctctttcctccttccttcctccagggtctggaaagctaaatggtagtagcagcacagttagttaataacgcatctgtccttctgtcctttcacgtctcagatcattttcatatcatgagcttgcagcaacacatgtgtttctcagtggagaagggattcttaattccatttacctataattacctaggatggggaaactaagtaattagcctaaagtcatacaactagtaaatggaagatctagaaggagaatccaggtcttctgattccaagtgcaaagcctctttcccttatagtagcggaggaggccaagggtgcagagtgtctgaccacaggggtatctgacagcctgactgtcttcaagcctgaacacccttggaagcccctcagtctggggcctgagtccatttacaggagactcctcataaagtccttgaaatt

SEQ ID NO: 519295 - DNA, 478 bp, Homo sapiens
agatcatttgaacagtatagaaaaatgtatttcacaaaacttttacttattatttcacatttttaaacttcatattccacgttttgctttattttgggtatcaaggcttctagggcatattttaatcaccccagaagcatggacataataagacctggttaaagagtgcactgtgagtgagccatggggtgaaggatcctgctgctgcctcacagcctcctgcctccctgtgcacacataggtttactgtcaggactgtaatgaggtttgcatgaataaacagctttagaaacagctttcaagtttccaccaaaatacctgttaggaagtcttgtttccaccataattgctaattgcttacctacatgtgacctgggtatccataatgcagacatgagcaacacatgattgtagaaaattctaatttaaattattacatttttatttgggttscacgcagaaaacatcttaggcagcc

SEQ ID NO: 519296 - DNA, 628 bp, Homo sapiens
aaaccaggggcatgaggtacaaaaataagggagactcttaatttggcagcttctcttttgtcctgtgcttactggagtttttgcctatttctcaggaagccttcagtgttcattgtgtgggggatgttctttgaggtccctgtctcctctgattttacatagtgtggtaggttctgattctttctttgtctgatttactgggataggcttttctcctgacctgtgacgcacaaatttgggtggaaaattttgtctaaagtctacacgttactctggaaaacagagcttggttcttctttccttttrgctttaaatttggctttatcttgcttttattggtccttgaagttctaataacctataggtagaagatattcatagtatgacatcacttcatcaaaagcagcctgaattccatgcactgtagtaagccctctgtaattcataacctatcctatgtttcttgcttgagggattacatcagcaatgacatgttaggaatcagctagtgggatgacttgggtagggactgctgctgttgcttcagaaagctaaaaggaatgggctcttgagtgtgcaaatggatgcatttcattactaccattttatttaagaattctggtgtttc

SEQ ID NO: 519297 - DNA, 605 bp, Homo sapiens
cttggtgcacagttacccggcctgtgcccggcccctgagaacttggtggacagttacccttctccgggagccacgacaacctagccagcagcacccacagtcctaatactggaatcaatgagatctgaagattggagcaattcccaggcaagagctcctaggaattaaatctcttgttacaaaaatatggtttaatctccacgggattttgaaaataaaatygaaaacaacaatctcccagaaaacaggaaaatgacaaaataatggaaaataagagtaaaaagatgagatgctcacagtgactttgcaaaaactccaacatatgatgacaaagctctcaaaagagcatagagaaagcagagtggggaaatgatccaggaaaaggaaattctagaaaaatcaccaattctagaaaaatcaccagacccaaagtcggtgagattatagatggcaggtgcatgaactccccagaacaatgaatacaacataggccgacacccctggaaaactcccatacaccagcattgccaggggagcctgtgagctttcagggagaaaagacagatcgagaaaccagatggcttccatcttctccagagcggcag

SEQ ID NO: 519298 - DNA, 557 bp, Homo sapiens
ttacccttctccgggagccacgacaacctagccagcagcacccacagtcctaatactggaatcaatgagatctgaagattggagcaattcccaggcaagagctcctaggaattaaatctcttgttacaaaaatatggtttaatctccacgggattttgaaaataaaattgaaaacaacaatctcccagaaaacaggaaaatgacaaaataatggaaaataagagtaaaaagatgagatgctcacagtgactttgcaaaaactccaacatatgatgacaaagctctcaaaagagcatagagaaagcagagtggggaaatgatccaggaaaaggaaattctagaaaaatcaccaattctagaaaaatcaccagacccaaagtcggtgagattatagatggcaggtgcatgaactccccagaacartgaatacaacataggccgacacccctggaaaactcccatacaccagcattgccaggggagcctgtgagctttcagggagaaaagacagatcgagaaaccagatggcttccatcttctccagagcggcagggaca

SEQ ID NO: 519299 - DNA, 493 bp, Homo sapiens
ctgaaaacctaccataaacactgcaggcctccatcaacctgctgggacaaaaattacactgaaaacatactgtgtaccacctaaagcctgggagcagaagctgggagagttccttcagtaaatcaggacattcgagagcacttgagtaacaacagctaccgccccactsaacagcagatgactgaaagttcttcctgtgaggtcaggaacaaggcaagtgtgcccttgcctgccctctacttatgtgcttttataaatgggattattttcttaatttccttttatactgttcattctgatagtatagggaacaactactaatttttgcatgtaattttatatccagatattttgctgaattcctttttcagaagaggaaatgccacttctactcatcatagtagtagaagtcctagacagagaaattaggcaaaaaaaaaaaaaaaaaagagagagggagaaaaaatagaaaatcatccaaattggaaagaag

SEQ ID NO: 519300 - DNA, 493 bp, Homo sapiens
ctgaaaacctaccataaacactgcaggcctccatcaacctgctgggacaaaaattacactgaaaacatactgtgtaccacctaaagcctgggagcagaagctgggagagttccttcagtaaatcaggacattcgagagcacttgagtaacaacagctaccgccccactcaacagcagatgactgaaagttcttcctgtgaggtcaggaacaaggcaagtgtgcccttgcctgccctctacttatgtgcttttataaatgggattattttcttaatttccttttatactgttcattctgatagtatagggaacaactactaatttttgcatgtaattttatatccagatattttgctgaattcctttttcagaagaggaaatgccacttctactcatcatagtagtagaagtcctagacagagaaattaggcaaaaaaaaaaaaaaaaragagagagggagaaaaaatagaaaatcatccaaattggaaagaag

SEQ ID NO: 519301 - DNA, 651 bp, Homo sapiens
gttcccacatagagctgcattgcactcgtggtagctatgtggaggttgagttcccattaacatctgcattgcactcatggtagctgtgtggaggttgagttcccacacagagctgcattgctctcatggtggctgtgtggaggttgagtgcccagcagagctgcattgctctcatggccgctgtgcggaggttgagtgcccatgctctgctgtcttacactcatgatggctttgcaaaggagccaacccattgtgtatgcggtggagcgtgttgatggattcagcaccagccagtatcagtccccacctcacgttggctgcttccccwtccatgtcctgcttgtgcctttggaatcttgtggcatcatctcaggtttggattttggatgtgacctggattatattgaagaatggtcaccatggtctgtcgccttccttagagatatttttaaatattcttagcattcatttatctttctggaactcatggtgagataaattagctgcagggtggagatgcggccacttgctcctgccaagtcacctcagcagtgtgctgctcagagagtgctgccgtttttaaggggccagcaagcccatcaggtctctttcccttcccgttcacctaaacagacacagctttacaaaaca

SEQ ID NO: 519302 - DNA, 651 bp, Homo sapiens
gttcccacatagagctgcattgcactcgtggtagctatgtggaggttgagttcccattaacatctgcattgcactcatggtagctgtgtggaggttgagttcccacacagagctgcattgctctcatggtggctgtgtggaggttgagtgcccagcagagctgcattgctctcatggccgctgtgcggaggttgagtgcccatgctctgctgtcttacactcatgatggctttgcaaaggagccaacccattgtgtatgcggtggagcgtgttgatggattcagcaccagccagtatcagtccccacctcacgttggctgcttccccatccatgtcctgcttgtgcctttggaatcttgtggcatcatctcaggtttggattttggatgtgacctggattatattgaagaatggtcaccatggtctgtcgccttccttagagatatttttaaatattctyagcattcatttatctttctggaactcatggtgagataaattagctgcagggtggagatgcggccacttgctcctgccaagtcacctcagcagtgtgctgctcagagagtgctgccgtttttaaggggccagcaagcccatcaggtctctttcccttcccgttcacctaaacagacacagctttacaaaaca

SEQ ID NO: 519303 - DNA, 651 bp, Homo sapiens
gttcccacatagagctgcattgcactcgtggtagctatgtggaggttgagttcccattaacatctgcattgcactcatggtagctgtgtggaggttgagttcccacacagagctgcattgctctcatggtggctgtgtggaggttgagtgcccagcagagctgcattgctctcatggccgctgtgcggaggttgagtgcccatgctctgctgtcttacactcatgatggctttgcaaaggagccaacccattgtgtatgcggtggagcgtgttgatggattcagcaccagccagtatcagtccccacctcacgttggctgcttccccatccatgtcctgcttgtgcctttggaatcttgtggcatcatctcaggtttggattttggatgtgacctggattatattgaagaatggtcaccatggtctgtcgccttccttagagatatttttaaatattcttagcattcatttatctttctggaactcatggtgagataaattagctgcagggtggagatgcggccacttgctcctgccaagtcacctcagcagtgtgctgctcagagagygctgccgtttttaaggggccagcaagcccatcaggtctctttcccttcccgttcacctaaacagacacagctttacaaaaca

SEQ ID NO: 519304 - DNA, 633 bp, Homo sapiens
tggtggaaaagtagtcttccatgaaaaattatattcactatggctaaactcacaggctcaaatcccactgcagatgaaaagagggaaaggctggagaagagcttgcttccctgggagggttgttacagttttaggactaaaatagcttttaggtctgtttttcaatggatgcactgacctggacagatagaaacagtaagaatggagaggatggtaggttctcacacattgccaaaaggatcaggtgaaaaacttayagatttgacacccatttaagagaaatacctatatttcatgtgaacaccagagaagaaagctctattatctgctaaatcattaagtcttcctttttaattattttaatcagccttctttgcagtagagctattagtctgaataaattcggaacatttttttgaccatcacattatttgttaaattatctcaaaatttcgatgctcctgtcttgagtttgtgttaacaatctcgttatttctaaactgtatttgtgtggatttttaaatctatttaaaggcaagaaattagaaagttcagaaagaaacatatttgtttctaggtagcaaatgcatgttgttagaaagtgtcagctaactttgtcacgttagaactttg

SEQ ID NO: 519305 - DNA, 506 bp, Homo sapiens
tggaagcatcttccaaggttttaattctaaattttatggaaagtaagacttttccaacctgattttaaaatatgtatttttaaatgaggaagataattgcttttattagattagccaaagatatataaagctataatgacagtattgcataaatttatttacatggcmatatataagacatggggagggtggagagtatataaaacatttttatgctattttattccattctattatacttttagattatataatattaaatctgggtaaaacaatccctagagcacaatctggtttaaaatcaatttggtcaatgatttttgtaactgatagttctatagtgcattataatacatttagagccctctgggattcttttgaatatgctgtacagaaatgtatattacacaattttcaatttagatagggcaaaaagttctattattaaattttatatatatcactcaatattagaggtggtgatctgctatataatatatacatca

SEQ ID NO: 519306 - DNA, 489 bp, Homo sapiens
taaaagaagcaactagcctgggagaagcaactgtcctaggaaggcactaaatatagaaggtaaaaaggtaatcactcaccagtaacaagctcagatggcaaaaatccacctgctcccagaatgtaaatgagaagcctagttgctttctgagctggtcaggctgcaccctctcattccgcgttaagtagtaatctacccatcctttaaaaactattgttaacactctattatctgaagggaagtcaagaattagatcctccttggcttcgyttatgtccaatgagtgatatacaaacatgatttgttattattaggaataaaatactttttataataaaaatatttacttggtggtgtgaggtatacatggattaatatgtacaatcctcttagaagtgcttgatgttaattattagcatgtgccctcttccttatttttacccaccgacccctgacaatcatgccagtcacacactcaaccctgctttc

SEQ ID NO: 519307 - DNA, 489 bp, Homo sapiens
taaaagaagcaactagcctgggagaagcaactgtcctaggaaggcactaaatatagaaggtaaaaaggtaatcactcaccagtaacaagctcagatggcaaaaatccacctgctcccagaatgtaaatgagaagcctagttgctttctgagctggtcaggctgcaccctctcattccgcgttaagtagtaatctacccatcctttaaaaactattgttaacactctattatctgaagggaagtcaagaattagatcctccttggcttcgcttatgtccaatgagtgatatacaaacatgatttgttattattaggaataaaatactttttataataaaaatatttacttggtggtgtgaggtatacatggattaatatgtacaatcctcttagaagtgcttgatgttaattattagyatgtgccctcttccttatttttacccaccgacccctgacaatcatgccagtcacacactcaaccctgctttc

SEQ ID NO: 519308 - DNA, 427 bp, Homo sapiens
cccatgcaggttattcaagagaaatggtgtctggggaaggaacagggtaaaaaaggtgaagawcatgactaataaagcataaaaagaatgaaaaccttcaaattaaaaataaaaggatggcgtcctggttttaatcatgatggagtaataagaatagggcttaccttttactgtaataatcaactataaaactctagaaaatatataaagcagtgttttcatacagttgtagacagcagtccaggactgatttttaagagaagaaacaagcggtgagctccatagtcaccctgactttctgcttgaaggtactttgcaaactaacacaaagtggagtatgtctggttgggagaaaataacacagtatagggttcctgctggaatctgctgggcagagtactggggaggaggaagctgcagagatgca

SEQ ID NO: 519309 - DNA, 684 bp, Homo sapiens
atttctttcatactagtaaagtagcttggttgtataatattgttatggttttaaaaaatgtatcagttattaacaactctaaaaaggaaaatgtgataaaaatatggatttttcaagtaatattcctagtacatatatgtatacaaatagtatataataatatgtgaaacaaaataaaattttgacttatgttgtttatcatttctcccttttacttttaaattatgacagacactagtttagtaagcaaactagagtatagtccagytaatagatgcacactgttactgtcagttgggtaggctgttatttaagtaggataaactcctaggctggatttcaattgtggacatatataatcagaaacctgaagatactttatttacttagaaatttaaaatgccactcagtagctgagcaagtgatcactcatccaatgaataagttttctaaaaattttaaagagcaaaaataaagcaattgacagcactcatctattttctgttggaaaacacacaacttcattcaaaatagtaaatagaaagtcatgcaggatgtggttcagacgagatgaaaagcaatctctgagagactatttacagttactttttaaaaaacaatggtattgttgtggatcaaatactaaacttgggtgtcaaataacctgtggtttattactggatt

SEQ ID NO: 519310 - DNA, 564 bp, Homo sapiens
ctgtaacccaatgctttgaagaacgccaagcacatacaaacctcatgtctgaaatgggtatgacagggctattgttaagagcaagtggaattatatccaggaaaaccctttgtaaaatatgaatttcttaatataaatgggatattattgtttgaaactggaaaccctgatgggacagaggccaggactgatgctgaggccttgtctgctgtgaaggcaagaatctataccttaaaataacaaaaaaattcaatgagaaaggaaaataaataattawtacacattatttgttattgaaacaaggaatagaacatttatttatccaagatttatgtcaaatcaagaaagtgtagccggacatgttggctcatgcttgtaatctcagcactttgagaggccaaggtgagaagattgctggagctcagaagttagagaccagccagggcagcatagtgagaccctatcactacaaaaaaattaaaaaattagctaggtgtggtggtgcatgcttgtggtcccagctacttgggaggctggagcccaggaggtagaggctgcagtgat

SEQ ID NO: 519311 - DNA, 593 bp, Homo sapiens
caaatttcatattctctgtggttatataaattgggctgacacttttagaacacaaattcccaatattttgattagagaaaatttacaaatttaggtaggtctcacaccagttttacttctggaggagatggagggtaagattggagaagggaggagaaaaaatactcactttgtatacttctatatcactgaatattttagagtaagaatatcttcattacttaatacttatgtattacttaatgtatttactttaaaaaataattgcattgagttagaactgtctacacaaatagaaaatgcacccaacttgaagcacaaatgtattaatgagagttcacktttgtgtcaagtgaggacacgtccctctagaatgtatagcttagattacaaattaccaaaatgtcatctcatttgtaagaaaacacaagacatggtttgctcacagtctctctactgctactgaaacttttgtaaacattctttttcccttttaatgaacataaattcaacttctctgttgattcccagagactccttagttgtttccactgcatatgcctcactaaatcagacttcagttaattaaattc

SEQ ID NO: 519312 - DNA, 589 bp, Homo sapiens
caaatttcatattctctgtggttatataaattgggctgacacttttagaacacaaattcccaatattttgattagagaaaatttacaaatttaggtaggtctcacaccagttttacttctggaggagatggagggtaagattggagaagggaggagaaaaaatactcactttgtatacttctatatcactgaatattttagagtaagaatatcttcattacttaatacttatgtattacttaatgtatttactttaaaaaataattgcattgagttagaactgtctacacaaatagaaaatgcacccaacttgaagcacaaatgtattaatgagagttcacttttgtgtcaagtgaggacacgtccctctagaatgtatagcttagattacaaattaccaaaaygtcatctcatttgtaagaaaacacaagacatggtttgctcacagtctctctactgctactgaaacttttgtaaacattctttttcccttttaatgaacataaattcaacttctctgttgattcccagagactccttagttgtttccactgcatatgcctcactaaatcagacttcagttaattaa

SEQ ID NO: 519313 - DNA, 548 bp, Homo sapiens
ctttgggatattttcttcaacaaaaaactaacatccctcttataaaaaatcagcctaaactctcccccgtgctttaaaaaacttgcttaaaaaaacacaacaggattttcgaagaatcctttcttagaaaacaaacaaaaaaccaaacaaaaacgtactttctccccactatgctgaatctgctctctccctctttccttctttctcttctccctccctcatccaccaagcatggttccaggaaacactagtaagagaaaaatttgtgtaaaatcaaatttatttcaggggctaattctgaagtctcccatgaagaggatgcaatattggatgtgttgatgaaaagacaaaacacatttgtgctgttctaagttgtaaagctgcattgactgcagttggtatcacatgtggctgcctgtaaaagagctaacaatycatgaatgtcaacagatgtcaacttacagagctcccaaccaggtgaaattaaatttcatccccatgtaatttctcttgtggacaagagacttagagatcatcaggccaatatt

SEQ ID NO: 519314 - DNA, 572 bp, Homo sapiens
gtggctgggggtcctgcggctgctgctcttcaagctgctgctgtttgacctgctcctgacctgcagctgcctgtgcgaccccgcgggcccgctgccttcccccgcaaccaccacccgcctgcgagccctcggctcccatcgactgcacccggccacggagactgggggacgagaggccaccagctcacccagaccccagcctcgggaccgccgctggggtgacacccctccgggtcggaagcccgggagcccagtatggggggaagggtcttacctcagcagttaccccacttgcccagcacaggcctggtgctcaagatctsgcctcagggctccttcctccagtcttggagcattttttgcaggtgacctgcctcctcctctgcaggctggagctgcctgagggcagggctctacctcccctgcgtcacactgtgtgaggctgtgtctctgccatccaaaagggggccccttgagaatggtgatccacccagttacaggggcatttagggagcagatgactgagaacattaaaaaagaacttaaatgacacagcaaatgaaaaatatttg

SEQ ID NO: 519315 - DNA, 572 bp, Homo sapiens
gtggctgggggtcctgcggctgctgctcttcaagctgctgctgtttgacctgctcctgacctgcagctgcctgtgcgaccccgcgggcccgctgccttcccccgcaaccaccacccgcctgcgagccctcggctcccatcgactgcacccggccacggagactgggggacgagaggccaccagctcacccagaccccagcctcgggaccgccgctggggtgacacccctccgggtcggaagcccgggagcccagtatggggggaagggtcttacctcagcagttaccccacttgcccagcacaggcctggtgctcaagatctcscctcagggctccttcctccagtcttggagcattttttgcaggtgacctgcctcctcctctgcaggctggagctgcctgagggcagggctctacctcccctgcgtcacactgtgtgaggctgtgtctctgccatccaaaagggggccccttgagaatggtgatccacccagttacaggggcatttagggagcagatgactgagaacattaaaaaagaacttaaatgacacagcaaatgaaaaatatttg

SEQ ID NO: 519316 - DNA, 555 bp, Homo sapiens
tccagcaagtcaggctggagaggagggagttggcacgtgaagcaaaaagcttagaaggacccatgaggtggggactagggcccctatatatggactttgggtggccttgaaataatatgcagcatattagatatagatctgctccttgaaagttagattgtatggccaaaccscaaacccaaatatggatttcttacttctaggcatttgtctctcatggttctttctatccatggagtttgcaaactccactttctcttctgctttctctctcctgctttctctgtctgcttttcaagatttctgtcaaatgctacatcttctccgatcctcccagaccaaagtggcccatctccacctcctctgacacaccacagcctgtgacaccctcattccacatttattgggcactgctcccagtgccagatactggggtaacctagacatgtaccatcccagccctcaggagcttacattctagggggtggaatgggaaagggggaaatgatcctcaagcgaacaagtatacaaagtaatttccaatggtaaccaatg

SEQ ID NO: 519317 - DNA, 555 bp, Homo sapiens
tccagcaagtcaggctggagaggagggagttggcacgtgaagcaaaaagcttagaaggacccatgaggtggggactagggcccctatatatggactttgggtggccttgaaataatatgcagcatattagatatagatctgctccttgaaagttagattgtatggccaaaccgcaaacccaaatatggatttcttacttctaggcatttgtctctcatggttctttctatccatggagtttgcaaactccactttctcttctgctttctctctcctgctttctctgtctgcttttcaagatttctgtcaaatgctacatcttctccgatcctcccagaccaaagtggcccatctccacctcctctgacacaccacagcctrtgacaccctcattccacatttattgggcactgctcccagtgccagatactggggtaacctagacatgtaccatcccagccctcaggagcttacattctagggggtggaatgggaaagggggaaatgatcctcaagcgaacaagtatacaaagtaatttccaatggtaaccaatg

SEQ ID NO: 519318 - DNA, 502 bp, Homo sapiens
gcttttctgtcattaaaatctgaaaaatccctgggaaggaccccagttgtctgactggggaggtaggtgcacatctattgcaaaggaggaggtacygtgatgggcaagagcctcacagaacctaatagctacatgggcagttcctccaagaagagggcatctttccagaagaaaggaaggtgctgaaaaaaacaaacacatgccccctactttacttaaaaagaaaatacttgatcacagaacttgtcttaaagtattgatagccatgctaaatgttaatcgtacccttgagcatttatcctggagaatgaagacttacattcacataaacaaagcagtacatgaatgtttattgcagcattatttataatagcccaaaactggaaacacccagatgtccttcagtggataaatgattaaacaaactgtggttcaaccatatcatggaatactattcagcaataaaaagaatgaactattggcacatgcaacaacctgaatg

SEQ ID NO: 519319 - DNA, 556 bp, Homo sapiens
ctgttgctgtacctcacttccatttcctgtgatcacttttctttttctgtctataaatcttctaccacgtggctgtgctggagtctctatgaacctactctggctcaagaggcttccttattcgcaaattgttctttgctcagttaaactctgttaaatttaatttggctaaggtttttagcaaccttttttcttattaaccaagagagtaatacttgtcttcctttcattatcatcattctgcatttgtacttgcagactcacaccatttgttttatastaatgaaaccaactttgcaaaaattataacagtgagaaaaccatgacaatgggaagatctgatctagcccactctcttcttgcctttagctttcaagctgccagacatttagtttatagtttagatgattagcccttccccaaaactcaaccacttttgtaaagctaatgagagactaccaggctaggaggatagaggagcctgaattttgctaaggtgaaagtgcagacataaatgattgccagccattattgtggaggtcacaagatatgcaac

SEQ ID NO: 519320 - DNA, 564 bp, Homo sapiens
taaggcacttggccctgttgagtttgtaaaatgggacttgctgtcccatcaggcctctttcatctgacccatcctgtccccgccagtgctgctgggaagcctgagccgggtcttctcaccccattccagggacctgtggcattgggagacatcccattctatttctcccgggaagaatggggcaccctggaccctgctcagcgggatctcttctgggacataaagcgggagaactcccggaacaccaccctgggtaagcacccasggcctttgggtccaggctggccgcccccgattctgctggaacttcagtcttgtttcccaccccatccttagctggttccaaagcaggctctccctaggtcttgccaggaacctgagtaactcctttcttggctgatgatcagtttttgtgcgtttccacatgcagcatgggacggcgccggcgctgcccaaccctgcagttgctctaagggcaacttctcctttgagtctcacaacctagtgcatggaagtattgtccccattttacacataagggacctgagactcaggtcagtggat

SEQ ID NO: 519321 - DNA, 564 bp, Homo sapiens
taaggcacttggccctgttgagtttgtaaaatgggacttgctgtcccatcaggcctctttcatctgacccatcctgtccccgccagtgctgctgggaagcctgagccgggtcttctcaccccattccagggacctgtggcattgggagacatcccattctatttctcccgggaagaatggggcaccctggaccctgctcagcgggatctcttctgggacataaagcgggagaactcccggaacaccaccctgggtaagcacccacggcctttgggtccaggctggccgcccccgattctgctggaacttcagtcttgtttcccaccccatccttagctggttccaaagcaggctctccctaggtcttgccaggarcctgagtaactcctttcttggctgatgatcagtttttgtgcgtttccacatgcagcatgggacggcgccggcgctgcccaaccctgcagttgctctaagggcaacttctcctttgagtctcacaacctagtgcatggaagtattgtccccattttacacataagggacctgagactcaggtcagtggat

SEQ ID NO: 519322 - DNA, 564 bp, Homo sapiens
taaggcacttggccctgttgagtttgtaaaatgggacttgctgtcccatcaggcctctttcatctgacccatcctgtccccgccagtgctgctgggaagcctgagccgggtcttctcaccccattccagggacctgtggcattgggagacatcccattctatttctcccgggaagaatggggcaccctggaccctgctcagcgggatctcttctgggacataaagcgggagaactcccggaacaccaccctgggtaagcacccacggcctttgggtccaggctggccgcccccgattctgctggaacttcagtcttgtttcccaccccatccttagctggttccaaagcaggctctccctaggtcttgccaggaacctgagtaactcctttcttggctgatgatcagtttttgtgcgtttccacatgcagcatgggacggcgccggcgctgcccarccctgcagttgctctaagggcaacttctcctttgagtctcacaacctagtgcatggaagtattgtccccattttacacataagggacctgagactcaggtcagtggat

SEQ ID NO: 519323 - DNA, 489 bp, Homo sapiens
tcattgtcatgttatttgcaatagcaaaagacatgaaaccaacctaggtgctcatcaatggtagattggatgaagacaatgtggtacatatacaccatggaatactgtgcagccataaaaagaatgaaatcatgtcctttgcagcaacatggatagagctggaggccataatcttaagcgaattaacaaaagaacagaaaaccaaatactgcattttctcacttataggtgagaaccaacattgagcacacatggacacaaacrtgggaacaatagacactgcagtctacaagagaaaagatagagggaggggtgtgtgtgttgaaaactatggggtactatgctcactacctgggtgcaatatatgtatgtaacaaacttgcacatataccgtccgtatctaaaataaaggttgaaaatttttaaaatattatgaaaaaggcaaatttattcatacaactatttgatgaacattattgagtgtctgta

SEQ ID NO: 519324 - DNA, 498 bp, Homo sapiens
cgagagagaccagctcggctgagcgcccgcgagtactcccggcaagtgcacgagtggctgtggcagtcctactgcggctacctcacctggcacagcggcctggccgccttcccagcctactgcagcccccagccctccccgcaragcttcccttcgggcggcgctgcagtcccccaggccgcggcgccgccgcccccgcagctgggctattacaaccccttctacttcctgagccccggggccgcggggcctgacccgcggacagctgccggcatcagcacccctgctccagtcgcgggcctgggaccccgggctcctcacgtgcaggcgtcggtccgggccactccagtgacgagggtaggatccgcagccccttcgcgaagcccgagcgagaccgggcgacaggcaggtgagaagcgcgaggtggaggctgggcggagtagaagggttttcgggggcctgtggggtagagctggcacgctttttagacctgtaact

SEQ ID NO: 519325 - DNA, 581 bp, Homo sapiens
tttaatagaacctcttctgaaaggctcttcatatcagtcaaaggttccaagccgtttgtaagattcatattcctttgagacttgaatgcatgctaggaactctttctgcccaaattgcacacattcattgacatggaattttctacaccatttcaaggagttcatgaaatctattaagtatatatatatatatatacttaatagattatatatacatatatatatatataagccctaggcattcaagtaccccagttaagaacaatgaagcactccaatccctggaacaatactttatcatctccctagaggttatcattgtytaaaattacattttcatctgtttatttttttatctgtattgtacctatttttttctcttgaatttaagttttatgagaagaagggtggtcttttcttttctttctgattcactaaattcccagaatctgcaatagtacctaaatttgagtaggcattcaataaatagctgttaaataaagaaattgatgcattaataatttaatccttatcacttatgaaaattagaagaaagattaaacataacaaagagggctggc

SEQ ID NO: 519326 - DNA, 466 bp, Homo sapiens
ggcagggccaagaggggattgcagcctaatttcagatcttgtgctcttcattctttcctcgaagtgtcaagggctgattaccaatcttgttgccccaccaaccccttgcttttttgtggtttctgagcctgaagcaaatcactggtttggacccttcacttggggccctggacatggcaggaggtggcctgagcgtgcccggccctggctgaggtcagtgggggcctcctgcctctctgagccccttgccaggcattctggagccracagcgctgtggttctgaaacaagaagccttcagcagttctctgactcttttttccttcccctcaggaagtcaagttggggattttatgagctaatgtaactatttacccagaggccgctggaagactataaagggatgattgattaattgattaattttacatgtggaggagatgagttagaagtaaccctactgtaaa

SEQ ID NO: 519327 - DNA, 466 bp, Homo sapiens
ggcagggccaagaggggattgcagcctaatttcagatcttgtgctcttcattctttcctcgaagtgtcaagggctgattaccaatcttgttgccccaccaaccccttgcttttttgtggtttctgagcctgaagcaaatcactggtttggacccttcacttggggccctggacatggcaggaggtggcctgagcgtgcccggccctggctgaggtcagtgggggcctcctgcctctctgagccccttgccaggcattctggagccgrcagcgctgtggttctgaaacaagaagccttcagcagttctctgactcttttttccttcccctcaggaagtcaagttggggattttatgagctaatgtaactatttacccagaggccgctggaagactataaagggatgattgattaattgattaattttacatgtggaggagatgagttagaagtaaccctactgtaaa

SEQ ID NO: 519328 - DNA, 508 bp, Homo sapiens
gcactttttcagggtgtgacatcaaacgggagacacttccgttgctttcttatatttttgtaattattttttawaaaaggaattgtagttccataagaatttgacattggcaattcttaatttccttagctgaactttaatggtgctgcattttgagtcatagctgaagatctgttcaaagccagagccgatggtgagactgttttggaaaggtgtggtcccctctgcttccatgagcccccgttttagcctgtgccttttcttttggcagccctggaatatcaaacccagaataaatgccaaactccaaaaccagccagggtgcttgtcctagggctggcagtgtgacctgggagattgctgctgatgggcatgcattttgaccccgtttctgaggtcgactagaaggtccatcttcatttttaccccttcctcatctacaacatacagaatgcatgcctagcatagactctgtttcctttgttgctaattatatcctactcagtta

SEQ ID NO: 519329 - DNA, 508 bp, Homo sapiens
gcactttttcagggtgtgacatcaaacgggagacacttccgttgctttcttatatttttgtaattattttttaaaaaaggaattgtagttccataagaatttgacattggcaattcttaatttccttagctgaactttaatggtgctgcattttgagtcatagctgaagatctgttcaaagccagagccgatggtgagactgttttggaaaggtgtggtcccctctgcttccatgagcccccgttttagcctgtgccttttcttttggcagccctggaatatcaaacccagaataaatgccaaactccaaaaccagccagggtgcttgtcctagggctggcagtgtgrcctgggagattgctgctgatgggcatgcattttgaccccgtttctgaggtcgactagaaggtccatcttcatttttaccccttcctcatctacaacatacagaatgcatgcctagcatagactctgtttcctttgttgctaattatatcctactcagtta

SEQ ID NO: 519330 - DNA, 606 bp, Homo sapiens
cgttttctggcctagtatttctatttaagggttttataagttgaatatgaacattttatttgagtggcaatactgcaactacatatgtagtttaataaaacctgataagtacatatttgaattttaaaaacacaggtggtgagttatttgcattttaaaaggattcttccctttacaaaagggtccactgcagggttctattaaatatccaattccccttagtgcatttattatatgatttaatttaccaaaatttgatttatatgccactctaaaggggtagctctcaagttccagtaagcatgggaatcacttgggcaacttgtttaaaattcagatctggcccccactccttcccaaaattctgattcattaggtcttggttcgtgaagcccaggatcttcgttttttaataaccatctccaggtggccgatgtagattgtcagtgaaatacactttgggaagcatataagataaagcgcaatgatagrggtttttacgaggcttgaatcccctcttactaccaaatgtcctgttcactatttagtaaatttaaaaaatattcacgtgggtcaaataaagactcttccatcgctttcctactc

SEQ ID NO: 519331 - DNA, 539 bp, Homo sapiens
aaggaacttttggattggcttaactcaagtgtctttttaagtacattttctattttgattgggaatagtttttttggaagggttcgtttaaatagggaaattactgcttcctggtaaaatacacaccacagatgttaaaacaactgcaattttaaagatactagtctggttaaaacacttccagtttgtattacctgagtacttaaacagatakccatatagtgagcataaacaatacttctgagaatggctgcttaactctaggaagagctgatcttggcataacatgagaaaactgctaggaactttagtcttatttgctttcaaatttggagcaggtcaacagtcatcatggttatttctctactgtatatctaaggtcattcatcctgagagtctggttatgaatggcttttttttttttttttttttttccagacagtgaacatgtaggtgaaggaattgctttctggtaggaattacttgtttagaagtcattggctcagctaaggattttgtgggttgtcgcagtgcacagc

SEQ ID NO: 519332 - DNA, 539 bp, Homo sapiens
aaggaacttttggattggcttaactcaagtgtctttttaagtacattttctattttgattgggaatagtttttttggaagggttcgtttaaatagggaaattactgcttcctggtaaaatacacaccacagatgttaaaacaactgcaattttaaagatactagtctggttaaaacacttccagtttgtattacctgagtacttaaacagatatccatatagtgagcataaacaatacttctgagaatggctgcttaactctaggaagagctgatcttggcataacrtgagaaaactgctaggaactttagtcttatttgctttcaaatttggagcaggtcaacagtcatcatggttatttctctactgtatatctaaggtcattcatcctgagagtctggttatgaatggcttttttttttttttttttttttccagacagtgaacatgtaggtgaaggaattgctttctggtaggaattacttgtttagaagtcattggctcagctaaggattttgtgggttgtcgcagtgcacagc

SEQ ID NO: 519333 - DNA, 601 bp, Homo sapiens
cattcccatttactggcttttctgttggttcttgcttgacagtttgttttggagatccagcactacttctttcttagaaatggtttatcttgtctgaaataatcctccagtttccctacttttacctctgcctttctttaaataaaggtttttttttttaacaaaactttctcgtatcagtttaaatacatttctgaatgattacatggcattatccccattttcacaggcaagaaaacagaggcccaaggttacaaagctagttacagagctagcagcagaaccaagataaactgagctttgtctgaccccaaagcctgagstgacactactatatacgataccatcatttcaattaatttcactgaacctcagttttctcttctgtaaaatggggatgctaatatattattctaatatattctgaattcatataaatagtattacatatgatgtattataaataataagacattattttacttttggtaaaattgagaagtatataagctaacacatattaaatgcctaaaaagatgtctagctctcgttatggttttaatatattccctttcctctcgacagtaacaataaagtgtaa

SEQ ID NO: 519334 - DNA, 631 bp, Homo sapiens
tcttagcttgagttgatggagtggggccaaatgcctgattcaataggattttgttttattgtgatcactgggtaaaaatatctcagcattttttttcctctttatcgtctaaaaagggacacttttgattaagataattttcttgttgcattaagacaataataggagtacatgtttgataggcctgcttattttttgtgactgacttgtgaacagttaactgatggcaactcattttagtttgtagatatatcttaatctcttgtacgcatagtraccattacctccatgatgttctgaaatgaagccccttcctgtaaagctgtgcttttttctcttgtagctagaggttggcccattgtactattggaatggatgtcagagtgtggataattctgggcttgtgatttttttctttctcctattttatctgcctctttttgtgtctttgtgagcaagtctgtgattactattgagtttttttccctaaatgccagcaattatctcacaggtggagggattaggaaagagctgagagaaatgcactgggtttagaataaaggctccccacccccactttaaatatggtgacaggagggagtgtagagttgggggcgggggtggcagacag

SEQ ID NO: 519335 - DNA, 531 bp, Homo sapiens
caacactgtgcgtgtggttcaagcaggaggctgcctgcctctttgtgtrgtgtggctgtgtttgttggatatgtgcgtatccagcctcatacggtggctctggacaggtgtggtagtgacggggaaggaaggcaagaagcagggatggtcagtggggaagagtcctcaaggtagttgagaggagggtagaggggaagaaactgctcctgcctccagcaggaagcctcaaatgagatccccacgtccaccaagcgaacccgtgggtgggtggctcatggatgactggtgggcggatacagattgaagggggagaaggggatgaggtgggtgaaattgagggttttccctgctgccttgacagagcctggggctgagctcgggagggtggtcttgctcccctggcatcagccacctcttgggcggctcggccttgttggaggctgcagcctgaaggagctgaaatcaccctcggccgtgagagcagcccagcccctgttttctcctgggctctggctgccttaactaccggac

SEQ ID NO: 519336 - DNA, 552 bp, Homo sapiens
caacataggattgtcaacactgtgcgtgtggttcaagcaggaggctgcctgcctctttgtgtagtgtggctgtgtttgttggatatgtgcgtatccagcctcatacggtggctctggacaggtgtggtagtgacggggaaggaaggcaagaagcagggatggtcagtggggaagagtcctcaaggtagttgagaggagggtagaggggaagaaactgctcctgcctccagcaggaagcctcaaatgagatccccacgtccaccaagcgaacccgtgggtgggtggctcatggatgactggtgggcggatacagattgaagggggagaaggggatgaggtgggtgaaattgagggttttccctgctgccttgacagagcctggggmtgagctcgggagggtggtcttgctcccctggcatcagccacctcttgggcggctcggccttgttggaggctgcagcctgaaggagctgaaatcaccctcggccgtgagagcagcccagcccctgttttctcctgggctctggctgccttaactaccggacgccattt

SEQ ID NO: 519337 - DNA, 531 bp, Homo sapiens
caacactgtgcgtgtggttcaagcaggaggctgcctgcctctttgtgtagtgtggctgtgtttgttggatatgtgcgtatccagcctcatacggtggctctggacaggtgtggtagtgacggggaaggaaggcaagaagcagggatggtcagtggggaagagtcctcaaggtagttgagaggagggtagaggggaagaaactgctcctgcctccagcaggaagcctcaaatgagatccccacgtccaccaagcgaacccgtgggtgggtggctcatggatgactggtgggcggatacagattgaagggggagaaggggatgaggtgggtgaaattgagggttttccctgctgccttgacagagcctggggctgagctcggragggtggtcttgctcccctggcatcagccacctcttgggcggctcggccttgttggaggctgcagcctgaaggagctgaaatcaccctcggccgtgagagcagcccagcccctgttttctcctgggctctggctgccttaactaccggac

SEQ ID NO: 519338 - DNA, 640 bp, Homo sapiens
atgctactctagagcctgatgtccacatcattccatagctctgtgacaaacagacacaggcccttagagaggaggtgcacatatagcattgactgtgtctggtggtgtgtttgggaagggtgtcagcagagcctgggtcacccttccttagacataggattattctagccataagtgtgaggagaaaaaatagctttgaggtaaggtggtcaaataggactgctgatttctttggaatccaactgcttgagtcaagaagggattgcctttttgaaattgctggcagacaggagctcccagctaatccctcctctgtacacatgtggacccttaagatgagttccttggatgctaggattccagatagaagtaaatatctttaggcagccatgttgaccccagaaattagtgccagggactttcttaaagaggattctaagattttctggaattcctgaagaaaagtagatgrggagcactgagaagaagaagtacgtctcaggtcacccagttaaatttgaatttcagtgctccttctccttttcagtgacacaaagggagacagaaagagagatattagactctcccttttaatccagaatcttcggtaactggaagacaagttgtagtctaccaacag

SEQ ID NO: 519339 - DNA, 455 bp, Homo sapiens
gaggcaagaatgagtgagaagatagcaaaaaagaaagctgttcatggcttagaaagcaggtctcatccaatggactgtacgggtttctgggagagaatcatgccttggaaatatccgttcatcaaaagcatagtttgcatctgcaagcccgaagggaaactgagaaaaccagccaccaayttggcaggcaacagaattgtctcctccaagatagtgagtggaggagagaaggctgccttttcccaagaggaccagtccagcccttgttaggccatctccgaagatgtatgtttcctttaccaggtgtagccttacaggaagggactctttggagtgaagccaagtgtctactttgggacaggggaagtatatcagttatttattgctgcataacagatggcttataactacaattatttttcatgattcagtgggttgactcagaagtttgcccc

SEQ ID NO: 519340 - DNA, 537 bp, Homo sapiens
tgagttgaagttaggagatggtgaccctcagagaggggaggatggtgcatgctgcgaaagcaaagtggcagtatcataaaggaaaggaaagagaaaagagggtgcagccaactcctctgctaatgacttattgtcctagcctgtcccattccttatatatgcacaacaatctcttatcctaactgtagctggaggggacctttgcttcttgcaaataaaaagtttattaatagttcaagtcttctttgaggtgtccagcacttagatgacaccaatggaacagaattttctcaaatgaatgggctgagagtaagattttgagttgtgtttccttccagagagcattcagtcaaacctcagatgttcttttcctatagcttgagaaaaattcctgaaagattccttagcttggttcrtggctggcagattcctgtgagggccagctaatgggcatgtcttggttatatggtggcagagaaaaaaacctctgaccagtttctggctgaggaacagggctcctggctccaaggaacattc

SEQ ID NO: 519341 - DNA, 572 bp, Homo sapiens
ctgggagctctccgtggtgctggaagcaatgcacttccacaggaaatttgaggggaaattgcccacaagagttctaaggatcattattgccctacaggagggttgagttggaaccagagtagcaagcatttgagggcttgctggatggatgtccatcgtacaaactaatgaccactttcacatttgttcttattctrtgatgccaactgattgttttataatgcttcatttggttttcttcctggtggtgaggggcaaaagtagatgctttatattattgtccacttgaagcacaaacataatgaaagagctacaattcatttattgcacaggcatttgtcaggcacctttaatatgctggctgatatgtgctgggagttgagccttgggcaaacttataactcacacaggaatcagatgagttgtgactccaggagagctgttttttgccctgacaaatactgacatctggttactgacaatgctggaccttagatagtgactgtagtcaagaagagacctgggaaaaagtcctggaaatgctgggcctccctatgtggcttctataaact

SEQ ID NO: 519342 - DNA, 602 bp, Homo sapiens
gcagtttggatggggtttggctgatctaggttgttcatagttggggtgggtggctggaatagctctggtcattgacctgttggractggtgggctagaacaggcatgcttatctcatcgtgagggcagaggtgccaaagagcaagcacttttcaaacttttggtcatgtcacacccactaatatttccttggccaaagcaaatcatgtggccatgccagaattcaagatatggggaaatagactccacccatgcaggcaggaggcgacagtgagtgaatatttctgaacagtaacataattgactacaagtggtaggtaagagctgtgaagaggaagagaggtggggttgcagatggcatgaggcccttgaatgatgacataagcacagaggggaagaaaggatactgtctactctgctcccatcctgagatacacatggccccaacacagagtgtttggcagagacatcatttgattagagaaggcatagctttctgtattgtgaggagtcaaatatgaacagtgggaattctggagggcacagagggaagaattcgaaagaggcattgggaggcagttggctacccagggccagagagca

SEQ ID NO: 519343 - DNA, 573 bp, Homo sapiens
cacttcctcatggtgagccgtgaccgcctgcgcacggtgctgatgcttgayggcgagggccagtctggggagctgcagccccagcggccctacatggatgtggtcagtgacttgttccttggtggagtccctactgacatacgaccttctgccctgacccttgatggagttcaggccatgcccggcttcaaggggttaattctggatctcaagtatggaaactcggagcctcggcttctggggagccggggtgtccagatggatgccgagggaccctgtggtgagcgtccctgtgaaaatggtgggatctgctttctcctggacggccaccccacctgtgactgttctaccactggctatggtggcaagctctgctcagaaggtaagaccctctccctctcttgctagagacccacccacgggatggctgaggctggggctcctgatacaaaccagttctatatggatgcatatctttagctgcatgttagatcactgggccccttgccctaaggaggcagtggaaatcctttgcctactcttaatggagaatctgtcagatctcagcaggag

SEQ ID NO: 519344 - DNA, 573 bp, Homo sapiens
cacttcctcatggtgagccgtgaccgcctgcgcacggtgctgatgcttgatggcgagggccagtctggggagctgcagccccagcggccctacatggatgtggtcagtgacttgttccttggtggagtccctactgacatacgaccttctgccctgacccttgatggagttcaggccatgcccggcttcaaggggttaattctggatctcaagtatggaaactcggagcctcggcttctggggagccggggtgtccagatggatgccgagggaccctgtggtgagcgtccctgtgaaaatggtgggatctgctttctcctggacggccaccccacctgtgactgttctaccactggctatggtggcaagctctgctcagaaggtaagaccctctccctctcttgctagagacccacccacgggatgrctgaggctggggctcctgatacaaaccagttctatatggatgcatatctttagctgcatgttagatcactgggccccttgccctaaggaggcagtggaaatcctttgcctactcttaatggagaatctgtcagatctcagcaggag

SEQ ID NO: 519345 - DNA, 603 bp, Homo sapiens
ctttagccatttatcttcatatacatattttcccccgtcatctctgactttattcttattggatcctttatataatagagcagagcattcttgatattgcatttttaaacctaggataaagcagcttcttttatatatatcaagcttcgagcttgtaatagtggaaggaaaaataacgagtaagttattctctgagattatcatgtccccttaggtatgaggaaacttgttggctttgtctgccacattccagacactcagtaccactcagaactccctctgttgactgtgtttgttgctttttcacctaaggagcttgaaacatgctgtcactcctgccaggaaagcccactctctcagaatcacctttgccaggctaagtcctgtggcagagtgtgtatgtttgtgtggagctttgtgtatgttagttacattatgcaatacgcactttcacatacacaaatatactatttctctatattccccaacatttagtgtttaaatgtracacacacacacacacacacacacacacacacacacgtatttacatacactcacacactcaccatatgaataaactgtcaatctaagtcattttct

SEQ ID NO: 519346 - DNA, 453 bp, Homo sapiens
tggcagatgtttgctaccaaccctagattccctatgttaggagataggcaccagttacaactaaatcaacacagtgtaaatttttacatagaytatcattttttcaggtgaatgacaaccctatgtttaatctgtagaactaattgtttcttcttctcctttcttcttctcttcctccttctcctttcttcttcttcttgagccagagtctcattctgtcaaggggcgtgatcaaggcttattgcaacctccgcctcccaggctcagacagctctcctgtctcagtctcccaagtaggtgggagtacaggtgcatgccacctcacgtggctaattttctgtagaaatggtttttgccatgttgcccaggctggtctcaaactcctgagctcaagggatccacccgtcttggcctttcaaagtgttgggattacaggtgtgagccaccgcaccc

SEQ ID NO: 519347 - DNA, 453 bp, Homo sapiens
tggcagatgtttgctaccaaccctagattccctatgttaggagataggcaccagttacaactaaatcaacacagtgtaaatttttacatagattatcattttttcaggtgaatgacaaccctatgtttaatctgtagaactaattgtttcttcttctcctttcttcttctcttcctccttctcctttcttcttcttcttgagccagagtctcattctgtcaaggggcgtgatcaaggcttattgcaacctccgcctcccaggctcagacagctctcctgtctcagtctcccaagtaggtgggagtacaggtgcatgccacctcacstggctaattttctgtagaaatggtttttgccatgttgcccaggctggtctcaaactcctgagctcaagggatccacccgtcttggcctttcaaagtgttgggattacaggtgtgagccaccgcaccc

SEQ ID NO: 519348 - DNA, 563 bp, Homo sapiens
gggatcacctaaggtcaggagtttaaaatcagcctgatcaacatggtgaaaccccatctctactaaatacaaaaaaaaaaaaaaattagccaggcttggtggcgcatgcctgcaatcccagctacttgggaggctgaggtaggagaattactggaacccaggaggtggaggttgccatgaactgaggtcgtgccactgcactccagcctgggcaacagagcaaaattccaactcaaaaaaaaaaaaattgagaaaacgttatatttatttatttaaaaaaagagtaaaatgaaaaagaaaaagaataaggracagttgacataagttaaaaattattgcttaaatgataatttcaggagaaaagctattaatagaaaacatataaatcacaaacaaaaaaaaaggatgaaaagcagtcaggggaaaggtaagcacagtagataaatattttttacatattcttatacaacttcagaatagaaatgataaaaagaaaaccctaaaaactgcagaaaaaataaataaaacaaattatcatgggcagaattgaatcagattggcag

SEQ ID NO: 519349 - DNA, 643 bp, Homo sapiens
aagtacaagcaataaataggatcaactgtaaaaccacaatttcactacaagacgacattccttttttaaacagtttttttctctacatcttatgtcagtaaataacaatgtattgtcttcttgagagctataatatgacttcgttttctaccaatttcctttgtaatgtcctatagggaaaggtatctttcaaattcaaatccccagcgtrgctcttggcatatgttagatgttcaataaatgtctgcagtgtgctatgggttgaatgtttttgtcctcagaccccaaattcatttgttgaaacattaagtcccaatgtgacggtatttggaggtggggcctttcggaaacatttagcccatgaaaggggagccctcatgaatgagattagtgccttcataagaaaagacatgaaagagacaatctgtctctctttctcccatgtgaggatacagcaagaaggtggctggctgtcttcaaaccagaaatagagctctcaccacacactgaatctgctggcaccttgatcttggacttcccaggctctcgaactgtaagaaataaatgtttgctgtttaagtcacccaggctatgataatttgttatgtcagccagagctaactaaaacatggtgtaaatgaga

SEQ ID NO: 519350 - DNA, 545 bp, Homo sapiens
ttttatatcaaatacctttacagatccagttaaatgttagaaaacctctttatgaattatttttaaggtacaatctaagaaacttcaagcttcagaaaaatataacatactgataaaatattttatttcaaaaattgttaagttgttttgttttccattatgagcagtatttaattgttttttaaggtagattgacacttgttatttcatctgtttactgagttatattcaatgccttatttatttttattatatgtttgytttacattttacatctattcatctagcttttggtttataggctgaagaggtttaagaaatagttgaaggcaacaaacagaaaagaagaaaaggataattcaggaggggaaataaaattaagacaaaagagttaaaatagtatttagaaccaattatcttttcaaaatttatttatttctggatgtcacatttgataggctcatgttcttgaattatttggagcacattcctctgttttctcccatttactccattttagtaaattttatttctgaataaaataa

SEQ ID NO: 519351 - DNA, 623 bp, Homo sapiens
gaaaattacacagaatgcttgaaactgaaatttacacagaaaagtaatgttcaagattggaaaaatatgtttcagtatattaatatccatattataatgttgtaagaatgaaatgagattatttatgcaatatcatacacccctgggyacagaatagacactaaataaaagatagcttatttttgttatttttgctattacaactcaaagtgggagccagagaataacctgtttctgtaaaaaaaaatttaagaagcagcagcattagtaaggaaagctaataacctagattaatgcatcaagaaatctatgtagcaagtcatttaatatccttatatttactttaaaaatagaggataacaccttctaaatttccatccatacacatttaactgaaaggggcttggagggagggaaagaaagataataatcgataataaaagagtctatttaataaaaacagtgcaatagctacagcaactatgtagagacaaagcaacaaacagttctcttgatagtaattcatcttattgtgactaaatctcttgtaagaactctgtctccacttcagaaagccaaagtggattatgatttcaagtcttaaatatcactgggtttaatac

SEQ ID NO: 519352 - DNA, 633 bp, Homo sapiens
gtctccaaattgatgataactgatggtaataataacaattaaccattggatttttgttaaatgaaaacacacaggcataattctaatataaaaatctgcattatcacacttctcttgaaacattaataagtagaaattttcaatacagttgataggctgttgtatgattgctttattttgtatgtttgctttgccaggatactagtaaactggcaactaatcaaaagacacaacatggcctaatctttcaaatttaactgctctacttgacaaatgtgccaaataatatttttaaaagctaaaagaaaatcttttcaagctgtggaaggtgtttctatgagattaatttgtggccagtagtttacttattatttagtcaatatcattgcttgttaatttcaatttgtgactaatcttaccttagatttcattatrtactttagaagattcctaagtttttaataagaaaaaagtaaaatattgtccaagtaacttgggaaagttattctaaagagtttaatgttttcagtagttcataactgagattataaattaaatatttttacttctttcctttttaaaaattttcctctccaagattaactatttttctaattactttattatttcaaa

SEQ ID NO: 519353 - DNA, 602 bp, Homo sapiens
tggggtctacatacgccagtaaagaaaggcctcaagccccaagttttgactgctgatttgtcttatacttctcttcttcaataaagctattacatttaattttagatgaattaaggaaagagatgctgaagtgaaactacaggaattgttgaaatgtaagtaaatgtttcttcaaggcaagctaatcaactactgcaaatcccttctgatttaaggaaaatataacaaaaacacgaatattagacacattatggatttttactgcagatttcaactttagactatattcctggactcctcactccgtaaaaccattcaataccctcacatatattctcacttcatttactttgctacttttctgttttggcgagttatagtacgtcattatttttacatcatttaagtttatagcatttayataaatacttttcatagttgattgatcttggctctattctttatttacaagtatctttttttcttctggatattcttatcatgtaattcttccaggaaaatttcgttttgttccagaatacttgtctataccagaaggggaattcaggagagtataacattctttttcttgctttcaaaat

SEQ ID NO: 519354 - DNA, 547 bp, Homo sapiens
gtaaatgcgtttggttttctgacagataataatattgacaaatcactctttataaaggttgtgctrattttcatttctaccaacaagggatcagaatgacaaccctccatcccccatatacatacagtgggtgttgtttggggtagtatttaatctttgtctaggtttttttttaaaaaaatatcacattatataacaacttctttttcttctttggttaaatttggagatttataagctctgagacacttctatttaaagtatgtatgacatacacagaaaatctctttgtttttaataaaagatgtgtttacagaaataaaaataaaattaactatagacttaccattgtttaattaatactatcccatacatcaaatggattatttctaataatgccttaaatgtttgaaaattcgtgagtttcaactctgagttcacacaagttaagatacattttagtttagtaaattaaggtgtaatagaaatgaatgaatgaattaataaataaatacacttataaatcagggagttgcccaagctgtct

SEQ ID NO: 519355 - DNA, 523 bp, Homo sapiens
ccacatcctagagggttgagttttgagtttagagaagaatagaacgttaaagatggaatgtcacttggattttggtgcaaagggagttgagaatcagaacagtggggtcctgtttctttatgataatactcaagttgctttccctctaaaggtttcattttaccatctgtaaaacgaaacccactgtccctactgaataattaaccaaaatgacttgttttctgtctattccattgaaagcttttttatgagcacatttgctctttaatcctgatgctttcaagccattttcctcagcccctcttgtcccagcagttctttgttgtagttctcaaattcatatacttgtatttcatttagctaaatctyatttgtcagttctgtgaagggaatgatttaaaatttttttttttaccattttcctggtgccaataatctttcttgattttcttctccaatgtttgcaacacttcataatttagtacccgcttcagatcctcctttcaaaactatttgtggtatt

SEQ ID NO: 519356 - DNA, 326 bp, Homo sapiens
gcctgaagcctctcagtgtaggtgcatacagataagttaggcagtgttggtccagagatagtttctatgaataataattaataaaaatgaactattaagtcagaaaattgaacaaatatttattattgagtacctactctagagaaaataacatgctgggcactgagatacacacmgggtgaacaagacagtctgctcttagggaactttaaaggagatagaaaagtcagcagggaatgtgctgcaaagtgggtattattgcatgcctgagacacatagaataacaacagactacattgactgaggatttgctatgtgtcaggcac

SEQ ID NO: 519357 - DNA, 612 bp, Homo sapiens
taaaacagtagtctcttatacttctttgttctcgtcttttgaacatgcaggtatttccagtttgcaycatagatgtcaaggggctcccttctcttaaaacttgaatgcagggtttttttgttgttggggggtgggtggttggttgcttttgtttttgtttttgtttttttgagtcagagtctcgctctgtcacccagccagactggagtgcagcggcatgatctcagctcactgcaacttccgcctcccaggtccaaacaactctcgagccttcgcctcccgagtagctgggattaccggcatgcgccaccatgcatggctaatttttttttttaatttttagtagagacagtgtttcaccatgttggcccggctggcctcgaactcctgacctcaagcgatttgcccaccttggcctcccaaagtgctaggattacaggcatgagccaccgcgcccagtctggttatgcagttagttgataccagagaggagtagcttgaatgtgtggacttgccttcgctataataaaacatagcctctatccccattataaaatggggaaagaagttagaaaaccaacctgattttaagatgatgaggtgaagaaaaag

SEQ ID NO: 519358 - DNA, 612 bp, Homo sapiens
taaaacagtagtctcttatacttctttgttctcgtcttttgaacatgcaggtatttccagtttgcaccatagatgtcaaggggctcccttctcttaaaacttgaatgcagggtttttttgttgttggggggtgggtggttggttgcttttgtttttgtttttgtttttttgagtcagagtctcgctctgtcacccagccagactggagtgcagcggcatgatctcagctcactgcaacttccgcctcccaggtccaaacaactctcgagccttcgcctcccgagtagctgggattaccggcatgcgccaccatgcatggctaatttttttttttaatttttagtagagacagtgtttcaccatgttggcccggctggcctcgarctcctgacctcaagcgatttgcccaccttggcctcccaaagtgctaggattacaggcatgagccaccgcgcccagtctggttatgcagttagttgataccagagaggagtagcttgaatgtgtggacttgccttcgctataataaaacatagcctctatccccattataaaatggggaaagaagttagaaaaccaacctgattttaagatgatgaggtgaagaaaaag

SEQ ID NO: 519359 - DNA, 657 bp, Homo sapiens
ctgcgtgacttgtgtctgcgttgctttcctttctttcttctgtggactgagaatgctagtgcctttgaatttgtctttacaggacctgagggtcttttgatggtaagagaatgaatgatcattgctgccttgagttctgtgtgatcgtcaggcctcgcctcaggatggcaattgtagcctgagatgacgtagcccaagttgcacagcagagttgctgttctggaaacactgtgctgagtgaccaccgaccttcacagtgctagtgtgcttgcaggctgtggccaggagtagtgtacacgaataactgctggctggtgtctcatggcttgtttgagctctagaacactcagcatttggggacttttgctatttaggtgtctcccttgaagtttggttactactgccttaaggaaatcagagagcatgaaaaacttgcgttctaatttttcttactcttttccaggtgcttctcagcttcaygggaaagggcctgctgtaccacggaaattgtgaccgcttcagaggcaaggcttgccacttgggtctgggtggaatcagaacgtgcaggtctcccaggatgtacactcactgcgccctttctgctgcttggtgttcttctggaggagcgtgagttctcagcggagcgcttctcggcac

SEQ ID NO: 519360 - DNA, 524 bp, Homo sapiens
gctcattctggcagcccaacctggcattgtctttacacaatcctgcatgcaattttgtatttacaataatcaggagcattttatcttttattctgtagcaatagtttcagggggtcttcctacatggattcacatagaagtggtcagttaagaacagtatttccccyggtgggttccacagaacagcatgttatgtgaaagaaaacaggctgaggtcaaatgaatcagggaaacaacaggcaaaacattactaaactttctgtttaggacaatctctcaaggcctttaacaagctaatatgtcatgttgttctccaaaatgcaggagtagcaagcaaggtgaactgggcttctgtttgcccctccagacccactctccaccactctccaccctgctctgttccctggcagcctagtcttttctgattccataacaagccccctttgctctcctttccagttgggtttggacagtggggacttagtaggtaagagggaaagagtagagaatagtcaagtatttcc

SEQ ID NO: 519361 - DNA, 524 bp, Homo sapiens
gctcattctggcagcccaacctggcattgtctttacacaatcctgcatgcaattttgtatttacaataatcaggagcattttatcttttattctgtagcaatagtttcagggggtcttcctacatggattcacatagaagtggtcagttaagaacagtatttcccccggtgggttccacagaacagcrtgttatgtgaaagaaaacaggctgaggtcaaatgaatcagggaaacaacaggcaaaacattactaaactttctgtttaggacaatctctcaaggcctttaacaagctaatatgtcatgttgttctccaaaatgcaggagtagcaagcaaggtgaactgggcttctgtttgcccctccagacccactctccaccactctccaccctgctctgttccctggcagcctagtcttttctgattccataacaagccccctttgctctcctttccagttgggtttggacagtggggacttagtaggtaagagggaaagagtagagaatagtcaagtatttcc

SEQ ID NO: 519362 - DNA, 156 bp, Homo sapiens
aatcacagcaacagggacagaaascgagggagcaggacatgcaccccatcggcctggggtggtgtggagacggcttcaaaagcaggtgacatgctgggcacggtggcactttggcaggccacggtgggaagattgcttgagctcaggagttcgaga

SEQ ID NO: 519363 - DNA, 456 bp, Homo sapiens
ctcactaggaggccctctttggctaagagcaattctgggagaaggactcagtcacaggcatcagctgccaacactcacatcaactgagcaactgaatgctggatcccagaagtgtgtctgtgcagcactagagggtccgctacagggctatctcaggctctgcctaaatacccaaaaccaacccctctatcctacagtggctgtcctgagttggttctgaatatttgatgaggctgctaacacaacttctcctaagacatagagaggaagtctcatttgagacacttgtgccctcagatactcaaatctggaaacttctatccccactccctcttgcagacctctccaaaatgctctgatatcatgtcctacatcctccctcatctatgtttcacagtcaaaytcctgtattcaattctccaattgataatttcggggaaccccataaatcgtttt

SEQ ID NO: 519364 - DNA, 657 bp, Homo sapiens
tgtgtgctggcctggggttgttgcagtgttcccttgtgctgttgacttgaggggccctatttagaagacaaaaaaaaaaaccaaacacctggagcaaaggtaggagaaaggtcatggcaggccccccaggctctgtgcgtgactcattgactgagttgactcattagaccacagtccccaacatggcctgggttcctgggaggaacgggattatacccaacatagcatgcagggccctaagcagggggttccttgtctttccttgttgtcaggacagtgtaatttagcccctcttaatgctaatgctcaggawttttttccctatctgatttttctccgtagttccagagctgattggcgctcaggcacatgctggtaagtgcccagatcaaggcaagtggccctggcctgctggatccctgtgctctcccctaccacgttccagaagaactaccctgtccctgtttcctgcaggtggggagaaccctgtagggatgttgcccatggacccctacctaggtattcaaattttctttgcagttaatgtgattctggatgcagaaaccgcttaccccaacctcatcttctctgatgatctgaagagtgttagacttggaaacaagtgggagaggctgcctgatggcccgcaaagatttg

SEQ ID NO: 519365 - DNA, 657 bp, Homo sapiens
tgtgtgctggcctggggttgttgcagtgttcccttgtgctgttgacttgaggggccctatttagaagacaaaaaaaaaaaccaaacacctggagcaaaggtaggagaaaggtcatggcaggccccccaggctctgtgcgtgactcattgactgagttgactcattagaccacagtccccaacatggcctgggttcctgggaggaacgggattatacccaacatagcatgcagggccctaagcagggggttccttgtctttccttgttgtcaggacagtgtaatttagcccctcttaatgctaatgctcaggaattttttccctatctgatttttctccgtagttccrgagctgattggcgctcaggcacatgctggtaagtgcccagatcaaggcaagtggccctggcctgctggatccctgtgctctcccctaccacgttccagaagaactaccctgtccctgtttcctgcaggtggggagaaccctgtagggatgttgcccatggacccctacctaggtattcaaattttctttgcagttaatgtgattctggatgcagaaaccgcttaccccaacctcatcttctctgatgatctgaagagtgttagacttggaaacaagtgggagaggctgcctgatggcccgcaaagatttg

SEQ ID NO: 519366 - DNA, 379 bp, Homo sapiens
aatgctggtggtaggggtgagcrgcttttattagaagtggaggtaggtggtgactttgcaaggatgagatgagatattctaagggctttggatggggatggtcccagatcttgagcatggttcatttgacttttacgctttggctttctcttccttctcttaggcttcattagctccactgataatcagatgtgattagggtttgggattttgctcaccaatggaatagagtgaagggagaaaaagggaaacattttttcctcttgagatcagtaggtgtgagttggaatacagcagacaaagaaactgcctatgtatggactcagggacgcccttagggtgagattatttcttgcggggaggagaaaggaagcaggag

SEQ ID NO: 519367 - DNA, 445 bp, Homo sapiens
ttttctaaagagattaatatgggtagagggaagccaggttctatttatcgagacagtgggagaatgaccctgaaggcatttcagagcagtggttgagccacatatggggcttcttctaaagctgcttctatatttttaggtatttgttatagcaacaccctgcttctcagtaccagttttctgtcttaatatattttgtrtggctatacccgagactgggaaatttataataaagaagaactcattggctcattgttcctgaggctgagaagtccaagactgaggggctggtatctggtgagggccttctcactgcatcatcccatggcagaatggtgaagaagtggtgagagagagcaaggtacaaccttgagggcaagttttccaaagcatttgctaccctgtaccaccttgagtctctgcttcccatactctggtgcagtgc

SEQ ID NO: 519368 - DNA, 681 bp, Homo sapiens
ctggaaacgctgcggcgggtggtatcaccagtggacaggcgaacttcaggccagagagtgccttcctccagggctttaggggaaaagggcgacgaggccgtggtggtcggcgccctgaataccccgaggggccagggcccctttttctacatgaagacctgggcccgttccctcccgggttcttccactcccatctcagccaagtgctgatctaataactcagtggaagcgcccagagaagaacagggtcgccgtggttagagacgctgttcccctccgcgcctgactccgcagttactttgttacttaaccgcccttctgctcatttgacaagccctgagcgcacatttgcagagcttccttccgggacttcgtggcacggattgcaagaggcccctactctggcaaggacttgactcagggaaattctttctgtcctttcttactagaaaaggcataaattggaggtgagcctccttgattagaatgggcacaatggctggtggccacgagacccagaagaggtcactggyggtgttgcttcccagacagccagccaatgttggtgagactacagtgaaaagaggcagattgaactaaccagacctgggacttgtcttcatctgcaaacggtagtaacagcggttaaccccctgagcgcttctgacatgctgaacgctg

SEQ ID NO: 519369 - DNA, 554 bp, Homo sapiens
gcctgggcaacaagagtgaaactctgtccccaaaaaaagaaaaaaaaaraaagaatttgtattatctctgacttgaatccaaccctgcaggtttcattctaaccttctcccttttctcactgctgcttttttctctgatggtgagaaacctgactcccattatctataatttatttacatatttgttcaaccctagtatacatgtgaagtagtttcagaatcaccaatgtagttccctatgaaaagtaaatttatcaactagagtatagtgtttttgcagagttctttttgcacagtatttttttagctttacagattccagtcaaacacatcattttccattgtgtgtgaagtttgtgacagtgaaataaaaaagaaaaaaaccccatcattttccaaagttacttaggtcagcttcttttttttccttcttgatgggcacatcttaatatttccaaagcatttctacatctggtttcttttatcatatcattgttggatgggggaagaagaaaccatgacatatgaaggttgaactggttgtctcaggtcac

SEQ ID NO: 519370 - DNA, 391 bp, Homo sapiens
atttatttacatatttgttcaaccctagtatacatgtgaagtagtttcagaatcaccaatgtagttccctatgaaaagtaaatttatcaactagagtatagtgtttttgcagagttctttttrcacagtatttttttagctttacagattccagtcaaacacatcattttccattgtgtgtgaagtttgtgacagtgaaataaaaaagaaaaaaaccccatcattttccaaagttacttaggtcagcttcttttttttccttcttgatgggcacatcttaatatttccaaagcatttctacatctggtttcttttatcatatcattgttggatgggggaagaagaaaccatgacatatgaaggttgaactggttgtctcaggtcacatgat

SEQ ID NO: 519371 - DNA, 592 bp, Homo sapiens
ctgggcgcggtgactcatgcctgtaatcccagcactttgggaggctgagggggacagatcacttgaggtcaggcattcgagaccagcctggccaacatggtgaaaccccatctctactaaaacaaatacaaaaattagctgggtgtggcggtgcatgcctgtagtcccagctactcgggaggctgaggcatgagaattgcttgaacctgggaggcggaggttgcagtgagctgagatcacgccactgcactccagcctgggtgacagagcgaaactccatctcaaaaaataaatawgccaaattttcttctgaactataatccaacacagtatcaaatgtaatagaaagatatatcttaaaaagctcaacaatgaagaatatgtaaggaaaccaatcatattgtatcctcagctgctactcctattttgagagaatactcaatttataataacatattttctcaaatgaagaaacccttttgtaattgttgtcaaataatttcccaaccaagactcacttgaaggaccagttataatcatgagactgtctctccatgatgtccaccctggctccaggcacactacagattgg

SEQ ID NO: 519372 - DNA, 605 bp, Homo sapiens
aaataactgacttcatgaatgtagagcacaagaatgtaaattaacaaagtagtcctcataaaaataaaatgtagtcatacaattctgtcattaaatggtttccctccctaataatctcaaaaagacggctcttccctccccacaagcctcctcccacattaatagattaggggaaatgccataaaaaccacataattccaatttcaaccaagaaaaacaattccaaaattaagattccatcctttgcatattttcaaggatcaaaatgaaacaaatccaaagagaaaataataaacaagaaacactataaaayaggatataggggccgggtgtggtagctcacacctgtaatcccagcactttgggaggccgaggtgggtgggtgggaagatcacttgaagtctcaggagttcaagaccagcctggccaacatggcgaaacccatcgccactaaaaatacaaaaattagctgggcatggtggcgggtgcctgtaattccagctactcgggaggcttgaggcagcagaatcgcttgaacctgggaggcagaggttgcagtgggccgtggtcactgcactccagcctgggcaacagaatgagactcc

SEQ ID NO: 519373 - DNA, 551 bp, Homo sapiens
ttatattgcctgagattttctttttttattttattaattccatggctttccaatraattgagattttctaagaatcaaattttcctttaattatttcagaggtactacaacttaatctgattgttttaaaataatcagtggcttaatattagaattttactgcaaattcatcttccatacttatttttgctatttaaataattagctatttttgttattcatgttattagctacacttacatggagacaaatggttatatgggtttcctctactaagaaaatgggtttctaggaaatgaggtttcgcaccaactaatttagttgtcctggaaataacctgcttgcctatgtaaaagtcaagcttatacaggaggcaataaagacactaccctttagcacaacctgcagagctctccagcacatggtggactgcagtacaaccaggatcacaagcccggtttctcagcccagcttcttggcatttgaaatcaatgtgagaaaagagcagaggaaagagctgacacgtttccccttccttgtagcaccaaccg

SEQ ID NO: 519374 - DNA, 648 bp, Homo sapiens
catctgcaaagaccctatttccaaataaggtcacattcatgggttccaactggacatgaatttgrcgggggagctatttgacccaggattctcccttaccctcatctttgatttttccctctgtcttatccccaccactcccaagaagctttcaggtcagcctgactgctcctccttgacatctgcctgtctgtctcctcttcaccatgctgacagccagggccttcccatttagcacagactctggggcttttctttctttctttctttctttgtctgtctgtctgtctgtctttctttctttcccctctctctctctctttttttttttttttttgcgacagagtttcgctcttgttgcccaggctggagtgcaatgaggtgtgagccactgagcctggccaactctggggctttaataaggaaacttgaacatgttgcttcatttctctgggcctgagtttcctgacttgcaaagtggacataaaagtagtacggtgcctactttacagtactattgtgatgatcaagtgaactactctgtaaagaggcagagaacaatgcctggcatggaagcatggctgttactagtatcttgtccggcctccatcacgtctagcatgaaatactgcaaaggcttcctaacca

SEQ ID NO: 519375 - DNA, 425 bp, Homo sapiens
tttaaaattttttgtagagatggtctcactatattgcccagtctagtctcacactcctggtctcaatcgaccctcctgcctcagactcccaaagtgctgggattacaggtgtgacttaccatttactcagcctgccagggatactttcaaagcactatcatgattattatctyaccagatcctcactctggggcggggatagggaagacaggaattaaaaaacaaatgcaaaaaaaaaatgtcctccaggctgggagtcaactgaagccagaaagccagggcaagaacattttgtaggttttgtattttgccagatttcctccctgttcccagaggttcacctcagagcagcagagccttgctcaatctctgcccatccaggaagaaactgaggcaaccctggcaggacccagagtggaaacaca

SEQ ID NO: 519376 - DNA, 603 bp, Homo sapiens
gaagaacatgacagacaagggccctgtgcttgggaggtttgcattctagtggaggagacaaaataagcaagtaaggaaaaagaagcagtaaacactggtcatggtgagagtgccgtggaggaggtggacggtggcgcaggctcagcttcagtcctgagcagcagccaactttggcaggcaggggaaaaggccggtgtgagaractcaggtgggaggccccgggggctggagaggtgagcaggtggggcagaggtgtaggaagtgggagtgggcctggggctggctgggggcacctcccaggcctcagtagtacacgtgattgtatttgaagggccacaggcagggttgcatgtggatatggggagaggacagggtgagggtaagagaagagtgaagccgcgtctgtggcctgtgtgtgtgccaaggtgcgggatggagggcgagggagtgaggcaggggagggaaggcttctcttccgtccttgggccactgggctctggaaagccctgcagtgtggcaccagccctgctggacttcagagcggtggccacaaatccctggaagccccgtgcctattcgaggttccctttattgagctccagc

SEQ ID NO: 519377 - DNA, 603 bp, Homo sapiens
gaagaacatgacagacaagggccctgtgcttgggaggtttgcattctagtggaggagacaaaataagcaagtaaggaaaaagaagcagtaaacactggtcatggtgagagtgccgtggaggaggtggacggtggcgcaggctcagcttcagtcctgagcagcagccaactttggcaggcaggggaaaaggccggtgtgagaaactcaggtgggaggccccgggggctggagaggtgagcaggtggggcagaggtgtaggaagtgggagtgggcctggggctggctgggggcacctcccaggcctcagtagtacacgtgattgtatttgaagggccacaggcagggttgcatgtggatatggggagaggacagggtgagggtaagagaagagtgaagccgcgtctgtggcctgtgtgtgtgccaaggtgcgggatggaggrcgagggagtgaggcaggggagggaaggcttctcttccgtccttgggccactgggctctggaaagccctgcagtgtggcaccagccctgctggacttcagagcggtggccacaaatccctggaagccccgtgcctattcgaggttccctttattgagctccagc

SEQ ID NO: 519378 - DNA, 603 bp, Homo sapiens
gaagaacatgacagacaagggccctgtgcttgggaggtttgcattctagtggaggagacaaaataagcaagtaaggaaaaagaagcagtaaacactggtcatggtgagagtgccgtggaggaggtggacggtggcgcaggctcagcttcagtcctgagcagcagccaactttggcaggcaggggaaaaggccggtgtgagaaactcaggtgggaggccccgggggctggagaggtgagcaggtggggcagaggtgtaggaagtgggagtgggcctggggctggctgggggcacctcccaggcctcagtagtacacgtgattgtatttgaagggccacaggcagggttgcatgtggatatggggagaggacagggtgagggtaagagaagagtgaagccgcgtctgtggcctgtgtgtgtgccaaggtgcgggatggagggcgagggagtgaggcaggggagggaaggcttctcttccgtccttgggccactgggctctggaaagccctgcagtgtggcaccagccctgctggacttyagagcggtggccacaaatccctggaagccccgtgcctattcgaggttccctttattgagctccagc

SEQ ID NO: 519379 - DNA, 530 bp, Homo sapiens
gtaagcagagccaccaggctccacagtcccttccattaacttccatccatgcttcagcagctcctagctccactgggataatgtccttgttccttctccaagcctataaggttctccatgatgtggcccatcccagctctgtggcctcattctctctgcttctgctcacaaacatctcttgctgtttcacacccctatgcctttgcacttgcctactctyttcttctttggtgaatcttgtttcctcctctggttttgccccccttcctcagacctcactaatcctcattagtcctgcaaggcttagctccatgttcccctcccctatgctgcatgctcctttccttgctcctgcagtacccaggtgtacctctgtcactgctgtcataacacttctgatgctattggcttgtttgcctgtctcccccaattacagtgttaagttacccgagggcagaaaccttgccatgtctgcctgtgtgtccctcagtgcttagtgcagtagctggcatatggcaagcctctaatta

SEQ ID NO: 519380 - DNA, 443 bp, Homo sapiens
accttttgatctctgaacatccgcgcgccatccacagcacaccrtctataccagtgttaacagattgcgtttgtagataatgatcactgtcccatcctcgtggcactgcggtgcctgaacagccttgacttcagtccttccaactttggaatggagggagcgtctgtgcagtgccaaggggctcctagaagcatggcgagcacacaggaatcatcccggcatgcacctttgccatgcctggtgggtctgcactcggctcttggtcttaggggacacccaacacccgggagacgcaggctcctcaccttggccttctgccctttttagccttgttaggcctggaagcatgggccgctcttttgtgggagggaagggggacctgcgatcgttgttacaagaccaagtgtttgctcctggtctctcctgcttctctcagagctatg

SEQ ID NO: 519381 - DNA, 586 bp, Homo sapiens
ttaaccttttgatctctgaacatccgcgcgccatccacagcacaccatctataccagtgttaacagattgcgtttgtagataatgatcactgtcccatcctcgtggcactgcggtgcctgaacagccttgacttcagtccttccaactttggaatggagggagcgtctgtgcagtgccaaggggctcctagaagcatggcgagcacacaggaatcatcccggcatgcacctttgccatgcctggtgggtctgcactcggctcttggtcttaggggacacccaacacccrggagacgcaggctcctcaccttggccttctgccctttttagccttgttaggcctggaagcatgggccgctcttttgtgggagggaagggggacctgcgatcgttgttacaagaccaagtgtttgctcctggtctctcctgcttctctcagagctatgcagaccaacacaaaatcacgatcgtggacttcttcaagagcttgaaccccactgggacaatgaagatgtctgtggatgagttccagaaagtgatgatagaggtgtgctgggtcctagtggcaacaggctgtgtgtgagtg

SEQ ID NO: 519382 - DNA, 586 bp, Homo sapiens
ttaaccttttgatctctgaacatccgcgcgccatccacagcacaccatctataccagtgttaacagattgcgtttgtagataatgatcactgtcccatcctcgtggcactgcggtgcctgaacagccttgacttcagtccttccaactttggaatggagggagcgtctgtgcagtgccaaggggctcctagaagcatggcgagcacacaggaatcatcccggcatgcacctttgccatgcctggtgggtctgcactcggctcttggtcttaggggacacccaacacccgggagacgcaggctcctcaccttggccttctgcccttyttagccttgttaggcctggaagcatgggccgctcttttgtgggagggaagggggacctgcgatcgttgttacaagaccaagtgtttgctcctggtctctcctgcttctctcagagctatgcagaccaacacaaaatcacgatcgtggacttcttcaagagcttgaaccccactgggacaatgaagatgtctgtggatgagttccagaaagtgatgatagaggtgtgctgggtcctagtggcaacaggctgtgtgtgagtg

SEQ ID NO: 519383 - DNA, 586 bp, Homo sapiens
ttaaccttttgatctctgaacatccgcgcgccatccacagcacaccatctataccagtgttaacagattgcgtttgtagataatgatcactgtcccatcctcgtggcactgcggtgcctgaacagccttgacttcagtccttccaactttggaatggagggagcgtctgtgcagtgccaaggggctcctagaagcatggcgagcacacaggaatcatcccggcatgcacctttgccatgcctggtgggtctgcactcggctcttggtcttaggggacacccaacacccgggagacgcaggctcctcaccttggccttctgccctttttagccttgttaggcctggaagcatgggccgctcttttgtgggagggaagggggacctgcgatcgttgttacaagaccaagtgtttgctcctggtctctcctgcttctctcagagctatgcagaccaacacaaaatcacgatcgtggacttcttcaagagcttgaacccyactgggacaatgaagatgtctgtggatgagttccagaaagtgatgatagaggtgtgctgggtcctagtggcaacaggctgtgtgtgagtg

SEQ ID NO: 519384 - DNA, 576 bp, Homo sapiens
tggaagtcgtgcctgcctggctggcccatctctggagccaggagcccaggagcctgcctgccagcgagggtctttcttgttctgtcttggcatgtgtgtgctgggctccagggcagctrtgcggggtggtgtggctggagcatggtccccgtgacagatctgggcttatgaggagaacgggatgggtgaaggccctgtagatacaggaggtgggcctggggctgaccctgcgtctatcagctcaggaggcctgaggtcctgggccatcagaagggctgagcttttctcacctgtgaaaggggcacactgccgctttttcattgcaggtctcacgaagtcagatggggctgctggactcccagctcgggctctgcttgtgcccccagcccggctcccagacctgtccagttcctccccttcccagccttccctaccctctcctttgccccctagggaggaaggtttttacagagcccaccccctgcatccagccgccctagggctcaaggtgggccaggctgaggtctgtgcctggagctacctaagctgctcgtggcaggtgtgaggttcagcacc

SEQ ID NO: 519385 - DNA, 511 bp, Homo sapiens
tagagacaaccaggcacctggtgtttcctagggtggcccagaagccagccagcaacccaggggacagatgggcttcactggggcgcagtttgctcctaaccacatagcatgttcagcatgacaggttttctcctcgggatgggagggagctgttctgttgcatgagaaagagaataccccactgtacaactgctgtagtsatttactgacacgtgggtgttattttaggcaacctttattacagaagtccactattttaagtgactttttgccaattttagatttgaagggaaggtctcaagttaagcttggaaccacttagaatccaagagggtagcaggaagatccaacccctcaaagcaggtggcgtgggtgccactgggaggggatctggggcctgtcttgagccgtaaatcttcctccacctgagacgtgcaccccactgtaccagagatgcctaagactccaatccctgggttctggctgtgtggaaaatgtctctacacagtca

SEQ ID NO: 519386 - DNA, 511 bp, Homo sapiens
tagagacaaccaggcacctggtgtttcctagggtggcccagaagccagccagcaacccaggggacagatgggcttcactggggcgcagtttgctcctaaccacatagcatgttcagcatgacaggttttctcctcgggatgggagggagctgttctgttgcatgagaaagagaataccccactgtacaactgctgtagtgatttactgacacgtgggtgttattttaggcaacctttattacagaagtccactattttaagtgactttttgccaattttagatttgaagggaaggtctcaagttaagcttggaaccacttagaatccaagagggtagcaggaagatccaacccctcaaagcaggtggcrtgggtgccactgggaggggatctggggcctgtcttgagccgtaaatcttcctccacctgagacgtgcaccccactgtaccagagatgcctaagactccaatccctgggttctggctgtgtggaaaatgtctctacacagtca

SEQ ID NO: 519387 - DNA, 332 bp, Homo sapiens
tggcctcgcccctttcctgcccagcctggctccgcatcctcagagtccccagctcccatcacaagctgtgtttcccgcacagtcatcttagagttagtttgtttgctttgagggattacgtgaagctctcggaagccttcattttaattttccttgatttgaaaatggaatgggtgcagccgccacccacaataagatagagagggtcatgtcgttcaggagtagccatgccaagtgagggtctcactgcctggcacagacacgtcttctcaggccatcatctccgtgaccgggatcckcagtgttgtcctgggccgccacagatgttgccc

SEQ ID NO: 519388 - DNA, 567 bp, Homo sapiens
tgacctccctgcccctcccaggctgcttgctcctctgcccacgggagctgcagttcctggctcccgtgggcccaggccacgagccgatctccctggttaggagtgggtgcartgggtctgtggcctcctcggttccccgagcacctccgcccatcctgggacattctaaccgctgacctgccccttctagaatggtgcccagaagtcctgggacttcatgaagacgcatgacaggtgagagcctggcccagcctggccactggggaagccccagactgatgtctacggggacactgggcccagggcgaaggtgccctctcctccctgacgttgctgttccctgcgtgggctccaaaagtcccttctctctgcccggcctctgggtttcctatccctgaggggtcagcctgaggcctgggggctgagtcaggtctttgctcaggccaccgggaccatgatggtgggcaggccctctcagggcagggagaggctgtcctggagcctttgcccctagcatccagggtctgggctggatggcgacgtggctcgaggagtgtggctggtggg

SEQ ID NO: 519389 - DNA, 270 bp, Homo sapiens
tcttgcaaggctatctgctgtacaaatatgcttgaaaagatggtccagaaaagaaaacggtattattgcctttgctcagaagacacacagaaacataagagaaccatggaaaattgtctcccaacactgttcacccagagccttccactcttgtctgcaggacagtcttaacatcccatcattagtgtgtctaccacatctggcttcacygtgcctaaccaagatttctaggtccagttccccaccatgtttggcagtgccccactgcca

SEQ ID NO: 519390 - DNA, 452 bp, Homo sapiens
caataaaaatagtaataataataataataataaaatgattakccaggcatggtagtgcacacctgtagtccctgatacttgggaggctgaggagaaaggatcactttagcccaggagttggaggctgcagtgagctacaatgataccactgcactccagcctgggtgacagcaagactttgtctctataaaacacacagagagaggaagtcaatcatgtcagtcattccttgtcctgccttcccaggcagaccaagtcaggaatgctggcagccccttctgaaaaggatgcacgtggcatcccaactcatgacctctgctcccttcccccttctggtgcactttgggttgcttctggaggtgcccctccaaggacccatatgttcctggctggggcactctctaaggctgtggacccctcaggaatggcagcatcgtggtggactacctggt

SEQ ID NO: 519391 - DNA, 452 bp, Homo sapiens
caataaaaatagtaataataataataataataaaatgattagccaggcrtggtagtgcacacctgtagtccctgatacttgggaggctgaggagaaaggatcactttagcccaggagttggaggctgcagtgagctacaatgataccactgcactccagcctgggtgacagcaagactttgtctctataaaacacacagagagaggaagtcaatcatgtcagtcattccttgtcctgccttcccaggcagaccaagtcaggaatgctggcagccccttctgaaaaggatgcacgtggcatcccaactcatgacctctgctcccttcccccttctggtgcactttgggttgcttctggaggtgcccctccaaggacccatatgttcctggctggggcactctctaaggctgtggacccctcaggaatggcagcatcgtggtggactacctggt

SEQ ID NO: 519392 - DNA, 618 bp, Homo sapiens
tgcactgtgaatctaggattatttcaaaacaaaggtttacagaaacatccaaggacagggctgaagtgcctccgggcaagggcagggcaggcacgagtgattttatttagctattttattttatttacttactttctgagacagagttatgctcttgttgcccaggctggagtgcagcggcatgatcttggctcactgcaacctccgtctcctgggttcaagcaattctcgtgcctcagcctcccaagtagctgggatttcaggcgtgcaccaccacacccggctaattttgtatttttagtagagatgggctttcaccatgttggtcargctgatctcaaaatcctgacctcaggtgatccgcccacctcagcctcccaaagtgctgggattacaggcatgagccactgcacctggcctatttaaccattttaaaacttccctgggctcaagtcacacccactggtaaggagttcatggagttcaatttcccctttactcaggagttaccctcctttgatattttctgtaattcttcgtagactggggatacaccgtctcttgacatattcacagtttctgtgaccacctgttatcccatgggacccactgcagggg

SEQ ID NO: 519393 - DNA, 577 bp, Homo sapiens
accagggccatgaccaggtccactgtggagcagccatctatctacctgactcctgagccaggctgccgtggtgtcatttctgtcatccgtgctctgtttccttttggagtttcttctccacattatctttgttcctggggaataaaaactaccattggacctagaatttgggctcctgtactgtcttcacctgctcttgtccaccctactgcatcctctggtgaggataaggagtcctatcctatgtacaggtcaccttcctgtgctgagraggggggctgtggcttcaagtccctgctgtccctgtgtctgcaggggacagtgttgtgctcaccatggtagaagatgcacaccctctcctagggcttctcatcccctggggcttacttagtctgtcccttctccggccccactttccctttgccagaccttttgctctcagatttttacttttggaactggaggaagaatgttcccatctgattttagaaacggaacattctagctggacttttatggtcttgtgaagaacactgtgctcacaccctcccacacctggcctctgcccctgcctggc

SEQ ID NO: 519394 - DNA, 585 bp, Homo sapiens
ccaggtaggtgtctgtccccagcaggatacgaccactctctttggctggtccctttgcctctcagctccgtggctgggttgcttctctccagaatggagaatcgtcattctgaaaccctgactccagcatggtgccctctcacctttcccctcttcacttttgaatccagccgctcttcctgcgtctgctgttgactgtgatgttgcaggtagaggggctgagaggtgggtggcagcacttatctagtggtgttggggagaaccttaagaaaggggttggcctggggacgcstgaaatggagtctgtggctgccacagaggcagtctcactgatgatcagttagaagggtgacactggggatcacaggaggcgagggccgaggccaggggcagtaggggaagccctgctgccattagtctccatgctgtgtttcctgctgggctgtggcgccaggctgggctctgctggcttagtgtattgtagtgactgggtctgtgccttcaagtggggctgggaaattctgctaagaaacttaggctagagtttatttttcttttggtactcgggtggagacctaagaaggt

SEQ ID NO: 519395 - DNA, 512 bp, Homo sapiens
tgcagttaaccctgctgaaagtggcagatgggtccaggctcttgagctcgtcttggacatggaacatgtggatacaggctttgagcagtgtgtgtagctctttcaggaaggaagggaaaagggtgttacccgggtcctacaccctggaacgacccttctcagacagtaaatagttggcagggtgcggtcatgtgtgattttagttttcaactttaggctttcattttcaaattccacaataaacacataaggtggagttctggtttcagcacacacacacacacacacaaacacacacacacacacacacacaktctctctctctgtatgtctctttctgtctctctctctctccttcctgcaaggatccttgttaacaagaaaccttctgccaaatgcctctgaagcacaggcaggtcttggggagccacaaggccacttcctctttgtgcactagtgtcttgggtaggcatagctttcagagctctggggcctccacaaccttgccctgc

SEQ ID NO: 519396 - DNA, 512 bp, Homo sapiens
tgcagttaaccctgctgaaagtggcagatgggtccaggctcttgagctcgtcttggacatggaacatgtggatacaggctttgagcagtgtgtgtagctctttcaggaaggaagggaaaagggtgttacccgggtcctacaccctggaacgacccttctcagacagtaaatagttggcagggtgcggtcatgtgtgattttagttttcaactttaggctttcattttcaaattccacaataaacacataaggtggagttctggtttcagcacacacacacacacacacaaacacacacacacacacacacacagtctctctctctgtatgtctctttstgtctctctctctctccttcctgcaaggatccttgttaacaagaaaccttctgccaaatgcctctgaagcacaggcaggtcttggggagccacaaggccacttcctctttgtgcactagtgtcttgggtaggcatagctttcagagctctggggcctccacaaccttgccctgc

SEQ ID NO: 519397 - DNA, 512 bp, Homo sapiens
tgcagttaaccctgctgaaagtggcagatgggtccaggctcttgagctcgtcttggacatggaacatgtggatacaggctttgagcagtgtgtgtagctctttcaggaaggaagggaaaagggtgttacccgggtcctacaccctggaacgacccttctcagacagtaaatagttggcagggtgcggtcatgtgtgattttagttttcaactttaggctttcattttcaaattccacaataaacacataaggtggagttctggtttcagcacacacacacacacacacaaacacacacacacacacacacacagtctctctctctgtatgtctctttctstctctctctctctccttcctgcaaggatccttgttaacaagaaaccttctgccaaatgcctctgaagcacaggcaggtcttggggagccacaaggccacttcctctttgtgcactagtgtcttgggtaggcatagctttcagagctctggggcctccacaaccttgccctgc

SEQ ID NO: 519398 - DNA, 452 bp, Homo sapiens
cagatgcaaggcatcccggcgccctcccaggcgctccaggagccggcgccctggtctgcactcccctgcggcctgctgctggatgagctcctggcgagcccggagtttctgcagcaggcgcaacctctcctagaaacggaggccccgggggagctggaggcctcggaagaggccgcctcgctggaagcacccctcagcgaggaagaataccgggctctgctggaggagctttaggacgcggggttgggacggggtcgggtggttcggggcagggcggtggcctctctttcgcggggaacacctggctggctacggaggggcgtgtctccgccccgccccctccaccgggctgaccggcctgggattcctgccttctaggtctaggcccggtgagagactccacacmgcggagaactgccattctttcctgggcatcccggggatcccagagc

SEQ ID NO: 519399 - DNA, 297 bp, Homo sapiens
ggcaggcctcctggctgcacctgccgcagtgcacagtccggctgaggtgcacgggagcccgccggcctctctctgcccgcgtccgtccgtgaaattscggccggggctcaccgcgatggccctcccgacaccctcggacagcaccctccccgcggaagcccggggacgaggacggcgacggagactcgtttggaccccgagccaaagcgaggccctgcgagcctgctttgagcggaacccgtacccgggcatcgccaccagagaacggctggcccaggccatcggcattccggagcc

SEQ ID NO: 519400 - DNA, 297 bp, Homo sapiens
ggcaggcctcctggctgcacctgccgcagtgcacagtccggctgaggtgcacgggagcccgccggcctctctctgcccgcgtccgtccgtgaaattccggccggggctcaccgcgatggccctcccgacaccytcggacagcaccctccccgcggaagcccggggacgaggacggcgacggagactcgtttggaccccgagccaaagcgaggccctgcgagcctgctttgagcggaacccgtacccgggcatcgccaccagagaacggctggcccaggccatcggcattccggagcc

SEQ ID NO: 519401 - DNA, 587 bp, Homo sapiens
ctgttttggaatttgcttcttacatatttatatgtcattacatgtaaattatattattttttaaactattatgtggtgcttcattatattgatgtaccaatatttaatctatttcctcttgatgaacgttttaattttcctgactttctgctattagaaaaaatatgaataggtatggtgtatatgttattcatttatatgtaaatgaatttatataaaatataaatttaaattaatttatayaatttttttaaaaattttactttaagttctgggatacacgtgcagaatgtgcaggtttgttacataggtatacatgtgccatggtggttttctgcacctatcaaaccatcatctagattttaagccccacaggcattaggtatttgttctaatgctttccctccccttgccttccacccccggacagaccctggtgtgtgatgttcccctccctgtgtctgacttcaaactatactacaaggctacagtaaccaaaacagcatggtactggtgccaaaacagatatgtagaccaatggaacagaacagagccctcagaaataacaccacacatctacaaccacc

SEQ ID NO: 519402 - DNA, 533 bp, Homo sapiens
ctacagcatgttagctcaaggcatttactaccatttgctttgcatttcagtggtgtatgttcatgtcattcatcttactagagagcaaacctcttgagagcaagatctgaggctaattagcttttgtctctctatcttataatattagtgaatggtggggcttttaattaygttgcttggctaagtgaatgctaatggtatggaaagacttctctagtggtggggtctaaagaaattgaaacactttgaacccatatatgtggccatttgcaggctaaaagagaatgcatatttaacaaagacttgcaatttgcaagctcctgattgaatatgctagagtcaggctggaatttggtgtcttattgcaacaaaaagtctgttttgtagctgtgcccaccctgcaaaaaactgatattaagcaaggcaatattttacacatattatcttgctaaattctcatcacagctttttgctgggtgggcactattattattcttactttatagatgagcagtgacaattatataagtaat

SEQ ID NO: 519403 - DNA, 533 bp, Homo sapiens
ctacagcatgttagctcaaggcatttactaccatttgctttgcatttcagtggtgtatgttcatgtcattcatcttactagagagcaaacctcttgagagcaagatctgaggctaattagcttttgtctctctatcttataatattagtgaatggtggggcttttaattatgttgcttggctaagtgaatgctaatggtatggaaagacttctctagtggtggggtctaaagaaattgaaacactttgaacccatatatgtggccatttgcaggctaaaagagaatgcatatttaacaaagacttgcaatttgcaagctcctgattgaatatgctagagtcaggctggaatttggtgtcttattgcaacaaaaagtctgttttgtagctgtgcccaccctgcaaaaaactgatattaagcaaggcaatattttacacatattatcttgctwaattctcatcacagctttttgctgggtgggcactattattattcttactttatagatgagcagtgacaattatataagtaat

SEQ ID NO: 519404 - DNA, 572 bp, Homo sapiens
ctgcccctccctcagaaccgccctctgcttaagggtgtccactctctcctgtcctctctgcatgccgcccctcagagcagcgggatctcaaagttatatttcatgggcttggactccaaatggggggaactcggggacactagctccccccggcctcctttcgtgaccctgcccttgacttcctcaccttctctgtctttcctgagcccctctcccagcatgtgactgataaggaaattgagtcacacagcccctgaaagcgccagactagaacctgagcctctgattcctctcacttccctcacctaccctgccacttcctactggatagaagtagacagctcttgactgtcctcttttctccccactggctggtccttcttaccccrgcccgtttgaaagagctcacccccgacacaaggacccgcacacagatacctcccagctccctctcaacccaccctttccagggttggagaacttgaggcataaacttgcttccatgaggaatctccacccagaaatgggtctttctggcccccagcccagctcccacattagaacaatgacaa

SEQ ID NO: 519405 - DNA, 535 bp, Homo sapiens
agatcctctctatgtgttccaaagagaccctctggttttcaaattaagctcttacttgctgatcaaacaatctcaacttcttattatttatttttttaagcaagacttgggcttagctatagaktcccaatttcactgttttcatagtggctattttccccatattttttcaaataacatatttattgtaccagataatgaattgctttctaatggcatgccattccacttcaacaccaacaaaacctttaataaatgcactgctactttttgtaaagtcctgatttgtgatgggatcctcattgtcagcagagggtaggtgctacagctccaactcttatcccaggatcagctttctcagatcatttccagcgccagttgtggatttcttcagaagtagactgttacatagacattagcatgcagaaagattattaggtagtatttctgggatgaactacactcatggtaactgagaaagcaggactgggtaaaaggaaatgtgaatttatgaagtaatctcattggaggtctc

SEQ ID NO: 519406 - DNA, 535 bp, Homo sapiens
agatcctctctatgtgttccaaagagaccctctggttttcaaattaagctcttacttgctgatcaaacaatctcaacttcttattatttatttttttaagcaagacttgggcttagctatagattcccaatttcactgttttcatagtggctattttccccatattttttcaaataacatatttatkgtaccagataatgaattgctttctaatggcatgccattccacttcaacaccaacaaaacctttaataaatgcactgctactttttgtaaagtcctgatttgtgatgggatcctcattgtcagcagagggtaggtgctacagctccaactcttatcccaggatcagctttctcagatcatttccagcgccagttgtggatttcttcagaagtagactgttacatagacattagcatgcagaaagattattaggtagtatttctgggatgaactacactcatggtaactgagaaagcaggactgggtaaaaggaaatgtgaatttatgaagtaatctcattggaggtctc

SEQ ID NO: 519407 - DNA, 405 bp, Homo sapiens
ttgcatgcctgtactcctagctactcaggaggttgagataagagaatcacttgaacytgggaggcagaggctgcagtgagccgagatcatgccactgcactccagcctgggtgacagagcaagattctatctcaaaaaaaaaaaaaaaaaaagataaacagaactgtggatgggggcccaggccccctacaaagggtagaggagccttatatatgtatgtaaaataaaaaatcacttaaagatataatagacataaatagctcatatatttcgggaaacaggatttcattcttacattttgttttaaaagaaataccttaagtttttgttgaaggtgttttacttccacctgcagagtcttggtagctgtctgagctgctaaagtcttccgagtctcaatagcca

SEQ ID NO: 519408 - DNA, 563 bp, Homo sapiens
gtgccttgactccgaaggacttggaagaggagggagakggagtggaggccggagtggagaggatagactggccctgaggcctctgcgttcccagcccggggcctggacttcctgtgtttggctgctgtttggagcttggtgatgattaatgaggaaatacgcactctgaagagcttatacctccctggactgtgaggccacatctgcatttataacacagtctgtgatgtgacagagccatttcttgaggaactttggttctggtgaggcagcatcaggactctctagaggccagacaagagtgtgtttctacatttgtatggagagaggacaagagccacgaagaggcctttaggaaatgaagcacccttgctgaagccctccaaagggtttacctgtcatctggggtaagacaactccagtttgtggctcccctgtgacaggtgtttgtcaagtgagtttctccatagggcccctcaagccccgcacaggccgttatctgggtttcccaggaaagttctggacatttgcacacatgatcttcgctttccaacttccacaga

SEQ ID NO: 519409 - DNA, 563 bp, Homo sapiens
gtgccttgactccgaaggacttggaagaggagggagagggagtggaggccggagtggagaggatasactggccctgaggcctctgcgttcccagcccggggcctggacttcctgtgtttggctgctgtttggagcttggtgatgattaatgaggaaatacgcactctgaagagcttatacctccctggactgtgaggccacatctgcatttataacacagtctgtgatgtgacagagccatttcttgaggaactttggttctggtgaggcagcatcaggactctctagaggccagacaagagtgtgtttctacatttgtatggagagaggacaagagccacgaagaggcctttaggaaatgaagcacccttgctgaagccctccaaagggtttacctgtcatctggggtaagacaactccagtttgtggctcccctgtgacaggtgtttgtcaagtgagtttctccatagggcccctcaagccccgcacaggccgttatctgggtttcccaggaaagttctggacatttgcacacatgatcttcgctttccaacttccacaga

SEQ ID NO: 519410 - DNA, 563 bp, Homo sapiens
gtgccttgactccgaaggacttggaagaggagggagagggagtggaggccggagtggagaggatagactggccctgaggcctctgcgttcccagcccggggcctggacttcctgtgtttggctgctgtttggagcttgstgatgattaatgaggaaatacgcactctgaagagcttatacctccctggactgtgaggccacatctgcatttataacacagtctgtgatgtgacagagccatttcttgaggaactttggttctggtgaggcagcatcaggactctctagaggccagacaagagtgtgtttctacatttgtatggagagaggacaagagccacgaagaggcctttaggaaatgaagcacccttgctgaagccctccaaagggtttacctgtcatctggggtaagacaactccagtttgtggctcccctgtgacaggtgtttgtcaagtgagtttctccatagggcccctcaagccccgcacaggccgttatctgggtttcccaggaaagttctggacatttgcacacatgatcttcgctttccaacttccacaga

SEQ ID NO: 519411 - DNA, 634 bp, Homo sapiens
tggaagaggaccagggcgggagctgagcagtgccttgactccgaaggacttggaagaggagggagagggagtggaggccggagtggagaggatagactggccctgaggcctctgcgttcccagcccggggcctggacttcctgtgtttggctgctgtttggagcttggtgatgattaatgaggaaatacgcactctgaagagcttatacctccctggastgtgaggccacatctgcatttataacacagtctgtgatgtgacagagccatttcttgaggaactttggttctggtgaggcagcatcaggactctctagaggccagacaagagtgtgtttctacatttgtatggagagaggacaagagccacgaagaggcctttaggaaatgaagcacccttgctgaagccctccaaagggtttacctgtcatctggggtaagacaactccagtttgtggctcccctgtgacaggtgtttgtcaagtgagtttctccatagggcccctcaagccccgcacaggccgttatctgggtttcccaggaaagttctggacatttgcacacatgatcttcgctttccaacttccacagagttaaaaactacaagcgtgggcttctctgagaagttcagaat

SEQ ID NO: 519412 - DNA, 634 bp, Homo sapiens
tggaagaggaccagggcgggagctgagcagtgccttgactccgaaggacttggaagaggagggagagggagtggaggccggagtggagaggatagactggccctgaggcctctgcgttcccagcccggggcctggacttcctgtgtttggctgctgtttggagcttggtgatgattaatgaggaaatacgcactctgaagagcttatacctccctggactgtgaggccacatctgcatttataacacagtctgtgatgtgacagagccatttcttgaggaactttggttctggtgaggcagcatcaggactctctagaggccagacaagagtgtgtttctacatttgtatggagagaggacaagagccacgaagaggcctttaggaaatgaagcacccttgctgaagccctccaaagggtttacctgtcatctggggtaagacaactccagtttgtggctcccctgtgacaggtgtttgtcaagtgagtttctccatagggcccctcaagccccgcacaggccgttatctgggtttcccaggaaagtkctggacatttgcacacatgatcttcgctttccaacttccacagagttaaaaactacaagcgtgggcttctctgagaagttcagaat

SEQ ID NO: 519413 - DNA, 513 bp, Homo sapiens
gtatctcattttcttgctatgagacaatacagartgataatgcagtgagggcatctctaagacaacatcaccaggaagcagcagcagttgagtattgaaggccgatgagaggggaaggctgaacccactcctcctctgcaggatgaacaggacacctgccctcacaggctgctgggaacaccaaattccatgggaaggttttcagccaatcagtccttgctgaggggcctaaacacctgcgttttccacaaaaattggagctctattttcagcagccccattttttttgattttaccatggctgcctcccatgtgtattccagattgcatctttcagattgaaaaaaattccagagagcatggactgtttcctttgataatctgaccacagcttcttgcaggttcctgtgagtgaatatttattcattagtattttgagcaattgactatcttgacaaaaatcatggcccaaatcaaacatctctatctcttttatctccatttgtctggcat

SEQ ID NO: 519414 - DNA, 663 bp, Homo sapiens
gtcattattaataattgatgtgcaggacacaggtgaggttaatattaattcattataactttataaacagtatcactgtactgattttcatgtataatgaaagaaaactttctgttgcaagagtattagctaatgatatccacttcaagctcattcaagaacatgttcaatcatatgatgaactcattgctagcctctcttaataatctctcttaaaatgtcctacagatagaaaaaaaggagaaaatataccaaaatgtctaccattattatgtctctgagacagataagagattcctacaacctatatatactgcatttctaattacaagagatcaataaattttattttaaaaatgttttcttttttatttttaagatagtttagagatagttttaaaatcaatgtttctgctgtttctaatcttgattttactgagtatatgtatgtacgtgcctgtgtatgcrtgtacgtgtgtgtgtgtgtgtgtgttgagagggatttagggaacagttgaataatttaggaaaaaaagagatagagaaccccaaaaaatatatatcaccataattacaaatttagtttgcttcatttttgtattctgtaatatttgggaaacatctatggcttcctttctttactcagttataatttattcaaga

SEQ ID NO: 519415 - DNA, 612 bp, Homo sapiens
tttgcttgctttcttttttcttttgcaaaaaacaatacatacatatatgtgattatacatgtgttttatatatagattatagtgtgttaatgtgtgtatatttttatatctatatatgtataagtatacatatataaatattatatcaatgaaagcatcaaatcccatggaaagagcaataagatcctacaaaaattaagtcagtctcttgatagctaacaaaaaatcatggtatatgacttaacattgggcaagcagatgcccagacttaccactggagcagcaaatgtgtaggagccagtggcagctatgaaattcacagagggtgggaacatgaggaaatatatgttggaatgacatcaagaaaggatgaacccatggaggagcttaaagattggtaagtggagccataaagattggtaaatgacttaaaactcatgaattattctgagctaagagaaccaaaaatatatgtatatatatattttccatgrgatttcaacagcagttaacatggtattatctttgtactaattttgttaactgtgtgtctagaaaacttgtgcaacaatatagtaaacacaaaattagtgctgtaccatgccgtgtcaa

SEQ ID NO: 519416 - DNA, 491 bp, Homo sapiens
gttccaggaagctaagacagatggaatgtgtggacatagtactagacagaagaggaacacatagaggaaaaccttcagaaatcttcataggtgcatagggcacctttgaatctgttattgaatactgagctacacatgcatagagtagaaaatccataaagtctgacaaagaactctcagggagccataaactgaacaatgcccagagctcaaacaaagctgggagacatgcgaattccaatcagccaggatggggcattcaggtacaactggtcctatggtaaatactacattacactactaaaaataaggcttaaaaaatgatgaagttaatctgcaaacaaattcaaggctagttaaaacatttttycaacactttattgggaaaaaaacaccttaaatgacataaaatatgatactttacatatttatactattagatgatagtgtctgatatccaaagaaaaaattactagccataaaaaaatgaa

SEQ ID NO: 519417 - DNA, 571 bp, Homo sapiens
tccaatagagaagaaatttggggtcatgactgttgtcatgtcatgaaagttgtatcattgtttttgttttaatactttatcccagacctattgtatacctccactgcagcagagaaagtggggagtgtattctgctactcacttgattactttcctctattgattacatactacttccttagcaggtatattatctgaaaaaaaaattatcactaaattaactttaggacagcagtgttctagaaagaktaatgatatataatttacatttatgaaagaagcaagcatccaataaattagaaaatgcataccatcatccaagtacattgttaaatatcccaagtgctcaccttattgagtatttgacaaatggatttcacatttatatcagcactatttttatgtcatctgctgtgtttgcttaaatgtatgtgttttcactaacgatgttaagtgtacttaactccatttatactgtctaggagggatactcaggaaggatgatcatttgaaaacattgaataggccctgatcatgtgttacttataccgttgctgctgattcttagatt

SEQ ID NO: 519418 - DNA, 571 bp, Homo sapiens
tccaatagagaagaaatttggggtcatgactgttgtcatgtcatgaaagttgtatcattgtttttgttttaatactttatcccagacctattgtatacctccactgcagcagagaaagtggggagtgtattctgctactcacttgattactttcctctattgattacatactacttccttagcaggtatattatctgaaaaaaaaattatcactaaattaactttaggacagcagtgttctagaaagattaatgatatataatttacatttatgaaagaagcaagcatccaataaattagaaaatgcataccatcatccaagtacattgttaaatatcccaagtgctcaccttattgagtatttgacaaatggatttcacatttatatcagyactatttttatgtcatctgctgtgtttgcttaaatgtatgtgttttcactaacgatgttaagtgtacttaactccatttatactgtctaggagggatactcaggaaggatgatcatttgaaaacattgaataggccctgatcatgtgttacttataccgttgctgctgattcttagatt

SEQ ID NO: 519419 - DNA, 536 bp, Homo sapiens
gcatggtccatttcacttagcataatagggggactaagttcaagagatctattgcacaacatggtgaccatagcaaataataacatcttgtattttgaaaatcactaagggagtagattttaagtgttcttagcagaaaagaaaatacaatgaggtaatgccggtataatttagcttgattcagccatttcacaacttgtatacatttcaaaacattatgttgcacatgataaatatrtacaatttttatttgccaatttgaaaaacagagaagtccctcttcagatcctgtcctatgcagctgtcactcacttggctttgtaagcctgcagacagtgtcatttaaaatattttcctctgtaccataacgcttttccttttaatgatatataagaataatatttctctctaaatagttatttctttaactttgaaataattcagcatctcatgattttgatttccatttctccatatatacattttttggggctctgttctgggatttagggctaacctttgtcatggagacatct

SEQ ID NO: 519420 - DNA, 536 bp, Homo sapiens
gcatggtccatttcacttagcataatagggggactaagttcaagagatctattgcacaacatggtgaccatagcaaataataacatcttgtattttgaaaatcactaagggagtagattttaagtgttcttagcagaaaagaaaatacaatgaggtaatgccggtataatttagcttgattcagccatttcacaacttgtatacatttcaaaacattatgttgcacatgataaatatgtacaatttttatttgccaatttgaaaaacagagaagtccctcttcagawcctgtcctatgcagctgtcactcacttggctttgtaagcctgcagacagtgtcatttaaaatattttcctctgtaccataacgcttttccttttaatgatatataagaataatatttctctctaaatagttatttctttaactttgaaataattcagcatctcatgattttgatttccatttctccatatatacattttttggggctctgttctgggatttagggctaacctttgtcatggagacatct

SEQ ID NO: 519421 - DNA, 536 bp, Homo sapiens
gcatggtccatttcacttagcataatagggggactaagttcaagagatctattgcacaacatggtgaccatagcaaataataacatcttgtattttgaaaatcactaagggagtagattttaagtgttcttagcagaaaagaaaatacaatgaggtaatgccggtataatttagcttgattcagccatttcacaacttgtatacatttcaaaacattatgttgcacatgataaatatgtacaatttttatttgccaatttgaaaaacagagaagtccctcttcagatcctgtcctatgcagctgtcactcacttggctttgtaagcctgcagacagtgtcatttaaaatattttcctctgtaccataacrcttttccttttaatgatatataagaataatatttctctctaaatagttatttctttaactttgaaataattcagcatctcatgattttgatttccatttctccatatatacattttttggggctctgttctgggatttagggctaacctttgtcatggagacatct

SEQ ID NO: 519422 - DNA, 509 bp, Homo sapiens
gcggcctggattgtcagcctcttgaaagtcagrgagagagtgcggaagggatgtcccagagatgcgaggagtgtggcaaaggcatcagagccacttcagatatcgctctgcattgggaaattaatacacagaaaattagcagatgtcaagaatgccaaaaaaagttatctgactgcttgcaggggaaacatacaaataactgccatggagagaagccgtacgaatgtgcagagtgtgggaaagtcttcaggctctgctcgcagcttaatcagcatcagagaatccacacgggagagaaaccctttaaatgcactgagtgtggaaaagccttccgcctgagctcaaaacttattcagcatcaaagaatccacactggggagaagccctacagatgtgaggaatgtggaaaagcttttggtcagagctcaagcctcatccaccatcagagaatccacacaggagagaggccctatggttgtcgtgagtgtgggaaagccttcagccagcag

SEQ ID NO: 519423 - DNA, 610 bp, Homo sapiens
aaatgtatttatagtccttgytctttctaaatcgtgtacctcacaattttgagatttttccaaccagagacaattaattagttcagtggaattatcatggtgcaccagtttcaaaacttaaagagagttttagaatatctgtgtatgatttgctaggaggtgacttgaacctcatctacttcaccttccttcagtttccattcaggaggagtacaaagattaatagggatttctttgtatgtttgtcccacctccccctgggagagtagctggagcgcttctctcccattctcatattgccttagttagttcagactgccataacaaaaatgtcataggctgagtggcttaggcaacagaaatttatttctcacagttttggaggctggaagtgaagacccaggtgcaggctgaatcagttcttggtatgtcctcacatggtggagagagaggaagcaagcgctctcctgtctcttaaaagggcaccagtcccatcatgagggctccacctaattacctcctgaagtctccacctcctcataccatcatcttagggattacagtttcagcatatgaatttaggcggggcgggggacacacgttcagtcca

SEQ ID NO: 519424 - DNA, 610 bp, Homo sapiens
aaatgtatttatagtccttgttctttctaaatcgtgtacctcacaattttgagatttttccaaccagagacaattaattagttcagtggaattatcatggtgcaccagtttcaaaacttaaagagagttttagaatatctgtgtatgatttgctaggaggtgacttgaacctcatctacttcaccttccttcagtttccattcaggaggagtacaaagattaatagggatttctttgtatgtttgtcccacctycccctgggagagtagctggagcgcttctctcccattctcatattgccttagttagttcagactgccataacaaaaatgtcataggctgagtggcttaggcaacagaaatttatttctcacagttttggaggctggaagtgaagacccaggtgcaggctgaatcagttcttggtatgtcctcacatggtggagagagaggaagcaagcgctctcctgtctcttaaaagggcaccagtcccatcatgagggctccacctaattacctcctgaagtctccacctcctcataccatcatcttagggattacagtttcagcatatgaatttaggcggggcgggggacacacgttcagtcca

SEQ ID NO: 519425 - DNA, 610 bp, Homo sapiens
aaatgtatttatagtccttgttctttctaaatcgtgtacctcacaattttgagatttttccaaccagagacaattaattagttcagtggaattatcatggtgcaccagtttcaaaacttaaagagagttttagaatatctgtgtatgatttgctaggaggtgacttgaacctcatctacttcaccttccttcagtttccattcaggaggagtacaaagattaatagggatttctttgtatgtttgtcccacctccccctgggagagtagctggagcgcttctctcccattcycatattgccttagttagttcagactgccataacaaaaatgtcataggctgagtggcttaggcaacagaaatttatttctcacagttttggaggctggaagtgaagacccaggtgcaggctgaatcagttcttggtatgtcctcacatggtggagagagaggaagcaagcgctctcctgtctcttaaaagggcaccagtcccatcatgagggctccacctaattacctcctgaagtctccacctcctcataccatcatcttagggattacagtttcagcatatgaatttaggcggggcgggggacacacgttcagtcca

SEQ ID NO: 519426 - DNA, 549 bp, Homo sapiens
atattttctttgatgtccaattttaaaatttttcatgaagcccaatttgtttatttcttcttttatggcctttgcctttggtataacagccaccaaaagattgttttcaaatccaatgttgtgaagcttttgccctgtgttttttctaagatttatataattttaggttttacaaatggatctttgatataccttgagttaatttttatatatgatgttaggtaaagatccaacttcattattttacatgtgaatattgttttcccatgggctggactttttaatacctgaaaatgggatctttaagacaaatttatccatagacaggaaagagaaatctgagagggggtttgaaagaacaaggctgacttctacttggcctcctatgtccagcccattcaaagaattggttctataaccaaagcacaattatcargtaatgaaactggtttcctgtgtggtatataaaccaaccctgaaggaaatactccaagaaaaaaacagttttaagaaactccattagcaagacatttaaaaataaagaaagag

SEQ ID NO: 519427 - DNA, 546 bp, Homo sapiens
atttattttgaattttatagtatgttagaggttaagcattaatttagcattgcttttattacaagaactgaatgcgcataatgcataagccagtaacatgactttggttttttttgttattttttttattttttttatttttttttttgaggcagagtctcgctcttttcgcccrggctggaggtcggtcttggctcactgtaagctccgcctcctaggttcacaccattcacctgcctcggcctcccgagtagctgggactacaggcgctggccaccatgcctgggtaatttttttatatttttagtagagacggggtttcactgtgttagccaggatggtcttgatctcctgacctcttgatccgcccgcctcggcctcccaaagtgctgggattataggcgtgagccactgcgctcggccgacttttaaaactaacaattataaagtctttggattcagcttctgttcagtgtttaacttatgaagctcttgtctatgtagctttctttacaaggtccaagtttattcttttctggaagatta

SEQ ID NO: 519428 - DNA, 603 bp, Homo sapiens
agcagaatttgagatttatttgcttttttatgcttaaatatttcccagtgtgaagctttaaagttatttgaaatatttgtgttaccaatttggcatacaattaatttttttttctatttatattactgggatttactctacattttttgagacagggtttcactctgtcacccaggctagagtgcagtggcacagtcatgactcactgcagccttgacttcttgggatcaagcaaatcctctcatatcagccttctgagtagccaggactacaggtgcgcaccaccatgcccgggtaatttttttgtgaagrtgaggtttcgctgtgttgcccaggctcctctcaaaactcctgggctcaatcgatcctcctgccttggcctcccaaagtgctgagattttaggcatgagccaccatgcctggcctacatttttaatttgttttattttgaatgtaaaacgtttatatggttcaaacattaaaactatattttaaaaaatatatactccaaatcttgatctcatcttctccttataccctattcatagctacttcctataggtaaccattttcattagtttctggatttttttttccctgtgt

SEQ ID NO: 519429 - DNA, 654 bp, Homo sapiens
cgactaaggacagcccccaaatcccgagcctttttctgaactgacaattgcctccccagtgaacactctgagcttgtcaatcttaagtggccagacattaacattcccattcagtgcaggtttgagatgctaatttaggagcttgagatgctaaagagctgggagtgccactgctgctttattctggggtctaggatccttgtgttggctgagataatctgctaatgtgggtgcagcagacatcccgcggtttgtggaatcgataaaggatggggatcaatggtgtttgtgcactgtgcggtctgtgcccaattgcctgccttgtgctgtggaatctgtacayctggccaacatgtgcttgtgtgagcctgacagtgcattttccagagcctcacctcggctctgccctggaggctctgtgctgctggaatcagactcaaggacctcatcagaggaccatggccccgtatcacctgggtcaggcactgaagctgggacaggagagcagagacttccaaaatgagggatccctgtgttctgaggtgatcatgactgggacccaaggactcaagcgcatgctccagagggaatcgtttcccacaaggcctttggcaggaacagggatcctgggagcctgccaagcagagcgcacag

SEQ ID NO: 519430 - DNA, 560 bp, Homo sapiens
tcacatccatttggttttctctagagctgtagttctcaaccttttgtgtggtagagaaacacctagagaacatgtttaaaaatatcctgggttccacccttgagagataataaggtccaaggggaacccaaatatctgtgtttcaggtcagcttattggctcatcctattataccaactcctcagaaggccaaggtgggtggattccttgatctcaggcgttcaagaccagcctgggcaatatcrtgagactccatctcttaaaaaaaaaaaaaaaaaggattagccaagtgtggtggcatgaacctgtggtcccagctacttaagaggctgaggcagacagattgcttgagcctgggaagtcgaagctgcagtgagccatgatcatgccactgcactccagcctgggtgacagagcaagaccctgtctcaaaaaaataaaaatgaaaaaaatctgtgttcccaagttccaagtgatgctgatgctgctggttgcctttaagcatctcacaaagaacgaactcataaatgctaatacagtatatgtctatggatactgaa

SEQ ID NO: 519431 - DNA, 560 bp, Homo sapiens
tcacatccatttggttttctctagagctgtagttctcaaccttttgtgtggtagagaaacacctagagaacatgtttaaaaatatcctgggttccacccttgagagataataaggtccaaggggaacccaaatatctgtgtttcaggtcagcttattggctcatcctattataccaactcctcagaaggccaaggtgggtggattccttgatctcaggcgttcaagaccagcctgggcaatatcgtgagactccatctcttaaaaaaaaaaaaaaaaaggattagccaagtgtggtggcatgaacctgtggtcccagctacttaagaggctgaggcagacagattgcttgagcctgggaagtcgaagctgcagtgagccatgatcatgccactgcactccagcctgggtgacagagcaagaccctgtctcaaaaaaataaaaatgaaaaaartctgtgttcccaagttccaagtgatgctgatgctgctggttgcctttaagcatctcacaaagaacgaactcataaatgctaatacagtatatgtctatggatactgaa

SEQ ID NO: 519432 - DNA, 619 bp, Homo sapiens
gctgggacatggggaagagattcaaagtcaggcaggtaacagggtggaggaagatgaattcagggaggttgtctggagccrgagtgtagaggagacaggattctatctgatcagggcagcttccagaaaattctgtcataagctagtgatatggtttgactgtatcctcacccaaatctcatcttgaattgtggctcccataattcccacgtgtcgtgggagggacctggtgggaggtaattgaatcatgggggcgggtttttcccatgctgttctcgtgatagtgaataagtctcacgatatctgatggttctataaaggggagttcccctgcacaagccctcttgcctgctgccgtgtaagacatgttttcttccccttctgccatgactgcaagtttgctgaggcctccccagcccggcagaactgagtcaattaaacttctttcctttataaattatccagtcttgggtatgtctttatcagcagcatgagaacagactaatacagctagtttcagggctggaaacattcctttgtcttcccagaatttggcagtggtgaaaatctccctgggaagcattctactggaaaggagaccttcacccctttgccaaga

SEQ ID NO: 519433 - DNA, 577 bp, Homo sapiens
gctgggacatggggaagagattcaaagtcaggcaggtaacagggtggaggaagatgaattcagggaggttgtctggagccagagtgtagaggagacaggattctatctgatcagggcagcttccagaaaattctgtcataagctagtgatatggtttgactgtatcctcacccaaatctcatcttgaattgtggctcccataattcccacrtgtcgtgggagggacctggtgggaggtaattgaatcatgggggcgggtttttcccatgctgttctcgtgatagtgaataagtctcacgatatctgatggttctataaaggggagttcccctgcacaagccctcttgcctgctgccgtgtaagacatgttttcttccccttctgccatgactgcaagtttgctgaggcctccccagcccggcagaactgagtcaattaaacttctttcctttataaattatccagtcttgggtatgtctttatcagcagcatgagaacagactaatacagctagtttcagggctggaaacattcctttgtcttcccagaatttggcagtggtgaaaatctccctggg

SEQ ID NO: 519434 - DNA, 619 bp, Homo sapiens
gctgggacatggggaagagattcaaagtcaggcaggtaacagggtggaggaagatgaattcagggaggttgtctggagccagagtgtagaggagacaggattctatctgatcagggcagcttccagaaaattctgtcataagctagtgatatggtttgactgtatcctcacccaaatctcatcttgaattgtggctcccataattcccacgtgtcgtgggagggacctggtgggaggtaattgaatcatgggggcgggtttttcccatgctgttctcgtgatagtgaataagtctcacgawatctgatggttctataaaggggagttcccctgcacaagccctcttgcctgctgccgtgtaagacatgttttcttccccttctgccatgactgcaagtttgctgaggcctccccagcccggcagaactgagtcaattaaacttctttcctttataaattatccagtcttgggtatgtctttatcagcagcatgagaacagactaatacagctagtttcagggctggaaacattcctttgtcttcccagaatttggcagtggtgaaaatctccctgggaagcattctactggaaaggagaccttcacccctttgccaaga

SEQ ID NO: 519435 - DNA, 598 bp, Homo sapiens
agaaggtacttaaaataaaaggaaagaaaaggaagagatcataagagtaaatgctgttattttgcagtgaatgtgttatttcctcaaagccctcgctcctcttcctttccttgggagactggagcatgaaatatactcatgttctcaggctgtggttgctacaaattactataacaacaataatcattcatggttattgagcactgtcaaaaaacaatgtgaacacttttatggttctgcatggtcatgactttctgagcaaaaattattggcaacatggctgaaaggataagtgaatggtaaaaaccgtgaaagctaaaacagtgaaatatcctggggagatgtacaggtttcctctattttggtgccacgtgttcatgtttcaaagaattgtcartaccaaaggaccttctcgcgtttgtctcagagaagacttgtttacatcacagaccaaaaatttttctgtttttcttaggaagcaggaacggtagctgtttagctcctacataagctctgaggttcgtaattgcaagccttctttctctcctgtgtacaaatcttgctttgcatgcacaggaaatatctgccctcatcattt

SEQ ID NO: 519436 - DNA, 503 bp, Homo sapiens
tctactcaacctttagaatatagagttagaactatgtatctggacatacagaaactgaagcagattgatgtatatatgtgtgtgtgtatatatatatatataaaacatatagctgtttgcaaccaaagaacatatgaacrataaatttggatactggctacgtggctgtgataattaatgccaaactagggaacaacttccactaatggaaaatataaacacaggttttaattggactaaagggactcctagtcccattaataacggattttgaaacacacaaaatacatgtcctctagcaaccactttcaatacaacagtggaccaaaaagaattttttacttcaaccttaattcctatatgagcactgcatttgccattaaattactgactttacttcttgtttatgtcattaacttaggcttagggactgcataaatttttatttctcactttggcgttggcatccaagtggatagatgataaatttagagacagccatt

SEQ ID NO: 519437 - DNA, 483 bp, Homo sapiens
tgaacatagaaaaaaaactagttattattaaattcagtgtgaagatttcaataaatgtgggaattgcagttatataacagtgttcatatcttataaacctttacaatcaagaaatgatatagcccaaaaaagtgagggarggaagggagaggaaaagtagaagtataaaactgcaagtttatccatttttaacagctaaaattaaaagcatatcatttaaagttagaaattaagtgacagaggtgaaagtatatgtgacaataaacatgtatttaattggcaatataaatgaactaaaatttgattatttaaatggtgtaagtggaaggaagatagatagattaatatataataggaagtcacgcaaaagaattgtaaaggtttacagtcctaagaagtcaaccaaaaaagtatttaaaattttaaagaacgtatttagactacagggagtggaaaagggtaagacagagaaccatgtatttt

SEQ ID NO: 519438 - DNA, 483 bp, Homo sapiens
tgaacatagaaaaaaaactagttattattaaattcagtgtgaagatttcaataaatgtgggaattgcagttatataacagtgttcatatcttataaacctttacaatcaagaaatgatatagcccaaaaaagtgagggagggaagggagaggaaaagtagaagtataaaactgcaagtttatccatttttaacagctaaaattaaaagcatatcatttaaagttagaaattaagtgacagaggtgaaagtatatgtgacaataaacatgtatttaattggcaatataaatgaactaaaatttgattatttaaatggtgtaagtggaaggaagatagatagattaatatataataggaagtcacgcaaaagaattgtaaaggtttacagtcctaagaagtcaaccaaaaaagtatttaaaattttaaagaacgtatttasactacagggagtggaaaagggtaagacagagaaccatgtatttt

SEQ ID NO: 519439 - DNA, 634 bp, Homo sapiens
ttaagaattctgggtgatatgcagcactcccaggatgccccgatgaggccccttgaaggctggtaaacgggcgtgctttcagccayagcacatttacattttcaaccatgaagaaggaacaagatcattgcaataaatctgtccatttggaaaaggaagaatgaggaacacacattggtcaccgttccatagtaattatcaaaacctactaagcaggagtagccaggactcctttccttggcaatacaggaagttccttgattgaccaacctggtagcctctgattctttctcctgaatgttctccctcgtgccttgccctctgctgttcctggatctgcctttgaagtttcacatttgacagttttcctcaacaaatgtatctgagacagacacgggggaggttgtccttcttggagacctcttggattttgaaatatttcagcacagggattattttaaagttttaacaatgagattattgcaaaccaagttggggatttctttgggatgttaatttcttcagacacttagcaggcttgatttgtttccattccattccatgtacaagttaccatagccaaaagtcttgcccagacatggttttcaaggctgcagattctcagtttttattt

SEQ ID NO: 519440 - DNA, 535 bp, Homo sapiens
ggtacaaaatactttacagatattgtgtcatttaatagtactgttattcctatctgatagataagtaaactggaccttgagagtgtaaataatttgttctaagttgcatagttagtaggtggkaaaattaggatttgaaccaaagaaacctacatgcagtgccataactcttaacctgtatactacattatctcccaatactgaaaacatgcaggaatgaatgactgaatgtcccatacttgataagagacaatcattctctgagttaattgtgcatcaagaataaaaaactaattaggagtacaaagatgcagggcactgcccattcttataaacaatttgttttggtaacagtaactaatttttacttatttttgtacttgggatggaatgcgctatcaattttttaaacattatttttaaacctatctacatgataaaaagaaacttaagatgacaactatttcagcaaagaatgataagtgaagcaccagatgctacatattttcaactgcaaaaatatcatgggaagcca

SEQ ID NO: 519441 - DNA, 595 bp, Homo sapiens
agaaaacactgccacagataccaaatgtcaacagactatataacgtgtttgtgatgtgctacagttgacccttgaacaacgctggcttgcaccgtgtgggtccacttataagcaaattttcttccatttctgccaatcctgagacagcaacaccaactccttagcctacttaatgtgaagatgatgaggataaaacctttattatgatctacttccacttagcaaagagtgaatatattttctcttccttatagttttcttcagacatctttcctctagctaactttatcwtaagaatacagtatataatacctataacatataaaatacatgtcaatcaactgttttaatgttattggtgaggcttctggtcaacagtaggctatcagtagttaagttttgagggagtcaaaagttatatgcaaatgttttaactgcacagtggctgggactcctaatccccacattgtccaagggtcaactgtattcacaagtttattccagtgtgaactctcgtagaaagagagagagagaggcaggctcgtgctctgttgtccaggctggagtgcagtaattcaatcacagctccccataa

SEQ ID NO: 519442 - DNA, 683 bp, Homo sapiens
ctggtgataaactcagttggttttagtggtctcatagggtgagaggaaaagaagctaaagtctgggcttacccaaaacgctgaaatttaataaggcactccaatattaagcaaggataccaaaataatatgctaccaagataaagatgaaataaaagtaaacacccctacccccaaggacctgaaaataagtttttttctaacagaataagcagagaaaagaaaaaggaagcagtcctcagagattataaatctgaagccacaagccaacctcttgggcacttatgtctcaaacttacatcacatgggtgatgaagaaaacaaaataaatttttaaaaaaagaaataatgagaaaaacttaaattgagaatttggtttttagctttycagagtggttgtgtcttgatatacctgtcagaaacagatacacatcttctctagaggatacatttttaccttgagactcaaactcctcattaatagaatttcaaagccaatgaacaacacagagctaaactaagtacacccacacatgcacacaccccaccaccaccactaccatgagcataaacctgcagaaacaacagacacccacataaatctataaaaatactgatataagcttatcagacacagatgttttcaatgtttaaagaaattaaaaacaagcttgaaaatatctg

SEQ ID NO: 519443 - DNA, 683 bp, Homo sapiens
ctggtgataaactcagttggttttagtggtctcatagggtgagaggaaaagaagctaaagtctgggcttacccaaaacgctgaaatttaataaggcactccaatattaagcaaggataccaaaataatatgctaccaagataaagatgaaataaaagtaaacacccctacccccaaggacctgaaaataagtttttttctaacagaataagcagagaaaagaaaaaggaagcagtcctcagagattataaatctgaagccacaagccaacctcttgggcacttatgtctcaaacttacatcacatgggtgatgaagaaaacaaaataaatttttaaaaaaagaaataatgagaaaaacttaaattgagaatttggtttttagctttccagagtggtwgtgtcttgatatacctgtcagaaacagatacacatcttctctagaggatacatttttaccttgagactcaaactcctcattaatagaatttcaaagccaatgaacaacacagagctaaactaagtacacccacacatgcacacaccccaccaccaccactaccatgagcataaacctgcagaaacaacagacacccacataaatctataaaaatactgatataagcttatcagacacagatgttttcaatgtttaaagaaattaaaaacaagcttgaaaatatctg

SEQ ID NO: 519444 - DNA, 683 bp, Homo sapiens
ctggtgataaactcagttggttttagtggtctcatagggtgagaggaaaagaagctaaagtctgggcttacccaaaacgctgaaatttaataaggcactccaatattaagcaaggataccaaaataatatgctaccaagataaagatgaaataaaagtaaacacccctacccccaaggacctgaaaataagtttttttctaacagaataagcagagaaaagaaaaaggaagcagtcctcagagattataaatctgaagccacaagccaacctcttgggcacttatgtctcaaacttacatcacatgggtgatgaagaaaacaaaataaatttttaaaaaaagaaataatgagaaaaacttaaattgagaatttggtttttagctttccagagtggttgtgtcttgatatacctgtcagaaacagatacacatcttctctagaggatacatttttaccttgagactcraactcctcattaatagaatttcaaagccaatgaacaacacagagctaaactaagtacacccacacatgcacacaccccaccaccaccactaccatgagcataaacctgcagaaacaacagacacccacataaatctataaaaatactgatataagcttatcagacacagatgttttcaatgtttaaagaaattaaaaacaagcttgaaaatatctg

SEQ ID NO: 519445 - DNA, 683 bp, Homo sapiens
ctggtgataaactcagttggttttagtggtctcatagggtgagaggaaaagaagctaaagtctgggcttacccaaaacgctgaaatttaataaggcactccaatattaagcaaggataccaaaataatatgctaccaagataaagatgaaataaaagtaaacacccctacccccaaggacctgaaaataagtttttttctaacagaataagcagagaaaagaaaaaggaagcagtcctcagagattataaatctgaagccacaagccaacctcttgggcacttatgtctcaaacttacatcacatgggtgatgaagaaaacaaaataaatttttaaaaaaagaaataatgagaaaaacttaaattgagaatttggtttttagctttccagagtggttgtgtcttgatatacctgtcagaaacagatacacatcttctctagaggatacatttttaccttgagactcaaactcctcattaatagaatttcaaagcyaatgaacaacacagagctaaactaagtacacccacacatgcacacaccccaccaccaccactaccatgagcataaacctgcagaaacaacagacacccacataaatctataaaaatactgatataagcttatcagacacagatgttttcaatgtttaaagaaattaaaaacaagcttgaaaatatctg

SEQ ID NO: 519446 - DNA, 598 bp, Homo sapiens
acttgtggtggcacagacagacatcagaaaagataatgagttcctgaggggaaacaaaaaacacagtaagcctctctgagaaattgcatgcacaggcccagataccccaaaaagtttcagaggattccagaatctctttatgggctacttagtgggagtcttatctaaacaaagccagtctgaagactgggagaagtgacagatcctaatacaaagccacaaggtgcatgaaaaaacaaggaaacatggctcaatcaaaggaataaactaaatctccagaaactggayctacaaagaggtatgtggacaacttgaaagagaattcaaaataattgtcataaagatgcccactgagctcaaagaaataacaaacgaacagaataaagtattaagaaagatacagaaaatataaaaaagaagttttggagctgaaaaagaaaataaactgcaaaactcactagagaagtttaatggcagacttgatattcagaagaaaacatcagcaaacttgaatatgagtcatgtgaaattatctgctagaggctcaaaatgaaaaaagaatgacaaagaataaagaaaacctaagggacatacaagg

SEQ ID NO: 519447 - DNA, 590 bp, Homo sapiens
gaagagttctgctgagtgcttggtggagttcaccctcgatgtgcagtgcaatgatgaccagatttgacatgtcacatcttgagacctcatctccaacagcccccaggtcattccagtgaaacaagatgatgaccctaatgactacgtggagcaggatgacattctcatcatcaagttgagaaagggccaggagctgagactttgagcctatacaaaaaagtgttttagcaaggagcatgccaagttgaaccttactgcaggggtggcttttgaatacaatccagacaatgccatgaggcatgcagygtaccccaaacccaaggagtggccaaagagtgagcacttggagctggatgaggatgagtcacaggtgccctgtgaccccatgggcaagccagaaaggttttactacaacatgaattcctaaggctctctgtgtccttaagccatgtgctcttagccctcactggattgaagaagaagctgagtgatttaaaaactcaattaagccacgagatccagagtgacatgctaactataaactagctgcagcttgctgcttcagcaagaatggggattcaagccagcag

SEQ ID NO: 519448 - DNA, 590 bp, Homo sapiens
gaagagttctgctgagtgcttggtggagttcaccctcgatgtgcagtgcaatgatgaccagatttgacatgtcacatcttgagacctcatctccaacagcccccaggtcattccagtgaaacaagatgatgaccctaatgactacgtggagcaggatgacattctcatcatcaagttgagaaagggccaggagctgagactttgagcctatacaaaaaagtgttttagcaaggagcatgccaagttgaaccttactgcaggggtggcttttgaatacaatccagacaatgccatgaggcatgcagtgtaccccaaacccaaggagtggccaaagagtgagcacttggagctggatgaggatgagtcacaggtgccctgtgaccccatgggcaagccagaaaggttttactacaacatgaattcctaaggctctctgtgtccttaarccatgtgctcttagccctcactggattgaagaagaagctgagtgatttaaaaactcaattaagccacgagatccagagtgacatgctaactataaactagctgcagcttgctgcttcagcaagaatggggattcaagccagcag

SEQ ID NO: 519449 - DNA, 547 bp, Homo sapiens
agctggatttggggggtctctcttgagactcttctagtttttggaawtctagtctactgttgcttgagcttcttggcaggtcatcagtaccaactagaagcgggtaatagattactagggatgccagcggcatttaagcaggacagttttttactggccctaactgctaatcgccagcagtgctccacagatcctaaaacatcccttttagcctgtttcctaatgcgtctgtaggggagccaaccggacttctctcctggttagttcagttctttactttaaacgctttctgtccaaaaggaataatttcagttgtaccttagatttctggtattaggattgaatgtcacagccttcattcaaagggcctataaacccttccagttctttccccaagtctgtcctactagcacttcaaattcacaggcatctttaatttgagaagtaaccttctgggaagagcatcaggccatggctgtgccctctcccctatgtagatacaatatttcactctctacccagcagttacaaaccccttcaccaccaa

SEQ ID NO: 519450 - DNA, 547 bp, Homo sapiens
agctggatttggggggtctctcttgagactcttctagtttttggaaatctagtctactgttgcttgagcttcttggcaggtcatcagtaccaactagaagcgggtaatagattactagggatgccagcggcatttaagcaggacagttttttactggccctaactgctaatcgccagcagtgctccacagatcctaaaacatcccttttagcctgtttcctaatgcgtctgtaggggagccaaccggacttctctcctggttagttcagttctttactttaaacgctttctgtccaaaaggaataatttcagttgtaccttagatttctggtattaggattgaatgtcacagccttcattcaaagggcctataaacccttccagttctttccccaagtctgtcctactagcacttcaaattcacaggcrtctttaatttgagaagtaaccttctgggaagagcatcaggccatggctgtgccctctcccctatgtagatacaatatttcactctctacccagcagttacaaaccccttcaccaccaa

SEQ ID NO: 519451 - DNA, 546 bp, Homo sapiens
ttttaaaaattataactaaattgtccatggttatactgatagtaagtagcagaggatttatagacaacacgtcttcctctagaatccctagttttatcactgcactgtactgtatgtagttcaggacccatgtgactgataatgtacttctccattcttcattatcattctttatctaaactcctacaggtctaaattcattctatgccagaaatgcaacagactgaaaatatcgtgtcccccagaattcatatgttgaaacataatcwttggtgtgatggtatttgcaggtggggcctttaagcagtgattaggtcatgagtacagagtcctcatgaatgggattaatatcctaataaaagagaccccagagagctccctcacttcttctgccatgtgacaacagtgataagttggccatctatgcacctgctggcatcttgatcttggacttcccagcttccagaagtacaagaaatacatttctgttgtttataagccacccagtctatgctattctgttatagcagcctgaatggaataaga

SEQ ID NO: 519452 - DNA, 546 bp, Homo sapiens
ttttaaaaattataactaaattgtccatggttatactgatagtaagtagcagaggatttatagacaacacgtcttcctctagaatccctagttttatcactgcactgtactgtatgtagttcaggacccatgtgactgataatgtacttctccattcttcattatcattctttatctaaactcctacaggtctaaattcattctatgccagaaatgcaacagactgaaaatatcgtgtcccccagaattcatatgttgaaacataatctttggtgtgatggtatttgcaggtggggcctttaagcagtgattaggtcatgagtacagagtcctcatgaatgggattaatatcytaataaaagagaccccagagagctccctcacttcttctgccatgtgacaacagtgataagttggccatctatgcacctgctggcatcttgatcttggacttcccagcttccagaagtacaagaaatacatttctgttgtttataagccacccagtctatgctattctgttatagcagcctgaatggaataaga

SEQ ID NO: 519453 - DNA, 575 bp, Homo sapiens
tctgtgaccaatgtttctttcatcatgataatatgtcttctttactaatttattactatatgtaagatccaagaaatttatgtaattttctattaaagttctgcatgctattgaaatgagttgttcatttctagatattcaataattttcatgattatttctctaatttttgcaaaaatctggtttttcacctatgaaagccaaattctggmttctgtagcaatctatcatttgacaatatattagcttaaatgatgaagtgctttcttaaatgccaagtaaacagtgtcataaaaaaaactgcccgtgtcaatctgcaatagaatcttatactaagagctaaggttagttaggaagaaatccgtcctcctaaatccaaaaaagttgaacataataaagaatagatcaattactagatatatgtcaagaacatgaatccatagattgaatatttggcaatgatgtcaaaaagtccaaatcaccaaacataagaaaagactaattaaaagtttcaaatgtaaatcatatataaatgaaggagtaaaaaattatttttgtataattgttcaactgcg

SEQ ID NO: 519454 - DNA, 575 bp, Homo sapiens
tctgtgaccaatgtttctttcatcatgataatatgtcttctttactaatttattactatatgtaagatccaagaaatttatgtaattttctattaaagttctgcatgctattgaaatgagttgttcatttctagatattcaataattttcatgattatttctctaatttttgcaaaaatctggtttttcacctatgaaagccaaattctggattctgtagcaatctatcatttgacaatatattagcttaaatgatgaagtgctttcttaaatgccaagtaaacagtgtcataaaaaaaactgcccgtgtcaatctgcaatagaatcttatactaagagctaaggttarttaggaagaaatccgtcctcctaaatccaaaaaagttgaacataataaagaatagatcaattactagatatatgtcaagaacatgaatccatagattgaatatttggcaatgatgtcaaaaagtccaaatcaccaaacataagaaaagactaattaaaagtttcaaatgtaaatcatatataaatgaaggagtaaaaaattatttttgtataattgttcaactgcg

SEQ ID NO: 519455 - DNA, 580 bp, Homo sapiens
ctgctttttgagtgttgattttgttgttttaacaattttttttgtgtggaggcttttagagttttctacatatataacctgcaaacagcgataatcttgcttcttctcttccaagttggttatcttttatttgtttttcttgttttaattgcaatacctagaactttcagtcatatgttgaatagaaatgatgagagtgggcatccttgtctttttcatgatcttagaggaaaagtttttttctttcatcaataagtattgtgttagctgtgagctttttatatattgccattattatgttgagatagtttccttcttttcctagtttgttgagagcttttatyaaggaaggatgttggattataagaatgctttttctgcattgatgaagttttttgttttttgtctttcattctgttaatgtggcatgttacattgattgattttcatatgtggaaccatccttgtatatctaggtataaatgcaacttggtcatgctgtatgtgctgggggtaggagggggagcttcagcatgtaaaatgccatgaattttcctactgactttgatgaggttctttt

SEQ ID NO: 519456 - DNA, 575 bp, Homo sapiens
aaatttaatctagaattctagattaaatctgttttttgttcttcctgacatgcagtggtactaatgaaaagtctgatgccaatctgattctcttttctctgtgttttttttctcttgcaacgtattttattattttcttttggtgttttgaattctgaaacttcagaattatctctctggctttcatttttcckataatccatggtgtccttcaatttaaatattcttcttatagacttgttttctattatttctgtaattatttatactcaccatttgtctcttttctttcttctggttctccagtaggtatatgttatactttcttatcaatggcatttaatttcctaacattttcaatatcttagtgttttaaattttctattctggaatatttccttgtctttatcatccaaattattaatcaaggactacccactttattaagtattccttttgattcttttaaaattaatgttagcactcatacttttcatttccaataattattttatgttcttttattgttcttttatatgtcagcctgtttttatgttagagatgcaatatgtgct

SEQ ID NO: 519457 - DNA, 528 bp, Homo sapiens
gccaggtagaatgagctgagctgggctgctcggaagaactgccctcaggatcatgagctaactattcattcttttaaacctctaggttttgaggcagttgtttcttttgcagcacaaaccaactcatacgccactaaaaacaaaatcagacatgtcctctcctttgcttaaaacggcagaatgctttccaccacatgctataagtaagaccctgaagatcaggatcttgctggcctctccaggcttagctcttattaatctgtacctcatggttttctctctggcaatgtggaaacacttaatttgcctgtgcaccgtgctcctccttcyagttcctttgctcttcctatacctcctttcacatagtgaccctctacataaccttcaaattgcagaccagatcccacctcctccagaaagcctgatgggttagatgcctttgcttatgcttttctaatactccattcatattcctacccctacacttaaggactttcttttaaaatatttatgttaataccctctaag

SEQ ID NO: 519458 - DNA, 611 bp, Homo sapiens
gtccccagaggcctgtccacctagtcatgagctgcatacatcactgttccccatcacttcctaagctcccaggacyctctctatgcagatgcaagagacactttacttaccatcattccgcgataacattaggtcagggatcagggactggcctggaggtcaggaactctagtccttgctcttttaggcgaaatgatcaggggctggtgacttgcctcaagttcctcatctgtgaagtgaggggccctctgttataatcgttcccaggctggggagcctcccttatgtgccaaccctgagctgggcactttccattcctcactgctaatccccagaacatagggtatcatggtgcccgttgcccaagtaaagacccgagattcaagcctggactttactaggtcacccatcccagaaaggtggagctggggtttaaggccagctctgcccaactccagagcccagccctttcctctgccctgggctgaccacgtggtttggaggggacttttcagccctggatggttctaggtgctggtaaggggatgatggaggggaaggagcctgggcctgggtgggtgtgggcactggggggaagaagggagggtgat

SEQ ID NO: 519459 - DNA, 351 bp, Homo sapiens
aaggagatggggcaggagagcctcacctgctgtgyggagcccctgggcccggacgctcaggtccctttatagaggaagcggcagtggcagcgtggcaggcagcgggcgggttctaggtcggggctggggcccggggaagcccccagggcttagaagatactgctgtttcagtcaaaggcaggaaaggctgaggcctaggagagaaccacaggctgggggttcaggcgactgagttctgggaaagggagtcgggtcaggggaatcgtgggctgggagggccagggagtggggtcaggcctagagttccaaagaagggacagtcaattcagagaggaggcggttgagcagctg

SEQ ID NO: 519460 - DNA, 547 bp, Homo sapiens
caactctgtcctcggggggtggggccccagccgagatcacagcgcgacaggagtgggggtggccgctggaggtgagtcttgcgtggggggccctgaaccgtgtgggggccggagtttgggggtgccgggcccatgcctgcaccagacagagagtatggggagccggtatttgggcgcggagctaggcggggtggactttgggacatagacggggaaccgggtcctggagccgggagtagtgccagcgccccggaaccacgccccctgttaccccgcccctcgcatttcgttttagacctctcccagtccttcgggactcggtctggtttatactaggtcgygctaggggcagcgtgaccagccagggcggagagaggatgcttaactccttaggctcgaactcctcccttcctacccacctctctcccttctcgttcgggtattcaggacttccattccccagcccctgcctctccagctttctccttctgtcccataacccctgcgggtcccgggctggacttccagtccctgcggtagcgagcag

SEQ ID NO: 519461 - DNA, 547 bp, Homo sapiens
caactctgtcctcggggggtggggccccagccgagatcacagcgcgacaggagtgggggtggccgctggaggtgagtcttgcgtggggggccctgaaccgtgtgggggccggagtttgggggtgccgggcccatgcctgcaccagacagagagtatggggagccggtatttgggcgcggagctaggcggggtggactttgggacatagacggggaaccgggtcctggagccgggagtagtgccagcgccccggaaccacgccccctgttaccccgcccctcgcatttcgttttagacctctcccagtccttcgggactcggtctggtttatactaggtcgtgctaggggcagcgtgaccagccagggcggagagaggatgcttaactccttaggctcgaactcctcccttcctacccacctctctcccttctcgttcgggtattcaggacttccattccccagcccctgcctctccagctttctccttctgtcccataacccctgcgggtcscgggctggacttccagtccctgcggtagcgagcag

SEQ ID NO: 519462 - DNA, 604 bp, Homo sapiens
agggaagagtgtgtgcctaggataaggaaggataaggagggggccccgggtgggagctgagcacaggcatctctatcctgactcagttccctccccttgcatgtgaggaagtctggggttgattaaatatgcctgttccctctcttctttgtgaggatgagacatggggtagtgggggtctggcttaatttagagatgggttgaggctttccattttctctgtccctccatcctcccactttgtgcttctatttttctccctctgtccatctctttccactttctctgacttgagtctcttcccttctctctcttcccccgttttccccatttgtccttcagctccactgcaatggattccycaccattgctcaagtctccagattcctgtctcctccctgtgcacacccatcctccttgcccccaccagcaacctcaggctcccctcaaccccacagtactatgggctcagggccatccctccactgctgctacaagacaggagaccaaacctttttgtaggttacatcacagaataatgctcctcctttccttcagtcccccacccctccccatacacagcttggtggctgctggaggccag

SEQ ID NO: 519463 - DNA, 620 bp, Homo sapiens
ggagtttaggtggtagaggatccagggggaatgttgaaatgggaggagtgggaatgacgtctggagacaaaccccagaatgagatgaggattgaaaaattatctttattatcttgagtgggagctggagctggaagtctccagcttctccctccaacaactcagctcccattgtacccatctggggacttagatgaagttacaggtcagttattggacagctcacaggcctctgtgatggggggagggaaaaagaaggacagaagggaagtccagggagaaaagcaaagttgatagtaatggggtgggggagaacgtgttctttcattccctgtgtcaaaggggagtctctaaggctcttttccctccacgtatgaccctctgccccctttatccagtgcaaactcagaaacctctcttttgagtagcccagaacccatcctgcctccctcaggtgacatcacagctcttagccacatccctctggtgacatcacacgagcctctttcaccctgtaacaccagaagactttgtgagtcctaatcctgttttatgagattttaacmccttaccttgattcctaggagtcaataagaaggctttggagtccaggcaggaagt

SEQ ID NO: 519464 - DNA, 437 bp, Homo sapiens
tgtctctagacacatactcccttggatgccagacagataatataatgtccatgtgktttttttttgtttttcatccgtgttatttttcctggatctataacctgagcttcattaagtttatttatttaattttttgagatggagtccctctctgtcacccaggctagagtgtagtgatgcgatctcggctcactgcaacctccgcctcccgaattcaagtgattctcttgcttcagcctccctagtagctgggattacaggcgaccaccatgcctggcttatttttttgtatttttggtaaaaaaggggttttaccatgttggccaggctggtctcgaactcctgacctaatgtgatctgcctgccttggcctcccaaagtgctgggattacaggtgtgagccaccgcgccaagccaaatttattgtctgtattttg

SEQ ID NO: 519465 - DNA, 522 bp, Homo sapiens
ttggctctgtgtcctcatccaaatctcatctcgagttgtaatccccacgtattaagggaagaacctggtaagaggtgattggatcatgagggcagtacctccctgctgttctcacgatagtgagggactgctcatgagatattatggttttaaaagtgtcagtttcccctccacgctctctctctcctgctgccttgtaaagagggtgcttgcttctccttcaccttccacaatsattgtaactttcctgaggcctccccagccatgtggaactgtgagtcaattaaacctcttttatttatgaattacccagtctcaggtagtatctttatagcaatgtgaatggcctaatacagatagtaacataataaggataacatttttgaaataccttctgaagtaatattctcctcctggtagccacatttatgccctgtggcccttcagctatactgcaatagagaagggaaggatgaatacccagaaatgaagaagaatgagcatggagaaactcctaccagc

SEQ ID NO: 519466 - DNA, 563 bp, Homo sapiens
ctgttggctactcagccagtgataatgacatcatttatttaagtaaaggaaacaacttccagtgttcatattcaatgtgataatattaccattttagagattttagtgtttggttgtgtttccacctttgatgaaagtgtaatgaaatactttgtatatgttaagtttcaatgagtaattattgatgagcagactgttgattgagacagatttaatgaaaggggagtcaatttataaactgtacttataattttgaaatattttcaaacttattatctcttttacttttctgagcarggtacatacacaaaatatttcactatgcaatttaagatagaccctaagctaaacatgtgaggaagaattaggtaacattcaggtagattcaaatttctagaagcaattatttaaaagtaaaatgaaaataaatataatctacctaataataatcacacttctcctggctacagaaactcattccttcttttgcaccatggccatacaatttttaaatgcgtagaaagagctggaggtaaataaattcaggtgtaaaatcatatata

SEQ ID NO: 519467 - DNA, 563 bp, Homo sapiens
tttgggaggttgaggcaggagaattgctttaacttgggaggtggagattgcactgagctgagatcacgccactgcactccagactgggcaacagagtgagacttcgtctccaaaaaagaaagagagaaagaaagaaagaaagagagagagagaaagaaagaaagaaagagagagagagaaagaaagaaagaargaaggaaggaaggaaggaaggaaggaaggaaagaaagaaagaaagaaagaaagaaagaaagaaagaaagaaagaaagaaagaaagagaaaagcaaagcaaagcaaagaaaagaaaagaaaagaaaagaaaagagaagaggtgcaggccacaaaatttgaggaaggcagagaagggggtggtcattttgtactggatgatcagaataagtcctgacaaaggagatggggtttgtctaggccctgaaaaatagggagagatgagatttaaatatcaggaaagaatgaagaaagggagttcccagcaatgagagcaggatgaactaaggtagagagagggtttgaaagttcaaaatgtattggaaactctgag

SEQ ID NO: 519468 - DNA, 578 bp, Homo sapiens
ccaggaatagcagatgcccaacaaatactaatttaaaaaaaaaagaaaaaagagtaggaacaaatgccacgcagattgtaaacataagcgaagaaagatgcccctttagtttttaatgaatctcgtatttggtatcaggaggctgtgttatacacctgtgtccgctcatattacatatgacccaaaacatgaattttcagggctctgtgttactaattgttagctcatcctcatcaacacataactcaaagaaataaaaccaagtgcgaatcccactttccacttccagctacaggcaacatttcagaagcatttcatcaccttggagacgcggggtgggtgtgtgtgtgggtgggggataggtaattccaaacccgatktgatggaaaaagcctccaaattcagcatccctgagccgacagatccggatgtagctcctcccccttcctccacaaaggggtcctggaggtgcacgttctcgcagccttccatagcttgccccaattcaacaggcaattcaaaaacctaggtgctgttgaaaggaacgcctccctaagcctgatgtccctgggatggac

SEQ ID NO: 519469 - DNA, 626 bp, Homo sapiens
ctgcttaaggactaagaccrtatctagctccttttagtatttccacagcatgccatggagatacatgtttctgattatatatgatacatggaaattatatgttgttgaatgagtgattgagtaaatgtgtactagggcagctaatcataaatatttctactattgctaaaatgactggatttatccattccttctgagagtttatactgattgcttatattgtatcaaataccgtaactgagggcaatgtttactcaaactaatagcaccattcaaatttatgcaaacaataacactatatctttaaaatgttttcactaaaagctgcataaagagtgtattcaacaacaatagaataattttacaatcttttttcttgcttaatggccatttgtgccttctgacatgctgctagccattcaaaggtcacactaccttgaagttgaagatcaagacaaatgattagactcataaaagacaaatcacgtctttctggacaggtgattattaataattaattagcatttaaacatgtattatttaagttctttttaagttataaagtctttgatttgctaaacagtttaaataatgaataaaacataaaataataatagttaccattt

SEQ ID NO: 519470 - DNA, 626 bp, Homo sapiens
ctgcttaaggactaagaccgtatctagctccttttagtatttccacagcatgccatggagatacatgtttctgattatatatgatacatggaaattatatgttgttgaatgagtgattgagtaartgtgtactagggcagctaatcataaatatttctactattgctaaaatgactggatttatccattccttctgagagtttatactgattgcttatattgtatcaaataccgtaactgagggcaatgtttactcaaactaatagcaccattcaaatttatgcaaacaataacactatatctttaaaatgttttcactaaaagctgcataaagagtgtattcaacaacaatagaataattttacaatcttttttcttgcttaatggccatttgtgccttctgacatgctgctagccattcaaaggtcacactaccttgaagttgaagatcaagacaaatgattagactcataaaagacaaatcacgtctttctggacaggtgattattaataattaattagcatttaaacatgtattatttaagttctttttaagttataaagtctttgatttgctaaacagtttaaataatgaataaaacataaaataataatagttaccattt

SEQ ID NO: 519471 - DNA, 624 bp, Homo sapiens
gcttaaggactaagaccgtatctagctccttttagtatttccacagcatgccatggagatacatgtttctgattatatatgatacatggaaattatatgttgttgaatgagtgattgagtaaatgtgtactagggcagctaatcataaatatttctactattgctaaaatgactggatttatccattccttctgagagtttatactgattgcttatattgtatcaaataccgtaacygagggcaatgtttactcaaactaatagcaccattcaaatttatgcaaacaataacactatatctttaaaatgttttcactaaaagctgcataaagagtgtattcaacaacaatagaataattttacaatcttttttcttgcttaatggccatttgtgccttctgacatgctgctagccattcaaaggtcacactaccttgaagttgaagatcaagacaaatgattagactcataaaagacaaatcacgtctttctggacaggtgattattaataattaattagcatttaaacatgtattatttaagttctttttaagttataaagtctttgatttgctaaacagtttaaataatgaataaaacataaaataataatagttaccattt

SEQ ID NO: 519472 - DNA, 626 bp, Homo sapiens
ctgcttaaggactaagaccgtatctagctccttttagtatttccacagcatgccatggagatacatgtttctgattatatatgatacatggaaattatatgttgttgaatgagtgattgagtaaatgtgtactagggcagctaatcataaatatttctactattgctaaaatgactggatttatccattccttctgagagtttatactgattgcttatattgtatcaaataccgtaactgagggcaatgtttactcaaactaatagcaccattcaaatttatgcaaacaataacactatatctttaaaatgttttcactaaaagctgcataaagagtgtattcaacaacaatagaataattttacaatcttttttcttgcttaatggccatttgtgccttctgacatgctgctagccattcaaaggtcacactaccttgaagttgaagatcaagacaaatgattagactcataaaagacaaatcacktctttctggacaggtgattattaataattaattagcatttaaacatgtattatttaagttctttttaagttataaagtctttgatttgctaaacagtttaaataatgaataaaacataaaataataatagttaccattt

SEQ ID NO: 519473 - DNA, 509 bp, Homo sapiens
atattattctgattgtattaaacaattttgagcaacagtgagttagtaagatgaggtctccaatgtgtttgtgcctatttcagagatatgtggcaactgttttcatcaacagagattttgtcaagttatttaagctctttggttcagccctctttccgagcaaatatagtgatgacggcaaaaataattacacatttccaggcagagtgcttgcagagccactgtcttttatatctatgaaattagtccttataggaagaggaaagtcccagcctcccactcactaacattataggcatgtgagagattcaactcctgcctccttgctatcctactcatctctcttcataccaaattactgaggatgattaacaaacacaatgaaaactggatcaacggctccgtagtccatacgttgaaatggtactagagatggtatgttgcctatacactacagkcaacactagtattctctgggggaagaaaggagacagaaagtagagaaactt

SEQ ID NO: 519474 - DNA, 451 bp, Homo sapiens
tgctcattggtccacgtgtcacatctagactcaaaaatgttcacagaaataaataaaatagtctcttacattgtctctgttttaggagtgaggaaactactcaaaagacctccagaagacctcttgtcatgtctctcstgttagtgttggatctttcttagtccacagaggtatggtttatgccaccataacaagatacctgagactaggtagtatgtaatgaacagaaatttattttcttacagttctggaggctgagaattccaaaatcaagaagccagcatctggcaaggaccttcttgatgcatccccaaatgatgaaggcagaagggcaaagaggcaaaagggggccaaactagcccttttgtaacagcattaatccattcatgaggatggatacctcatgacctaaacacctcccattatgccccacctcccaacactgttgcat

SEQ ID NO: 519475 - DNA, 431 bp, Homo sapiens
cagtgctgaaattgctgaggttaagaaactctggcctaggctataagaactacagtagttctaaggtgagagagaagagtcagagatgactttgctaatacggcaagattttttagggtaatacatttaaatagatgtaaattggcatgctggaggaggaagtaaagycttcatcaccactcagcagtgtttctatgcaccagaaaatatctgtacataatacatccccatatacataaaaaccagggtcagtggattaatctgagcattagtaatacatcagaaaagtttgacctatgttcacacttaggaaaccagtgttcaagacccataattattgacatcacaacgaatgggcaacacttctgtaaacccaattaataagaagatatttcctttgctcttcttttattcacaagtttgagaagagg

SEQ ID NO: 519476 - DNA, 562 bp, Homo sapiens
tggttataaaccaccctattatctgccatattttgcctaagtggtagttttttttaacttaaaggagactcaaccttgtgattaaataaacagtctgaatcacttagcaggtcaaagctgagaagtgctggcagaacaagtcccgcagtggaatagacaggctgtgtgtgtgtgccscagactcaccaacatgacctgcaatttaacaacagcacatcccacaattcatctggaaatgccaaaaaagcctgttcaaatcagtggataccacctaagagggaggccacttctaaaatatttagaattttcaggctgctgttcccgatgtgccaatagcttattggctccatctgaataaagcaaaattgccaatcttcctgttgactctagcactgtttccaatctgcttagatatgagtgtgctatgcaatattggaaacataaacctctccccagagcagacaaccaatggcctaatcgtttacttttgttataagaattgaaagtacgtatggaaaaagcttttttttttttcttcccctctgacattttgctccatttg

SEQ ID NO: 519477 - DNA, 170 bp, Homo sapiens
tatgtcagttcctttgattttyacctaccatctgggttattttcctcatagtattcagactgtttctaatctctcctcttggtggagattcaatgatttgtcctgcaaagttttctttgccattcttctaagaagaatcaaatgtccttatgcaaataaaacttatggca

SEQ ID NO: 519478 - DNA, 170 bp, Homo sapiens
tatgtcagttcctttgatttttacytaccatctgggttattttcctcatagtattcagactgtttctaatctctcctcttggtggagattcaatgatttgtcctgcaaagttttctttgccattcttctaagaagaatcaaatgtccttatgcaaataaaacttatggca

SEQ ID NO: 519479 - DNA, 170 bp, Homo sapiens
tatgtcagttcctttgatttttacctaccatctgggttattttcctcatagtattcagactgtttctaatctctcctcttggtggagattcaatgatttgtcctgcaaagttttctttgccattcttctaagaagaatcaaatgtycttatgcaaataaaacttatggca

SEQ ID NO: 519480 - DNA, 457 bp, Homo sapiens
cgactgagtgagactctgtctcaaagaaaaaaaaaaagagagagrgagattataaaataagtgcctagagcttataattgctaaaattgagcattgggacagatgatagggaatcaagcactttaggatccaaaagctcagatagtggcagttttgatcttgaatgaaagaatgagtcttgaaataattattttttaagaattggatatgcctaaggatgtgtggatgatgtggacgttgcaggttggagatttgtgtgcatatcagatttagctgactccgtaggtaaactaataataagtcattcctccttgatcataaagatcttggactgcttctccttgtctattatcttagtatttttatactgtctcatggctttactttccgtacactaatatgtccaagttaatctctctagtctggatctctcctctgaactccagggttgaaccgg

SEQ ID NO: 519481 - DNA, 551 bp, Homo sapiens
tccttgcttctcctttttatattgtttaattatacattctcatagcaagtaattttgcatacatattatttttagacactggtggaagttcaaaggtcaacaagatacaaaatgtagtctctggstgaacacaagttgcctggggaagccatcctagaggtgaaataatgatccagtacaatattgcaaagggcttgaatacagatacaaatacagtgcttggagcaccaggaagaaagtaactagctctgtcttttggagttgaaaagtgcatccaaaaaacatacatcagaaccagattgtgtatgaaagatcaaatggaaggaattagagaaagaaatacattgcagggagaagaaacacattgtgtaaatacaccatgataaagttcattcaaatttgcatcaattttgttactttccagatgatatcataccttaaagagtgtataaagactagctctttatattctcttgagttgaagtcaatagaatttggagactaacattgagatatatattgttgtagatgcatgtttgaattttgtccca

SEQ ID NO: 519482 - DNA, 551 bp, Homo sapiens
tccttgcttctcctttttatattgtttaattatacattctcatagcaagtaattttgcatacatattatttttagacactggtggaagttcaaaggtcaacaagatacaaaatgtagtctctgggtgaacacaagttgcctggggaagccatcctagaggtgaaataatgatccagtacaatattgcaaagggcttgaatacagatacaaatacagtgcttggagcaccaggaagaaagtaactagctctgtcttttggagttgaaaagtgcatccaaaaaacatacatcagaaccagattgtgtatgaaagatcaaatggaaggaattagagaaagaaatacattgcaggsagaagaaacacattgtgtaaatacaccatgataaagttcattcaaatttgcatcaattttgttactttccagatgatatcataccttaaagagtgtataaagactagctctttatattctcttgagttgaagtcaatagaatttggagactaacattgagatatatattgttgtagatgcatgtttgaattttgtccca

SEQ ID NO: 519483 - DNA, 667 bp, Homo sapiens
ccagctatgccatttgaattcctgacccaaaaaatcatgaaatgtaacgaaatcatggttgttttaagacaytgagttttagggcaattctttatttggcagtatataatcaaaaatatgtgaaatacattgattggctcctttaggtaatgtgtgttcaaatcaggagtcaaactctgattgttttaatatcaaggcctataatcttctccttatttcttagtacctctactgagagactaggatgtttatatttaaaactattttttaaatgacaaagggtcagtttctttattatcttaacatctcatttttgtagaaaaacatagtttaaaaagatttcacattttctcatttctttcattcttacaaccatccattgaattaaatcttattatttctattttataagagaagaggctacaaacaaatgaaatggtatctcaactttaggttccctgctctaaaatgcatattcttaacattaaattaaaatactttttcatctattctctacttagtcattcataatgaaatttttagagacaaaataatctatctttggtttggattccagaagagagattagtgttattgctacctttgtgccaaaataaagcttcaggatgataaagcagaaatttatgccaaggaaattaatgtgtta

SEQ ID NO: 519484 - DNA, 667 bp, Homo sapiens
ccagctatgccatttgaattcctgacccaaaaaatcatgaaatgtaacgaaatcatggttgttttaagacactgagttttagggcaattctttatttggcagtatataatcaaaaatatgtgaaatacattgattggctcctttaggtaatgtgtgttcaaatcaggagtcaaactctgattgttttaatatcaaggcctataatcttctccttatttcttagtacctctactgagagactaggatgtttatatttaaaactattttttaaatgacaaagggtcagtttctttattatcttaacatctcatttttgtagaaaaacatagtttaaaaagatwtcacattttctcatttctttcattcttacaaccatccattgaattaaatcttattatttctattttataagagaagaggctacaaacaaatgaaatggtatctcaactttaggttccctgctctaaaatgcatattcttaacattaaattaaaatactttttcatctattctctacttagtcattcataatgaaatttttagagacaaaataatctatctttggtttggattccagaagagagattagtgttattgctacctttgtgccaaaataaagcttcaggatgataaagcagaaatttatgccaaggaaattaatgtgtta

SEQ ID NO: 519485 - DNA, 247 bp, Homo sapiens
ctgctcccttgagctccaacctctccaatgggcagaggtagtgatgcaggcagctcccaatctyttaaattcatcatcaggttacctaatttacacagagcagggataacagagcatgtgtttttacctcccccttgcagcctggtcaatgagttttgggcctgttttggccaccttacatgaagaggggattattttggacaattcctttgctggttaacattatggcaattctacccctatccca

SEQ ID NO: 519486 - DNA, 247 bp, Homo sapiens
ctgctcccttgagctccaacctctccaatgggcagaggtagtgatgcaggcagctcccaatcttttaamttcatcatcaggttacctaatttacacagagcagggataacagagcatgtgtttttacctcccccttgcagcctggtcaatgagttttgggcctgttttggccaccttacatgaagaggggattattttggacaattcctttgctggttaacattatggcaattctacccctatccca

SEQ ID NO: 519487 - DNA, 247 bp, Homo sapiens
ctgctcccttgagctccaacctctccaatgggcagaggtagtgatgcaggcagctcccaatcttttaaattcatcatcaggttacctaatttacacagagcagggataacagagcatgtgtttytacctcccccttgcagcctggtcaatgagttttgggcctgttttggccaccttacatgaagaggggattattttggacaattcctttgctggttaacattatggcaattctacccctatccca

SEQ ID NO: 519488 - DNA, 247 bp, Homo sapiens
ctgctcccttgagctccaacctctccaatgggcagaggtagtgatgcaggcagctcccaatcttttaaattcatcatcaggttacctaatttacacagagcagggataacagagcatgtgtttttacctcccccttgcagcctggtcaatgagttttgggcctgttttggccaccttacatgaagaggggattattttggacaattcctttgctgsttaacattatggcaattctacccctatccca

SEQ ID NO: 519489 - DNA, 604 bp, Homo sapiens
tgtgtttctattttgattgtaaccacttactttcagttattgcttttgtcttcactgtgcccacatttctattttgtttgttttcagatgttttattgtttgtcattgatacatctggctattatagttctactgctgtactgtttgttcttcctgtaatttttaaatatatttttaattgctatgggtacataatagttgtacatatttatggagtacaagtgatgttttgatacagacatacaatgtgtagtgatcagaacagggtaacttgagtatccatcaccttaagtatttatcatttyttggagctaaaaaataaattggactcatggagatagagaacagaataaaggttaccacagcctgggaatggtaggtgggaaagggtgataaagtgaagatggttaatgggtacaaaactacaggtttgtattaatagaatgaataacatctagtatttggtagcagaatagggtgagtatgattaacaataatttattgtacacctacatctttttctgattcagtttataccccttggtcttgaatgggattgtaataagaaaggtttggaaagtaccatctctaataattttacttg

SEQ ID NO: 519490 - DNA, 604 bp, Homo sapiens
tgtgtttctattttgattgtaaccacttactttcagttattgcttttgtcttcactgtgcccacatttctattttgtttgttttcagatgttttattgtttgtcattgatacatctggctattatagttctactgctgtactgtttgttcttcctgtaatttttaaatatatttttaattgctatgggtacataatagttgtacatatttatggagtacaagtgatgttttgatacagacatacaatgtgtagtgatcagaacagggtaacttgagtatccatcaccttaagtatttatcattttttggagctaaaaaataaattggactcatggagatagagaacagaataaaggttaccacagcctgggaatggtagstgggaaagggtgataaagtgaagatggttaatgggtacaaaactacaggtttgtattaatagaatgaataacatctagtatttggtagcagaatagggtgagtatgattaacaataatttattgtacacctacatctttttctgattcagtttataccccttggtcttgaatgggattgtaataagaaaggtttggaaagtaccatctctaataattttacttg

SEQ ID NO: 519491 - DNA, 536 bp, Homo sapiens
caatccggcagtgggattacaccgagaagctggccatgttcatgtttcaggtagagagtagggcatgctgtgtggggcattgggttgagcttgaacttgtactstgccagtagagaacagaatctgcctgccaccttgccccagttgtggttctcttcatcttttcatttactttatctgcttcatctctaatagtcccctcttccctcccctggtacccataggatggaatgctggacagacatgagttcctgacctgggtgcttgagtgttttgagaagatccgccctggagaggatgaattgcttaaactgctgctgcctctgcttctccgagtaaggcttggaattttggtactggtggggcagggggagtctaagaagaatttgaggaagaataaaatgttagagcagggtcccctggagagaactaggggctctgatggtcgtgtcttcacagtactctggggaatttgttcagtctgcatacctgtcccgccggcttgcctacttctgtacacggagactggccctgca

SEQ ID NO: 519492 - DNA, 439 bp, Homo sapiens
tcattacaatcacgggtgttgcagctccccagggatcatctggcctgggaaccgcacccatgctctgcaagggatgcagctgggcaaatgatcagaggtgacggaaactgagcatctcccacccatcacttcatcaaagagacaaaagccaggaggaagaccctcctgagtgaggaccgagggtccacccacccctcacaagaggggccacagaatccagctgagcccctcttgtcagccctggaagaccctggcaatgttgtcacccckaccacagccctcccctcactgccaccttggaagactccgagtcaagagacctggtttaaggggagaagacatcctcagcacaaaacaggggtccaggcttttccaggcatcaaggtcgagacactgagggatgactgaaagaccccacccccacccccaccacgaccca

SEQ ID NO: 519493 - DNA, 439 bp, Homo sapiens
tcattacaatcacgggtgttgcagctccccagggatcatctggcctgggaaccgcacccatgctctgcaagggatgcagctgggcaaatgatcagaggtgacggaaactgagcatctcccacccatcacttcatcaaagagacaaaagccaggaggaagaccctcctgagtgaggaccgagggtccacccacccctcacaagaggggccacagaatccagctgagcccctcttgtcagccctggaagaccctggcaatgttgtcaccccgaccacarccctcccctcactgccaccttggaagactccgagtcaagagacctggtttaaggggagaagacatcctcagcacaaaacaggggtccaggcttttccaggcatcaaggtcgagacactgagggatgactgaaagaccccacccccacccccaccacgaccca

SEQ ID NO: 519494 - DNA, 572 bp, Homo sapiens
caattaagtattaacctgacttcaaaggtcatacttcagctttacttgcttatgtaattaaattaattatgtaatatatactcctttttttttcctttttttgagatggagtctcactctgtcacctagtctggagtgcagtggcatgatctcggctcactgcaacctccacctcccaggttcaagtaatattcctgcctcagcctcctgagtagctgggattacaggtgcgcaccaccatgcttggctaattttagtatttttagcagagacaaggttttcaccatgttcgtcaggcttgtctcgaactcctgacatcgtgatccacctgcctcagcctcccaaagtgtcttttttttttaatgtagcagttgttggtttaattctgttgctgtgtagtatttcattgattgagaataccacagattatctttttagtttataatcaatagacatttgagtgccaacaatttctggacactattaataattctgtcataaacattcttgtatatagcaataggcttacaaatttatacatatattttcctawataattgagagtggaattg

SEQ ID NO: 519495 - DNA, 597 bp, Homo sapiens
aacacaacaccgtcttcatcagagctctgggcaaattcttccattttctccagagaaaaaattgtcttcattataaagatgcaataccacataaaataatatagtttatgtatacttttaaaataaaattttgaagttgtcatacatatagctatattgtccctatattctgagatgcatgttagaacagaaattataaagtttgtgttagaaacatayagcttcagtatataataattatttactagaagcagcacacaacccgataattatacagaacatttaagtgagaaatgtccaactcatttaatatttggtagacatcaaattctaaaagcataatggtttgcaaactcataaaactatttcaacaatatcgtgtcaatttgttgacactttgtgatgtcaacaaaacaataaaattgtaaaaacccaacatcaattctcccacaaaagtataactagtagctatccaaatacacaaatgccactctgaattcaccagatctcaagaaagaaggagaaaacctcaagactcacggacctgagaaaacttatgattggtaagatgaataatttttttggactgtaccactc

SEQ ID NO: 519496 - DNA, 597 bp, Homo sapiens
aacacaacaccgtcttcatcagagctctgggcaaattcttccattttctccagagaaaaaattgtcttcattataaagatgcaataccacataaaataatatagtttatgtatacttttaaaataaaattttgaagttgtcatacatatagctatattgtccctatattctgagatgcatgttagaacagaaattataaagtttgtgttagaaacatacagcttcagtatataataattatttactagaagcagcacacaacccgataattatacagaacatttaagtgagaaatgtccaactcatttaatatttggtagacatcaaattctaaaarcataatggtttgcaaactcataaaactatttcaacaatatcgtgtcaatttgttgacactttgtgatgtcaacaaaacaataaaattgtaaaaacccaacatcaattctcccacaaaagtataactagtagctatccaaatacacaaatgccactctgaattcaccagatctcaagaaagaaggagaaaacctcaagactcacggacctgagaaaacttatgattggtaagatgaataatttttttggactgtaccactc

SEQ ID NO: 519497 - DNA, 567 bp, Homo sapiens
gctggggctggttataagagcctatgtgttgtccaaggcctcgttgacatttacatcttttcagaagataccacattcaaatgggactcttgtgctgctcatgccatactgmgggccatgggtgggggaatagtagacttgaaagaatgcttagaaagaaatccagaaacagggcttgatttgccacagttggtgtaccacgtggaaaatgagggtgctgctggggtggatcggtgggccaacaagggaggactcattgcatacagatccaggaagcggctggagacattcctgagcctcctggtccaaaacctggcacctgcagagacgcatacctagaggaactctaaccccggtgtacctgtataaactgaactgtgaaactgtttcggttatctctgtcttttgaggatggctttgtcctgttgctggttaacattcaccttcctcttttgaggagtatttttccattatgtattcataataatgttaatttcaataaatgacattcatgcagcaattatattggtgtatgaaattcttacagtgaatattgtgctgttagtg

SEQ ID NO: 519498 - DNA, 614 bp, Homo sapiens
aaaaactatacccattaaacaatgactctaccctctcttcccagccctagtaaccaccatcctactttctgtctccacgaatttgacattctgagtacctcatacaagtggaatcatagagtatttgtctttttcagtctggcttattcatgtgccataatgtcttcaagtttcatccatgttgtagcatgtgtcagaatttcctttctttttaaggctgaataatatttcccaatctcatttatatgagaagtagatataaaaaacagagaagttttgaactggaacagatcatagaaatcatccaatccaacctctctgcccctgcttttcttttccttttttatgtttacaaaatggggaaaacaagtccttcagagcttacatcatgtggccgagtttatatacctgattggcaaarcagagcctaagaaccagctctcctgtatcccaagcaaggctctttctaccgcacaccctgcaggcccatccaggcccatccagacaataaacagtaagtgttaaaggagttggtgtctccaattagtatggcatgagttctaaaggaaagataaattgactttggaatcttccttaattaatgaaaaatgtta

SEQ ID NO: 519499 - DNA, 447 bp, Homo sapiens
actcatgtctccaaaaaccgagctccccgactgagtaattcctgtccctcttaagggcttacaactctaagggggtstgcgtgagagggtcgtgatccattgaggaagcagagggtactgactgggggccgcatgcagcggtaattagatcagaacaaaacaggacagggattttcacagtgcttttcgatacaatgtctgtaatctatagacaacataaccgagtaggtcaggggtatatctttaactaccaggcccagggtgtgacaccgggctgtctgcctatggatttcatttctgccttttagtttttactaaaagcggtgcgcccatgtgtgtctgtttgggaatgggtttgctcgtgattgtggtggggtgtgtctggatgtccgtcagtaactttgtcccgggatcaggctgcctactctatcgccagcgcatgggtgt

SEQ ID NO: 519500 - DNA, 447 bp, Homo sapiens
actcatgtctccaaaaaccgagctccccgactgagtaattcctgtccctcttaagggcttacaactctaagggggtctgcgtgagagggtcgtgatccattgaggaagcagagggtactgactgggggcygcatgcagcggtaattagatcagaacaaaacaggacagggattttcacagtgcttttcgatacaatgtctgtaatctatagacaacataaccgagtaggtcaggggtatatctttaactaccaggcccagggtgtgacaccgggctgtctgcctatggatttcatttctgccttttagtttttactaaaagcggtgcgcccatgtgtgtctgtttgggaatgggtttgctcgtgattgtggtggggtgtgtctggatgtccgtcagtaactttgtcccgggatcaggctgcctactctatcgccagcgcatgggtgt

SEQ ID NO: 519501 - DNA, 526 bp, Homo sapiens
cagaggccactctcaatatttcatagcacattgcttctcaggaaacaggtcattggggaaatgcagatgggtttgtgacttacatttaattttatttatttatattttattgtatcatgtttaaattattttgcatctggatatcatcacaaaagtgttactgaaggcaacaattgcaaatatatgtgcagtgctttgcacttatacaaagatacaaaratacttacacaaagattgcctttttcactatttaaagcaattttcagacgaaatacaaagttttctgggtctctttggttagtcaagtacctggaagctctgaacagtgattatttaggactcttttcctttaccatttaattgcaggctctcctaatctctgtcagcccttcacctttatgaccttgccttatctaccagaacacagatccctcttactaaaggtagccttgtgttacctctgtcagcccttcagctttatgaccagaacacagatccctcttactaaaggtagccttgtgttaca

SEQ ID NO: 519502 - DNA, 426 bp, Homo sapiens
ggcaggctccgggcagacgagctgccaggtgggtgtgggrtgcaaaggtttggagcaagagcgccatggggagcctccccagtgggacagaagcacaggagtgagggggttgggccctgaggagatctcagtgtcacccgcaacggctgcagtgcacggcccatggagaaaggacattgtcaggtgagacgtgggcttccaaaggccccaggctgggggttccgagtcctctgatctttccctgaggtgctcctttgaggcctgtggcaccctgggtatgtggattcccgcctcatgtgtccacctgacaagcacttctcccctggactcctgtgcctgctccatcacctgcaccctctcttaattagcaggttggagagtggggtccacattgaatgggacgttgtgttgactcagaattgctcc

SEQ ID NO: 519503 - DNA, 482 bp, Homo sapiens
catcagcctggactcatccccagccaaggagcggctggaggacggctgtgtgcacccactggaggaagccatgctgagctgcgacatggatggtgagggctcaggccagggctgatgcgcaggagggcccaactctgtattccaccagggccagggctgtgtctgcctctgatctcttccctcccttggtctgttgggtcctttccaggtgtgtgtgcctctgctgtcccattatgtgtctgtcggctctgtctctgagtctgctttcctaagttttgtgactgctgagtttctgctctctcttgaggccataccgctgtgattttcytgtgtgtctgtctctggttccctggctgggcctctgcggataatttgctgtttcttctgccccatctgctcctgccttgctcctcctcggctggctgctgtgggagcctcctcagtgcctcctgctggtcaagtaggggacgtctctctgctgg

SEQ ID NO: 519504 - DNA, 569 bp, Homo sapiens
ccaaggggccatggatgacccagacaagtgcattctgagaagcggtggggatgaaagtgggatggagagaacatgtgcaggcaactcctctgatgttctttgctgtaaatgggaagcagagaaacgtgggagctggaatgaattatgcaggcttctttctttttttcttttcccttccttccttccygctttccttttttccttccttcctgcttgcctttctcccttcttttctttcttccttcctttatctttctttcttttctccctctcttactctctttatttcttttctttatctctttctctttctttccatttctctctttccttcctttgttctttttctctctcctttcgttctttcatctctttagtttagagacactacagcatcttcatatcctctcagaattgtctagtagggagaggaacccaaatgatgcaggagagaacagataattgcggaagccaagtgtttttgtaggcatgtgttgaggttcacggcaccatgaaggccgagggtggaagcagaacagttcagagagcacatggtctaggagcaggta

SEQ ID NO: 519505 - DNA, 615 bp, Homo sapiens
ggttctttatagaagtaccccttaaaattgtcaggggtgctattaagtacttagggttccccactattcttatctccagactggtcaaatctaccaggcatctttctgatatatcagatagatayaatctatcatagatataccaaagatttatttgcatctgagtgtcctgtggtgaggcattccacagcaggctgtgcatcaggtctgtctgcagaaagtaagaaagaaaggaatacagtttaaaattcacgtaggaatggagtttaaaaactccccaggcaatgtgaaggtgagttaggactgggaaccacaagctaaaaaggagaaccacagagaattctttctgactttggggctgaaatgaagctgaccgaggcattcaggtggttccagaggctggaaagtctcatacgacaggtttttttctcacaaaagagaagtgaaataagtaccttattatgttccaacaatatcaagatacaaatctatcttttagaaaaatgctaaataaaaacacagtcagagagagacttccaccactataaatagtttcttataaatgccacctagagacaaaattatcatttctatgatcctaaccaaaagagcctt

SEQ ID NO: 519506 - DNA, 660 bp, Homo sapiens
acgaatgtaagcaccagtgggaagagcactagaccaagaggctcaaaaatatactgtgaccttcaactagtcacttaacaagtgctcattgtatcatttaaaaaataatacaatagaactccatgaatccaattaaatttaattccatattattcgagtgtttgtttaaaatgatatttctcaaagcaatggtcaaatgastttgggaatcagtagattaaagaaggttaagcaggtttctgttccatgcaacttctcagtaactttaatagtctactgtgcaccgtgaagctctcagacctggtggatgtggtatggaacattccccagactaataggaatcaaagatcctgtttgtttaccatggacagccttgtagaactcctattctctataatacatggccatcaattatagaagacacagagatactaaagagaatagttttcttgggtcctggttctgaggcctggcattctcatgaagctgagtttatgccctcccctgtgatttatgccatacctctgaatccttataatgatgtccctttttgatcttaagatggctttaactggtaactatcatttgtaagcaaaagtaccttattaaacaagaaaaacagctacgtgtgagttctgagtaaatattgctaatttatgt

SEQ ID NO: 519507 - DNA, 660 bp, Homo sapiens
acgaatgtaagcaccagtgggaagagcactagaccaagaggctcaaaaatatactgtgaccttcaactagtcacttaacaagtgctcattgtatcatttaaaaaataatacaatagaactccatgaatccaattaaatttaattccatattattcgagtgtttgtttaaaatgatatttctcaaagcaatggtcaaatgactttggraatcagtagattaaagaaggttaagcaggtttctgttccatgcaacttctcagtaactttaatagtctactgtgcaccgtgaagctctcagacctggtggatgtggtatggaacattccccagactaataggaatcaaagatcctgtttgtttaccatggacagccttgtagaactcctattctctataatacatggccatcaattatagaagacacagagatactaaagagaatagttttcttgggtcctggttctgaggcctggcattctcatgaagctgagtttatgccctcccctgtgatttatgccatacctctgaatccttataatgatgtccctttttgatcttaagatggctttaactggtaactatcatttgtaagcaaaagtaccttattaaacaagaaaaacagctacgtgtgagttctgagtaaatattgctaatttatgt

SEQ ID NO: 519508 - DNA, 634 bp, Homo sapiens
ccatagttggctattttggaaaattagtgttaaataagaataaaaaaaaaaaacccttcacctttatgtgtaataaagcactgcttaacaatcaaggtcacccatgtcaataacactccccaagcaaagcttcatatctttttaattcctaggctcataaagaccattgtcactwacatcattacaggattcaagggagaataacataaagagaatgtgcaggataattttcaaaataaaagagaaaaaaatgacacatctacatatcaaaccacacaagtcccgtgtctgataaaatcacaattatagatttggtgcatttaaccagtcatacatgccatgcatttgcgaaggtgccatatgggggagttgtggaaagtcaaataattcctagactttttctttctgagcacatgtgacaatgaatattatttacccctgtagtatagaaattatgaagcttaagaccccattgcttctttttaataaaagctaacacatcacagcttactgcttgacccagctccttggtctttgcacgttctcctctctgggcagctctctctcagttttaccccctaccacaggaaaggagacagctgtgtttctagacttgacagacttgtttttactt

SEQ ID NO: 519509 - DNA, 615 bp, Homo sapiens
aaagttaacttcaaattcaattctaactctatctccaacttagctctcttgaatctaactgaagattcaactttcttaactctaaacttaacccttgaatcccawctcctagctttcacctctcaagtgtcttaactctaacttaaagtcaaacttagtctcttgaggaggtaattaaacttcaacaactaattggaatgagttcttgtgaactgagagcttggcttatcaacacatctggtcttcagaggttaagaaaaaactcactttctgttattgtaaacttaacaccagagtaatgttttatttcagctatgatggtaatattttttaaattatgctattatccacttaaaaaatccatggatgtaaggtataaagtaacataatgctccttgatggtgaaagcacatcttaggcaccatgctttggagaaaaactgtggatctggagggaatctcctcctcccaccctaaaccacacatacctaaaccacacacagcaccgggtatacctcagtcttcaacataaagaaccaactcggcacgttccatttcattcgactcacttgcttagatagcttaggaaaccaatctgctcaacattagtaagtct

SEQ ID NO: 519510 - DNA, 558 bp, Homo sapiens
tggcacctgagagctgggagtgctcaataaatacgccccttagcaagtgatattccagaaatcagactcagagaagagaatgtggtgtaaggcccaggggattactctaaagaggcctccattaattcatgcattcaatcaacagtcattgagcttgtccactgtttcaggtcytgggctacatggaagataatcaagggaaaggccacagtttgtgtcctcagagggttcctattctagaggggacagcaaaggagaagtaattataacacggggcatcaatgctctgctaaagtaaggaagtagggagcttctggtctgcataacaggagggtacctaatggggcctttgaggtaggggaagggtgggcctctcagcaggagtcatgtttaggcggagactcacaaaaatgcatagtgttaaaaaaattaaatttagcctgaggctgtctccgtaatttgagtccctacctaaggaactgcagcctaacctaacttagtctattaaacacaccgaaagcctaatttaggatgctttttttttttttttttttgtaa

SEQ ID NO: 519511 - DNA, 440 bp, Homo sapiens
aggctgccaactgatcagaccatgaccaaataaggtgaacacctagmcataacttaaggaggaggcaggatttgactgaggaggcagggctcggacaccagatcaaatcaaagactacctagaacagggacagagtggaagtacatttccgtaagatatgcccaccactggtgccatgctactttatctctccagcacttaatagattctacctgaacccctcaccctcaactgctattaactgaacctggaaatctgagtatctatatctgtagtgcattaatgattctatattttgcacccactgtgtattaatgacacaaaagtggaggtttcccttcaatgctttgatccaactctaagctgccgagtccccaaggctgtaacagtgtatacaggattctacttgtgagcaaggaaacaaaccatatatggtgact

SEQ ID NO: 519512 - DNA, 440 bp, Homo sapiens
aggctgccaactgatcagaccatgaccaaataaggtgaacacctagacataacttaaggaggaggcaggatttgactgaggaggcagggctcggacaccagatcaaatcaaagactacctagaacagggacagagtggaagtacatttccgtaagatatgcccaccactggtgccatgcyactttatctctccagcacttaatagattctacctgaacccctcaccctcaactgctattaactgaacctggaaatctgagtatctatatctgtagtgcattaatgattctatattttgcacccactgtgtattaatgacacaaaagtggaggtttcccttcaatgctttgatccaactctaagctgccgagtccccaaggctgtaacagtgtatacaggattctacttgtgagcaaggaaacaaaccatatatggtgact

SEQ ID NO: 519513 - DNA, 516 bp, Homo sapiens
acttgcataggccttccttccacctttccgtgtgcaaacggatactgtgattttgagaatgaaacatgatagctcctgcatccactactaacaaaagcaagtgactgkcaatgagggtaaatcaggcctcccttgagttggtccttgaaggtgctatcaaattaacgtatgtctaacaattctgtctccattcaaatcaattcgcctaggtagctaacctgctcactgtttctctaacaaggtaaacaatggattagtaaaaactacacatatcagacctggtttcttacaacattaggctcaaaatgcaagatttacataaagagaacatctatggtgagaaataatttgcttagacaggaaattttatcactgccattcagttagttggaaaatgaagatttagagatttggggaattctctaatgttctacataagcatagggtaaaataaaaacttcgtatttctttgaattaatatccaattctcttctagaggaaattttattgaattgg

SEQ ID NO: 519514 - DNA, 543 bp, Homo sapiens
cccagctgctcgggatgctgaggcagaagaatggcctgaacccaggaggcggagcttgcagtgagccaagatcgccaagcctgggtgacagagcgagactccatcagaaaaaaaaaaaaaagaattccagttactagcaactgacaatagagttgtggttgaaaagggattaaggagctraagtgttatgctaagcatggttatgaacaaaaggcagaaaaagaacaaatgcgtccactatatggcttgatttgattacttgaaaattattcatttgttttactctttagctctttgcttcctttaaggtaatcacttttaaccctcttctcatattacttggctgatgatataccttggtgtactgttttctttatttgaacaaatatggttactgtgccagtaccttcaacagattcaaatctttttaagggtaaaaaggcttttctatttttcttagactacaaataatgactaaagtaattcaatgataatgagcattctagatatttctgaaggtttctgaaggtcacacaaaggtga

SEQ ID NO: 519515 - DNA, 543 bp, Homo sapiens
cccagctgctcgggatgctgaggcagaagaatggcctgaacccaggaggcggagcttgcagtgagccaagatcgccaagcctgggtgacagagcgagactccatcagaaaaaaaaaaaaaagaattccagttactagcaactgacaatagagttgtggttgaaaagggattaaggagctaaagtgttatgctaagcatggttatgaacaaaaggcagaaaaagaacaaatkcgtccactatatggcttgatttgattacttgaaaattattcatttgttttactctttagctctttgcttcctttaaggtaatcacttttaaccctcttctcatattacttggctgatgatataccttggtgtactgttttctttatttgaacaaatatggttactgtgccagtaccttcaacagattcaaatctttttaagggtaaaaaggcttttctatttttcttagactacaaataatgactaaagtaattcaatgataatgagcattctagatatttctgaaggtttctgaaggtcacacaaaggtga

SEQ ID NO: 519516 - DNA, 543 bp, Homo sapiens
cccagctgctcgggatgctgaggcagaagaatggcctgaacccaggaggcggagcttgcagtgagccaagatcgccaagcctgggtgacagagcgagactccatcagaaaaaaaaaaaaaagaattccagttactagcaactgacaatagagttgtggttgaaaagggattaaggagctaaagtgttatgctaagcatggttatgaacaaaaggcagaaaaagaacaaatgcgtccactatatggcttgatttgattacttgaaaattattcatttkttttactctttagctctttgcttcctttaaggtaatcacttttaaccctcttctcatattacttggctgatgatataccttggtgtactgttttctttatttgaacaaatatggttactgtgccagtaccttcaacagattcaaatctttttaagggtaaaaaggcttttctatttttcttagactacaaataatgactaaagtaattcaatgataatgagcattctagatatttctgaaggtttctgaaggtcacacaaaggtga

SEQ ID NO: 519517 - DNA, 543 bp, Homo sapiens
cccagctgctcgggatgctgaggcagaagaatggcctgaacccaggaggcggagcttgcagtgagccaagatcgccaagcctgggtgacagagcgagactccatcagaaaaaaaaaaaaaagaattccagttactagcaactgacaatagagttgtggttgaaaagggattaaggagctaaagtgttatgctaagcatggttatgaacaaaaggcagaaaaagaacaaatgcgtccactatatggcttgatttgattacttgaaaattattcatttgttttactctttagctctttgcttcctttaaggtaatcacttttaaccctcttctcatattacttggctgatgatataccttggtrtactgttttctttatttgaacaaatatggttactgtgccagtaccttcaacagattcaaatctttttaagggtaaaaaggcttttctatttttcttagactacaaataatgactaaagtaattcaatgataatgagcattctagatatttctgaaggtttctgaaggtcacacaaaggtga

SEQ ID NO: 519518 - DNA, 621 bp, Homo sapiens
tatgaatatacacatataattttatgatatctattgctataatatatgcaatatgtaagtatgtatgcacatatgcatatgtgtgtttatatataaaatgagtgatttttgctctttgatyttcaaatattttctttggatgtcaatttttctttccttttttttctttcttgatttggatctcaggatccaaaagtaaactaactttcctaaacctcttcagtattaaagagagattcattttgagccagcacactatatttctagtccatatctgaatccatatctgaaacaaagaccacgtctaaaagtaatactcttatttctaattctcacctaacacacccatggaagataagaaaattaacttaccaggcagcagtaacttcttggaattctatgctcacactttgctcagcacacataggcgttctgttgacagttggctctcaacacctcaagtacgtgtcagagggacgcgagccgatcagtttacccaagctccttacttattctcatttaccctctagaattttatttcctgcctcagaaagaagaatcccatctgccagaaggaaatatttgtagccaacatgacaaaagtggaatccctattttgta

SEQ ID NO: 519519 - DNA, 459 bp, Homo sapiens
caccatcccacgtttccgtgatggatattagaaaataatgtaacctcaactgacaagtttattaagacacagaagacattacagaggcccttttgacattccaatctctaacgcagtcagggggagatgctgacttgccatcattattgaaagtaattggtcaaaaaaaaaaaataaaagaggtgagagasaaggagagcaatcctataaagctgtcaggttaattatttggcctacaggtgtgctcagtgctcttgatctgcctaccactgggcttgccagtgctttgccagtgttttctccaccctcactcctagtttgggatagttcaatctaaagctaagagagtacatttaaagcagaattttaccttggccaagttatttccttgcctaattatacctacgtaccagtccaaatctccattcttccctatggctctgtcctgttggcatacca

SEQ ID NO: 519520 - DNA, 601 bp, Homo sapiens
tgcaccatcccacgtttccgtgatggatattagaaaataatgtaacctcaactgacaagtttattaagacacagaagacattacagaggcccttttgacattccaatctctaacgcagtcagggggagatgctgacttgccatcattattgaaagtaattggtcaaaaaaaaaaaataaaagaggtgagagagaaggagagcaatcctataaagctgtcaggttaattatttggcctacaggtgtgctcagtgctcttgatctgcctaccactgggcttgccagtgctttgccagtgttttctccaccctcactcctagtttgggatagttcaatctaaagctaagagagtacatttaaagcagaattttaccttggccaagttatttccttgcctaattatacctacgtaccagtccaaatctccattcttccctatggctctgtccwgttggcataccaaactccaattttccaggacagataacccagttagaaacaaccgacttgtgtgaaatgccacagagagtcacaacgcaaaaacaagttttattcagattgaatttaatttcctaggcagtttagatcacagatccgaaacc

SEQ ID NO: 519521 - DNA, 625 bp, Homo sapiens
tcaccgtcaacttatggttatgagaaaagcccaagggaggcggtgcagctctggtaccattttctacctagccaagtttcaatttctcaatctctctttctatctttttggcaaattcttcatatttgaatggaataattccagagaatcactgaaaaatgcatttgcaccagtgtaaaggtaacgaattgtctcacaaggaatgaaggcttattaataatctacaacagtattactgcagagaacaaaatttaaactaagtggagcacaggatcattaacatatttcctctcaggtaatggggaatgtagcagtctaaaatatttactcctttctgtagtcaggttaaggcattgttttctaaaggagttgtcagaggaatcacgctattgttagaagtggaaaaggcttggtgcttcattatttctgtgcaaaagaagagcaaatacagtggatttagtagccagccaaggaaagccaggtactaaaaattaccttgggacaaaagttggtcttttattcctgtgattccccattccactgggaggaacaatgaactagtagagcagcctgasaacatgttacatcataatctagaacatatagacagctgatgtcatgaaac

SEQ ID NO: 519522 - DNA, 635 bp, Homo sapiens
taaagcgaatttagaatcaccaccccacagtccccccgccgacaaatcatactatttaatatggcggtgatgagaacaacgtatgtgactaccgtgacactcaataaaaatgctatgatttgctttttaaaaagtcagaaacctatagaattcgtatgtgagttccactcattgtttctataaaaaggtcattctgatatgttttagggcattgtcatgagaatgtgtgaaaaatctataggcttacaaaacatgaaaactcaagatactggttggtaaggacatggtaggggtaatgtattcttagaagagaggctgcatcatttctgcagataaatttgaaattttcttcatgcaatttggaatgtaatctcttactagattaaattttacagctcaggaaggtgaggagctggtaagagcaaactgcatgagacaagagtatagatatccaacaaacaatgaggcaaccaacctgattcasttagtacttgacagcaatgcttttattagaaacactttacttatgacctattaccagtggttcctctactattgggatacatttaaatctgtcattttaaatgtgtttacactttttctgtgtacaagaactgctgacaaaggcaagcgtg

SEQ ID NO: 519523 - DNA, 540 bp, Homo sapiens
  misc_feature (1)...(540): n = A,T,C or G
gcttcggttgccctggcaattggggaagcccctaggaccgggctaaagcgggccccgcctgggagtctagagaccaggcgattgacgtcagggacctgggcacgccccactttaaccctttcccgaatgaagtggggggagggagtagatgagcgggataggacccggatgtctttcaccactccccgttcctgacgtcctttgcactgcgtagggtgaggggcgtaggggagcgaggaaggcaggttattcaggatgcgctgcgcccacaaacctcttcagcccggcctccntctcggcctggctaacgtggggcggggccnagggcaggagaggcggggctagcggatcccttctgcgctcaggagtttnggntcggccccangscacgccccacccccctgttgtcctgacgacagggcctcctggaggtgggtctccccgggtcttgactggtcctagataccgttgctaggcaacacggtccttagaggaaggggtggattggacggctggttggtgagaccgagggaggggcct

SEQ ID NO: 519524 - DNA, 611 bp, Homo sapiens
ccctcttactcctaactcataaatcttccctatctactgggctttttctatcaggatgcaaacacgcgtttttgcctccatattcaaatagatagatagatagtaggtaggtaggtagatgatagatagatatcatttgctcctccagttaacacaccatttcttgaaaaacatatttattcccctgtcttcaaattgaggtgactagccactccagtttgcctggaaatgaaagggttccaggacatgggatctttcagttttcaaaccagaagtcataggatgcaaactttcatgctaaaaccaggaaagttcccagacaaaccaggacgaggtggtcatcccacaaaatcatctcctytccttctctcaaagatgctccactcaagctccttctccatccccaccaatcccaccaccattgcacccaactactcttggctagtcacccatgatcaattgctaattcctccaacagttgttagtctgcatttttcctgattgtttagcatcagtggacagaatttatcactgtggctctagaaatattctcatcgcttggcttccaggacacacacactctcctggtcatcttgtgctctcctgtgccc

SEQ ID NO: 519525 - DNA, 527 bp, Homo sapiens
ttgtttcttcaaggctagcaggaaaatctctccaagctcagggcaggcttgagctctcttttaaaggcctcacctgagtaagccaggccaacctaggccactctcgcttttgatgaacttgaaggtaaactgattagagacttaatcacaaaatccctccatctttggcatatgatgtaacctgatcacagaagagacatccatcatatccacaggtctggcccctactcaagtggactgtgcagggctcggacaccaagagggggaatctgggacatgaccttagaattctgcctgcctcagggtttcattttcaaaattgtcacggatcttgtgggtgtgtcttcttgttgtttcaatccatgtttacctgatgtcaytggtcatttgcagatcttttgtgaagtcttctgcccagaatttgttcttagtggattgcttgcctttttgtttttgagtcttctaacctgaatataaattctcagttggatacaagtgttgtaactatgttctcccagtcgatggtt

SEQ ID NO: 519526 - DNA, 117 bp, Homo sapiens
gaagactcagcatatgatatcggtgacgttaayaccctcccagggagaagcgctgttccttctggctgggaagtgcgagccggtggggggagagagcggagtagagcattacgtgga

SEQ ID NO: 519527 - DNA, 117 bp, Homo sapiens
gaagactcagcatatgatatcggtgacgttaacaccytcccagggagaagcgctgttccttctggctgggaagtgcgagccggtggggggagagagcggagtagagcattacgtgga

SEQ ID NO: 519528 - DNA, 599 bp, Homo sapiens
catcagtgattaggtttcaacatataaattttgaagaacacaaacattcaggccacagcaactggatagaattttcaaaacatatataaaggatttccataacctctctttcatgtgatctacaaaagaacccagcagaataggtaaagagggtgttattatccccacttgaagatgaggaaactgagactccttgagagtatgagttttttccaaaaaatctcatacatatgaacctagaatcgaaccttctgactcctatgkttttttttccatgaccagctttgtaaatcacagagagaaggagaatgagatgaaggagaatgaaaagaaaagattggagagggaaggatgaagaaagagagctaatcatttcattgactacgcaccatgagccccgagtatcctgggattttcagatactctttttttcttttttttttttttgaggctaagattacatacatttccatgtatacatagaaacttgttgtattagtcagcttgggctgagttgtgttgcaataatatcccccaaatcttcagggcttacaacaataacggcttctctctggcttgtgttcatgccctttgaagat

SEQ ID NO: 519529 - DNA, 524 bp, Homo sapiens
aaataccaacaacttggattaaaaaaaaaatgcttttttgatctggttggttttgatagactgtcaaaaatattaatcttaaaatttatcgtaaatagtagtcatgcaaacctttcattatatattctctcaaattgatttttttcaaagaacaagttttcasaaatacactggattcaacaatttttgaattacagtcagatttgaatggtcttgtgcagatccacttaacttgtgagtagtaatgaccacttaactagtaaataatactatctcataagcagtaaataacttttatgaaaaatgaaacgatataattgctaaattaagtttctcactttatacttttgctgtatctaaagataattggtattcctacaggttaacatattgttgattcatatatatggctaccatattaagtgctaatacttcattgttgcatgtctctgtaaaaatagctataatcaagcttaggaatagtttttattttaattcatttctttatggagtaaaaattgtgg

SEQ ID NO: 519530 - DNA, 524 bp, Homo sapiens
aaataccaacaacttggattaaaaaaaaaatgcttttttgatctggttggttttgatagactgtcaaaaatattaatcttaaaatttatcgtaaatagtagtcatgcaaacctttcattatatattctctcaaattgatttttttcaaagaacaagttttcagaaatacactggattcaacaatttttgaattmcagtcagatttgaatggtcttgtgcagatccacttaacttgtgagtagtaatgaccacttaactagtaaataatactatctcataagcagtaaataacttttatgaaaaatgaaacgatataattgctaaattaagtttctcactttatacttttgctgtatctaaagataattggtattcctacaggttaacatattgttgattcatatatatggctaccatattaagtgctaatacttcattgttgcatgtctctgtaaaaatagctataatcaagcttaggaatagtttttattttaattcatttctttatggagtaaaaattgtgg

SEQ ID NO: 519531 - DNA, 622 bp, Homo sapiens
ttttgtctagaaaactgaatgtgatcattttttacgtaagcatttctgggaaaaaacttagctggatagtcactgtgttttaaaatctgttattctgtaagataagtttttaattatcccatgtaaatatttaggcatggaattactgtgtaatatgttaggtgtatgtttaaccttataagaaaatcctaaactgttttcctgagtagctataccattttcattcatactagctatgtagttcgagttgcttcacatcctcaccacacttggacttgctagagtggtttttattttgcccattctaatagatgtgtrgtgatatcatattatgattttaatttgcatttgcctaatgggtaatggctaatgatgttgaacctcttttcctgtgcttatttgacacatcaacaacttagatgaatctcaaaagtattatgctaaatgaactgtatgtgtctctaattatattcttgaaagaaaaatcttcaatgatgagtaacagatcagttttaaggagtaaaggattttgtagttgttgttgttgtttgcttttgttttgttcttgtgagtaccataagtaccactcaaaccaagaatactgatttgggctgtgcttatg

SEQ ID NO: 519532 - DNA, 622 bp, Homo sapiens
ttttgtctagaaaactgaatgtgatcattttttacgtaagcatttctgggaaaaaacttagctggatagtcactgtgttttaaaatctgttattctgtaagataagtttttaattatcccatgtaaatatttaggcatggaattactgtgtaatatgttaggtgtatgtttaaccttataagaaaatcctaaactgttttcctgagtagctataccattttcattcatactagctatgtagttcgagttgcttcacatcctcaccacacttggacttgctagagtggtttttattttgcccattctaatagatgtgtagtgatatcatattatgattttaatttgcatttgcctaatgggtaatggctaatgatgttgaacctcttttcctgtgcttatttgacacatcaacaacttagatgaatctcaaaagtattatgctaaatgaactgtatgtgtctctaattatattcttgaaagaaaaatcttcaatgatgagtaacagatcagttttaaggagtaaaggattttgtagttgttgtwgttgtttgcttttgttttgttcttgtgagtaccataagtaccactcaaaccaagaatactgatttgggctgtgcttatg

SEQ ID NO: 519533 - DNA, 589 bp, Homo sapiens
caagaggttcaaagttgctatttgctagtattggaatagactgatagtatacaaagtctacctgctaatattagataaagcagaatttaaatagtcttcattttctttttggaaatttgtggacaaacaacatttgtttcaagtatgaaaatttttcaaataacatacttttaaaaaaatagcctcttgctttctagaagatatgcactaagtgaaacaaaagatagccacagcataccacatcatgttttagaatatgtgtcacttgtttattatgacaaaatatggacaaaatataattaacattgcattaatgactcttgttttctttaaaagattcaggaatgtttcccactagtttactgttgaatttgtatttatacagcttttacttattatcttaagtatagttcctcttaaggatttcaaaatactttggaaattaactctttgtgtgctaagttttataggaattgataaaaatcattgtgttctgttgaattcactagwtgtgatgtaatacatataggaatactttttcatccagaaagttctagactcagaaatatttctccacctgcttttgtct

SEQ ID NO: 519534 - DNA, 569 bp, Homo sapiens
ctggcacacaacccaccctttccccttcctcctcatttggcactgcaaccagagtttgcaggtacctcaaatgcattgtatacagattctgtaaagtttgcttattctgttactttgttttcaattttaaatttaattatccctgtaatctagagcaaacaaggtatttccatcacccattttccccaaggacaatagtacacattctcatagacacaattttaagacacattggagtgcttctgaatgtgaaaaatgaggaacaagtgcagaataaagacaagatgtttactataaacaacagtaaaccagcttattattctaaagaggacttcagagtaaggcaaaggggccttgaagattgtgtttatggaamaacacacacacacacacacacacacacacacacacacacatattttctgttctcttttttatttgggaatattgacttccaaagtaaatgaaacatttttaaattcagataataaatagaaaaacctaaatgtgcacaaaataaacagatcctgctctcttgtcccttcaagagctgcatctcactccaattt

SEQ ID NO: 519535 - DNA, 569 bp, Homo sapiens
ctggcacacaacccaccctttccccttcctcctcatttggcactgcaaccagagtttgcaggtacctcaaatgcattgtatacagattctgtaaagtttgcttattctgttactttgttttcaattttaaatttaattatccctgtaatctagagcaaacaaggtatttccatcacccattttccccaaggacaatagtacacattctcatagacacaattttaagacacattggagtgcttctgaatgtgaaaaatgaggaacaagtgcagaataaagacaagatgtttactataaacaacagtaaaccagcttattattctaaagaggacttcagagtaaggcaaaggggccttgaagattgtgtttatggaacmacacacacacacacacacacacacacacacacacacacatattttctgttctcttttttatttgggaatattgacttccaaagtaaatgaaacatttttaaattcagataataaatagaaaaacctaaatgtgcacaaaataaacagatcctgctctcttgtcccttcaagagctgcatctcactccaattt

SEQ ID NO: 519536 - DNA, 642 bp, Homo sapiens
cttcttgaaatgagctaaccacaaacttaacagcatgtagtactaaccaaccaaccaacaaacaaataacaacaacaaaacacaaacaaaaagcaagcatctgagtagatccaccattacgcctcacaaagatcaagtttgttcacacgctggggcctgtggggtggagggcagggagacggagagcatcaggaaaaatagctaatgcatgatgggcttaatacctaggtgatgggttgacaggtgcagcaaaacaccatggcacatgtttacttatgtaacaaacctgtacatcctgtacatgtaccccgaaaattaaaataaaaatgaaaataaaagaccaagtttgtttaaaaaaaaaaaaagaacataagtgcattttctattaccaactcttgatcatttgaarttctctgctgggtatcagaaaaagaaggcacacacacagacttactaataaattgaaagcagcatttaggtatgcacagtccaaggttgggagtaaaatggaatttttccacatttaacatagaattacaatgagatctctgggtcagtttcattcactggttttgagaaaaagctcagtatgttaatagaagatgttgtcttgaataccttttgcttacaaagctacatttt

SEQ ID NO: 519537 - DNA, 642 bp, Homo sapiens
cttcttgaaatgagctaaccacaaacttaacagcatgtagtactaaccaaccaaccaacaaacaaataacaacaacaaaacacaaacaaaaagcaagcatctgagtagatccaccattacgcctcacaaagatcaagtttgttcacacgctggggcctgtggggtggagggcagggagacggagagcatcaggaaaaatagctaatgcatgatgggcttaatacctaggtgatgggttgacaggtgcagcaaaacaccatggcacatgtttacttatgtaacaaacctgtacatcctgtacatgtaccccgaaaattaaaataaaaatgaaaataaaagaccaagtttgtttaaaaaaaaaaaaagaacataagtgcattttctattaccaactcttgatcatttgaagttctctgctgggtatcagaaaaagaaggcacacacacagacttactaataaattgaaagcagcatttaggtatgcacagtccaargttgggagtaaaatggaatttttccacatttaacatagaattacaatgagatctctgggtcagtttcattcactggttttgagaaaaagctcagtatgttaatagaagatgttgtcttgaataccttttgcttacaaagctacatttt

SEQ ID NO: 519538 - DNA, 642 bp, Homo sapiens
cttcttgaaatgagctaaccacaaacttaacagcatgtagtactaaccaaccaaccaacaaacaaataacaacaacaaaacacaaacaaaaagcaagcatctgagtagatccaccattacgcctcacaaagatcaagtttgttcacacgctggggcctgtggggtggagggcagggagacggagagcatcaggaaaaatagctaatgcatgatgggcttaatacctaggtgatgggttgacaggtgcagcaaaacaccatggcacatgtttacttatgtaacaaacctgtacatcctgtacatgtaccccgaaaattaaaataaaaatgaaaataaaagaccaagtttgtttaaaaaaaaaaaaagaacataagtgcattttctattaccaactcttgatcatttgaagttctctgctgggtatcagaaaaagaaggcacacacacagacttactaataaattgaaagcagcatttaggtatgcacagtccaagrttgggagtaaaatggaatttttccacatttaacatagaattacaatgagatctctgggtcagtttcattcactggttttgagaaaaagctcagtatgttaatagaagatgttgtcttgaataccttttgcttacaaagctacatttt

SEQ ID NO: 519539 - DNA, 640 bp, Homo sapiens
tgttgagttatcaaaagaaatatttctatataatagctaaaattatttataaaagttagtggtctcataactttatttatttatttacttattttgagaccgagtctccctctgttatgcaggctggagtgcagtggctccatctcggctcactgcaaacttcacctcctggattgaagcgattctcctgcctcagcccccccgagtagctgggattacaggcttgcacccccacgcccagctaatttttttgtatttttagtagagacagggtttgaccgtgttagccaggctgatgttgaactcctgacctcaggcaattcgcccgccttggcctcccaaagtgctgggattacaggtgtgagctgccatgcccagccagtttcataactttaataaggaatcaatttgtttaaaaacaatcataatatggtttaggtcatggttgtttggaagtacagaaagggaacaaaataaacttgcgtttcctaaattcattttaatacawctaacttttctgatataaatatgtgcccttggattgctgttttcaagactatctgcaatcacatcgtgcagttaaccttcttccacacagtccacttggcttacccaaaaatagtacagaaccagggtcagc

SEQ ID NO: 519540 - DNA, 600 bp, Homo sapiens
gctgggcgcagtggctcacgcctgtaatccaatcactttgggaggctgaggcaggtaratccacatgagctcaggagttccagagcagcctgggcaacatggggaaacaccatctttactaaaaatacaaaaaaattagccggccgtggtgatgcatgcctgtagtcccagctactcgggaggctgaagcaggagaattgtctcaacccaagagatggaggttgcagtgagccgacatctcatcactgcatgccagcctgggtgacagagtgagactccatctcaattaaaacaaaaacaaaaacaacaacaacaacaacaaccaaaactttctcctgtatggagaaattcataagatatgtcaaaataccttcctaatgatgataatgatctattattgatctttataacattctgtcccatggcttcaacatcttttaagataaattattttattctaacagctttcctgtgaagtacttattctgatttttacgcatatgaaaaactatttgaatttccttttctaccgactcagctcctgattccaggacttctaattctgaacccacgagttttcctgcaaagcattcattgaaa

SEQ ID NO: 519541 - DNA, 599 bp, Homo sapiens
ctgggcgcagtggctcacgcctgtaatccaatcactttgggaggctgaggcaggtaaatccacatgagctcaggagttccagagcagcctgggcaacatggggaaacaccatctttactaaaaatacaaaaaaattagccggscgtggtgatgcatgcctgtagtcccagctactcgggaggctgaagcaggagaattgtctcaacccaagagatggaggttgcagtgagccgacatctcatcactgcatgccagcctgggtgacagagtgagactccatctcaattaaaacaaaaacaaaaacaacaacaacaacaacaaccaaaactttctcctgtatggagaaattcataagatatgtcaaaataccttcctaatgatgataatgatctattattgatctttataacattctgtcccatggcttcaacatcttttaagataaattattttattctaacagctttcctgtgaagtacttattctgatttttacgcatatgaaaaactatttgaatttccttttctaccgactcagctcctgattccaggacttctaattctgaacccacgagttttcctgcaaagcattcattgaaa

SEQ ID NO: 519542 - DNA, 600 bp, Homo sapiens
gctgggcgcagtggctcacgcctgtaatccaatcactttgggaggctgaggcaggtaaatccacatgagctcaggagttccagagcagcctgggcaacatggggaaacaccatctttactaaaaatacaaaaaaattagccggccgtggtgatgcatgcctgtagtcccagctactcgggaggctgaagcaggagaattgtctcaacccaagagatggaggttgcagtgagccgacatckcatcactgcatgccagcctgggtgacagagtgagactccatctcaattaaaacaaaaacaaaaacaacaacaacaacaacaaccaaaactttctcctgtatggagaaattcataagatatgtcaaaataccttcctaatgatgataatgatctattattgatctttataacattctgtcccatggcttcaacatcttttaagataaattattttattctaacagctttcctgtgaagtacttattctgatttttacgcatatgaaaaactatttgaatttccttttctaccgactcagctcctgattccaggacttctaattctgaacccacgagttttcctgcaaagcattcattgaaa

SEQ ID NO: 519543 - DNA, 492 bp, Homo sapiens
agggtttcatggctcctagaaccacaagaaagccatccactaaaacatctgtaccagggmggtgttgtcagaaaacagaaaggaaaataacagtaaagaacataaaagagtagccataaataagaggaagttgcacgagtaagtcaggtgaatggtttttaatccggcttggacggcaagcttgaaaaaaaaaaaaacacaaaaaatgacccagtccagagcatcagattttatttacataaatatcaaaaaaagattatgttaaaatgataaaaattatttaatttaaaaccattttgtaaaatctggaaaatatatgctaagtgaacttgtggtttgttaataccctttgcttggggatttttctactccacaatttatgaaaagtcccaaatattctctaatgggatttttagcccagtcggttggaaagcacaaaactacctctggggatttatccactgcacccattagaggctctgtacactcttc

SEQ ID NO: 519544 - DNA, 492 bp, Homo sapiens
agggtttcatggctcctagaaccacaagaaagccatccactaaaacatctgtaccagggcggtgttgtcagaaaacagaaaggaaaataacagtaaagaacataaaagagtagccataaataagaggaagttgcacgagtaagtcaggtgaatggtttttaatccggcttggacggcaagcttgaaaaaaaaaaaaacacaaaaaatgacccagtccagagcatcagattttatttacataaatatcaaaaaaagattatgttaaaatgataaaaattatttaatttaaaascattttgtaaaatctggaaaatatatgctaagtgaacttgtggtttgttaataccctttgcttggggatttttctactccacaatttatgaaaagtcccaaatattctctaatgggatttttagcccagtcggttggaaagcacaaaactacctctggggatttatccactgcacccattagaggctctgtacactcttc

SEQ ID NO: 519545 - DNA, 724 bp, Homo sapiens
atacccctgctctagagtagtatatgtgcctcaggactaaactaatcagcatgatcctgtctcctggcctcagtatattcagggatgcattttactcaattacagatggtaagacacaaagagagattggctgagacctgccagcaggtgaagctttctgcatatggaagagaaagcatgtaaccttgacagcaaccagtcttatcattagcagatgctgtggaaggcagagcagagatggaaagagtccctcatgatcccaacgagtagatgaatcaaaccattcctgaagcctactttatcttggacttttctaattgtaagacaattatccctttttattatttaagtcgctttgagctgattgttctgttacgtgaccaaaagcatcctgaatgacagagataaggaccatatttatctttttcactgctatgtccccaaggcctacatggtacatatgcaaagtagatagttaagaaatatttttgagtgaacatacattcttgttttcctggtggaataaataactacaatacattcagaacctgtcatagtttgctagagagtaccgctcatggagtctaatatactaagctacatattcatgtattgattccatcccatactccaagggctgtgttatttctggaaatatagagatttttaacagggaagatgaaaggaattcacrcttgctgactaattttaaaagttcagcact

SEQ ID NO: 519546 - DNA, 557 bp, Homo sapiens
aaaacccaactgcagctcatatctatattcaccaaaagatattacagaaatatttatctcaacatattgtctattattcataacaggcaaaaatctggaaacaatcccattttcatcaccaatgaagaaacaaatgaattgagctatattcatacaaagaaatactacacagtgaagaaaattcrtagtctagtgctataaattatagtgaactaatatcaccaacataatattagaaaaaaagacaaaaagaacagttcaatttaccatgaagtctgagatgaagcaatcttataaagctagaggagattatatagtggtagactttatggaagaaaggcttataaatagtaactgggaggaaacatgatggaggcccctgggattctgctaatagcttttcttgacctggaggggagttacaagtatgttagtttataaagctatacatttatattttatgcacttaaaacgtttcttatatgcacaaaaatttaaaagaatgcgtagcatggtgttgttaccaagagaaatcagggtgtatctatctgttgtga

SEQ ID NO: 519547 - DNA, 507 bp, Homo sapiens
aaactcaatgtttcagggatttcacttctagataaaaacccaactgcagctcatatctatattcaccaaaagatattacagaaatatttatctcaacatattgtctattattcataacaggcaaaaatctggaaacaatcccattttcatcaccaatgaagaaacaaatgaattgagctatattcatacaaagaaatactacacagtgaagaaaattcatagtctagtgctataaattatagtgaactaatatcaccaacataatattagaaaaaaagacaaaaagaacagttcaatttaccrtgaagtctgagatgaagcaatcttataaagctagaggagattatatagtggtagactttatggaagaaaggcttataaatagtaactgggaggaaacatgatggaggcccctgggattctgctaatagcttttcttgacctggaggggagttacaagtatgttagtttataaagctatacatttatattttatgcacttaaaac

SEQ ID NO: 519548 - DNA, 619 bp, Homo sapiens
aaactcaatgtttcagggatttcacttctagataaaaacccaactgcagctcatatctatattcaccaaaagatattacagaaatatttatctcaacatattgtctattattcataacaggcaaaaatctggaaacaatcccattttcatcaccaatgaagaaacaaatgaattgagctatattcatacaaagaaatactacacagtgaagaaaattcatagtctagtgctataaattatagtgaactaatatcaccaacataatattagaaaaaaagacaaaaagaacagttcaatttaccatgaagtctgagawgaagcaatcttataaagctagaggagattatatagtggtagactttatggaagaaaggcttataaatagtaactgggaggaaacatgatggaggcccctgggattctgctaatagcttttcttgacctggaggggagttacaagtatgttagtttataaagctatacatttatattttatgcacttaaaacgtttcttatatgcacaaaaatttaaaagaatgcgtagcatggtgttgttaccaagagaaatcagggtgtatctatctgttgtgagcagggtagaagctcttctaaacaatct

SEQ ID NO: 519549 - DNA, 502 bp, Homo sapiens
cagagaagcctcatgccactgatgtcatagaaataggtcacacataaggaacacccttggataagtgacatatcacacttacattggaattaatttccacaaaattccattgctgtccctaccttctaaatagcttctgaattatcatcagcacccacatgttcacactcagtgcctcgggggcttcaagatgtcccagaaccgcagccagcagcccagagtgtcttatctgaagaagggccatattgcctgtccacatgcatccttaacatcacatggaaagggggattcaacttcaacagagggaaaataccgccaggtgaatcactttcaactacacagaaggaatcacaaatgtctgcctccaaaacttcagagtcccagtttattttgtaaaattggactcttgtcactcctgtcatttccacacatgcaggtcccccarcatgaacgcatgaaccaacaacatgtacccttttatatcaactttacaccccagcca

SEQ ID NO: 519550 - DNA, 566 bp, Homo sapiens
tcatgacctaataacctttcaaagaccccacctacaaatactatcacattaagagttaggatttaatatgaattttaggaggacacagatatttgatccatagcagtgtgtgttcatttaaagaaaaattatttgaagaatgtacttattttaaaaaatcaaggcacaaggtccacaaattcaattttgtaaaatttatacttagtttaaatattcaattggctttctattataaatcctaattccacctggatgataaaaatgtaatcttggtcatttcattgttctctaacccccaaatatctcagcattggatcgtagttccaagaggctgtgccarttatcaaagggccctgtggaatggcatgatgtaagaggatggggaatcctagtccgcataagttgccatttagctattttgttcctgtgtggatggccttttcaggatgactggaagctttcttgaaagtctagatcatattttttcgtggtattttttctgcttcttgttctctgagcttcttagatctttagtttgatgtcttctattatttttagaatttttt

SEQ ID NO: 519551 - DNA, 478 bp, Homo sapiens
ggcaggaaggtggtgtctttaggagagagagtacttggatccactggagagtatgctctgagggaagctgyggcacttgcagaggggagtgggctggaaccaaatggagcccttttccggacacgcacaatgctattcccagtgaggtaatctaggaactctacagggcactgcggtccttagctgaggtgctcaaggactccggaaggaagtcatgttccccatttacaacccgttccctagtgcgggaagccagccacggagaaaggaagaactgacggcagggggtggggcaaaaagacagccatgatgggtccgtcctgatgaccccagcatcagacgtggaggtcactttgctctgtgatggctggtccctgtgatgtggcattgatagcacccaatgtacaaatttcccgttgggcagcatcctgggattcccaaaggcatgggatcactgggtgctagacggctgggttta

SEQ ID NO: 519552 - DNA, 490 bp, Homo sapiens
gcgtctccaaccgtgcctgcaagccaagaagcccagtgagactgctgtgggccgaggtgaagggagaaactgagtcaggggacagtccagcttggcctcactcccagaaggaaccatgcttggtgtaacaggaagagaacccggctgagggtagagacccaggttctccttgagcaactactatctgggcagttcactctttctaggcctcagtttcctcgtctgtgagctcctgggagaagggactatgccccagccatccttgtttctccagcaccagctcagttcatcagagcttcatggagattctgggacgcaaggaggcctggggatattgttgsccttttttttttttttttttttttttttttgagacagtgtctcactctgttgctcaggctggagtgccatggctcaatatcagctcactgcaacttgtgcctcccaaggtcaagtgacctggtgccttagcttcccaagtagctgggaa

SEQ ID NO: 519553 - DNA, 490 bp, Homo sapiens
gcgtctccaaccgtgcctgcaagccaagaagcccagtgagactgctgtgggccgaggtgaagggagaaactgagtcaggggacagtccagcttggcctcactcccagaaggaaccatgcttggtgtaacaggaagagaacccggctgagggtagagacccaggttctccttgagcaactactatctgggcagttcactctttctaggcctcagtttcctcgtctgtgagctcctgggagaagggactatgccccagccatccttgtttctccagcaccagctcagttcatcagagcttcatggagattctgggacgcaaggaggcctggggatattgttggcyttttttttttttttttttttttttttttgagacagtgtctcactctgttgctcaggctggagtgccatggctcaatatcagctcactgcaacttgtgcctcccaaggtcaagtgacctggtgccttagcttcccaagtagctgggaa

SEQ ID NO: 519554 - DNA, 436 bp, Homo sapiens
atgacacgtgtttttaagagggagaaaaaaaataaggaatgagaattggctattaagtttgactctaagtacttggaacaaaggcctgcttggagtgagatgaaaaaaaaaattggaagtgaggaataaagatggtgactttagatatctcttttgagagacamaattgtaaaggaaagagaagtgagtgatagctggaaaatttaagttataggtgggcgtattttaaacagtgggctatttaaaaattcacatgtaagccaatataaataatacaacatagagaaggaagaaagagatgatgcagagaggggagtcataattgcaggagaaataattactacgtggataaaaagagtaggattcacagcacagtttgatcagttggcattagatagaatggacacttcttccatcatgacatcagcagaaacag

SEQ ID NO: 519555 - DNA, 569 bp, Homo sapiens
agtgacctaaactataagctggatctaaagaaattacccagtgagcagtgaggagaaacaaggagctagaaracattggaaagttaagagagttcgagggaagaattataaagactaggagtcctagaaagagaaatttaggagaataaaggagaggcagtacttgaaagataacacaattttacaaatttgttggaaaaacatgaattcataaattcaggaagcacaatatataccaaacatatatttaaataaaatccaggcctagactcaaggtattgtaaatgacaagataccaaatacaagattttaaaagcaaccatggggagaaaaagatcagtgaaagcaagacagtcaaatacttagtaggcttcctaacagcaacaatgtacccaaaagagggtagaattctgagaaaaactattagcttagaatttgcaacaagcgaaactgaaacaaacagatgctcagatgaaaaacagatgttatcctcagcacaaattcagtaaagagactacaaaaggatgatcttcaagaagggaaatgattctaaaaggattatctgaaat

SEQ ID NO: 519556 - DNA, 436 bp, Homo sapiens
gtattaaagaggagaattaatacaatgggaatatatacaattaataarcaagctagatacccagtctatttttctttgaggatattttcctgtaggtcattttaattgatttgtttgacatgactacatttataataatctaaaatggtaaacctaagcatcctacatcttgtctttagcttataaagaattttcctttcttgaagcattaagtgacttctggtcccttaaaatattcaaatgtgttgtttttgcaaaatttccataggcaaagaagaatggagaaaagaaattgtaaatggttctcggagcttctttgggttaaagggtctaatgccaggaacagcatacaaagttcgagttggtgctgtgggggactctggttttgtgagttcagaggatgtgtttgagacaggcccaggtgaggctcacacca

SEQ ID NO: 519557 - DNA, 556 bp, Homo sapiens
tgtgggctatgatgccaaagcattccagctcttaagtcagatactggtggactctcatgctggctcagccactacttagctgtggggctttgggtaagtcactcaacctctctgaagttcaggagccttatctgtacaatgaagataatcatatttagtggctaaatcttaaggatactgtgaagactaaatgacaattaatgcaaattcatataaagtacaactcttttwactaccatttgtcattactataaattggagttgatcaatctagaaacagctactttgcaaagtagtgacctctctggtactggaaatcttctaccaagccaggagaggacctatctgttaaagaacatcctgtaagaaattcttgacattgagttggaggttgttctatttgacttctaaagcccttggtattcttggaaatctataactaccctgcaagtctcttctgcaccttgactatgttaagtttaaccaacttttattgagctccaaccactgttcatgtaaacattagcgagaatcagtcccttccattgagggactt

SEQ ID NO: 519558 - DNA, 394 bp, Homo sapiens
cattgacgcctcaggctgaattgtacgggagaaagggccaggatgtgccccagcaggcaaacaggtggtaaaagaaggaagagaagagaaattgaaaagaaagcgttctgaacaaaagggatttcaaagggtgaggggtttgaaaagagagatgaagggcaaaaacaagagaagaaagcaacagacaccctmacaggggtgaagataatcagagacaggcaaacagaagagaggataagaactctgtatgtgattctgctggtggtggtggtggtggaaggacaagcacagacacacatctgtagatattaaatgttccatgaggatgcactaccttgattatatgacaaagacaagctacataaaggtggaagagaactaatatttcttgagt

SEQ ID NO: 519559 - DNA, 318 bp, Homo sapiens
atgtaaatcagtagttaaaataagggccaggaaggcttcaacacaacacacctctttaattcaagtcagatctataaaaacggagacttgacagacctcagatttaggtgctaaaggttaatctaaaattccattttacaccaaaactccccggtartcactcaagtctcccaatgacttgccatccagacagagtttgtttttgaagtaggaacgctgtaaagtcagggtacttttccacagaggttagtaatctttgtgtccattccaaaacaattcctttaagactctgcagtggagagcccgaagacatgagtg

SEQ ID NO: 519560 - DNA, 318 bp, Homo sapiens
atgtaaatcagtagttaaaataagggccaggaaggcttcaacacaacacacctctttaattcaagtcagatctataaaaacggagacttgacagacctcagatttaggtgctaaaggttaatctaaaattccattttacaccaaaactccccggtaatcactcaagtctcccaatgactygccatccagacagagtttgtttttgaagtaggaacgctgtaaagtcagggtacttttccacagaggttagtaatctttgtgtccattccaaaacaattcctttaagactctgcagtggagagcccgaagacatgagtg

SEQ ID NO: 519561 - DNA, 533 bp, Homo sapiens
agcgtcaaatcaaggaggggtggcagcaaagaggaagcaaaagagaagacaagaggaaagagagtttatggagagaggaagccaagttgggaagtggggagaagggcaggctggccaggggatgcgacgcgacagggcagagggagtgggaagaagcgggcaggaggcggcctccacgcagctggcagggcaggcagcgctggagagggaggaggagagggaggctgcaggcaccgcgcagcagccgaggatgagagaggtaaccggagggaacgggcgcacacaactgcttccgcaggacttcctgcgataacacgcccacagcccgggcgccgagcacgcgtggtggcggccgcaggcccggggctcctgcgagagcgaacgccagcgacacacacgcagctcctgtygtgtcgccgctgccgcctaggcagggccgcagacagcagcctccttcccagactgagccaactcactctcaccgtagctgctccagaatccgtgaaaagaaaatggaatgctatttctgttcc

SEQ ID NO: 519562 - DNA, 533 bp, Homo sapiens
agcgtcaaatcaaggaggggtggcagcaaagaggaagcaaaagagaagacaagaggaaagagagtttatggagagaggaagccaagttgggaagtggggagaagggcaggctggccaggggatgcgacgcgacagggcagagggagtgggaagaagcgggcaggaggcggcctccacgcagctggcagggcaggcagcgctggagagggaggaggagagggaggctgcaggcaccgcgcagcagccgaggatgagagaggtaaccggagggaacgggcgcacacaactgcttccgcaggacttcctgcgataacacgcccacagcccgggcgccgagcacgcgtggtggcggccgcaggcccggggctcctgcgagagcgaacgccagcgacacacacgcagctcctgttgtgtcgccgctgccgcctaggcagggccgcagacagcagcctccttcccagactsagccaactcactctcaccgtagctgctccagaatccgtgaaaagaaaatggaatgctatttctgttcc

SEQ ID NO: 519563 - DNA, 594 bp, Homo sapiens
tgaaatgttccaaatgcttaataaacgcaagacaatgaggctgaagccaaagggatgcaacacagartaagacacagtccttggcctcaaagaacttatattccactgggagacaaagtgcctgtatggtaccatagagaaggcatgaaacgcatgagccagcaaaccttggctggaagcctgcacttgcttgtgagctgtgtgactctgggtaatttatcggatcctcttatgcctcagtttcctcatcagcaaaatgggtgtagtcatacccagtttcacagaggatgctgaggtaacagcattcaatcaactgctgtgaaatctctaagcaccatatagatattcaagattcttaaacacatcagtaatgcacaagagaaaggaacatatgtgcagtaaattaacaagcgaaagactatgaaaaatcagatacaagcaccataagcctactggggttatgataaaagagtgtcctcactgcacgttgtaggtattgtaacccaattttctgaactcgcagaagaggacaatgatgaggaaggagaatagaaagcaggaggaggaggaggaggaggagatggctgggccatt

SEQ ID NO: 519564 - DNA, 553 bp, Homo sapiens
gcagtaagtatcaggtagtagaaaacaaacatcgaatgaatgtgattgatctcaaaggaggccttttgttgctgttgataagaccttggagacacaatggatacgtgatgaacacacacacagragctcacacatgcacacacacacgcacacacattcctgcccacatatacatacatcaaagccagaccaccacagaatcagataggcatcattatatatctctctaaccaggacaaaatatgtgtccccagaaattagaatagatgatcttggactctagcaaaactcagctcaagtatcctccattctggtaaccacctgacaaaaatgttattaatctagcacttgaaaggtatcaagaaaagcaggcttcttggacttaaatttctgagtgttttttttaaggctgtatatttatagcttaggagggaaaaaaaggaaattaaggggaaaaaaaattaaatgaaaaacacttatgacctaaaacatctctgtgaggtaggtaacgctatgatagcaaaacaacaaaaatcagaagcaatattaaagg

SEQ ID NO: 519565 - DNA, 553 bp, Homo sapiens
gcagtaagtatcaggtagtagaaaacaaacatcgaatgaatgtgattgatctcaaaggaggccttttgttgctgttgataagaccttggagacacaatggatacgtgatgaacacacacacaggagctcacacatgcacacacacacgcacacacattccygcccacatatacatacatcaaagccagaccaccacagaatcagataggcatcattatatatctctctaaccaggacaaaatatgtgtccccagaaattagaatagatgatcttggactctagcaaaactcagctcaagtatcctccattctggtaaccacctgacaaaaatgttattaatctagcacttgaaaggtatcaagaaaagcaggcttcttggacttaaatttctgagtgttttttttaaggctgtatatttatagcttaggagggaaaaaaaggaaattaaggggaaaaaaaattaaatgaaaaacacttatgacctaaaacatctctgtgaggtaggtaacgctatgatagcaaaacaacaaaaatcagaagcaatattaaagg

SEQ ID NO: 519566 - DNA, 553 bp, Homo sapiens
gcagtaagtatcaggtagtagaaaacaaacatcgaatgaatgtgattgatctcaaaggaggccttttgttgctgttgataagaccttggagacacaatggatacgtgatgaacacacacacaggagctcacacatgcacacacacacgcacacacattcctgcccacatatacatacatcaaagccagaccaccacagaatcagataggcatcattatatatctctctaaccaggacaaaatatgtgtccccagaaattagaatagatgatcttggactctagcaaaactcagctcaagtatcctccattctggtaaccacctgacaaaaatgttattaatctagcacttgaaaggtatcaagaaaagcaggcttcttggacttaaatttctgagtgttttttttaaggctgtatatttatagcttaggagggaaaaaaaggaaatkaaggggaaaaaaaattaaatgaaaaacacttatgacctaaaacatctctgtgaggtaggtaacgctatgatagcaaaacaacaaaaatcagaagcaatattaaagg

SEQ ID NO: 519567 - DNA, 553 bp, Homo sapiens
gcagtaagtatcaggtagtagaaaacaaacatcgaatgaatgtgattgatctcaaaggaggccttttgttgctgttgataagaccttggagacacaatggatacgtgatgaacacacacacaggagctcacacatgcacacacacacgcacacacattcctgcccacatatacatacatcaaagccagaccaccacagaatcagataggcatcattatatatctctctaaccaggacaaaatatgtgtccccagaaattagaatagatgatcttggactctagcaaaactcagctcaagtatcctccattctggtaaccacctgacaaaaatgttattaatctagcacttgaaaggtatcaagaaaagcaggcttcttggacttaaatttctgagtgttttttttaaggctgtatatttatagcttaggagggaaaaaaaggaaattaaggggaaaaaaaattaaatgaaaaayacttatgacctaaaacatctctgtgaggtaggtaacgctatgatagcaaaacaacaaaaatcagaagcaatattaaagg

SEQ ID NO: 519568 - DNA, 619 bp, Homo sapiens
gggccagggagacctgcggatggcgagagcaggttctcttaggagggtgtggattgtgagcttgtgcgctggcgaggagcagaaggtcagggaggcaccgtagttaatgaatcaataaaccaaacagccgatcaatcacttcctgcagtccgagtccggcgagggctaatcgattggtccgggtattttgaaaggaaaaacggcggtggatatgttgtcaaacggaggggtgcaggagaggcggggccaggcctccaggtgacccctctggcttcctgggcctgcagaggcgccgaaacgtgcaggcgccggcgtccatgaggcgtggggcgcgccgggcgagtccctgcttgcaggaggcgcccgagaggccgtcgcgtaccctggcaagaggagctggttagcacctcccgaccccragaaggcccagggggcgcccggcgggggggcggggaccgggcgaggcccgcctcccattggccgcatagcgccgcccagcgcgggccgccgttataaagcagccgccggcgccgggtgcctcacagcacgctgccacgccgacgcagacccctctctgcacgccagcccgcccgcacccaccatggccacagttcagcag

SEQ ID NO: 519569 - DNA, 522 bp, Homo sapiens
  misc_feature (1)...(522): n = A,T,C or G
acatattttaaaatttgaagacaaataaaagggaactcaaagtaaattgggatacatacatacaacagaatactgagccattaaaaaatgatgaaatagtaaaattgggggaattttgatgatactaggatgatataatgaccaagagacaaatacaattttagtttggttgagagatgtgatcatcacgttgctgattttactatgtatagaggttatcttttcctttctaagattttgaaactttaattagttaacccacttacctagtttctattagctgtgtaactttctcttcctgttttttgttttgttttgttttgttttttgctttttaactgcagtattttgaggagtcttggagtagcaagctaatctttggaagaaaggaaaatataaacctgaaaactaayaatttaaagaacgtcttttcaggttgtcatttgaaaaatancttgatttctgatcnacntgatttgaattgagtgtcaaatatttgatatgttttgtaaattaggtgaa

SEQ ID NO: 519570 - DNA, 588 bp, Homo sapiens
  misc_feature (1)...(588): n = A,T,C or G
tgaagatgagtgagtaggttctaaactgcttgggtttaccgcactctggagcattgcagragaatgtgatgttggaaggaagtgctgaaacataattattggcttgcctataggagggtgctacataattttagaaggtgtcaagaaattgacacagtctgaattagttctgttgagttgcaaaaaatgtaaagtttcttgattctgaaaataagaaatatgttcccagaaatctcatctagttaatgtgcttttaaaatcattgatgtctcttgttattacaataatagccattgaaagaatcttttttattagaatgttatttacaggtacgattagcttctatttaaataaattatttttatacttgatcttaggcaaaaggccaacaagtgatcagaataaattattttaagagnaaaactaattataattgatatttggaattggaagcacaatttcctttagaacaattccacgaatggttgttttgattctcaaggcagcccacaaaagacagtttgaaacacaatttatgcagtgtcaatagtactgacctgactttggatcttggaggcaggggcttca

SEQ ID NO: 519571 - DNA, 522 bp, Homo sapiens
aaagctccagtcacatggagaggacacaaatgagccattaaatgacagaaccaaccaccacacatgcaaatgaagaagccttcgagatgtcttcagtataggtcactgtctggttgcagccacatgagagaccctgagcaagaaccatccagctaagcccagttatccctcagaaccatgagaggtaataacaaagtgatgatgttgttgtaggctactacatttttagcatgctcgcttacagtcagagatcacagtgcgtatacatgggtgggaaaggctagaaactaagaatgggtggcctgcaccccamacatgaactacaaagtaggtcatggggatatgtggacacttgtgcacacttggagaattccccagtaagaagcctgatgatgaaagattcagaagagagttatatgtattgacttttgttgtgctggaaccaaattgtaaagtgtatgtagtttctggtattgatgacagatcactggcatggatgacacactctgagtgccacttgag

SEQ ID NO: 519572 - DNA, 541 bp, Homo sapiens
gagagttgtgatgacttacccgtagtcacacagcaagcagatagtacatcaaggactcaagcaagatttttcaatctgagttgaatgcttttcctaggaccccacagatgagtaccaaacagtgctaccgaagtagataactgatgagaatttctttttctgtgactcactctaaggcaggatttaaatcaaaacttttaaagtctaagatttagagaatctgctgtaaaaggggagaaragtttaattttatatccacttgagaaaccaaagtttttttctttcaaccttaaaaaataaaacaaaaccgaggtgagcctaaggccagcatgctgattgcatcagagagacgaagatgaaatgaggagagaggaaaacgggcatgagccctaaatcagcacgttaaaggggctggcctgggaggtttgtattatcagacgttagtcagagagggactttcttttgctggctttaaaagaaaactgaaataacacattaattttaggtcctttgatattttttcctggagatgttttgtttt

SEQ ID NO: 519573 - DNA, 477 bp, Homo sapiens
agctctcacagagccttgaggaaatagaaggcaaaagggcagggaaacctggtatgaaggcaaccaccagagagctcacatgcagagaacaggaaaactgaaagctgctattggcagaggaaggatttcaccaaatytgcgtgcagtggggataaccagaagctcgctaccatactggtgtgtgtaagattgatgtccaaactgctggtaaacacaagcaaaggaaagaaactaaaatccaagtgtcccattaggtgttccaaacaaactataatgtgaaactgatgttaagtacattttgataagagatcagtactgaaaaactcatgttgtggtacgttttaaattttctagtagattttttattggtgtaggcaaaaggttactatgcaagaactttaagaaaatgtttgatattgtctttaatgagtagaaaagaaaaggaatttgttcacctgtctaccaaacgaaaaaaaa

SEQ ID NO: 519574 - DNA, 620 bp, Homo sapiens
cccatcctgaacgcaactccttccctggggatgtcccgccctccctgcacctctgcacacccacgctcttcctgccttcgagaacgtgcctctgtgcatgggcgagcctgtggccgtgactgtgacccctcactgccaggatggctgctgctgcgacgtcaacacaaagcacrccgctctgccttgtgcttacttgtattttggggggaaagcagccctgccccccaaggcttgcttctctgttgtcatcgccccaaaggacaagggactggtgctgccacttcctgagctacgagcagtaagaatattcaaatctctcccaccctgccatcatggtctggtagccaggctcctcccagggtggcttccacttccctggaaggactggccccacggatgctgcatgggctcaggttggaggggaaggacacggcagggcagacccatgctgctggggccccagtgctgggggcctccctccaacacctgcctaagggatgcccagggcagggctctctccctgcaccggaaactctccctcctttccttgcttcttcctacatccaaattctgcccattcttcaaagccacggtctggagccatcactgaggtccaagtc

SEQ ID NO: 519575 - DNA, 583 bp, Homo sapiens
ttctatttccctctcttcttccgccacccccaccacgtctctatcctctcatctccccgacccccactcattccctcccaccctagcacagctcggttccggtccctttttccctcccacattttctctcttccctatagccttctcccttctttcatcctctcctctcatkgcgcctcatcccctctcttctccccctccctctccctcctctctccctcctggccccatccttctccaccttcagctccactatccccctctccctacccgttccttcctcccttccgcctcccccttcctcctcccgcccaccgccccgcacccgcccgttccacccttcgactttctcctgctgtggcctaggctgagccgggagttaccacttaactctcactgggtctctcctgcaccctatctctaaacttcctcccttgggtgccccagctttcctactcctgtctctcccgcagtacctaggcttctctctctgactctccgtctttctccagttatctacatctgcagctcccctgatgccttcagaaccctcatgctcctggccctggaagctggcttgtgt

SEQ ID NO: 519576 - DNA, 626 bp, Homo sapiens
taagtatatagaaatattccaagctctatctctgccatttgaacttacatgggagggaggacatgcatgtgattctattcaccagttgcacacacgaggaaaagcaaagaatctgggccaaggcacaagcccatgctgacaggaaacatgcattagatgtcactcaccgtgtaggggcattgcagtccccaaccaggaccctaacaggaactaccaagagggtagcagaracttgcataggagaaacaggatcataaaatatcttttagaagaaatgaggaagtaggctacccaaccagataactacaataaacaaagaaataattcagggaaaggatgagaatcccacattgtttcagaaacaccttgtagaggcagtaaagaaatacaccaatgtggactctatctctgaggcagggcagtcctcttagggacacacttcattagtcagtctgccacagacattaggaggaaaatacaaaaaatagccattgggtccccagaccccaaagaatgaattagtaaatgtagcatttgacatcttcaacaatcataacagagtggaagaggctcagtgggatcaatgtgaagaggaaagagacaagcaggaggcacagttgtttgcc

SEQ ID NO: 519577 - DNA, 626 bp, Homo sapiens
taagtatatagaaatattccaagctctatctctgccatttgaacttacatgggagggaggacatgcatgtgattctattcaccagttgcacacacgaggaaaagcaaagaatctgggccaaggcacaagcccatgctgacaggaaacatgcattagatgtcactcaccgtgtaggggcattgcagtccccaaccaggaccctaacaggaactaccaagagggtagcagaaacttgcataggagaaacaggatcataaaatatcttttagaagaaatgaggaagtaggctacccaaccagataactacaataaacaaagaaataattcagggaaaggatgagaatcccacattgtttcagaaacaccttgtagaggcagtaaagaaatacaccaatgtggactctatctctgaggcagggcagtyctcttagggacacacttcattagtcagtctgccacagacattaggaggaaaatacaaaaaatagccattgggtccccagaccccaaagaatgaattagtaaatgtagcatttgacatcttcaacaatcataacagagtggaagaggctcagtgggatcaatgtgaagaggaaagagacaagcaggaggcacagttgtttgcc

SEQ ID NO: 519578 - DNA, 563 bp, Homo sapiens
acatttctctagaataaaatctgtttcgccttaacctccacaggattctctatcaacaactgaagatctggaatactcctgggagctacgcttgaccgggtgcagtggctcacgccggtaatcccagcacttggggaggccgaggctggcggattacagggtcaggagatatagactatcctggttaacacggtgaaaccacgtctctactaaaaatacaaaaaattagctgggtgtggtggcgggcacctgtagtcccagctactcgggaggctgaggcaggagaatggcatgaacccgggaggcagagcctgcagtgagccgagatcatgccactgcactccagcctgggtgacagagagagactctgtcttaaaaataaataaataaataaataagtaaaataaaataaataaataaaaaattaaaaaaactytatgctccttttcagaaggaatccttgggagcctcctactacaaaatgatgctctgaataaggttggaggtagtattaatcttcctaattctctgcctgttcatcttttacttttactgatgtgagt

SEQ ID NO: 519579 - DNA, 653 bp, Homo sapiens
ctcagagtagtgtgtggtagattttctgctcttgtatatgctgatgggcacaaccttaaagcattttaaaacacatgacaccagatcttttatagtaaggagaatagaaagccattggtatctcaatgatgtcaatgtaggctttgaaagagagtgagaagaggtagtatattacagccacccaaaatagtacgtatttttyttagttaagagtttgtttttatgtaggagcattcataaaggagtaggaaatgacttgaagagtacactgaaagaaagttaggttaaaaatatgaaatcccttattcttctctgtgtgatatttttccaatttttattgtgtaaaacatacataacataaaactcacaatctcagcgatttttaagtgtacagttcagtggcattaagtacatttacattgttgtgccagtatcaccaccacccatctccagaacattacatcttgaggaactgaaactctatactcattaaaaattaactcctccttgctccctatccctggcccctggaaatcaccatcctactttttgtctctgtggttttgactactcttaagtaccccatataagtagaatcacacagtatttctttttatgactattgcatttcacttagaacagtatcttcatgg

SEQ ID NO: 519580 - DNA, 629 bp, Homo sapiens
gctgcagatgttaaggaaattgctgagtgatggtaacctcatattttgtctgtagattctctgaattcatcttttcttcaacaagtattcatggtatttacctgctgtgtgccaggagctagaaattcagagatgagttagctcaaaataaggaagaagggcatttaaagaattatagtcagtgaactttggctagtagaggtatgtgttttgctttcttcccagtgataaaggtaatgaaaactaagagtctagaatgcaccaagatagtttttcagaagtgttatggaaacacagaatgacttgtgtgcctggggaggtgaagtcaatgaaaatgtcacagaaaagctgttttcttaagaaaagtttttacttttgagagaccaggtctcactctgttgcccaagctggagtgcagtggtgcaatcatagctcactgtagccttgatctcctgggcacaagcaatcttcctgcytcagcctcccaagtaactcggactacagacacgcaccaccatgcctggctaattttttcccttttttttttgtagagatgggggcctcactatgttgcccaggctggtcctgaacttctggcctcaagcaatccccttgcattggcttcccaa

SEQ ID NO: 519581 - DNA, 524 bp, Homo sapiens
gttgggagagattggagaggaatacagaggaagtgaggactggttaggaggcagtttcaggtgagagatatggtggctcagacagggtgagaagatggagatgagagaacaggtaggatggaggaatgctttacatgcagtagccgtaggacttggcggtggtttggacctgggagttaagagagtgggagggggacaaggatgtctctcaggtttctggtctattaaacaactgaacagatagagatgctgtttgttgagatgaggagtagaggaggaggccatgtctagagtggatcttgggctcctctctttggaccccttaggtttgcagtaccccatgagacatccagggaaaagcagtgacatgcaaacatggcctakggtttgttccccccctcagctctatgggaaaattgggctccatgggaatgctgtttagggatggcatttgcttgcaaatgacagtggcttaaacagatagaagttgattggtttcacacaaaagagtttgaaagttagcc

SEQ ID NO: 519582 - DNA, 631 bp, Homo sapiens
gaacagagcctggcataaagcaaatgcccaaaaagtatcagcyataataattttactcctcatgtgggaagtgtcggtgaaactagttgtctagttatttaaataacaagcatgtcatttatgggaactgggttcaggagtaaagctgctattgttggttgtctttggcattaacattaaggatattaggaaagttaactctatgaacacaaaggctgaactctggcagcctttcaaaagagttagcaatcgaattttttgcctatatccattcattgaacattcattatcctcacacttattgagtatctactgatgtcaggcatgaggatgcaaagatacctgagaaggccaaccatctattattcattcgacacacatttaccaagtactttttttttccccagcaagtcactgctgggaaaaaaaaaaaaaaccgatgcatcagacccttcagtagcttacaggttaatggggggagataagtggtgtgtacacaatggagacacaaggaggaagatgatacatactacaaagaggtagggacaataataatgaacacttctttacacaggctccatgctaagtgccttacttggattatcccagggtgctgtgggagttgagagga

SEQ ID NO: 519583 - DNA, 631 bp, Homo sapiens
gaacagagcctggcataaagcaaatgcccaaaaagtatcagccataataattttactcctcatgtgggaagtgtsggtgaaactagttgtctagttatttaaataacaagcatgtcatttatgggaactgggttcaggagtaaagctgctattgttggttgtctttggcattaacattaaggatattaggaaagttaactctatgaacacaaaggctgaactctggcagcctttcaaaagagttagcaatcgaattttttgcctatatccattcattgaacattcattatcctcacacttattgagtatctactgatgtcaggcatgaggatgcaaagatacctgagaaggccaaccatctattattcattcgacacacatttaccaagtactttttttttccccagcaagtcactgctgggaaaaaaaaaaaaaaccgatgcatcagacccttcagtagcttacaggttaatggggggagataagtggtgtgtacacaatggagacacaaggaggaagatgatacatactacaaagaggtagggacaataataatgaacacttctttacacaggctccatgctaagtgccttacttggattatcccagggtgctgtgggagttgagagga

SEQ ID NO: 519584 - DNA, 631 bp, Homo sapiens
gaacagagcctggcataaagcaaatgcccaaaaagtatcagccataataattttactcctcatgtgggaagtgtcggtgaaactagttgtctagttatttaaataacaagcatgtcatttatrggaactgggttcaggagtaaagctgctattgttggttgtctttggcattaacattaaggatattaggaaagttaactctatgaacacaaaggctgaactctggcagcctttcaaaagagttagcaatcgaattttttgcctatatccattcattgaacattcattatcctcacacttattgagtatctactgatgtcaggcatgaggatgcaaagatacctgagaaggccaaccatctattattcattcgacacacatttaccaagtactttttttttccccagcaagtcactgctgggaaaaaaaaaaaaaaccgatgcatcagacccttcagtagcttacaggttaatggggggagataagtggtgtgtacacaatggagacacaaggaggaagatgatacatactacaaagaggtagggacaataataatgaacacttctttacacaggctccatgctaagtgccttacttggattatcccagggtgctgtgggagttgagagga

SEQ ID NO: 519585 - DNA, 664 bp, Homo sapiens
taagtgagtgagtgtgtgaaagagcacagaacagagcctggcataaagcaaatgcccaaaaagtatcagccataataattttactcctcatgtgggaagtgtcggtgaaactagttgtctagttatttaaataacaagcatgtcatttatgggaactgggttcaggagtaaagctgctattgttggttgtctttggcattaacattaaggatattaggaaagttaactctatgaacacaaaggctgaactytggcagcctttcaaaagagttagcaatcgaattttttgcctatatccattcattgaacattcattatcctcacacttattgagtatctactgatgtcaggcatgaggatgcaaagatacctgagaaggccaaccatctattattcattcgacacacatttaccaagtactttttttttccccagcaagtcactgctgggaaaaaaaaaaaaaaccgatgcatcagacccttcagtagcttacaggttaatggggggagataagtggtgtgtacacaatggagacacaaggaggaagatgatacatactacaaagaggtagggacaataataatgaacacttctttacacaggctccatgctaagtgccttacttggattatcccagggtgctgtgggagttgagaggatggag

SEQ ID NO: 519586 - DNA, 652 bp, Homo sapiens
gttgttttcctctagagtttccattcttcaacctcttgtcttttccccaactattcccttcctttaaaaatcttatctgcagccaaggcttcaattaccatctaaatgaaaatgactctaatattacatgtttagttccatctctttctyagaatgaagttacagatttctgtttctttcttttcttttcttttcttttttttaaacagagttttgctcttgtcacccaggctggagtgcaacggcacagtcttggctcactgcaacctccacctccagggttcaaacgattctcctgcctcagcctcccacgtagctgggatgacaggctcccgccaccatactcagctaatttctgtatttttagtagagatggggtctcaccatgttggccaggctggcctcaaactcctgagctcaggtgatccgcctttctcggcctcccaaagtggattacaggtgggagccaccgcgccttgccaaagttacagatttctaaatgcctcctggataatctccatctggagttggattcagtgtttccccagatcaaacatatccatttccttccacaattgtttcttttcccgtacctttgacttcggttaatagcacagttctctcaatcatatccacttctcccttttctgta

SEQ ID NO: 519587 - DNA, 528 bp, Homo sapiens
catgtttagttccatctctttcttagaatgaagttacagatttctktttctttcttttcttttcttttcttttttttaaacagagttttgctcttgtcacccaggctggagtgcaacggcacagtcttggctcactgcaacctccacctccagggttcaaacgattctcctgcctcagcctcccacgtagctgggatgacaggctcccgccaccatactcagctaatttctgtatttttagtagagatggggtctcaccatgttggccaggctggcctcaaactcctgagctcaggtgatccgcctttctcggcctcccaaagtggattacaggtgggagccaccgcgccttgccaaagttacagatttctaaatgcctcctggataatctccatctggagttggattcagtgtttccccagatcaaacatatccatttccttccacaattgtttcttttcccgtacctttgacttcggttaatagcacagttctctcaatcatatccacttctcccttttctgtacc

SEQ ID NO: 519588 - DNA, 528 bp, Homo sapiens
catgtttagttccatctctttcttagaatgaagttacagatttctgtttctttcttttcttttcttttcttttttttaaacagagttttgctcttgtcacccaggctggagtgcaacggcacagtcttggctcactgcaacctccacctccagggttcaaacgattctcctgcctcagcctcccaygtagctgggatgacaggctcccgccaccatactcagctaatttctgtatttttagtagagatggggtctcaccatgttggccaggctggcctcaaactcctgagctcaggtgatccgcctttctcggcctcccaaagtggattacaggtgggagccaccgcgccttgccaaagttacagatttctaaatgcctcctggataatctccatctggagttggattcagtgtttccccagatcaaacatatccatttccttccacaattgtttcttttcccgtacctttgacttcggttaatagcacagttctctcaatcatatccacttctcccttttctgtacc

SEQ ID NO: 519589 - DNA, 652 bp, Homo sapiens
gttgttttcctctagagtttccattcttcaacctcttgtcttttccccaactattcccttcctttaaaaatcttatctgcagccaaggcttcaattaccatctaaatgaaaatgactctaatattacatgtttagttccatctctttcttagaatgaagttacagatttctgtttctttcttttcttttcttttcttttttttaaacagagttttgctcttgtcacccaggctggagtgcaacggcacagtcttggctcactgcaacctccacctccagggttcaaacgattctcctgcctcagcctcccacgtagctgggatgacaggctcccgccaccatactcagctaatttctgtatttttagtagagatggggtctcaccatgttggccaggctggcctcaaactcctgagctcaggtgatccgcctttctcggcctcccaaagtggattacaggygggagccaccgcgccttgccaaagttacagatttctaaatgcctcctggataatctccatctggagttggattcagtgtttccccagatcaaacatatccatttccttccacaattgtttcttttcccgtacctttgacttcggttaatagcacagttctctcaatcatatccacttctcccttttctgta

SEQ ID NO: 519590 - DNA, 678 bp, Homo sapiens
ggggagagcaatgaagacagcaaagacaaccatgaagccagcacgaagaaaaagtgaggaataggttttaatgggtcttgtgtgttttttattattcaggtttttaatcacagttctgttccaaggttatcttactataataagcagttatcttttgatcacccaattcctgaattcagtaagcaagttacaattcaaaaaggaagaagagtaaaaaccttttattgacagtgactttgccactgaattcaagggaatggaactagctgggaacccagttaaaaagaaaatatttgctcctggactacttttactgagatactgttagtaatgacttgcattcacactttcttgaattgtgaaaggataattgtaaaaagttagatggagaatcacagttttgttgttgttgttttttctttgagacagagtttcactcttgttgctcaggctggagtgcartggcacgatcgtgctcactgcaacctccacttcctgggttcaagcgattctcctgcctcagcctcccaagtagctgggattacaggcacctgccaccacgcccatctaattttttgtatttttagtagagatgaggtttcaccatgttggccagcccggcctcgaactcctgacctcaggtgatccacccaccttggcttcccagtgttgggatta

SEQ ID NO: 519591 - DNA, 495 bp, Homo sapiens
ggcagagactcaggaaaaataagtcagagactctgagatttgggggacagagctgaatcagggtgagacagaagaccagaaatagaggagggggatagagacccagagagagaaggaacagacacaggggctgggtggggacagagaactggaaagagggggacagagaaccaggcggtgatggagaccctggttgagagagtgtcagtttccaggtaggaggaaggacaatgggaaccctgtgaaggtagttgttagtwatatctccatttcacagtgtagggaagcagaggcacagagaggtgaagtcctctccatgaggtcatacgggctagtaactgggagaaattagttggccctaggtcctgttgccttggtttccagaacaattacccacaggaaacccaagaccttctgagtcttcaggttagaaagacactttgtgtaatgctttctattgctgtgaaaccaattacaccaaaacttcaaacaaca

SEQ ID NO: 519592 - DNA, 557 bp, Homo sapiens
cagctgccacagactccaaaggcgtagaagtttgtgccaacacacggagtcattctggctctctgctgaggcccctgttttctggcaggtgccctccttggaaactggttttggctctgatcagcggttctttttgcagcaaagcctgcatctgtgttgacttgcaagattttgcgtttattcaggcaaaaactggtcaaaatggttactacatgatttgttcccagaggtttgaaacattcagtgaaactttttaaaactttgattgcatgatgtattttttttttagaaagttattgtttgagaataatgtctttttataccaggaaaatagttatcctgaatgacgttgaaaactccccctcccctttatttttttttaatcaatacatgtgaaagtacaagccctcggcccttgcgtcttcattcattcccggcttcaagcggggcgargtggtgtgctcagtgcaggacactggggaagctggggctgtggggctgtggggtgtgggtcctggtggggggttctgaagatcccatccttccagtctcctcct

SEQ ID NO: 519593 - DNA, 520 bp, Homo sapiens
ataaccatggacaaggcagctactcctactcgaactcctacaactctcccgggggcgggggcggatccggatccgactacaactacgagagcaaattcagtgagtkggcttccagagcccctcggccgggccagggtccaggccccagcagtgcagcctcacggagtggcagaagctcggcactgcccagacctctggctgagggccttaggaggaggacaagtggtgctggctgcgggcgggtgctaggaagatggggcgtgggacctcatggtgccgtctccgccactctctctggtgtgttctccgtaggcagggtagctgaggcctctgtcccgaggccctggctgtgggtgaggctgcaaggtgacttcctgggacttgctctagagagttttgcatccagcccctgcaagagcttgacctctccgccaccgcctttccgcttcctcatgcgcagacccagcaggcccgggctgcaccagtgacccagtggggctgagtaggtgtgtccttggga

SEQ ID NO: 519594 - DNA, 462 bp, Homo sapiens
gggggcggatccggatccgactacaactacgagagcaaattcagtgagtgggcttccagagcccctcggccgggccagggtccaggccccagcagtgcagcctcacggagtggcagaagctcggcactgcccagacctctggctgagggccttaggaggaggacaagtggtgctggctgcgggcgggtgctaggaagatggggcgtgggacctcatggtgccgtctccgccactctctctggtgtgttctccgwaggcagggtagctgaggcctctgtcccgaggccctggctgtgggtgaggctgcaaggtgacttcctgggacttgctctagagagttttgcatccagcccctgcaagagcttgacctctccgccaccgcctttccgcttcctcatgcgcagacccagcaggcccgggctgcaccagtgacccagtggggctgagtaggtgtgtccttgg

SEQ ID NO: 519595 - DNA, 462 bp, Homo sapiens
gggggcggatccggatccgactacaactacgagagcaaattcagtgagtgggcttccagagcccctcggccgggccagggtccaggccccagcagtgcagcctcacggagtggcagaagctcggcactgcccagacctctggctgagggccttaggaggaggacaagtggtgctggctgcgggcgggtgctaggaagatggggcgtgggacctcatggtgccgtctccgccactctctctggtgtgttctccgtaggcagggtagctgaggcctctgtcccgaggccctggctgtgggtgaggctgcaaggtgacttcctgggacttgctctagagagttttgcatccagcccctgcaagagcytgacctctccgccaccgcctttccgcttcctcatgcgcagacccagcaggcccgggctgcaccagtgacccagtggggctgagtaggtgtgtccttgg

SEQ ID NO: 519596 - DNA, 275 bp, Homo sapiens
caaaattaactctcttcttatcatacaaggccccatgcccttaaactaggagacatgtcaggaaacgcttcctgtatagttagcgcagggtataacttatctgcttctccctttcagactacctgtaatcagtctctacttacttccttaaatgcctcagtctcctaccaggcacccaacaatacctggctggcctgcacttcaggcctcactcactgcatcartgggactgaacctggacctctcctgtgtgtgttggttcatgtactgcccca

SEQ ID NO: 519597 - DNA, 448 bp, Homo sapiens
gttgtgggcacctgtaatcccagctactcaagaggctgaggcaggagaatcacttgaactcaggaggtggaggttgcagtgagctgagatcgcaccamtgcatgccagcctgcgcaacagagtgagaccccatataaaaaaaaaaaaaatcttatgtttggaaaacatttaagagcatagtaaaatggagattaacaggtgtttgggggccacaaggagaaataagttgcataggcaagagagggccagactagttcctgacaaaaaattcatttaaatgaatattactaatacctccttacccttgtaagacttttattttgtctaaaggacttaatactgagtcagtattaagtataccatgcaggcttctggcaatgtacatctgctgcattacacaactactgtgggaatttaaatcaacaatttttgttttgaccctaacaag

SEQ ID NO: 519598 - DNA, 448 bp, Homo sapiens
gttgtgggcacctgtaatcccagctactcaagaggctgaggcaggagaatcacttgaactcaggaggtggaggttgcagtgagctgagatcgcaccaatgcatgccagcctgcgcaacagagtgagacyccatataaaaaaaaaaaaaatcttatgtttggaaaacatttaagagcatagtaaaatggagattaacaggtgtttgggggccacaaggagaaataagttgcataggcaagagagggccagactagttcctgacaaaaaattcatttaaatgaatattactaatacctccttacccttgtaagacttttattttgtctaaaggacttaatactgagtcagtattaagtataccatgcaggcttctggcaatgtacatctgctgcattacacaactactgtgggaatttaaatcaacaatttttgttttgaccctaacaag

SEQ ID NO: 519599 - DNA, 599 bp, Homo sapiens
aacaatcagctcttgcgtgaactcactcatcaccaaggggatggtgctaagctcttcatgagatcagaccccacgatccagcgacttcccaccaggccccacctccaacagtgtgaatcacatttcaacatgagatttggaggggacggacatcccaactatatcacacgtgaacattctcagcctcagcagtcttatcagaagaatgaggataacccagtaaactcaagcctaagtgatggaggtgtggaaatgcttgacagacagagttgttaaaggggaagctatgtcatcataaaagggaatgagctgatgactatgaccatgttcttttcaggagacacagtgaggtgcacttaagcagatgtgattggtgcttccaaaccaactcgtttgactgccaacaccaactactctcttcctgaggtgatctctggccattgtagcccacatggaccacatggagcagactagggagttaatgtatccctagaagcagtcctcaaccgtgactgaaaactccagcttcctcatcctgggatagkagcaggcacaacaactctgaagcatgttgcatagtgtccccctggcagaaccaa

SEQ ID NO: 519600 - DNA, 519 bp, Homo sapiens
gaatatgccaattgtggcatattcactcaataaaatactggtcagcaataaaaaggaacaaatactgaaatgtgcaacaacatgaatcaatttcagtgacattacattgaacaaaagaagccarccacaaaagaacatacgtagtatgattccgtatatatgagattctagaacaggtaacattaatctataaggatagagatcagagcagtgcactgcaaagaggcatgagagaaatttctggggttatggaaatgttacctgttttgatcaggacggtggttacacaagggcatacatttgtcaaaacttactgaacactgaaaatgggtgcattttctatcacataaattatgctttgatgaatctgatttaaaataaaattaaaatgtgctctgagcaaaatattgacagtaacagttcttgtccatgctccaacaataaccatctgtttcattttagcctccccacgtttcaatatcctgatgagtaagatgaagtagttgaaatgaattattt

SEQ ID NO: 519601 - DNA, 604 bp, Homo sapiens
gtttacctaactaacttgccttgaggataacagtgacacattggcaatctcatctagctatctaagatgcacatatatcacctcttatacactgccagaaagaaggaagaaagactctaattttgtctttcttaatcagtgtttagctgaattaaaattcaacatggatttttcacttctttacccayacaatcaagagagaattttttttcaaagtatttccaggaaaatgtacccatttaaaaatttatttacaaatgtatgagtagtagatagtacaaacaaagcattaaatgattaccaaatatatctgcttaaccattacaatgtaattacagaggcagtttcaaaagtacattgtcaaaggaagggtacctgtttgtaattattggcctggcctacagtttcttggacaattccattcctcaagcacactgggcattcataccaagtacactctgaggcttactttccgttttctcttgtttcttttaatggttacggtacatacttgccataaatagtagactacccaacatgtagaatttgctttgacctaatttgcaggaatgtcttataagtctgtgtgcaatatctatataac

SEQ ID NO: 519602 - DNA, 604 bp, Homo sapiens
gtttacctaactaacttgccttgaggataacagtgacacattggcaatctcatctagctatctaagatgcacatatatcacctcttatacactgccagaaagaaggaagaaagactctaattttgtctttcttaatcagtgtttagctgaattaaaattcaacatggatttttcacttctttacccacacaatcaagagagaattttttttcaaagtatttccaggaaaatgtacccatttaaaaatttatttacaaatgtatgagtagtagatagtacaaacaaagcattaaatgattaccaaatatatctgcttaaccattacaatgtaattacagaggcagtttcaaaagtacattgtcaaaggaagggtacctgtttgtaattattggcctggcctacagtttcttggacaattccattcctcaagcacactgggcattcataccaagtacactctgaggcttactttccgttttctcttgtttcttttaatggttacggtacatacttgccmtaaatagtagactacccaacatgtagaatttgctttgacctaatttgcaggaatgtcttataagtctgtgtgcaatatctatataac

SEQ ID NO: 519603 - DNA, 243 bp, Homo sapiens
aaattatgatgatgaccatttaatgatgacagttagcacttattgagcctttatcaagtgccaggcagtcttatttacacacatgatattattgatctctcacaaaaatgttacagatgtaaatactgttttamttctattttttttcagatgaggaaacttaagcacaaagaggataaatcaattactgaaggagcccttatatactgaagttgggtgttcataaagtatatagttttacta

SEQ ID NO: 519604 - DNA, 243 bp, Homo sapiens
aaattatgatgatgaccatttaatgatgacagttagcacttattgagcctttatcaagtgccaggcagtcttatttacacacatgatattattgatctctcacaaaaatgttacagatgtaaatactgttttaattctattttttttcagatgaggaaacttaagcacaaagaggataaatcrattactgaaggagcccttatatactgaagttgggtgttcataaagtatatagttttacta

SEQ ID NO: 519605 - DNA, 550 bp, Homo sapiens
agcatttgtagaaagaaaaaataatgyaatatctatacacaaacacacagacataaaaaaatggaagagagaaaaaatggcagataggagtcagaactaacttgcagctcttacccagatggacagaacagcatgtggagactcatattgtgaacttttactccaagagctactgcaggaagataccaggaatactaaaagaattcacagatcctttgaaagaagaggcttgctgctacaaactctgtgagacagccaaaaaactgtgagtatccaaagtgtgagagaaggaaagtccgcttccaaatacacatcctcactgggaaacctgaaaatccagatcatgggagtaggatttaaccttacctagagctgaaactagagagccaagagaaatagaaacgtaaacaaagcagcagggagagccctgtaggaactccctgcttccagggaagcccagggaagccatttctgactttatctcacaggggtcttttgggagggctcccagtggaattggggaaagaccacaaggagaaggaaacttcca

SEQ ID NO: 519606 - DNA, 476 bp, Homo sapiens
  misc_feature (1)...(476): n = A,T,C or G
catgtcattttaccaattgctcattaatgctgatatttcccgtgggtctctgactctgaaatctgcatggagtggttacaccctgggcttgttagctcctacctgagctctgagtttctgtggatttctataggctcctgcaaattttatctagtggatattttgttaaaaaaaaaaaatggggtctcattctgttgccccggctgcagtgcnagtgacatgatcataactcatggtgacctcaaattcatgagcccaagcgatcttcccacctcagcctgagtagatgggactacaggcatgtgtcaccatgccaggctaatgtttaaaaatttttcttangaggtagagcctcactttgctgcctargctgatctaaaactcctggcttcaagtgatcctcctgccttgagctcccgaagcgctgggaccaatagagatttctctgagaattaggtcccccactattaataagg

SEQ ID NO: 519607 - DNA, 476 bp, Homo sapiens
  misc_feature (1)...(476): n = A,T,C or G
catgtcattttaccaattgctcattaatgctgatatttcccgtgggtctctgactctgaaatctgcatggagtggttacaccctgggcttgttagctcctacctgagctctgagtttctgtggatttctataggctcctgcaaattttatctagtggatattttgttaaaaaaaaaaaatggggtctcattctgttgccccggctgcagtgcnagtgacatgatcataactcatggtgacctcaaattcatgagcccaagcgatcttcccacctcagcctgagtagatgggactacaggcatgtgtcaccatgccaggctaatgtttaaaaatttttcttangaggtagagcctcactttgctgcctaagctgatctaraactcctggcttcaagtgatcctcctgccttgagctcccgaagcgctgggaccaatagagatttctctgagaattaggtcccccactattaataagg

SEQ ID NO: 519608 - DNA, 493 bp, Homo sapiens
gctggtttccaacctttcactgtgcgggtttctgatgagtacgctggcaggcctctggcttcagagatgccactacaaaggtctcctccttttcataaacattgctgcaaggcccgcttctcaagaaagcaacttgtgctacctcctgcgtgcttttatgcttcgctgtgaagtgcaaagttgggctggcaggcctgggctttcttctccgacttatgtatgattcatcaagaggactccaggctgtggtgtgcggtgcaacccgggctgtgttcccgagtgcatcaaacggggattgggacctgktttccttcccactcacatggaggtcaactacgggaagcaagggaggaaccatctgaagtggttttttttttttttagaattctcatggctgagacagtccagctctgctgaccaaaggctgagtgtccctttattagtctgagcccctagagaaaccaaagaggcaaccctcgacccaactgacaag

SEQ ID NO: 519609 - DNA, 475 bp, Homo sapiens
cctttcactgtgcgggtttctgatgagtacgctggcaggcctctggcttcagagatgccactacaaaggtctcctccttttcataaacattgctgcaaggcccgcttctcaagaaagcaacttgtgctacctcctgcgtgcttttatgcttcgctgtgaagtgcaaagttgggctggcaggcctgggctttcttctccgacttatgtatgattcatcaagaggactccaggctgtggtgtgcggtgcaacccgggctgtgttcccgagtgcatcaaacggggattgggacctggtttccttcccactcacatggaggtcaactacgggaagcargggaggaaccatctgaagtggttttttttttttttagaattctcatggctgagacagtccagctctgctgaccaaaggctgagtgtccctttattagtctgagcccctagagaaaccaaagaggcaaccctcgacccaact

SEQ ID NO: 519610 - DNA, 493 bp, Homo sapiens
gctggtttccaacctttcactgtgcgggtttctgatgagtacgctggcaggcctctggcttcagagatgccactacaaaggtctcctccttttcataaacattgctgcaaggcccgcttctcaagaaagcaacttgtgctacctcctgcgtgcttttatgcttcgctgtgaagtgcaaagttgggctggcaggcctgggctttcttctccgacttatgtatgattcatcaagaggactccaggctgtggtgtgcggtgcaacccgggctgtgttcccgagtgcatcaaacggggattgggacctggtttccttcccactcacatggaggtcaactacgggaagcaagggaggaaccatctgaagtggttttttttttttttagaattctcatggctgagacagtccagctctgctgaccaaaggctgagtgtccytttattagtctgagcccctagagaaaccaaagaggcaaccctcgacccaactgacaag

SEQ ID NO: 519611 - DNA, 545 bp, Homo sapiens
  misc_feature (1)...(545): n = A,T,C or G
ctaggttaattttttcccacatggcttttcctgtttgtttctttgattgtttttaattaataattagtttgcttatttatttgtttattttttgagagggagtctcgctctgtcacccaggctggagtgcagcagtgtgatcttggctcactgcaaactccacctcccaggttcaagggattctcctgcctcagtctcccaagtagctgarattacaggcccccaccaccaaacccagctaatttttgtggttttttttgtattttagtagagacgggatttcaccatgttggccaggctggtctcaaactctggacctcaaatgatccaaccgcctncggacttccgaagtgctgggattacaggcgtgagccaccgtgactgacctgtttttaatttttttangagacangagntttcacactngtttaccagattggagtgcagtggtgcnaatcctagcttactgcagcctgtaggtcccgggctcaagcgatcttcccacctctgccacttgaataggtgggactacaggtgggtaccac

SEQ ID NO: 519612 - DNA, 545 bp, Homo sapiens
  misc_feature (1)...(545): n = A,T,C or G
ctaggttaattttttcccacatggcttttcctgtttgtttctttgattgtttttaattaataattagtttgcttatttatttgtttattttttgagagggagtctcgctctgtcacccaggctggagtgcagcagtgtgatcttggctcactgcaaactccacctcccaggttcaagggattctcctgcctcagtctcccaagtagctgaaattacaggcscccaccaccaaacccagctaatttttgtggttttttttgtattttagtagagacgggatttcaccatgttggccaggctggtctcaaactctggacctcaaatgatccaaccgcctncggacttccgaagtgctgggattacaggcgtgagccaccgtgactgacctgtttttaatttttttangagacangagntttcacactngtttaccagattggagtgcagtggtgcnaatcctagcttactgcagcctgtaggtcccgggctcaagcgatcttcccacctctgccacttgaataggtgggactacaggtgggtaccac

SEQ ID NO: 519613 - DNA, 545 bp, Homo sapiens
  misc_feature (1)...(545): n = A,T,C or G
ctaggttaattttttcccacatggcttttcctgtttgtttctttgattgtttttaattaataattagtttgcttatttatttgtttattttttgagagggagtctcgctctgtcacccaggctggagtgcagcagtgtgatcttggctcactgcaaactccacctcccaggttcaagggattctcctgcctcagtctcccaagtagctgaaattacaggcccccaccaccaarcccagctaatttttgtggttttttttgtattttagtagagacgggatttcaccatgttggccaggctggtctcaaactctggacctcaaatgatccaaccgcctncggacttccgaagtgctgggattacaggcgtgagccaccgtgactgacctgtttttaatttttttangagacangagntttcacactngtttaccagattggagtgcagtggtgcnaatcctagcttactgcagcctgtaggtcccgggctcaagcgatcttcccacctctgccacttgaataggtgggactacaggtgggtaccac

SEQ ID NO: 519614 - DNA, 545 bp, Homo sapiens
  misc_feature (1)...(545): n = A,T,C or G
ctaggttaattttttcccacatggcttttcctgtttgtttctttgattgtttttaattaataattagtttgcttatttatttgtttattttttgagagggagtctcgctctgtcacccaggctggagtgcagcagtgtgatcttggctcactgcaaactccacctcccaggttcaagggattctcctgcctcagtctcccaagtagctgaaattacaggcccccaccaccaaacccagctaatttttktggttttttttgtattttagtagagacgggatttcaccatgttggccaggctggtctcaaactctggacctcaaatgatccaaccgcctncggacttccgaagtgctgggattacaggcgtgagccaccgtgactgacctgtttttaatttttttangagacangagntttcacactngtttaccagattggagtgcagtggtgcnaatcctagcttactgcagcctgtaggtcccgggctcaagcgatcttcccacctctgccacttgaataggtgggactacaggtgggtaccac

SEQ ID NO: 519615 - DNA, 610 bp, Homo sapiens
gcccagggtgctgggatcacaggcgtgagccaccgtgcgcgacctcagggtcccttctaacctgtgctgttgtcataaaccctggaggagaagcaagatctttctagcaggagcaacatcatcccaaataaagtgatagactttgatagtgttcttctattcattcaaccaacagagaacaaatgaaaagaatcaggagtctattgaggagacagaacatgagtgatttctgtgtgctgactatatttaaagacaagattagcagtaatatataaacgtaaataagaatttttttccccagccaagaaccatagattggacttcacattcaaaatgtaaattgtgcctaggaaacatcaatgcttattttaagcaaactgacccttgggataaaaataaaaagtcaaaaggaaacaaacaatgttgctgagaagtgatagaatattctagtttatatctcagtcatwttacagctctggcatttctggggaacactttagaatacttccactccggttggtccataaaaagctgcctgtgtttttatgttttgaaaatacacgcagagagacccactgcatgtcctattaggcatcttatccttgagtaa

SEQ ID NO: 519616 - DNA, 610 bp, Homo sapiens
gcccagggtgctgggatcacaggcgtgagccaccgtgcgcgacctcagggtcccttctaacctgtgctgttgtcataaaccctggaggagaagcaagatctttctagcaggagcaacatcatcccaaataaagtgatagactttgatagtgttcttctattcattcaaccaacagagaacaaatgaaaagaatcaggagtctattgaggagacagaacatgagtgatttctgtgtgctgactatatttaaagacaagattagcagtaatatataaacgtaaataagaatttttttccccagccaagaaccatagattggacttcacattcaaaatgtaaattgtgcctaggaaacatcaatgcttattttaagcaaactgacccttgggataaaaataaaaagtcaaaaggaaacaaacaatgttgctgagaagtgatagaatattctagtttatatctcagtcatattacagctctggcatttctgggkaacactttagaatacttccactccggttggtccataaaaagctgcctgtgtttttatgttttgaaaatacacgcagagagacccactgcatgtcctattaggcatcttatccttgagtaa

SEQ ID NO: 519617 - DNA, 443 bp, Homo sapiens
tatgtaaattgaacacaactttcccttccatagagagtaaaaaccacgctttggagggtagatacaattaccccagggttgtcttttcccactcctcacaatcccaccagtgcacatgcaaggtgatgtccttcctttagctatagcaaataatgttaattattgttggtgttaaataatgattatgtaaagcactagactagacattcgtcggcaaagtttttctgcaaagaatcagatagtaaatatttttgctctyatcagccagacagtctctgcggcaaccattcaagcattgttgaatacattgttgagtgttacatgagactattgtaatataaaagtagcctgggacaacacataaataactgggtgtggctgtgtcctaataaaactttatttacaaagaacaggaagtggcttggatttggtatctggcctgg

SEQ ID NO: 519618 - DNA, 435 bp, Homo sapiens
ttgcatagtagcttggagaatcagaaagatctgtctcatttgggaaatataccatgtaaaaaacattgtttctaaaggagatttgtcccatgagtaaaatagatgatggacagccactgcctagtgggacaattagaaaggtcagttcaaggttggaggagatgcttctttcagccaattttcctttttctcaggatcacctcaggtgatccgcccacctcaacctcccaaactgctgggattataggcgtgagccaccgctcctggcctttcagccaattttctatcaccaaagggaaatcgttttgctggaatatgtggtaaaggaggttaaagtcaraagaaattctcgtcccgctcagttaaggtactcagactattttccaaccaatcaaaaggggtgctgcttcatggagttcgtttaagctaaagcgg

SEQ ID NO: 519619 - DNA, 435 bp, Homo sapiens
ttgcatagtagcttggagaatcagaaagatctgtctcatttgggaaatataccatgtaaaaaacattgtttctaaaggagatttgtcccatgagtaaaatagatgatggacagccactgcctagtgggacaattagaaaggtcagttcaaggttggaggagatgcttctttcagccaattttcctttttctcaggatcacctcaggtgatccgcccacctcaacctcccaaactgctgggattataggcgtgagccaccgctcctggcctttcagccaattttctatcaccaaagggaaatcgttttgctggaatatgtggtaaaggaggttaaagtcaaaagarattctcgtcccgctcagttaaggtactcagactattttccaaccaatcaaaaggggtgctgcttcatggagttcgtttaagctaaagcgg

SEQ ID NO: 519620 - DNA, 609 bp, Homo sapiens
cagcgattctcctgctttggtctcctgagtagctgagattacaggtgcataccaccataactggctaatttttttttttccgcacaatctctgttgcccaggctagtgtgaagcagggtgatctcagctcgctgcaacctccgcctcctgggtttaagggattccgctgcttcagcctcatgagtagctggcactataggcacatccaccatgtctggctaatttttatacttttagtagagatggggtttcgtcatggtagctaggctggtctcaaactcttgacctcaagtgatccacccacctcmgcctcccaaagtgctgggattacaggagtgagctaccgcgtctggccatacctggctaattttttaaaatttgttgtagaggtggcatctcactatgctgcccaggccagactcaaactcctggcctcaagtgattctctcactttggcctcccagggtgctgggatgacaggtgtgagccactgtgcttggccttccttgccttaatgtcctcatcagacccacgcagcagcacttgtctctacgcagccatcagagtctacgctccagccacccaacataagcaatctcctccctctgg

SEQ ID NO: 519621 - DNA, 504 bp, Homo sapiens
taaccgctaaggtgtcaagccatcctttccccaattccatttgctttgggaatgtgctaagttgaaagtccataagagccatttaagaacaagtattagtagatggtattataggtttctgttcctctacacagtccatttaaggaggaaaaatagtttttctaataccatcttaagtgactttacggttatcgatacaaaacaccttggaaaaatatcccagtgcatatgttatcttgatgtttaagcaagagaagatttacaaatgtttaaaatttccaaatgttttaaactttctacctaaggaatagcagataatatttttcttcagtaaggggtcacaaaatattaatttgatacaagatataacaaaaagtcaattagatttccagcgcatgtagggytatgtcttctgtggacttaaaacattcttcatcaacacttttttttattttggagacagaatttttgctcctattgcccaagctggagtgcaatggtgag

SEQ ID NO: 519622 - DNA, 521 bp, Homo sapiens
tacagatattgtgtcatttaatagtactgttattcctatctgatagataagtaaactggaccttgagagtgtaaataatttgttctaagttgcatagttagtaggtgggaaaattaggatttgaaccaaagaaacctacatgcagtgccataactcttaacctgtatactacattatctcccaatactgaaaacatgcaggaatgaatgactgaatgtcccatacttgataagagacaatcattctctgagttaattgtgcatcaagaataaaaaactaattaggagtacaaagatgcagggcactgcccattcttataaacaatttgttttggtracagtaactaatttttacttatttttgtacttgggatggaatgcgctatcaattttttaaacattatttttaaacctatctacatgataaaaagaaacttaagatgacaactatttcagcaaagaatgataagtgaagcaccagatgctacatattttcaactgcaaaaatatcatgggaagcca

SEQ ID NO: 519623 - DNA, 623 bp, Homo sapiens
aatggcaaaacatacagctattttcaaccactccacttagattcacattcttctccgctctggtgctttaaaaagcaccaggatgcttgcttgtctccactgygtcctggcaggccattattctacagactgattttaatttgagcttaggcatgtcatcacaagtttgtgggagagtcatctaaaatcatcagaaacatgatgactgtgttcttgaagcacacatgcaggatgtcacgcaaaagattatagatcactttgaagagtcaacattgtctcccagagtgatgataaatcccgagaagatgtacacctccacataacaaagatcctccctggtattgtagagatgagacgtgacatgcatcgacactgtgtcccatgatagactgacaaagaagcatggtgatacctcaattgttcacaacttctgtgggtaaaacatactttgggcaaagttggcccaggtaggggaaaattcctgactcttcattgttttagtggctgctgagaaagctcaaccatttcttttgtaaagccttctgagacccatcaagaagaggtgatcccttcctcctttgcacctttactagcgctttgacatgttcttgtttttgtatcaa

SEQ ID NO: 519624 - DNA, 623 bp, Homo sapiens
aatggcaaaacatacagctattttcaaccactccacttagattcacattcttctccgctctggtgctttaaaaagcaccaggatgcttgcttgtctccactgcgtcctggcaggccattattctacagactgattttaatttgagcttaggcatgtcatcacaagtttgtgggagagtcatctaaaatcatcagaaacatgatgactgtgttcttgaagcacacatgcaggatgtcacgcaaaagattatagatcactttgaagagtcaacattgtctcccagagtgatgataaatcccgagaagatgtacacctccacataacaaagatcctccctggtattgtagagatgagacgtgacatgcatcgacactgtgtcccatgatagactgacaaagaagcatggtgatacctcaattgttcacaacttctgtgggtaaaacatactttgggcaaagttggcycaggtaggggaaaattcctgactcttcattgttttagtggctgctgagaaagctcaaccatttcttttgtaaagccttctgagacccatcaagaagaggtgatcccttcctcctttgcacctttactagcgctttgacatgttcttgtttttgtatcaa

SEQ ID NO: 519625 - DNA, 632 bp, Homo sapiens
tcagctggagctaaaagtggcatgaaattaagggagcaggaaaggtcaaatatccagtaagagagcaaaacccaagtttctgaagcacgggaagtattgtagattgtaaaatgaacaataactcacccaatgatcattaaatttgggtaaattttgcattaattgtatttcactgtattctakttcttggaaagcaggctaacactgttaactggtatatcatatattgattttgttgggatacaaaaaatgtgcttactcttggataagtagataaaacacttttggttgtaaggaagagcgacttatgccaattaacttgagagaaaaggaacttctaattcataaaatccaaggaagtgctgtcccatcaatcctcaggagaccatagctcttcatcctggtgctccaccaataatgtgccttttttctccccttattcagtccctattggtccaattctccaaagagaaaatttgattgacttttggccagccagtggactacttcttttatggtcaggtgtccagcccttgtctaaccagtgatactgaatggaggtgagggcaagttcacttaattcaaaggattgacattcccaagcctgtgaatagggctggtaaaactagcag

SEQ ID NO: 519626 - DNA, 519 bp, Homo sapiens
tagcattagaacagtaccaaaggggaaatctgctcccatgatccaaacacctcccaccaggccccacctccacactggggattacaaatcgacatgasatttgggcagggacacaaatccaaaccatttcactatctaagcacagagcttggttctatgactttcaagctaagtctgctcacaaggaaaatgccactatttcatttattttttaaattcagtaaacacctactgtgcacctactttgctccaggaagtgggaatgtcaaaacaagttttaaaagcccctggaggcggaacttgcagtgagcctagatggtgccactgtactccagtctgagagacagagtgagactctgttcccccccgccccctaaaacagcctctggaatttaaattaacatgacaaaataatgtggcaagtgcacaaatggaggtacataaaaaatggccctatgggagctgtgcaggatggagtccaccaacgaggctgcaggaacgacttcataaaagaaggaa

SEQ ID NO: 519627 - DNA, 590 bp, Homo sapiens
gtcctcaccagataccgaatctgmtggtgtctcgaccttggactccccagccttcagaacagtcagcaatacatttccattatttataaattacccagtctaaggttctttgttatagctgtctgaaatgatgaggttaataattaatgaaataaatcagtttcctccagatatactctatggtcttcagcctgtacctctcttctcatactatccccccagtttgaaccaccgttaaagggcctaccaaactgttgtattcttcctatggatacaaagcaggtgtcaacatttaggttgtcttgggccaatcgaagatgaaaacctagtattcacatctacaatcaagttgtataaacatgtaaaaatgagatactatatacatatgagagtaattggctagatatcaaccaggcaagactgccctaaattgtgatatattttgagaacagaatcaactgtaagtatgatccatgcctcattgcattacagggagaacctcaaaaaattatattactgcaacctgggatgagaggtaagggaggtggaaagtcggtagagatggtaaattggtggtgaactttatttta

SEQ ID NO: 519628 - DNA, 590 bp, Homo sapiens
gtcctcaccagataccgaatctgatggtgtctcgaccttggactccccagccttcagaacagtcagcaatacatttccattatttataaattacccagtctaaggttctttgttatagctgtctgaaatgatgaggttaataattaatgaaataaatcagtttcctccagatatactctatggtcttcagcctgtacctctcttctcatactatccccccagtttgaaccaccgttaaagggcctaccaaactgttgtattcttcctatggatacaaagcaggtgtcaacatttaggttgtcttgggccaatygaagatgaaaacctagtattcacatctacaatcaagttgtataaacatgtaaaaatgagatactatatacatatgagagtaattggctagatatcaaccaggcaagactgccctaaattgtgatatattttgagaacagaatcaactgtaagtatgatccatgcctcattgcattacagggagaacctcaaaaaattatattactgcaacctgggatgagaggtaagggaggtggaaagtcggtagagatggtaaattggtggtgaactttatttta

SEQ ID NO: 519629 - DNA, 660 bp, Homo sapiens
ggaggttatgatttttaagaagcctctttctgacctaaattctgttctgccatcttatttctctaccttttcccgttttgggttgtgttgactgttcagttcctttttgaaacttccctcccttggccacagagttgtactcctctagttccctttctgcctgcctctgtcactgcttctccattacttttgtttcctcctgcctcctaattatgtccatattcaggggtgtaaagttctttaccttttttctctttatactcactgcctcagaratttcatctacactcctggcttcaccttttttttttttttggtttttaattatagaagtaacacacaattacatgttcctattaaaaaataatatagatgcatctagagtaaaaagtgaaaatgccccttcaacctcatcctcagacgtaaccaccattatcggattggtgttctttctccaggtgttgagtcccagatctataaaggtagctctaaactctagatagctgcaatcaggatacccttacttggatgctccactatcagcatataaaatcagctagctgaatgactttgggcatatggttgatgtgttttttttttaattctgtggttctttcatgtcttatatttatttctttttgtgtctccatagcattaaac

SEQ ID NO: 519630 - DNA, 649 bp, Homo sapiens
cacatggcaacaaagttggatcttaaaaaccgacctgagtgaaaaaggaaagggaaagatacataacacggtaccattatgtaaattgataatatatgcttacacaatttgtaagaacacatacaaatagatacatgtatattaaayatactcgaacggttacctatggggtggtggctggagtgggggtaagtccgtaagctgtaatggaacctaaacaaatacatgaaacgagtaggaatcagaaggagtaacaataaaaatgtgccatgaactgaggagtgtaaattaatcaactcactgcatctgaggttaaaaatagaaagatgataattgttattcttattactcgtaggtcttccacttgcactcagctttacaatgttggactatccttcagatggcaccctccttgcacttgctcaggcaggagagctttttcctccagctttctaggtgatttaatatatcagggaataagtataaaaaaaggcacggtgctccctgggtagcctttctggacttcagagctaaattgcaaagtcagttttacacatgtgatttcatctatgaaattagggcaaggtagaaaactggcacagaaaaaatgtgatttattatggtgttactatcccttacaagcggagtg

SEQ ID NO: 519631 - DNA, 534 bp, Homo sapiens
aagaacacatacaaatagatacatgtatattaaatatactcgaacggttacctatggggtggtggctggagtgggggtaagtccgtaagctgtaatggaacctaaacaaatacatgaaacgagtaggaatcagaaggagtaacaataaaaatgtgccatgaactgaggagtgtaaattaatcaactcactgcatctgaggttaaaaatagaaagatgataattgttattcttattactcstaggtcttccacttgcactcagctttacaatgttggactatccttcagatggcaccctccttgcacttgctcaggcaggagagctttttcctccagctttctaggtgatttaatatatcagggaataagtataaaaaaaggcacggtgctccctgggtagcctttctggacttcagagctaaattgcaaagtcagttttacacatgtgatttcatctatgaaattagggcaaggtagaaaactggcacagaaaaaatgtgatttattatggtgttactatcccttacaagcgga

SEQ ID NO: 519632 - DNA, 466 bp, Homo sapiens
aaacctgggtttaaaaagggaccgaatagactagccattaaaagacctgcgtacaacctctctctctctctttgagagataatgtatctggacaataaacatgaacagagtggagtctatcctgtttaaaacattgcctactgtacaggcaccaggagctgaagggtcagaatattagcagtgggagcttgattagagttgatgagagatgggtagtaggaggaaagagtgagatagaggaagaggacatgggggttacccataagtggagagtagaaaagtagaatcagctggccatcaaagggcgtgggactgaggaacagtatggcatgtattaaatatactaagcgctgacattggaggagaactaggaagktaaatgaaatcaataggggatgatggagaatagttaggtgtgcagggattagggttatgatagaaatacatgtgaatacatgcagtattg

SEQ ID NO: 519633 - DNA, 394 bp, Homo sapiens
tgaaagccatggcagaagcagtcctctaaacgaaataaaatagaaaggttcctgctaagccctggcaaatgcagccttctatccctcccccaacactcacagcttctgagcaagatgtwgctgccttccaggagctgggtgatgggcaataatgagcagagccacgtgaaggaaagatgggtgaagaaatgtgtgtggagtcatgctggctgcactgaccatgaaacaaaggatctacccctctagtaactgccctactcctttggtaactgttctgaaattataacttgccagaagttcagaaggacctagtgcaggtattagaggaaattcgtaagattgagccatttattcctgcacagatacataataatggacacgggccatggtggcc

SEQ ID NO: 519634 - DNA, 628 bp, Homo sapiens
tagctggttaactatgagcaagtaatttagttcttctcagtttagtttcttcmcctgtaaaagaaggaaaataactgttatactccatttctgaattgctataaaagtcatttaattatgggcattgaagctctttgttcactgtataaggactgtacatctaagggattaatgagaccaggcttatgattttaagcatggagtaaatagtaacactgactctgttctatgaaccacatggaaactctaaagaatatgcacatttgaaacacaggtatcatctggggaaggtgatctgctcacccaaaccagttcatgaacatcaatctccagtggcgtgctggagctagctgtaccagctcatgagggccaattgtttcatttttaggaattttgtttgctggttaaaaatagtcattatttaaaattaaattatgtaaacaataatattagataaaataagttaaaataaaaacaaaggaactaattatccccaaactcttccccacctaattattttactatctgtgccttgggattatttacattgattttatccatatggtgacaatactattcatatataaatggtgtgcttctcttcataactctacatagcctgatgtca

SEQ ID NO: 519635 - DNA, 628 bp, Homo sapiens
tagctggttaactatgagcaagtaatttagttcttctcagtttagtttcttcccctgtaaaagaaggaaaataactgttatactcmatttctgaattgctataaaagtcatttaattatgggcattgaagctctttgttcactgtataaggactgtacatctaagggattaatgagaccaggcttatgattttaagcatggagtaaatagtaacactgactctgttctatgaaccacatggaaactctaaagaatatgcacatttgaaacacaggtatcatctggggaaggtgatctgctcacccaaaccagttcatgaacatcaatctccagtggcgtgctggagctagctgtaccagctcatgagggccaattgtttcatttttaggaattttgtttgctggttaaaaatagtcattatttaaaattaaattatgtaaacaataatattagataaaataagttaaaataaaaacaaaggaactaattatccccaaactcttccccacctaattattttactatctgtgccttgggattatttacattgattttatccatatggtgacaatactattcatatataaatggtgtgcttctcttcataactctacatagcctgatgtca

SEQ ID NO: 519636 - DNA, 628 bp, Homo sapiens
tagctggttaactatgagcaagtaatttagttcttctcagtttagtttcttcccctgtaaaagaaggaaaataactgttatactccatttctgaattgctataaaagtcatttaattatgggcattgaagctctttgtwcactgtataaggactgtacatctaagggattaatgagaccaggcttatgattttaagcatggagtaaatagtaacactgactctgttctatgaaccacatggaaactctaaagaatatgcacatttgaaacacaggtatcatctggggaaggtgatctgctcacccaaaccagttcatgaacatcaatctccagtggcgtgctggagctagctgtaccagctcatgagggccaattgtttcatttttaggaattttgtttgctggttaaaaatagtcattatttaaaattaaattatgtaaacaataatattagataaaataagttaaaataaaaacaaaggaactaattatccccaaactcttccccacctaattattttactatctgtgccttgggattatttacattgattttatccatatggtgacaatactattcatatataaatggtgtgcttctcttcataactctacatagcctgatgtca

SEQ ID NO: 519637 - DNA, 609 bp, Homo sapiens
tcagaacccttgtcttgtttgctctctgatgtaaccctttcacaatgtttgggcagcttattctctctatttccctgtagggtcccatccaggccaaagtgagtgccagcctcatttgggcagcasatgccctgtggaagggcaggaagagacgaaagctaattgtaactttgtgattagctgtcatggatgcctggtcctgtcaatagcgctcaataaagccagaaggccaagcgttcgcttctgcatactgattgctgagtcagatttctcagtgcagaagggctttctaggcagtcaattttagaatattagtcttggttcttaagtggttaaaatccctagctggtctttaatctgagcctggagaatttagttagggctgacattctgctgtgatatttttgccctcaatatatatgtctttcctccatctcttagatccctgaatcatagagatatatatgttatataatcaactgtctccagtctctaagagtgataagtacacattgtgtcaggttgaggggacaggagaactttcaaaagcctttcttgcccctttttccttctcactgcctcccactaagtccagccacttattattca

SEQ ID NO: 519638 - DNA, 537 bp, Homo sapiens
ttccctgtagggtcccatccaggccaaagtgagtgccagcctcatttgggcagcacatgccctgtggaagggcaggaagagacgaragctaattgtaactttgtgattagctgtcatggatgcctggtcctgtcaatagcgctcaataaagccagaaggccaagcgttcgcttctgcatactgattgctgagtcagatttctcagtgcagaagggctttctaggcagtcaattttagaatattagtcttggttcttaagtggttaaaatccctagctggtctttaatctgagcctggagaatttagttagggctgacattctgctgtgatatttttgccctcaatatatatgtctttcctccatctcttagatccctgaatcatagagatatatatgttatataatcaactgtctccagtctctaagagtgataagtacacattgtgtcaggttgaggggacaggagaactttcaaaagcctttcttgcccctttttccttctcactgcctcccactaagtccagccacttattatt

SEQ ID NO: 519639 - DNA, 609 bp, Homo sapiens
tcagaacccttgtcttgtttgctctctgatgtaaccctttcacaatgtttgggcagcttattctctctatttccctgtagggtcccatccaggccaaagtgagtgccagcctcatttgggcagcacatgccctgtggaagggcaggaagagacgaaagctaattgtaactttgtgattagctgtcatggatgcctggtcctgtcaatagcgctcaataaagccagaaggccaagcgttcgcttctgcatactgattgctgagtcagatttctcagtgcagaagggctttctaggcagtcaattttagaatattagtcttggttcttaagtggttaaaatccctagctggtctttaatctgagcctggagaatttagttakggctgacattctgctgtgatatttttgccctcaatatatatgtctttcctccatctcttagatccctgaatcatagagatatatatgttatataatcaactgtctccagtctctaagagtgataagtacacattgtgtcaggttgaggggacaggagaactttcaaaagcctttcttgcccctttttccttctcactgcctcccactaagtccagccacttattattca

SEQ ID NO: 519640 - DNA, 498 bp, Homo sapiens
aatcatctgtcaaggtgttaactaatggcaaagcatttaataaatcagcattcatgtattcaggtgctctgaattatctgacttttaaattcttactttataaatgagaaaattggggcatggaaaagttaactctcctaaccccgaattattacattattaaggacaggacttagaggccagatatcttaagtcattaatattctttggctcacagaattggcagtataacctaaaggtaataactaggtgattttcttttatatcaattaaatatgtcagttttcaaatattcataagtacctactgtgcagggaaagaacatgccatacaaaagatgtagtccaggcctttaagaaactttcatttaatgggaactcaagaagtgtacatataaggagggaagtagcagtatggtacaagataatacatacatatcagtgaatgatattgccaaaaagtgctattgatagagmaataattcatttctgcaaacag

SEQ ID NO: 519641 - DNA, 575 bp, Homo sapiens
tttggggggaacccagagtgatcaaagagataaggaaagtttgcccttttcaattaataaggacaaaagggacttaaggataaaacatgttctttmagataggtcactgtggttgtggatgagacttcctgggtgtatagctctctccctccatataatactgctcagcaaaccttcatgggagaaaggatgttgtcacttagctatagagatttagaatggtaggcgtgatgcttactcatgtactgcttatcctcagtatcgtcaccatcactaggtgggcatgcaagccccctgaggacagatcaggggatctatgcactctgcatcctcagatcctggcaccatggcggccctcaatatacattggatgaatgggtgactgatagcacagacctgttccagagagtgggtaacaaagcttagaggttcctcactctctcccattatctactccctgttcaccatcatgccacatttgtgtttctagcctctgacctgactgtgggcaaaatctatgcagcaatgatgatcatggactactataagcagagtaaggtgaagaagcagaggca

SEQ ID NO: 519642 - DNA, 590 bp, Homo sapiens
gtgaagactacgtctttggggggaacccagagtgatcaaagagataaggaaagtttgcccttttcaattaataaggacaaaagggacttaaggataaaacatgttctttcagataggtcactgtggttgtggatgagacttcctgggtgtatagctctctccctccatataatactgctcagcaaaccttcatgggagaaaggatgttgtcacttagctatagagatttagaatggtaggcgtgatgcttactcatgtactgcttatcctcagtatcgtcaccatcactaggtgggcatgcaagccccctgaggacagatcaggggatctatgcactctgcatcctcagatcctggcaccatggsggccctcaatatacattggatgaatgggtgactgatagcacagacctgttccagagagtgggtaacaaagcttagaggttcctcactctctcccattatctactccctgttcaccatcatgccacatttgtgtttctagcctctgacctgactgtgggcaaaatctatgcagcaatgatgatcatggactactataagcagagtaaggtgaagaagcagaggcag

SEQ ID NO: 519643 - DNA, 372 bp, Homo sapiens
ctgtgctccctccaagggctctaaaggagaattgattttcttcctcttccagcttctggcagccccaggcattccttggcttatagccacgtcactgtaatctctgcctctgtgatcatattgcctcttyttcaatgtctgtgcagttttataaggccacttgtcattggatttagggtcattctgataagccaggatgatctcttatttgaacatccttaacttaataatctgcaaagattatttttccaaataaagtaacattcacatgttccaggacttaggatgtgaacaaatcttttggggggctcccagtcatcccattacattcaccattctacaagctccaagcttgcatacagagttgccaat

SEQ ID NO: 519644 - DNA, 448 bp, Homo sapiens
tgcctcatttctgaaattgtgtaactattaaatgagctacagagtattaatgtaaaattcttagagcagtgcctggcgctacaggaagtactcagtgaaagttagctcttattattttaaatatttgacaaagttcctgcttctccaagctgattctctggttcccaggtggtttcattcatgcactgttattcctggaagttcttggcatgsccacttcccagttccaggaacaggcagtcgttgttttttctggcttatcacattgagataacatggttactacaagtgacacttaaacgtgtcaggcaatttgggggctcccttcttgaactttttctaagagcaaacctttgtcttaatgccaccctgtttacaacaatagtagggctttgaacaatgagaaaatgcggggaaatgaaaaagacatataaagggaaagagtgga

SEQ ID NO: 519645 - DNA, 448 bp, Homo sapiens
tgcctcatttctgaaattgtgtaactattaaatgagctacagagtattaatgtaaaattcttagagcagtgcctggcgctacaggaagtactcagtgaaagttagctcttattattttaaatatttgacaaagttcctgcttctccaagctgattctctggttcccaggtggtttcattcatgcactgttattcctggaagttcttggcatgcccacttcccagttccaggaacaggcagtcgttgttttttctggcttatcacattgagataacatggttactacaagtgacacttaaacgtgtcagrcaatttgggggctcccttcttgaactttttctaagagcaaacctttgtcttaatgccaccctgtttacaacaatagtagggctttgaacaatgagaaaatgcggggaaatgaaaaagacatataaagggaaagagtgga

SEQ ID NO: 519646 - DNA, 448 bp, Homo sapiens
tgcctcatttctgaaattgtgtaactattaaatgagctacagagtattaatgtaaaattcttagagcagtgcctggcgctacaggaagtactcagtgaaagttagctcttattattttaaatatttgacaaagttcctgcttctccaagctgattctctggttcccaggtggtttcattcatgcactgttattcctggaagttcttggcatgcccacttcccagttccaggaacaggcagtcgttgttttttctggcttatcacattgagataacatggttactacaagtgacacttaaacgtgtcaggcartttgggggctcccttcttgaactttttctaagagcaaacctttgtcttaatgccaccctgtttacaacaatagtagggctttgaacaatgagaaaatgcggggaaatgaaaaagacatataaagggaaagagtgga

SEQ ID NO: 519647 - DNA, 612 bp, Homo sapiens
tttatgaattatcatgctaaattaattaactcattaattcattcagggcacacccagttattccccaaaccgagtgatatatttctgggaatagacttattaagcttgagaaaacccaaaggatcattataacagcaaacaggaatgtaggcatccacatagtggatgactttagtgacctggcacacagtgccttatctacttrgcacatgtacaggtacaaggaacacttaacattttgcaccagagcttattacataccattttcaatgcttgagatattatataaatgctaaaattctaaaacctatagtaaagcaaagacccagattttatactgcagtagttttgccagtaagtctcatcctcactaacttatcttttaagattaaaaataatgtaaccaagtgggaagaaaaagagcaaatatgaacaaattgtcattgttttagaatctgcttcttttcctttctggtatttctgtgcaaggagagaatgatctctgaccttgtgaaaggcaaataccatgtgtattcatggttgttattcatttggcaaggacttgaaactcatgacactccctgctgaagatcctccacctattcttaacag

SEQ ID NO: 519648 - DNA, 612 bp, Homo sapiens
tttatgaattatcatgctaaattaattaactcattaattcattcagggcacacccagttattccccaaaccgagtgatatatttctgggaatagacttattaagcttgagaaaacccaaaggatcattataacagcaaacaggaatgtaggcatccacatagtggatgactttagtgacctggcacacagtgccttatctacttagcacatgtacaggtacaaggaacacttaacattttgcaccagagcttattacataccaytttcaatgcttgagatattatataaatgctaaaattctaaaacctatagtaaagcaaagacccagattttatactgcagtagttttgccagtaagtctcatcctcactaacttatcttttaagattaaaaataatgtaaccaagtgggaagaaaaagagcaaatatgaacaaattgtcattgttttagaatctgcttcttttcctttctggtatttctgtgcaaggagagaatgatctctgaccttgtgaaaggcaaataccatgtgtattcatggttgttattcatttggcaaggacttgaaactcatgacactccctgctgaagatcctccacctattcttaacag

SEQ ID NO: 519649 - DNA, 612 bp, Homo sapiens
tttatgaattatcatgctaaattaattaactcattaattcattcagggcacacccagttattccccaaaccgagtgatatatttctgggaatagacttattaagcttgagaaaacccaaaggatcattataacagcaaacaggaatgtaggcatccacatagtggatgactttagtgacctggcacacagtgccttatctacttagcacatgtacaggtacaaggaacacttaacattttgcaccagagcttattacataccattttcaatgcttgagatattatataaatgctaaaattctaaaacctatagtaaagcaaagacccagattttatactgcagtagttttgccagtaagtctcatcctcactaacttatcttttaagattaaaaataatgtaaccaagtgggaagaaaaagagcaaatatgaacaaattgtcattgttttagaatctgcttcttttcctttcyggtatttctgtgcaaggagagaatgatctctgaccttgtgaaaggcaaataccatgtgtattcatggttgttattcatttggcaaggacttgaaactcatgacactccctgctgaagatcctccacctattcttaacag

SEQ ID NO: 519650 - DNA, 612 bp, Homo sapiens
tttatgaattatcatgctaaattaattaactcattaattcattcagggcacacccagttattccccaaaccgagtgatatatttctgggaatagacttattaagcttgagaaaacccaaaggatcattataacagcaaacaggaatgtaggcatccacatagtggatgactttagtgacctggcacacagtgccttatctacttagcacatgtacaggtacaaggaacacttaacattttgcaccagagcttattacataccattttcaatgcttgagatattatataaatgctaaaattctaaaacctatagtaaagcaaagacccagattttatactgcagtagttttgccagtaagtctcatcctcactaacttatcttttaagattaaaaataatgtaaccaagtgggaagaaaaagagcaaatatgaacaaattgtcattgttttagaatctgcttcttttcctttctggtatttctgtgcaaggagagaatgatctctgaccttgtgaaaggcaaataccatgtgtattcatggttgttattcatttggcaasgacttgaaactcatgacactccctgctgaagatcctccacctattcttaacag

SEQ ID NO: 519651 - DNA, 600 bp, Homo sapiens
actgggaactgaaccaagcatttcctttagattgttcaagttgtgaaggttgatgttattagcttggttactacttggagtcttagctcatagtgtgtctttatggctttctgcctcactggaccctcttcccaaaaggctttagaatgtgttcaccatcatgagctgaccaacaatttctaaattcctactcagaaacacagcaaggggaatgcagtcaagcacaaagggyttaaatgaccagataaggctgggctggatgaataaagaggaatatcctatgaatgtgactgtgtagttttagagtatcccgattcaactgttatatttgacttgtggccttgtagacagtgtgttaatgtcagatcttctttttcagaactgttttaatcatggacaaacaaagtaagtaatttattttaaatgtttactttcctccttataatgttaatctgttggtaacttgttatttgtcataatgttttattcagtgtctgaaagtgtataatttgttttctgttgtttatgctccagaatacaatgtctagttcagtattttgactatagagaagatgtacaaaaatagcactatcactaggt

SEQ ID NO: 519652 - DNA, 448 bp, Homo sapiens
tgcctcatttctgaaattgtgtaactattaaatgagctacagagtattaatgtaaaattcttagagcagtgcctggcgctacagraagtactcagtgaaagttagctcttattattttaaatatttgacaaagttcctgcttctccaagctgattctctggttcccaggtggtttcattcatgcactgttattcctggaagttcttggcatgcccacttcccagttccaggaacaggcagtcgttgttttttctggcttatcacattgagataacatggttactacaagtgacacttaaacgtgtcaggcaatttgggggctcccttcttgaactttttctaagagcaaacctttgtcttaatgccaccctgtttacaacaatagtagggctttgaacaatgagaaaatgcggggaaatgaaaaagacatataaagggaaagagtgga

SEQ ID NO: 519653 - DNA, 411 bp, Homo sapiens
cggcgcccggcaggtcacctctcctcccagggcccgccgccccgcccgccgcccaggccgaggccgccagtgcccgccggccgcttccgctcccggcgcaggcgckgcagcttggccagagcggagggggctcgggagaggagtggacgccgctggccaggatggtgctggagagcgtggcccgtatcgtgaaggtgcagctccctgcatatctgaagcggctcccagtccctgaaagcattaccgggttcgctaggctcacaggtaatcctcccccatcagccagtccccatccttgcacgttcgccaagcgggggaaggaggcgtaaaaatcctagggccaaggggcgggacggagctcggcgcctggcacgtgatccccgcgcgcagaggaaggtgggcgcgcgccga

SEQ ID NO: 519654 - DNA, 292 bp, Homo sapiens
tgctgatctatatagtactaccttcctcattgtgattccatagtcttccaatagaaatgtgctgtcagaatctgtatagagagtttgtaaatgccactatttaacaaggttcttaagaatttaggtggatgttttatttgatacctaccaaagaagcctaagtaattgtataatacttaacccatttagaattcagttgtggcagcataaccaatctggagagaccaggggagatgttactaatgcttgtactttattcagaartgagtgcctcattggcttggtgcagtga

SEQ ID NO: 519655 - DNA, 424 bp, Homo sapiens
atgggtaaactatgagacatccatccaatggaatactactcatcrgcaaaaaggaagaaactactgatgcgcataacttggatgaatctcagaagcattatgctgagtgaaagaagcccatatgaaaaggccgcatagtatatgataccatttatttggcattctccaaaagacaaaactatagtgatggggaaagacatggggacagtggctagggctgggagcaagtgtgactaaaaaagaatagtatgagagaggtttcgggaatgatggaattgttcagtattctgatagtgattgttatactaatccatacatgtgttaaatttcatggaactgtaaacccatttttaaaagtcaattttgctgtgtgttaatttaaaaattaaagctaaaacctaacaacaatcaagaaatatattgg

SEQ ID NO: 519656 - DNA, 653 bp, Homo sapiens
attagtatgaaaacattcaacactagagcttgttgggactcaaagagtcccctttcccaagagcggccattcagttttcccatgttgaacccttatcaggtaggcccaaggacccttctcttcatccctgttgaaatattttacaaaagattcttctcaattgcattctatgctgccattcaaaatcacaggctatccgcactacaaaatgatgccttaaatcagatgctgtactaaaaattataaccaagaagctccatttaagyggcagggtttatttagccatttttagcgttgtaagatggacagaggcatttctctgtcttccataagggaagaggcatctcatggaggcctatcagtgtttgagcaatgtagagttgaagctcatccacttacattcaaccttgagatagtcttctctttgaagtcttcttctataaaatctctatagatgtcttcttctataaagatgttttgaagagtatgatgtgtttaatatatgtgtaggtggcaaagatcattgagaaaaaaatgatatgtgtttagtttttttcttttgggtgttttctttccttccagacattatgtctgtttcaaacacacactcctagtaacagaatagctacagctacatgaataaacacattgtc

SEQ ID NO: 519657 - DNA, 462 bp, Homo sapiens
cccatgtctaatcctataagaatggcttaatataaggctgatacatagttaacattcagaaatgaggaagcaatttctgctatgtggatgaaatgttccaagataaaaaaaatcttgaattctaatgctttttaaaatgctttgatatatagtgctaaaaactcacaataaatatattaattacagagtagaattcatagacagttgtatctatcttgatgccatccaaagggagtatcacctttaaaatacacaaggaaatgcttcaaggaatgagtagcagttgatccaaaccttrtaaggttatccatttctgggcacaaatttccttgtattctctcactgccttactctgctatataatgtcatggtctacaaggctattgaaatagtataaaacaaaaccatactagtctgaatgcctggagcctccatggccatggagtatccgtagattccctc

SEQ ID NO: 519658 - DNA, 462 bp, Homo sapiens
cccatgtctaatcctataagaatggcttaatataaggctgatacatagttaacattcagaaatgaggaagcaatttctgctatgtggatgaaatgttccaagataaaaaaaatcttgaattctaatgctttttaaaatgctttgatatatagtgctaaaaactcacaataaatatattaattacagagtagaattcatagacagttgtatctatcttgatgccatccaaagggagtatcacctttaaaatacacaaggaaatgcttcaaggaatgagtagcagttgatccaaaccttgtaaggttatccatttctgggcacaaatttccttgtattctctcaytgccttactctgctatataatgtcatggtctacaaggctattgaaatagtataaaacaaaaccatactagtctgaatgcctggagcctccatggccatggagtatccgtagattccctc

SEQ ID NO: 519659 - DNA, 575 bp, Homo sapiens
tttcatgtttgttaagggtgctttctatgtgctgagtaaatcaaataataccatgcaattttaatatgtaatactttaaaaatattaataagcaatgtttccggaatattttgtttccaaacgtgttatactatcgcttctctcagggacatgtgttcttcagattaacaggcgacaggaaaagatacgcctttgcatggtaagcagtcagggagctcatgagacagagcagccccctggcaaaggagatgcgtccccggcacactcattacttgtagctacaggaaaattctcaattacggcgtcctggctgtcaatcatctgcaartggaccccgcctgctccggctcagggcggtgatagtcaccgttccggccctcctccaccgcacttcttcagaaagccgcaaccctttcccgtcagagcccctcccctcctcgcaccctgccagttcggcagccgctgcctccagcgcgttcaaaagcagaaacgtgtcctccgcgggctcgtacacgtcgctgaaggcgccgcggcccacgtgcccgtggaacggcgtagcgaagttctcccctgcc

SEQ ID NO: 519660 - DNA, 575 bp, Homo sapiens
tttcatgtttgttaagggtgctttctatgtgctgagtaaatcaaataataccatgcaattttaatatgtaatactttaaaaatattaataagcaatgtttccggaatattttgtttccaaacgtgttatactatcgcttctctcagggacatgtgttcttcagattaacaggcgacaggaaaagatacgcctttgcatggtaagcagtcagggagctcatgagacagagcagccccctggcaaaggagatgcgtccccggcacactcattacttgtagctacaggaaaattctcaattacggcgtcctggctgtcaatcatctgcaagtggaccccgcctgctccggctcagggcggtgatagtcaccgttccggccctcctccaccgcacttcttcagaaagccgcaaccctttcccgtcagagcccctcccctcctcgcaccctgccagttcggcagccgctgcctcsagcgcgttcaaaagcagaaacgtgtcctccgcgggctcgtacacgtcgctgaaggcgccgcggcccacgtgcccgtggaacggcgtagcgaagttctcccctgcc

SEQ ID NO: 519661 - DNA, 575 bp, Homo sapiens
tttcatgtttgttaagggtgctttctatgtgctgagtaaatcaaataataccatgcaattttaatatgtaatactttaaaaatattaataagcaatgtttccggaatattttgtttccaaacgtgttatactatcgcttctctcagggacatgtgttcttcagattaacaggcgacaggaaaagatacgcctttgcatggtaagcagtcagggagctcatgagacagagcagccccctggcaaaggagatgcgtccccggcacactcattacttgtagctacaggaaaattctcaattacggcgtcctggctgtcaatcatctgcaagtggaccccgcctgctccggctcagggcggtgatagtcaccgttccggccctcctccaccgcacttcttcagaaagccgcaaccctttcccgtcagagcccctcccctcctcgcaccctgccagttcggcagccgctgcctccagcgcgtycaaaagcagaaacgtgtcctccgcgggctcgtacacgtcgctgaaggcgccgcggcccacgtgcccgtggaacggcgtagcgaagttctcccctgcc

SEQ ID NO: 519662 - DNA, 450 bp, Homo sapiens
ggcttctgaactatcaagtgtcttctaggtgaggtcttggtctcatagtctttgtggcttcctccaggtaacacttggttttttgacctaaccttggtatttgtgtgacacacgtgtgaatgtgctccctgtggcagcgctgaggaaggactcagtcatcacagatgccaaaaggcaaatgcaatgtgcttttttccaacatatccagtcttgcatttttacccatcagcccatttgaaaaagaaraaaaaaagccctccgttagaattaaatcccctctggagataatgtgtattttttacatctttcactttttttatagtcacatttgctcccagtgcctgccagaatccactagagggcagagacacccatttatatttgtgtggcacttgctgagtggtaagaaaaacagacaccctgccctcccagagccaacctccagtgccg

SEQ ID NO: 519663 - DNA, 513 bp, Homo sapiens
tgtcactagctccttacctggctggattggtcttctgaatacttgccattccctggcatgatgcttttgcaaaataagaaaatcaataataataataataactgctagtgtctaataagcatgtgctcttcaatgtctattctcttacaactaccttaacaaatagggacatattattattctccttttaactttgctttccaragaaggaggctggggctcagggagatgaagtgagtttttccaggtctcacaggaacaggactgaaggaaggaagccttgtttgccaggagaaaccaaatggacatacaggctttctgtggaatacacagttcctgctatcttttggttgacaaagtctgaggtcctaggaaagagaggaaagtaatagaaatatgaatatgagtgtgtgtgtattttgcttccctcaccaaagttttcacagtctatattaatgagggcacgattttgcctgttttgttctctgccatatcctcattgtctagattagg

SEQ ID NO: 519664 - DNA, 513 bp, Homo sapiens
tgtcactagctccttacctggctggattggtcttctgaatacttgccattccctggcatgatgcttttgcaaaataagaaaatcaataataataataataactgctagtgtctaataagcatgtgctcttcaatgtctattctcttacaactaccttaacaaatagggacatattattattctccttttaactttgctttccaaagaaggaggctggggctcagggagatgargtgagtttttccaggtctcacaggaacaggactgaaggaaggaagccttgtttgccaggagaaaccaaatggacatacaggctttctgtggaatacacagttcctgctatcttttggttgacaaagtctgaggtcctaggaaagagaggaaagtaatagaaatatgaatatgagtgtgtgtgtattttgcttccctcaccaaagttttcacagtctatattaatgagggcacgattttgcctgttttgttctctgccatatcctcattgtctagattagg

SEQ ID NO: 519665 - DNA, 513 bp, Homo sapiens
tgtcactagctccttacctggctggattggtcttctgaatacttgccattccctggcatgatgcttttgcaaaataagaaaatcaataataataataataactgctagtgtctaataagcatgtgctcttcaatgtctattctcttacaactaccttaacaaatagggacatattattattctccttttaactttgctttccaaagaaggaggctggggctcagggagatgaagtgagtttttccaggtctcacaggaacaggactgaaggaaggaagccwtgtttgccaggagaaaccaaatggacatacaggctttctgtggaatacacagttcctgctatcttttggttgacaaagtctgaggtcctaggaaagagaggaaagtaatagaaatatgaatatgagtgtgtgtgtattttgcttccctcaccaaagttttcacagtctatattaatgagggcacgattttgcctgttttgttctctgccatatcctcattgtctagattagg

SEQ ID NO: 519666 - DNA, 561 bp, Homo sapiens
ctttgatgatgcctccctgaggcgctggcttctgaatagcctccagatagagcttcagcatctttggcttcttatgcaaagctctgagcttaagtttccctttctggatatgcctggggatttctatgccactaagctgggccctcactgggatgtcaacacatctcttctcagaattgcctttgagaggaactttctcttckggagtaaaatgtttaaggcttttgtccttcaggctaggtccttaagcaagggacttatacctccccagacaggtacctacctgagaggaatttgctccttcctcagccctcttgccacttcctttgttcaggcttctgctgttacctacatggtactgccatacctgccaaactcatcttcttgcttcagtccaacagtttttctatgatgcttctagagctgttatttaaaaggagattctgcctatgcaatgccccttaaatctcttcagtggttcttcattgctcttgggataaagcaccatttgcagtatcccagcctcccctctgggctctaacctcattagaccatatgttc

SEQ ID NO: 519667 - DNA, 561 bp, Homo sapiens
ctttgatgatgcctccctgaggcgctggcttctgaatagcctccagatagagcttcagcatctttggcttcttatgcaaagctctgagcttaagtttccctttctggatatgcctggggatttctatgccactaagctgggccctcactgggatgtcaacacatctcttctcagaattgcctttgagaggaactttctcttcgggagtaaaatgtttaaggcttttgtccttcaggctaggtccttaagcaagggacttatacctccccagacaggtacctacctgagaggaatttgctccttcctcagccctcttgccacttcctttgttcaggcttctgctgttacctacatggtactgccatacctgccwaactcatcttcttgcttcagtccaacagtttttctatgatgcttctagagctgttatttaaaaggagattctgcctatgcaatgccccttaaatctcttcagtggttcttcattgctcttgggataaagcaccatttgcagtatcccagcctcccctctgggctctaacctcattagaccatatgttc

SEQ ID NO: 519668 - DNA, 615 bp, Homo sapiens
gaagtgtggatgggagatataaatgtgtaaattacagcttcgaggtggtatcaaatgtgtggatatgaatgcagttttctaggaggagggtgcagaatgaggagataaagggggatggagctgatcttgatgaacagctacataacaggtagagaatatgcaaagagatagagaaggagcagccagagggggagaaggagatggggatagtggatcctcgcgaaagctagggtgggagrgcgttgcatggtgaggaagttgtcaacagttttgagtgctgctgagagttcaaacaaggtgattcctgaaaaatgctgagtttagctcacagtggttgaggtggctaaaatgagaatgttttgttggagtggtggggcaggaacacagattggaatgagctgattcctaaaattccttctacatttaatgttctatgattatgtgatgtggattcctgttagtgtttagataggaaaaatatgttacacacacacacacacacacacacacacacacacaccctatatttgtcttgatgtatatctatatttagaaacaacataactcaaatccaggattcctctttgaactaaatgtattttctgaagataccac

SEQ ID NO: 519669 - DNA, 615 bp, Homo sapiens
gaagtgtggatgggagatataaatgtgtaaattacagcttcgaggtggtatcaaatgtgtggatatgaatgcagttttctaggaggagggtgcagaatgaggagataaagggggatggagctgatcttgatgaacagctacataacaggtagagaatatgcaaagagatagagaaggagcagccagagggggagaaggagatggggatagtggatcctcgcgaaagctagggtgggagagcgttgcatggtgaggaagttgtcaacagtyttgagtgctgctgagagttcaaacaaggtgattcctgaaaaatgctgagtttagctcacagtggttgaggtggctaaaatgagaatgttttgttggagtggtggggcaggaacacagattggaatgagctgattcctaaaattccttctacatttaatgttctatgattatgtgatgtggattcctgttagtgtttagataggaaaaatatgttacacacacacacacacacacacacacacacacacaccctatatttgtcttgatgtatatctatatttagaaacaacataactcaaatccaggattcctctttgaactaaatgtattttctgaagataccac

SEQ ID NO: 519670 - DNA, 615 bp, Homo sapiens
gaagtgtggatgggagatataaatgtgtaaattacagcttcgaggtggtatcaaatgtgtggatatgaatgcagttttctaggaggagggtgcagaatgaggagataaagggggatggagctgatcttgatgaacagctacataacaggtagagaatatgcaaagagatagagaaggagcagccagagggggagaaggagatggggatagtggatcctcgcgaaagctagggtgggagagcgttgcatggtgaggaagttgtcaacagttttgagtgctgctgagagttcaaacaaggtgattcctgaaaaatgctgagtttagctcacagtggttgaggtggctaaaatgagaatgttttgttggagtggtggggcaggaacacagattggaatgagctgattcctaaaattccttctacatttaatgttctatgattrtgtgatgtggattcctgttagtgtttagataggaaaaatatgttacacacacacacacacacacacacacacacacacaccctatatttgtcttgatgtatatctatatttagaaacaacataactcaaatccaggattcctctttgaactaaatgtattttctgaagataccac

SEQ ID NO: 519671 - DNA, 615 bp, Homo sapiens
gaagtgtggatgggagatataaatgtgtaaattacagcttcgaggtggtatcaaatgtgtggatatgaatgcagttttctaggaggagggtgcagaatgaggagataaagggggatggagctgatcttgatgaacagctacataacaggtagagaatatgcaaagagatagagaaggagcagccagagggggagaaggagatggggatagtggatcctcgcgaaagctagggtgggagagcgttgcatggtgaggaagttgtcaacagttttgagtgctgctgagagttcaaacaaggtgattcctgaaaaatgctgagtttagctcacagtggttgaggtggctaaaatgagaatgttttgttggagtggtggggcaggaacacagattggaatgagctgattcctaaaattccttctacatttaatgttctatgattatgtgatgtggattcctgttagtgtttagataggaaaaatatgttacacacacacacacacacacacacacacacacacmccctatatttgtcttgatgtatatctatatttagaaacaacataactcaaatccaggattcctctttgaactaaatgtattttctgaagataccac

SEQ ID NO: 519672 - DNA, 477 bp, Homo sapiens
gggaaggcctgtgtggggtgcccttcaaggccacctccgttttcttatttccttggagatttacttttgtgctcctgcttcccctccctgaagctttgcctgctgtccatatytggaggggatgaataggatgagcactggggaggggaggagccatcactccagcaggaatattcccagcggctgagtcactgcatttgattttcagtgtgaacaactgagaaatcaaagagccctaaaagaggaggaagtttcaggacaatgttttaaaagataaaaaaacatcaacagcatggtgtctgagtggaaaataatagaaggggcttgaggagactggaaattccagtttgtgtaagggcgcacagtgctgtaatacagagtcctacctccctgcagtccctggatgtgaattcccaggctgcacccacacctgagcaaagcggaggctgggccttattaggttctgactgcgggctg

SEQ ID NO: 519673 - DNA, 477 bp, Homo sapiens
gggaaggcctgtgtggggtgcccttcaaggccacctccgttttcttatttccttggagatttacttttgtgctcctgcttcccctccctgaagctttgcctgctgtccatatctggaggggatgaatargatgagcactggggaggggaggagccatcactccagcaggaatattcccagcggctgagtcactgcatttgattttcagtgtgaacaactgagaaatcaaagagccctaaaagaggaggaagtttcaggacaatgttttaaaagataaaaaaacatcaacagcatggtgtctgagtggaaaataatagaaggggcttgaggagactggaaattccagtttgtgtaagggcgcacagtgctgtaatacagagtcctacctccctgcagtccctggatgtgaattcccaggctgcacccacacctgagcaaagcggaggctgggccttattaggttctgactgcgggctg

SEQ ID NO: 519674 - DNA, 578 bp, Homo sapiens
atagccaatccttttattttcagccatagaacacatttgccctctactcaaggaaaataatgcaaattctcattcccttcttatatccagaaaaacagtccaagctctctggatgatgttcagtgtagtaggctgaataatggtcacccaaagatatgacatcctaattcctgggacctataaatgttactccataagtaaaaagcaactctacagatgtgattaaggatcttgacattggagattagcctggattagctgagtggactttagatgcaatcacaagtacccttaaaagtgaaaggcagaaagaaatttgagacagaagagaagacagaaaaggagaaggccacgtgaagatggatgcagagattayaggatttggatgcagcaaaagtatgccatttaccacccaaactggatgagataaggaatggtcttccagagcctctggagggaacacagccttgccaacaccttgatttcagccaaggaaactgatgttgaacttctgactccagactatgagagaaaacatttttgttatttgaagtcaccaagtttgtgatcatttgtta

SEQ ID NO: 519675 - DNA, 576 bp, Homo sapiens
gatagttctgatcagttgagctctgwggtttaagtgacaattaaatgacatttctgttttgttgtgttgtgtttctgtaccaggccagagcttatctgccaaccaatacatgctgtgatgtacctttatcaagctgggggactttcacattattgtctcggctttagctccaatacaagacatttcgttttaaaagccctttgctccctgtgtgttaattaaagtcatttcagtggtctctgctgccagtttcctctgctcttcaatctgagtaatgttaattcagtcccagagtcccctggagattcattcaagcttcattcctgatttatttctgtcctgaccagatggctccaggttcctgcgactgcatgggcatcttttggattattctgtttatctttcccagtgcccaagataagggtagagtctaatggagtgcatttgtcagcaggataagccattcaccaccactgctgcttgaacaccataaccaaagttattagatttaatatatgctttcgtaaactccgtagcaaaagctggtgaagggttgttgatttgttttttgatctt

SEQ ID NO: 519676 - DNA, 523 bp, Homo sapiens
ttctgttttgaatgtttggaaaggctgaatgaatatactgaaagtgtacagcatattttaatgcagcaagcatagaaaatccattttattacacccaaagaaagtcccagaagtgcacattgagaaggcatatatgtgttgtttatggtaggtaccacttattgtctgaatttaatagatctgattgttgacgaaaacactctagagttaaataaatcatttatatagtttttgtttagatttgtggtaaaataattggactatagtttgcatcattagtctcatgcctatcctattcttgatatttccccagtttctttgaaagttcttggaaatatcagaaacaacagttaattgttaatgacckagtgtcaagttaaggcatatagatgtctcaaggttaatatttctgtattgaagatagaagggaatgacatggtcagtcttagggtgaaatctgataccatttagtcctataggcatgggtataagggtcttactagaacatctggggctggatgag

SEQ ID NO: 519677 - DNA, 643 bp, Homo sapiens
aagagttagggacgagttgggctaagggctgtgggaagatgacaaggaacatttgtgagatttccatggggaaatgagtcatatttggaaacatcagaaagtaagaaaatctttgtctataatctatccagcttccctcttgcatatctttttccttttagtggcttcctctccacctttaatctagaagtttataaaacggcttgggggatgaagcacacatgctttgtcttatttttctatccctagtacataacacagtgcctgattcatggcctgtcagtaagactctgataataaataatttcttccaacccctgtcaaaacctactctcagagagaaaatatgtaagcaaattcatactaaggtataaatggctgataaccatttaaattgtgayccatatactaagaggaatttttcttataagtaatggaatagccctttgctaaaatcaaaacccatttctaatagtggcatacatagaactaggggaggcttcaggatggcagcagtgatatttccagttgggatctcagccactattagtccctcttatcctaaaggggcttctcaattcccacctagaggctaagccttgcctcattctctgcaatagatgctgtctgttctcagcagaaa

SEQ ID NO: 519678 - DNA, 626 bp, Homo sapiens
aaaattatcatttttcatcagtaattaatttccaccaacttttcagtaacgtgaagtgatgaagtatacactactatggtatactatagtgtacagtawactatataccatttactcccatcattaatggggttatatactatatactataatatatagtatagtacattatactatatgtatactacactataatacgtatacacacatactatacaaattatactatatactatatagtatcatatactatactgtatatacacacatatagtatatagtatagtatgctataatatacagtacagtattatatatacataaatagttatagtgtacagtgtagtatagtataccatagtatgtatcacacatagttaaaatattagaaaaaatttttaatatacacatatatgtatacacacacatatatacacacatatttatatatataggtacacatataatgttatttagtttttatttatatctaaatttgtgctatggctagccctcatgtcacatttttgtgagaaaagactttaagaatcagttctatggtgaactgtttgaactctctgttaacttttctaataatacagaacaaaaaatatagagatcataaa

SEQ ID NO: 519679 - DNA, 626 bp, Homo sapiens
aaaattatcatttttcatcagtaattaatttccaccaacttttcagtaacgtgaagtgatgaagtatacactactatggtatactatagtgtacagtatactatataccatttactcccatcattaatggggttatatactatatactataatatatagtatagtacattatactatatgtatactacactataatacgtatacacacatactatacaaattatactatatactatatagtatcatatactatactgtatatacacacatatagtatatagtatagtatgctataatatacagtacagtattatatatacataaatagttatagtgtayagtgtagtatagtataccatagtatgtatcacacatagttaaaatattagaaaaaatttttaatatacacatatatgtatacacacacatatatacacacatatttatatatataggtacacatataatgttatttagtttttatttatatctaaatttgtgctatggctagccctcatgtcacatttttgtgagaaaagactttaagaatcagttctatggtgaactgtttgaactctctgttaacttttctaataatacagaacaaaaaatatagagatcataaa

SEQ ID NO: 519680 - DNA, 557 bp, Homo sapiens
aagcaacaccccaagcatcctgtgacagttccagtctgaaggtctgagaaccaggagctccaagggcagggaaaaatcagttttccagctcatactgtcatgcagagagagagagaattcaacctttctccatcttcttcttctatttcagactatcaatagattraatgatgtctacctacatggggaaggaccatttactttattgagcgcaccaatttaaatcctgatttcttctgcaaaccccctcacagaccacccagaaataatgtttaacaaaacatctgagcatcccctggcccagtgaagttgatatataaaattaactattgcattatttatttccttatattttgcttcaaggggtattttattttttgaatcttgttaattacctccttcaataattattgatgtggattgtgtactatatgttgttagccagtatctaagatgctgaggttattgaaactaagataataactctgatgtaagaatagtcacttaattttatattaatttaagaatgaatacctaaatgattaaattgtcgttta

SEQ ID NO: 519681 - DNA, 557 bp, Homo sapiens
aagcaacaccccaagcatcctgtgacagttccagtctgaaggtctgagaaccaggagctccaagggcagggaaaaatcagttttccagctcatactgtcatgcagagagagagagaattcaacctttctccatcttcttcttctatttcagactatcaatagattaaatgatgtctacctacatggggaaggaccatttactttattgagcgcaccaatttaaatsctgatttcttctgcaaaccccctcacagaccacccagaaataatgtttaacaaaacatctgagcatcccctggcccagtgaagttgatatataaaattaactattgcattatttatttccttatattttgcttcaaggggtattttattttttgaatcttgttaattacctccttcaataattattgatgtggattgtgtactatatgttgttagccagtatctaagatgctgaggttattgaaactaagataataactctgatgtaagaatagtcacttaattttatattaatttaagaatgaatacctaaatgattaaattgtcgttta

SEQ ID NO: 519682 - DNA, 541 bp, Homo sapiens
gccaggccctgtcccagaggcagccccacagtgcagagcacagctcagatgcacccagcagacctcaaccgcttctccggcgtctcacgggggcctggcgtgcagggaagggagcaaaccctgcctgccaggccctgtgtccacacagtctccctccctctcactccagccctaggaaggtgggagtattacacccccgccctttttttttttttttttttaaacttgagacagggtctcactctgtcacccaggctggagtgcagtggtgcgatcayggttcactgcagcctccgtgtcccaggttcaagcgatcctcccacctcagcttctctagttgctggaaccacaggcacatgccaccccacccagctaattttttagttttttgaagagacagggtcttactgtgttgcccaggctggtcttgaactcctgggctcaagcgctgggattacaggcgtgagccaccgtgcccggccaacccctttaacagatgataaagctgaggcttagcgtgcaaagtaactcatccacttcc

SEQ ID NO: 519683 - DNA, 593 bp, Homo sapiens
aatgctggaaggttctggctgtgggagagtctgggatccagggtcaggatcagggtctgtgctggttgtggtgggtgtgagtcagtgtgggcgctggggctgccctggctgacctcagaggctgctcacctgcggctcccaacccccttggacatgggtgtacctttttcttggccttgtcaggggtcctcttggggctcgacaccagctttcagatgctgagcacccccgccctgacctagcccatgggcgacatggggtctgtgtccacccagtcctggacacttcctctttctggggctcccgcctcataccgctgcctctgccgcccgtctccctccggacgccccctccagacgccccctccggacgaccacgcagtgttgtctggctctgtgctctgtccacctgcctrcgtggcgtctgcctggatttccattttgggtcttgcctgtggtgtgcctgctcctgtgtggaccctgtgtgtacctctgtggggactttcacacgtgtgttccttgagtgggatcctctgtatgtgggtctgtgtgtgtggctgtggccctgtgttcctgatgtccccacttgtgtgc

SEQ ID NO: 519684 - DNA, 596 bp, Homo sapiens
tcctctgtatgtgggtctgtgtgtgtggctgtggccctgtgttcctgatgtccccatttgtgtgtccctctgtgggggactttcgcacgtgtgctcsttgagtaggatcctctgtatgtgggtctgtgtgtgtggctgtggccctgtgttcctgatgtccccatttgtgtgtccctctgtggggacttttgcacgtgtgctccttgagtgggatcctctgtatgtgggtctgtgtgtgtggctgtggcctcgagtgtgttcctgatgtccccatttgtgtgcccctctgtgggggcagagacaggagcctgagctgcggaagaggctttattgattaaacggtttgaggatacatttccatgtgggaggtggtagtgggcgttgtgtccacggctgcttgtgtggcaggtcctatggctgagccatgtctgaggtccacttaggcaccgtcctgactgcccagcacttgcacctggaaggcagacacatgtggactaagagggctgtgctcaataagtggagagccacagctccatcaggcaagcaaggccctcagtgggggggggggggtctggcatattgctgcctatctcctc

SEQ ID NO: 519685 - DNA, 585 bp, Homo sapiens
gtgggtctgtgtgtgtggctgtggccctgtgttcctgatgtccccatttgtgtgtccctctgtgggggactttcgcacgtgtgctccttgagtaggatcctctgtatgtgggtctgtgtgtgtggctgtggccctgtgttcctgatgtccccatttgtgtgtccctctgtggggacttttgcacgtgtgctccttgagtgggatcctctgtatgtgggtctgtgtgtgtggctgtggccycgagtgtgttcctgatgtccccatttgtgtgcccctctgtgggggcagagacaggagcctgagctgcggaagaggctttattgattaaacggtttgaggatacatttccatgtgggaggtggtagtgggcgttgtgtccacggctgcttgtgtggcaggtcctatggctgagccatgtctgaggtccacttaggcaccgtcctgactgcccagcacttgcacctggaaggcagacacatgtggactaagagggctgtgctcaataagtggagagccacagctccatcaggcaagcaaggccctcagtgggggggggggggtctggcatattgctgcctatctcct

SEQ ID NO: 519686 - DNA, 307 bp, Homo sapiens
tgggaggtgtgtgtgcacatgtgatggtgtgcacacatgtatgtgtgtgcatatcccagtgtgagcatgtgggtgtgaacstgtttatacatgtgtgcacgcagtgtacatttcatgtctgcacctgtgtttggatctctgtgtatgttcacatgtgtgcatggaggagtatcccacagactggggaggaggtctatggagtctgggggctgctcggtggacaggaggtctggggtgtccacctgagctggctgatgcgggtgcaatgtctgtgggtggtggatgtctgtgggtggggtaggctgtg

SEQ ID NO: 519687 - DNA, 640 bp, Homo sapiens
atttgggggtcctgagatttattttcctttcatggtatcagaacagagaaaaggtaatgcgttgagccatgagcttatgacaagatggctaggaaggaatttttcagctccatttttatctcatgggaccaccatcrtatgtatgcaatgcacgagtgtaaaatcacatttagttaagtcagcttacactaagctatggacccagatggtcctggggcctttttccactgggagatctttaaggacctttcttagcttttctatgctaattggtatattcatagttgccttatttcagggcccattttgttaatgtgtatttttactaggaaatcacccattttttctaggtttccagtttgatgcaattatttgacttttaatttctcctctgtttttagttttgtacataattttcctatctacttttgcactcttttttccatcaacaatatttttaaaatatactttttagctttttttgaagaattgttatgtttgacaattttttatgacctaatcatgaccgtaaatgatttttaattaatttcagcttaatgtcttttgtagggcacaactgttaaaatacagaattacaacaaatgtgggtttgcagatcttaattggcttttttttgtgg

SEQ ID NO: 519688 - DNA, 573 bp, Homo sapiens
gggagggaacagctcctcttggagaggaattgtcttcgtttaggaaaaatgcttttaaagggcacatttcaacccggggccaaggccacaaaagagacgttagaaacgaacaaaatttagaggaaagagcagaggtcagagtgaggggttgaggcaggaggtccctgagtgaagctcccttccacccctgcatcccccacactttcagggggcggccaaaggagttgtgtgtcatgttccatttgatgctgtttgcactacrgtgatctcagcgcccccatcccaccccagacgtctgcggtgtctcccacacccaggtgccttgtgcctgtggattgcactacggtgatctcagcgcccccatcccaccccaaacgtctgcggtgtctcccacacccaggtgccttgtgcctgtggattgcactacggtgatctcagcgcccccatcccaccccagacgtctgcggtgtctcccacacccaggtgctttgtgcctgtggattgcactacggtgatctcagcgcccccatcccaccccaaacgtctgcggtgtctcccacacccaggtgcctt

SEQ ID NO: 519689 - DNA, 640 bp, Homo sapiens
atttgggggtcctgagatttattttcctttcatggtatcagaacagagaaaaggtaatgcgttgagccatgagcttatgacaagatggctaggaaggaatttttcagctccatttttatctcatgggaccaccatcatatgtatgcaatgcacgagtgtaaaatcacatttagttaagtcagcttacactaagctatggacccagatggtcctggggcctttttccactgggagatctttaaggacctttcttagcttttctatgctaattggtatattcatagttgccttatttcagkgcccattttgttaatgtgtatttttactaggaaatcacccattttttctaggtttccagtttgatgcaattatttgacttttaatttctcctctgtttttagttttgtacataattttcctatctacttttgcactcttttttccatcaacaatatttttaaaatatactttttagctttttttgaagaattgttatgtttgacaattttttatgacctaatcatgaccgtaaatgatttttaattaatttcagcttaatgtcttttgtagggcacaactgttaaaatacagaattacaacaaatgtgggtttgcagatcttaattggcttttttttgtgg

SEQ ID NO: 519690 - DNA, 640 bp, Homo sapiens
atttgggggtcctgagatttattttcctttcatggtatcagaacagagaaaaggtaatgcgttgagccatgagcttatgacaagatggctaggaaggaatttttcagctccatttttatctcatgggaccaccatcatatgtatgcaatgcacgagtgtaaaatcacatttagttaagtcagcttacactaagctatggacccagatggtcctggggcctttttccactgggagatctttaaggacctttcttagcttttctatgctaattggtatattcatagttgccttatttcagggcccattttgttaatgtgtatttttactaggaaatcacccattttttctaggtttccagtttgatgcaattatttgacttttaatttctcctctgtttttagttttgtacataattttcctatctacttttgcactcttttttccatcaacaatrtttttaaaatatactttttagctttttttgaagaattgttatgtttgacaattttttatgacctaatcatgaccgtaaatgatttttaattaatttcagcttaatgtcttttgtagggcacaactgttaaaatacagaattacaacaaatgtgggtttgcagatcttaattggcttttttttgtgg

SEQ ID NO: 519691 - DNA, 573 bp, Homo sapiens
gggagggaacagctcctcttggagaggaattgtcttcgtttaggaaaaatgcttttaaagggcacatttcaacccggggccaaggccacaaaagagacgttagaaacgaacaaaatttagaggaaagagcagaggtcagagtgaggggttgaggcaggaggtccctgagtgaagctcccttccacccctgcatcccccacactttcagggggcggccaaaggagttgtgtgtcatgttccatttgatgctgtttgcactacggtgatctcagcgcccccatcccaccccaracgtctgcggtgtctcccacacccaggtgccttgtgcctgtggattgcactacggtgatctcagcgcccccatcccaccccaaacgtctgcggtgtctcccacacccaggtgccttgtgcctgtggattgcactacggtgatctcagcgcccccatcccaccccagacgtctgcggtgtctcccacacccaggtgctttgtgcctgtggattgcactacggtgatctcagcgcccccatcccaccccaaacgtctgcggtgtctcccacacccaggtgcctt

SEQ ID NO: 519692 - DNA, 640 bp, Homo sapiens
atttgggggtcctgagatttattttcctttcatggtatcagaacagagaaaaggtaatgcgttgagccatgagcttatgacaagatggctaggaaggaatttttcagctccatttttatctcatgggaccaccatcatatgtatgcaatgcacgagtgtaaaatcacatttagttaagtcagcttacactaagctatggacccagatggtcctggggcctttttccactgggagatctttaaggacctttcttagcttttctatgctaattggtatattcatagttgccttatttcagggcccattttgttaatgtgtatttttactaggaaatcacccattttttctaggtttccagtttgatgcaattatttgacttttaatttctcctctgtttttagttttgtacataattttcctatctacttttgcactcttttttccatcaacaatatttttaaaatatactttttagctttttttgaagaattgttatgtttgacaattttttatgacctaatcatgaccgtaaatgatttttaattaatttcagcttaatgtcttttgtagggcacaactgttaaaatacaraattacaacaaatgtgggtttgcagatcttaattggcttttttttgtgg

SEQ ID NO: 519693 - DNA, 538 bp, Homo sapiens
gaacagctcctcttggagaggaattgtcttcgtttaggaaaaatgcttttaaagggcacatttcaacccggggccaaggccacaaaagagacgttagaaacgaacaaaatttagaggaaagagcagaggtcagagtgaggggttgaggcaggaggtccctgagtgaagctcccttccacccctgcatcccccacactttcagggggcggccaaaggagttgtgtgtcatgttccatttgatgctgtttgcactacggtgatctcagcgcccccatcccaccccagacgtctgcggtgtctcccacacccaggtgccttgtgcctgtggattgcactacggtgatctcagcgcccccatcccaccccaaacgtctgcggtgtctcccacacccaggtgcyttgtgcctgtggattgcactacggtgatctcagcgcccccatcccaccccagacgtctgcggtgtctcccacacccaggtgctttgtgcctgtggattgcactacggtgatctcagcgcccccatcccaccccaaacgt

SEQ ID NO: 519694 - DNA, 375 bp, Homo sapiens
cagctgttctgtccctgaaaactggcaacaggctgtccacctgagagggagacggagcagagctgcaggacactgccccagcccactctgaagtgtagcagcctcagcctgcagccctgggaaagtcccatctgttcctgtccttycagcagcaggagcttgccttgcgcagagatgggctctgcctttaaggacatcgagcatctctccaagcctcatgctggtggtgagaggcagaagcctcactggactgactaaaaccaggatgtcacctgtaggggcccccactgggagctgggccccagaggagcacctggaccaactactcttgtccagatgatcgaatgtgggagagaagatgggggtgggcagagc

SEQ ID NO: 519695 - DNA, 375 bp, Homo sapiens
cagctgttctgtccctgaaaactggcaacaggctgtccacctgagagggagacggagcagagctgcaggacactgccccagcccactctgaagtgtagcagcctcagcctgcagccctgggaaagtcccatctgttcctgtcctttcagcagcaggagcttgccttgcgcagagatgggctctgcctttaaggacatcgagcatctctccaagcctcatgctggtggtgagaggcagaagcctcactggactgactaaaaccaggatgtcacctgtaggggcccccactgggagctgggccccagagragcacctggaccaactactcttgtccagatgatcgaatgtgggagagaagatgggggtgggcagagc

SEQ ID NO: 519696 - DNA, 375 bp, Homo sapiens
cagctgttctgtccctgaaaactggcaacaggctgtccacctgagagggagacggagcagagctgcaggacactgccccagcccactctgaagtgtagcagcctcagcctgcagccctgggaaagtcccatctgttcctgtcctttcagcagcaggagcttgccttgcgcagagatgggctctgcctttaaggacatcgagcatctctccaagcctcatgctggtggtgagaggcagaagcctcactggactgactaaaaccaggatgtcacctgtaggggcccccactgggagctgggccccagaggrgcacctggaccaactactcttgtccagatgatcgaatgtgggagagaagatgggggtgggcagagc

SEQ ID NO: 519697 - DNA, 634 bp, Homo sapiens
tgcttcagtgtgtgcttaccttgtcccytggggtagatgcttagctggcagtgtgaatcgtgtatcctgagggtctttgctggtgtggtggaaagacaaaccttttgaggtgaagagccagggtgtcaggaaatgtggcctatctgctagtcagagtggatgaagtcatgaatgttggggagtttttctgtatgggtaggagacggagacccataactaagtatgtgctgtttaaagtcctgttccttcatcttctacatttattggcagttgacattcccttactcccaatcaatactatttttttttattttgagacagagtctcactctgtcgcccaggctggagcgcagtggtgcgatctctgctcactgcaagctccacctcatgggttcacgccattctcctgcctcagcctcctgagtagctgtgactacaggcgcccgccaccacttctggctaattttttttgtatttttagtagagacagcgtttcactgtgttagccaagatggtctcaatctgacctcgtgatccacccgtctcagcctcccaaagtgctgggattacaggcgtgagccaccgcattcagcctcaatcaacactcttaaatgtttgtactgtttgcaaaact

SEQ ID NO: 519698 - DNA, 626 bp, Homo sapiens
cacagcctgccaggtaatttttatattttatctcatttgattcttgccaaagttgtgaattctataaatcatgtccatttaataaacgagagaattaagccttagcagagttaaacaatttttccaaaattatatgatttgtaaatgatggaactggggtataaattcatatgtgatttttatattataccatgctgggtcaaaatattactgccccaggatttttcagggacccaaaacagaagaaaaagttaatgtatgtgtactttatagatatgttttatttaactatccagaaaggatagtctttttgttaacttttgttttgggttaaggggtacatgtgcaggtttgttaataggtaaactcgtgtcatgggggtttgttggacagattattttgtcacctaggtgacaaagcctagtacccaatagttattttcttctgctcctctttctcctctcaccctctatctcctgataggtcccagtgtctgtggttcccttctttgtgtccatgtgttctcatcacttagctcccacttataagtgagaasatgtggtatttggctgtctgttcctgcattagtttgctaagggtgatggcctccagctccatccatgttg

SEQ ID NO: 519699 - DNA, 575 bp, Homo sapiens
tccccgcccccccgacccaaaaaaagaaaaaaaaaaatatcataaaaagcaaaatggattccactccrggggaagcttaggtcagctcatccgctgtgctgttctgaggtcagggaacagatacatacaggcccaaacagcctgaggtagcccccagcagagctgctctttgtcctggaagcagacactctcccatcagagaatgcttagaatacagacacaggattgggagcatgtcactcgagttctagacttatgagttaacaacttgtgaccttaagaaaatgacagccttcccaatatccatgtcctcttgtgtaaaatggaaatgtaaaagaagattggccccataaggcttctgtgaggatcaaaagagcctaagaatggaggtaaatggctatacacatggagccagcacctgaatagagacattgatcattgtgtttttttttctatgagaaaaggcttgagataacactcacagttcctgatgaggcttccttggcaaccagatatatttactgggaaaatcgatgtactcagatttccagtggccacaaaccagaacaaagcaa

SEQ ID NO: 519700 - DNA, 609 bp, Homo sapiens
caaaaaaagaaaaaaaaaaatatcataaaaagcaaaatggattccactccaggggaagcttaggtcagctcatccgctgtgctgttctgaggtcagggaacagatasatacaggcccaaacagcctgaggtagcccccagcagagctgctctttgtcctggaagcagacactctcccatcagagaatgcttagaatacagacacaggattgggagcatgtcactcgagttctagacttatgagttaacaacttgtgaccttaagaaaatgacagccttcccaatatccatgtcctcttgtgtaaaatggaaatgtaaaagaagattggccccataaggcttctgtgaggatcaaaagagcctaagaatggaggtaaatggctatacacatggagccagcacctgaatagagacattgatcattgtgtttttttttctatgagaaaaggcttgagataacactcacagttcctgatgaggcttccttggcaaccagatatatttactgggaaaatcgatgtactcagatttccagtggccacaaaccagaacaaagcaaggtggtgccccaggccttgttcctttggcctggggcccagacccaaggtca

SEQ ID NO: 519701 - DNA, 575 bp, Homo sapiens
tccccgcccccccgacccaaaaaaagaaaaaaaaaaatatcataaaaagcaaaatggattccactccaggggaagcttaggtcagctcatccgctgtgctgttctgaggtcagggaacagatacatacaggcccaaacagcctgaggtrgcccccagcagagctgctctttgtcctggaagcagacactctcccatcagagaatgcttagaatacagacacaggattgggagcatgtcactcgagttctagacttatgagttaacaacttgtgaccttaagaaaatgacagccttcccaatatccatgtcctcttgtgtaaaatggaaatgtaaaagaagattggccccataaggcttctgtgaggatcaaaagagcctaagaatggaggtaaatggctatacacatggagccagcacctgaatagagacattgatcattgtgtttttttttctatgagaaaaggcttgagataacactcacagttcctgatgaggcttccttggcaaccagatatatttactgggaaaatcgatgtactcagatttccagtggccacaaaccagaacaaagcaa

SEQ ID NO: 519702 - DNA, 609 bp, Homo sapiens
caaaaaaagaaaaaaaaaaatatcataaaaagcaaaatggattccactccaggggaagcttaggtcagctcatccgctgtgctgttctgaggtcagggaacagatacatacaggcccaaacagcctgaggtagcccccagcagagctgctctttgtcctggaagcagacactctcccatcagagaatgcttagaatacagacacaggattgggagcatgtcactcgagttctagacttatgagttaacaacttgtgaccttaagaaaatgacagccttcccaatatccatgtcctcttgtgtaaaatggaaatgtaaaagaagattggccccataaggcttctgtgaggatcaaaagagcctaagaatggaggtaaatggctatacacatggagccagcacctgaatagagacattgatcattgtgtttttttttctatgagaaaaggcttgagataacactcacagttcctgatgaggcttccttggcaaccagatatatttactgggaaaatcgakgtactcagatttccagtggccacaaaccagaacaaagcaaggtggtgccccaggccttgttcctttggcctggggcccagacccaaggtca

SEQ ID NO: 519703 - DNA, 609 bp, Homo sapiens
caaaaaaagaaaaaaaaaaatatcataaaaagcaaaatggattccactccaggggaagcttaggtcagctcatccgctgtgctgttctgaggtcagggaacagatacatacaggcccaaacagcctgaggtagcccccagcagagctgctctttgtcctggaagcagacactctcccatcagagaatgcttagaatacagacacaggattgggagcatgtcactcgagttctagacttatgagttaacaacttgtgaccttaagaaaatgacagccttcccaatatccatgtcctcttgtgtaaaatggaaatgtaaaagaagattggccccataaggcttctgtgaggatcaaaagagcctaagaatggaggtaaatggctatacacatggagccagcacctgaatagagacattgatcattgtgtttttttttctatgagaaaaggcttgagataacactcacagttcctgatgaggcttccttggcaaccagatatatttactgggaaaatcgatgtactcagatttccagtggccacaaaccagaacaaagcaaggtggtgccccaggccttgttccyttggcctggggcccagacccaaggtca

SEQ ID NO: 519704 - DNA, 641 bp, Homo sapiens
ggacggcatgccttgctctgattcagcgacctctctttcctcccccgacttagaggttcctggtctgcggagaaacttgcccagatgcaaagccacagagcagagacagcagaatcagaagctttaaaaggtgtaagcggccggacgcggtggctcacgcctgtaattccagcattttgggaggccgaggtgggcggatcaccagaggtcaggagttagagaacagcctggacagcatggcaaaaccctgtctctaataaaaatacaaaaaattagctgggcatggtggcaggcacctgtaatcccagctyctcgggaggctgaggcacgagaatcgcttgaaccagggcatcagaggttggcagtgagctgatatcgcgccactgctctccagcctgggtgacagagcgagactccaaaaagaaaaaaacaaatagatgtaagcactgagaaggcagagagagcatccctgtgcaatagaggaagacatgtaggtatagatactaaagatagaaaagacctctggtatcaagttccctccctcagggtccagagcaggggaaatattcaaggaactgctgcctctgatgtctcattggcagaccacagtcaaaaccacacatttttcaccagctcccgag

SEQ ID NO: 519705 - DNA, 505 bp, Homo sapiens
accaaaaaattaaatatacttggtgtcaatggattcatcactatgtataaagcttatttgtgtaataagtcaaataagtaaagaattatttgaattgtgyttgtgtaacattcttatgttaaatgcattttgtttctttaaaagttccatccttgaactgcactttgctttcttatctaatctataaataattaagttaaataacctaaatgattctcccatttaagcatagctatttgacagattttcttaaaaaacatcaaatatatattacgtttgaggcatataatcccgtaagtggtggaaatatcaagcatttactaaaattaaataccaatggcaattatttttaaacttctctaaggaccaacaaaacaaaacctaacaaaaaaatctacaaacttaattttgagcctcagttcaaggtatacattggcggtagtgagatgaacattgatttagggtatgctgtagagatggtgtttagtgttttactgctcaccaa

SEQ ID NO: 519706 - DNA, 574 bp, Homo sapiens
attgaaaaaggaaaatttttagattcagtagcaaacattttggatttctcaacaacactttctccctaaattgctgtgaaatacattattcatcaatacctagatccagaaatattcactgagggcctgtagtggcaggtagtgaattcattgaggcaacccatgcaaagtgcacccgcagagcctgtgatgtgagggggatttaaacataagttgccctcactctacttcttaaaaatattttcaaatgattcattaacattcttattttatatgatccttgaattagttagatgtatattcctcaatctccaagtattttgaaatttttctatcattttgctattaatttttagttaaagtcctcatgtttgagaacttattttgtatgattactgttattttaatttcacacatgtatgtccaatggccaagaatgttctctatcttgsagagcattccctgtgaggttgagaagatgtatattttgctattggaacgataattctataaatgtcagttggatcaagttactgaaataggggctgaaatctctatctataataataaatgt

SEQ ID NO: 519707 - DNA, 683 bp, Homo sapiens
attctatgaatatctaacagatgtatgaaacattacaggcattcagtatgcacaaggatttcattactgccctggggtctgcaacattattttgctgaaaataaccttaaacagctaagcaatgacagcctttcttcttattacctggcatcctcactttaagtggtaacttcaacagttcatctaggctctgccttctttccaccgtcattaatgatttgcagtgagtcagttttcatggattacccacattgcattttgatactgatgactaattctctagcggttttctatacttagatgaaatggagaaatctttccttttttcacatatgaagaaccacttcaagttactaatatgaaggtaaccaaacagggcttctcctttaaactatgctaatttttctgtcttcttgttttgtgatacttgtgtcatttagtgatcaggtgtgatctcatactctatgaatcatgctatcaaccaaaatgactctattttaatgaactgagccacaattaaaacaaacaaacaggctatttcataccraaatgctgatttaacaattcttttaaacttggaaaattggcaaccttatgtatgtatctctacatggaaataattaactagtttgggatatatgtaattatttttggatatttattaccatttttaccattccttt

SEQ ID NO: 519708 - DNA, 637 bp, Homo sapiens
gaaaataatggaataaaaatagggtatagttttgctatatgccaatattatactaggggatggtacagaattgtgaaaaaaataagcattatatttgttctgtgaagtcagatctttacttttttaacatttgcaagttttccaataccatttaatttattattgctttcttagccgttttgctttckgcctccaaaatatctgtccttgtttgacttaatattcatacttttgtctacataactataattctttctcataactcatatttttattctgcttcttatttagataaataatctcaaaatagactttagcacaaatgattttatttaataattatatatttatagcagtacataaatacatactactcaaaaaattaggaaaaagtaaaatataaatgttatttcaggatattatccatgaaaacttcccaaccttgtgagaaaggccaaaagtcaaactgaggaaatgcaaagaacgcctgcaagagtctgcacaagaatattatcccaaagacatataataatcagatttttcaagattgaaatgaaaaaaagaatgttaaaggcagctagacagaaagggcaggtcacctacgaagggaaccccattagtctaacagtggacccct

SEQ ID NO: 519709 - DNA, 514 bp, Homo sapiens
ggaagggttttgtagagaaagtgttatgcagagtttagattgaaaggaaaacaaaaaggagaaagcctgtgtggcctcagaatacagagagaraaaaaaaaatgtctattgatgacctgctaagtagtacagctatattttgaatgataagatttccaagattcattagtgttccaaaaaaattggcaagatttcagacggttcaagaggtttttttgtttctttacaatctttcttatttatataggagtaaagacagagagtaacataagtggaaattctgccaagatttgttttatttctttagtatgctcccattctcacacacgaaaatcatttcaattaatgtatgtgttacgttctccactattttgtccttttgaaatgatcggcaatcttgtgcagaatgcttttaagtgatatcttccttcaactatctaaatattttgttaatcatctagcatttcatggggaccagtcaggagcaaaattaagaagaataaaatgcaatgaa

SEQ ID NO: 519710 - DNA, 502 bp, Homo sapiens
acaacgtcgagacagaaattctcaactgcagagggttatggaaataatgattagaacataatgttctgagaggacgggagatgggtagccaatgagagtatttctcaatgtataggataaacatgtacatacactaaaggtgaatgatcaggaggtaagtgcagatgatacaataaaattcatcatcacttgctcagtttctggagctgagccagtactcagacttggaaattttgattgaagtagaggccctcttgaaaaaaaaatgttgkcgcaataattctccccaaaatgcacctaatgccaattacacggcaatcatacagtagaaaaattagagtactcagacatttcaaaaactattgaagttgtcactgatgcatgggcatcaccatgcattgaataataaaacatagagcactgtttctaaagctgactcatgttcattggatccattaaactaccgagacagagagaattcaaaattggagggcacatggag

SEQ ID NO: 519711 - DNA, 565 bp, Homo sapiens
tccttgacctgtgagtctgcactaggtccaggacttagagtcaaactcgagttgytagacactcagttgatgttgaataattagagcattggttgttggtgtgggaaaatgccatacattttgtgtcatagaaaaaaagtaccgcccaggcggagggaagcaaaatagaagctgatgctgcccaaggtgatcactcccagccaccagttctcagccagtcctcactgcctttagaactgggaatggtgactcttaaccctggcagcacggaagcaccatttctccaggccccatttcagaaaatgttacttttaattctaaatgtgattgtcccatagtatatataaaggccacattttatagtgtacaacttgatcaattttcacaagctaactcatacaatctaggaaacagcttttccttgatttgtaagttttctttatttgttctggctatgagatttctactggatatatgaaatgtgaaaatcgttttgcactttgtagtttcaattttcactctcttcatgtttttgatgaatcaatgttcttaattttaatatagt

SEQ ID NO: 519712 - DNA, 614 bp, Homo sapiens
gtaaaaaatgcctctacttatgaaagaaaagataatcgtcacaggaatacacagagctcaacctttgagcaaggtatcactgtatcagaaatccaactacaacatacattagccctgtgatcttggataattcactgcacctctctgcttcactgcaaaatatcagtgacgacattgccctgcagagttgttgtgggtgtagtagaattctgaggctggattgtgtttctcctagggacttaatgtacctggctacatttakgtctaaagctctttaaaatggctgaatggattaaaaaaataccattatcagtcaaaatatcctactgcaaattatagattaaatgtactacagctaactgaagtagaaaataaaatcattggaaagataatagaaaggtcacagaatggatggaaatctgagagaagcctagaaataaaagctaatcaggagagtggttcagtagtaagaagcaaatccaaggacacaacccagaaataattggttgagaggtcatgtcagtgatattgctgtagaacacctgatattgccattactgacctcatggtgccaccatctctgatgtgcacactcaatttattgagacttggtc

SEQ ID NO: 519713 - DNA, 678 bp, Homo sapiens
ataagacctcctctccaaaattaaagcacacgttttgccttactcctgcttctgctttccatcctattctaattccctcatgagaacatgaaaatttggtaaaagctttgctaactcttcatctccaacccaagtcctrttttctaggtttggttgaaatcattaaatgcttttactgttattacaatgacccctaagtatatccttttagtttcaaggctctgtatatttaacccttatatttatattctttttatatacttccacgttctcactatttcctcttcatcttttcttattttgagtttgtgttcttgcacattttgggtatagcataatcatttctcatgtgtttttctgacatgcgcaatggatgttatgcttcctcaatcttggcttatcctcacataccataccttaactcatgagttagctctgatggttaactattttgatggccattcaaatcttgattgtatccttttttctcagtactctttagaaataatttctattgtttttattgacatttaatgaagtaaatgtcagttctgttcactgagtcttttttttctttccctttttgatgttttttctttttatgcaagttactatttaatttcagagagtcattagatgttgtaattgagtaactatcccctttttattcatgttaat

SEQ ID NO: 519714 - DNA, 562 bp, Homo sapiens
ggaacatctccattttgctcagatggtaacaaagcttacatgacattttcccagaagccatgcctagtcaatgtcaccaacttgtttgacaggaagtgtgccattaccatgcttacaagcagcatagatcaggttgaccatctgtcttctttcytgtagaggtgaatgccctcccatcattgaggacaggtggctgagctgctgctttcatcatttatttccaagtactgatatgcatgatcccataggtagctgaagtaggggcaagcaaaataaataagtaaataaataataaagctttatgaaaaagaaaaacaggttataggataaagcttcatttgtgcaaaatatttatataatgaactatatgtgcatttttatattttaaaaatgcatactatagatgcatttttaaatgtttcacccattacacttgttacagagctttgcatattataggtattctgtatgtatgtatggaaagagtgcttaaatctactgttaaaataatacatgaaacaatcaaaaaccgtatgtcatatataataatataacattattt

SEQ ID NO: 519715 - DNA, 267 bp, Homo sapiens
gccaggcttccagacagggacttcccagtcttcctaatcacttgaggcaataccttacaataagtatcttcatatgtattctacatagttctgtttttctctgcgtaagcctgtctaacacattcgtaacctcattgtggtttaattgcatttccctgaatacctgtgacatttgctaaatatcagaagaatggataaattgtattcatacagtagaataaaatagyttaattaagacaaagaaactacacctatgttatcaacatg

SEQ ID NO: 519716 - DNA, 267 bp, Homo sapiens
gccaggcttccagacagggacttcccagtcttcctaatcacttgaggcaataccttacaataagtatcttcatatgtattctacatagttctgtttttctctgcgtaagcctgtctaacacattcgtaacctcattgtggtttaattgcatttccctgaatacctgtgacatttgctaaatatcagaagaatggataaattgtattcatacagtagaataaaatagcktaattaagacaaagaaactacacctatgttatcaacatg

SEQ ID NO: 519717 - DNA, 655 bp, Homo sapiens
catgtggtatctacttcttggtggagctggactatacaagtggtaccaggagttgtcctggttaacaggtggggtttagttagtccctagcacaaagtggtagctctattgctaaagatttcgctggtagtgacctgggaaaatgtcccaatagaggagttcagtggtcagratcatgcttggatacaacttttaaagtaaaccacagtgctgtatcttacatgcgctactgtagagaacgaagtccagcacctggtaggtctctttgggttctagaagcagcacattccacccctatgaatattcctctagcctgtatacaaggtggcatgcaaggctgctggctttgagtaggatcctgagcaggaatataatctgcagcagatccaggttatggtacaggcaatcttgccacttgggccatacaatccagcaaaccatatgatattacaggtgttagtggtggaaaaagataccatgtggagtttatggcaagctccagtgggagcaaaacaatgtaggtcctaggagtctggagcaaggacctgccatccacagcaaaaaacattatgccttttgaaaaacaggtcccggcatgttactgggccccaataaagacaaaacacttgaccatgggtgtcaagtggccatgcag

SEQ ID NO: 519718 - DNA, 505 bp, Homo sapiens
ctctcagccgtgagtaagtgcggcagggacactagggcaggtgcctcaatgggagatgcaggactcctctgacctgcccctgtggcctgaggactccttatcagctttgccaaaagtttcttagacatgcattaaagtctaaggcacttccacctagcctaccttcatttcatctctcctccaccgggggtcagaatctccttctcagtctgatggcactcctagcctaccctaagaatcggatggcactcctaaccacctctctctcaccattttccgtcacaggtctttccctcaatgactctcttgcacagttaatcccatctcagaggacctggatcaacacagctttcatcagatattcaaaaggtttatgacctaaaaaaggttgtatacaacccatttgccagatgctgagtttgcattcctgccttagaaaaaccagaaacacratatggagccattcttgacccagatcaatgctttctttcttgcagtatccttg

SEQ ID NO: 519719 - DNA, 636 bp, Homo sapiens
tcttgcaaattggcctttgggtattctagtgggcagatttccttcctgtaaaattccaaaaatactgtttttaattcatatgacctgtatgttcccatgaatacagttattctgatgttgctttaaccttgtgcaccatggcaaatatttgcttcctctaaaactccctccccagtttgcttccgttttacacgctcaaggccagtctattctaaaagagatatataatcttgtgtccttgctcctagacttagaaatgtcatggctatcattgcttcagttcaaccccagatcccttgggtggcccagctcagcagagcttgttttccttcatgtgctgcttagttattgttgaggctgctgaactcactttttccttcccagtgcctcttgaaacccagccatctttccccacaggagagtaagmccctgctgataggaatcttcccatgtgccacatgcacacagcagtttgccaacgtggatggctgccaatggttttctcctagttgcaagtttattttccctggatggcagtgctgtgccacacgggtggtccgtgacacactaggcttcccattgatagaagcttctttgtggagaagtgcctctggtgtacttggggttcccacagac

SEQ ID NO: 519720 - DNA, 642 bp, Homo sapiens
cttgccagttgccagagaaagttaatctttaatttgtataaagataagctaggcagcaccaaaagtaaggcatacagcctcttgtctcgtgtcccctttaaaatatcaaagtgcaagcaaaaaataaaggaaactgaaaaaaagaaaaaagctgcatggtagaarcacaaagactttcaaagactttggagccagaaactgtgcaaatcctcttgctactaattgtgtgcatttaacttcatgcctgttgccacattagtaatcaggcataaaaataactacactgcttcatggagttgcagtgagaattaaatgagattatatataaagtgtttgaggcttaaaattttctttaggcactgctgaaatgctttacaagtttctctcttttttgatgtttacagtgattacatttatctaagcaactttcatacatgttcagttttaacatattgactactctgacaaatatgcttaaaaaaagcaataacattatagagttaatgcagagtcctaaggatagtctagtagccactaagttttttcttaagtcttcactttagatgctgttatttctagcacaagcaagcagagtctttcatatgcttacaccctggagtctttggttgctaccattatcag

SEQ ID NO: 519721 - DNA, 642 bp, Homo sapiens
cttgccagttgccagagaaagttaatctttaatttgtataaagataagctaggcagcaccaaaagtaaggcatacagcctcttgtctcgtgtcccctttaaaatatcaaagtgcaagcaaaaaataaaggaaactgaaaaaaagaaaaaagctgcatggtagaaacacaaagactttcaaagactttggagccagaaactgtgcaaatcctcttgctactaattgtgtgcatttaacttcatgcctgttgccacattagtaatcaggcataaaaataactacactgcttcatggagttgcagtgagaattaaatgagattatatataaagtgtttgaggcttaaaattttctttaggcactgctgaaatgctttacaagtttctctcttttttgatgtttacagtgattacatttatctaagcaactttcatacatgttcagttttaacatattgactactctgacaaatatgcttaaaaaaagcaataacattatagagttaatgcagagtcctaaggatagtctagtagccactaagttttttcttaagtcttcactttagatgctgttatttctagcacaagcaagcagagtctttcatatgcttacacmctggagtctttggttgctaccattatcag

SEQ ID NO: 519722 - DNA, 571 bp, Homo sapiens
tgctagccatatgtccaacccttgtagaggggagggtatgtttccctgagctcttgtttattttcctggaagtcaagactaaccaaacctttaaatgcccagccggagtctttggsggaggaagattggtcacaaaagcttgaactgatttaatcacaatctaaatttatattatattttaccagattttctcttccaatgatgttgtgtcattttgtcctcacaaaaccccaaaatataggccatgtagaaatcctccatttacccataagaagactgagacccagggagactgagaccaataataaaagcagccattttggagttcactatatgttagacacttttctaaatccttgataggtgttcattcatttcatactgacatcagtcctacaaggcaggtaccattattatccctattccttgatgaaggagatgagcccagagaggttacttaacttgcccagggtcacacagatagttagtagtggagctgggattcaaacctaggcagtctggctccagagtctgtatttaaaaccactatacatgctgccagctagcttgg

SEQ ID NO: 519723 - DNA, 472 bp, Homo sapiens
gctagccatatgtccaacccttgtagaggggagggtatgtttccctgagctcttgtttattttcctggaagtcaagactaaccaaacctttaaatgcccagccggagtctttggcggaggaagattggtcacaaaagcttgaactgatttaatcacaatctaaatttatattatattttaccagattttctcttccaatgatgttgtgtcattttgtcctcacaaaaccccaaaatataggccatgtagaaatcctccatttacccataagaagactgagacccagggagactgagaccaataataaaagcagccattttggagttcactatatgttagacacttttctaaatccttgataggtgttcaytcatttcatactgacatcagtcctacaaggcaggtaccattattatccctattccttgatgaaggagatgagcccagagaggttacttaacttgcccagggt

SEQ ID NO: 519724 - DNA, 305 bp, Homo sapiens
caagtggtcttcttcccccacactccttrttttgcaaccaccttcaggaaacacttagctaacaatttgatgactttaaaataatattcagcaacatttattccactactgtgtaagtttcacaagggcagggattttgcctggtttgttcagtgctatgttcccagggtctagaagagagctcaggaaaacacataggcactcaatatttgttagatgactgcatgaatgactggacagcccatagagttagatgcttttcccaacaacacaaacatacccacctggtgagtaaccatcgcctc

SEQ ID NO: 519725 - DNA, 511 bp, Homo sapiens
ccagctagaaggctatgtccagaagggtgatgttggtagtggagatagtgagaagagagtggaattgaaatattccacagataatttagtgtaacctggaaggtaaaaacatacatcaaatatcaggggccaggtgacaatgtaggggatgggggaatgggaagtcggcatggagtttctaagaggtaagaagaagaaggtgatctgtgcmagacagtttgagtagagaaagttagaacttagtctgtagaagggatgtgtagttcccggggtgtttgagtagtggtctttgttgctaagaggcattggtcattcctatgtatggttctggtacataagtacctgtggtactgtaagcagtacatttgtaatatgatttgaatttgtaaaattctacttttttttaaatatatatatatggtttgtaaaacagaacaggtagtctcaagagtgggtttccagatggggactttaagagtggccagcctttgagagtgactttagactgcac

SEQ ID NO: 519726 - DNA, 511 bp, Homo sapiens
ccagctagaaggctatgtccagaagggtgatgttggtagtggagatagtgagaagagagtggaattgaaatattccacagataatttagtgtaacctggaaggtaaaaacatacatcaaatatcaggggccaggtgacaatgtaggggatgggggaatgggaagtcggcatggagtttctaagaggtaagaagaagaaggtgatctgtgcaagacagtttgagtagagaaagttagaacttagtctgtagaagggmtgtgtagttcccggggtgtttgagtagtggtctttgttgctaagaggcattggtcattcctatgtatggttctggtacataagtacctgtggtactgtaagcagtacatttgtaatatgatttgaatttgtaaaattctacttttttttaaatatatatatatggtttgtaaaacagaacaggtagtctcaagagtgggtttccagatggggactttaagagtggccagcctttgagagtgactttagactgcac

SEQ ID NO: 519727 - DNA, 563 bp, Homo sapiens
cataatgtgctgtaggaagaagatagggatctctccttatggagagacactgacaggggggactgaaatccccacctctgctcactcccacggctgcctctctgcaatgccctgaatctttgtttcctgcttggctctggattttgaggactttatgaggctgggattgggcagagwaacagaatagtagagctttttgtccaagctctgcattttgcaaaagagaaagctgaggtcagagagaggttgtgatggtgctgggcagggcagagaatgtcctggagtctgggttccttgatttctggtcccgtgttctctgcattattgcatgctcacccaagtgtgtgtgcatcacctttacaaaacatcttttgccttttacccttcttggtcctattctgcattcttctccttctggcttttgaaacaaaatcagctttctttaatctctttttttgtgcactgtttctctttattttcttcctccttccctgcattagagcatgtacaaattgtacataatgcataatttaaaccctcagtttgcctatattttgagcata

SEQ ID NO: 519728 - DNA, 460 bp, Homo sapiens
tctacctgggtccctcttaccctagagagccttctggcaggcttcattctctcatttcttcacatctttgctctaaagtaacttcaccttcaggaacttttgcctgaccaccctactacaaattgcaaccctccccactctccatgctaatgtagttttactatagtgggcattgccgtctaccttcctacataacttactaatgagagggtaagtgtcactgkggcagagatttgctttatatgtactctggtgtatccaagtggtggcacctagcgggcactcattgtggcctttgcctttcttcactccacaggacaccattggcactgcattccctgttgaatgacgccccctggaacacagctttatagacttcaatgtgaatagtgccccctagaattgttcaagttggcagtacagagcctaatatttgttgaaaagaggccacaggcgatct

SEQ ID NO: 519729 - DNA, 638 bp, Homo sapiens
agaacaggattgacgcccctggaccaggtccagagctttaagagcttgtgcttcagggagtgtatctgggtgatgccgcctctgtgaatttcacaaacctgtgtgtccagtcaggaaaggaactgaaagcctgggccacccaccctctccacagtattggggcagatgtaaaacgggacccaaaggattgcctttttgctytgttagaaggtaactgtataagctatgtgaattcagggaggaaactgctccaaaacatgcccccatccactgagccacatccctttacccaaggatgtagtctttcttctctctctctcaccctagaaggaaatgaggtgtcttaggttgcacttcctggaaaacccaatttgagtcagcaattgatgtgcaggaagtttattgggaatgccctggggagcaacacctattagggagggagagggcaggggagcaagagggagaagttgaactgcaatgccagtgtgcttgtcacagaggccacagctcatccctcaagggcctccagagctggggtggccttgcagaattggcccaaattgaagcaaaggggctgggcttttgtattgcccccacccatgaaagagggggtgaccttgggcaaaaaaagttcttat

SEQ ID NO: 519730 - DNA, 638 bp, Homo sapiens
agaacaggattgacgcccctggaccaggtccagagctttaagagcttgtgcttcagggagtgtatctgggtgatgccgcctctgtgaatttcacaaacctgtgtgtccagtcaggaaaggaactgaaagcctgggccacccaccctctccacagtattggggcagatgtaaaacgggacccaaaggattgcctttttgctttgytagaaggtaactgtataagctatgtgaattcagggaggaaactgctccaaaacatgcccccatccactgagccacatccctttacccaaggatgtagtctttcttctctctctctcaccctagaaggaaatgaggtgtcttaggttgcacttcctggaaaacccaatttgagtcagcaattgatgtgcaggaagtttattgggaatgccctggggagcaacacctattagggagggagagggcaggggagcaagagggagaagttgaactgcaatgccagtgtgcttgtcacagaggccacagctcatccctcaagggcctccagagctggggtggccttgcagaattggcccaaattgaagcaaaggggctgggcttttgtattgcccccacccatgaaagagggggtgaccttgggcaaaaaaagttcttat

SEQ ID NO: 519731 - DNA, 414 bp, Homo sapiens
gtctatggtaaattttatgaaatgttactttcctctttatggctagtataaacatttattatacatcctgtgatatatgtttccaggaaagtaaggaaatgctgttgtggaaagatatgattcccaactgatttgaaatataracaaatagcatgttttagaaaggggccaggactttaatggaaaaaaaagtagttatcagattttttctttcttgtcttgctctgccttctcttctggcaccagttaaaggaatatttctcatcctttctccccatgcacacaaaagatgatacctgatatgaaatgctgtcaaatcctgcttcattaaagcccacaaaagctaatgcacagctctccttgcactgccctaaaatgggaacaaagaagcagaataatgtcaaaatagaacac

SEQ ID NO: 519732 - DNA, 631 bp, Homo sapiens
actgctcctcttaggtttgtaaagaaacataattttgtggtgttccaaagtgacttcataattttgtcatgtaatctcctattttgacttgaaaatctattatgaataaagtgataaacaaagtaaaaaaaaaaatctgtagcaggawcaagataaagctaatttggcattaacaaccaattttcatattaatataatttacttttatatgtatcatatcaaatataattaagatgttccaggtctgcttaacgtatgaatgtcttactgaatagatataaatgccaaataaagcattagctgattttattttaatgtagactcacacgcacatacacccacacgtgcacacacacgtacatacacacacgatgttaatttatttatcctacatgacgctggaaattattcagtcttttaaaatgtatttacacaacaaatttacattgttttatccagattctatgtatattatacattttttgtcatgtacagtctgttttttatttctctattttttggcagtctcagaaaataaatgccatctttacacgtacatgtattcatcattcctcacccactccaccaacacacaatcccaagagaacaaaaaagatgtgaaaatgaaagt

SEQ ID NO: 519733 - DNA, 655 bp, Homo sapiens
aacatatgtaattacattatgtaattatgctatgtaatgccacataaggtattatcaatagattaagtgtttttgtccagatagaaaacaatctgataaataaaatgtgattattgctgtcattagatatactttagaaagatattttcacttgtttcagatcttatacctaatatcctaagttatgttgtaacttcatcacatgtaatgtgtgatatataaatacccaaataggaatagatcatattttggtgtcatttggtgtttatcttgcctggaaatcctagaaaccagaaaccagagggtgacagacaattctcagttttgtgcattttgtattaactttcataagcaagttctataatttgcaacctcatgaagacaacaaaaagttgaggctgattatgtctactaaatagttaccttgggcatacttctatagttaatgtccagtgagattttagtattaacttactatggcttccatattcctcagcatacattaaactatgctgcagtaacacatcaacycctaattccaaggatatggtaggttaaataatgatatctgatatgacgtggatgtttgtcccctccaaatttcatgttgaagtttgacccccagtgttggaggtgggcctagtgggagatgttc

SEQ ID NO: 519734 - DNA, 655 bp, Homo sapiens
aacatatgtaattacattatgtaattatgctatgtaatgccacataaggtattatcaatagattaagtgtttttgtccagatagaaaacaatctgataaataaaatgtgattattgctgtcattagatatactttagaaagatattttcacttgtttcagatcttatacctaatatcctaagttatgttgtaacttcatcacatgtaatgtgtgatatataaatacccaaataggaatagatcatattttggtgtcatttggtgtttatcttgcctggaaatcctagaaaccagaaaccagagggtgacagacaattctcagttttgtgcattttgtattaactttcataagcaagttctataatttgcaacctcatgaagacaacaaaaagttgaggctgattatgtctactaaatagttaccttgggcatacttctatagttaatgtccagtgagattttagtattaacttactatggcttccatattcctcagcatacattaaactatgctgcagtaacacatcaacccctaattccaaggatatggtaggtyaaataatgatatctgatatgacgtggatgtttgtcccctccaaatttcatgttgaagtttgacccccagtgttggaggtgggcctagtgggagatgttc

SEQ ID NO: 519735 - DNA, 655 bp, Homo sapiens
ccctgcacctgacacacactgttacagacagtgctgcctcatagacgtgtagaaggcacatcagggagagtgtcggggtcaggccagaaacttcacattaaatcagggaggatttgtttggggctcacatttagacagagaacaaagacttctctgtcatttttgtagttttgttcatttgtatttgaaaatagcagttctctctctggcctgactgcatccctttgatggtaactgaagctttccattgcagcggtgctcctgacgggggcgacattgaacctgctcagggctcagggctcctcttcccggctctgtggcctccccgaacatgagtaacactatggcctgcaaagataggacttaattgtccttaaaaggaaaaatgcctgcatgaccagagttggaccaagccagaacaggagcccctgagaagtgctaggtacrtttttaacagttcctgtttactttccataggagattatgagaagaacacaagagcacatttataagtagttttcatgattcatgttatcactgaaaccagatgctattctgaatcaaacaaccctgaagtgatgtgcaattctaatatctgcttaattaatcaaaatattcattaatacgtaagaaaacacattctgtttgtgtttta

SEQ ID NO: 519736 - DNA, 693 bp, Homo sapiens
ccccttttttaataatgggtctctaaaataaaggcagagttagcaatatagacagaaaatttcatttgaccattcagagccatggctcaaaaacatcaaaactgactaccattctggtagcatcactgaagtttgaagatcaatgaagtttgaaggcaaaacctaggaggaaagcctggagtatgtttagaccttcaatgactaaactcttgatacagaatgctaagaagacttttgtctaaggagtacagccaaataaaagtaggaagacaagagacagagcaagaccctttcactgagatcagacagaaatacagatcatagcaggctacaataagctgtctagacccaattttttaagaatagtgaaagaggggtagggarctctctgcccaatcctgtctcacaaccctgatcaatactctgatatgtcatgtaaagaggtcagccaggttaggtaatggaggtctcctgacccattgaccttgttttggcattagacattcaactttttgccattaaatgtcagatcaattcccaatgatttgaacattacccagaagtctttggcttcctggaatctttaatgaaaaaaaaatacaaacactaccatttccaagagcctaatgaattattattcatcacattagcttaatccatttcccttgctcaatttttaatattcttgtttca

SEQ ID NO: 519737 - DNA, 519 bp, Homo sapiens
tgctttaatccttcttctactgaaacaaatacagctaatgaattagagatgctcttttgttctcctgttaactatctgaccttaaggaagtcactcaaccaattggttctcagtattctctttccacactgagggaagtggacagataatctatggttgcttccagctccaaaattcagtgaccctttaagcttaacttctttcaccagaatacctgtcatttctaggtaaatagtgttctcagtcctttctgttaaaagaggttaagtaaataaaaaggaaagatcaggctatgcttttggcctagattataactttgtgaccaaggatgaaggaatttaatagcaataagaaagcttccagggtctaccatttacaatttaaatactttacttgggaggttaaaagttcaaagttgagtcacagtctgaggtggctctgytcttcctttttaattatctgaggtcaggaagttaataatacgagaaatccccagcggagacctcttgtgcactgtgt

SEQ ID NO: 519738 - DNA, 607 bp, Homo sapiens
gatgagaaccttatattgtcctgaaaagaggtgatgacttaacaatcatgctcaataggattacattgaagcccaggataggtaagaattagggaagatgatgcagggatcccaagatctccagctagaccacacttattttgcactggagaacttgagaacttgaagggcatctcaggggagcccaaccctgtctctgagctccttcgtgaggcagcccaggctccccttgcgggcttggtgtctgtgctccgcttctccagggacagggcaatttggtgttccttcctgaatgctccttcttccctgtgtccttcagtgagctcttctgcccaggtggggtccctrgctttgagcggcataggtcagtgcatcctgttggggtcatgggccatgagtgaggcagcatggggttggtgagagtcagccttcaggccactagggttttctcagggagccaaccgattactcaccgggagggatggttcctccaggagggtcacttcttgggaatctgaccctaggagcacacatttcctgaagctcggcagggagatggtggtccaggcaggaaagggttccttcaacctaacgtagggcagttccc

SEQ ID NO: 519739 - DNA, 624 bp, Homo sapiens
agtgcagcactggggtcatgcaggggagctgttttggacagtggaggtgctctcggggcctgcaatatgatgcagcctgggcgttttgctcaagcccagtgacccacctgccctttcctttctgggttcagtggaagggagggccaacagtgtagtgcgtacttaacaagtcagtatttcacattgaactcatcacatgtgtccatggagggcaagcaaaggtgagctggcacccccgacccccttccccaaacggaggtcagtttgggcacacgtctccctcctgtctccccagatggtgaccccggaggaaaatttgtgttgggcccactatccctgggccaatgtcagtcagctaggcacccagcccccagtgcgctgaagctcaggaccttcctagtgccctyggctcctgcactgagctctggtgagtccatctgggtcctgctggatgcatgagctgggggcgggagggtgccctgggttgggtcagtgatgagaaccttatattgtcctgaagaaaggtgatgacttaaaaatcatgctcaataggattacactgaggcccagcctaggtgataattttggaagaggatgctggaattctgaggtccctgacagagc

SEQ ID NO: 519740 - DNA, 626 bp, Homo sapiens
ccctgggttgggctgatgatgagaaccttatattgtcctgaaaaaaggtgatgacttaaacatcatgcttaatagtattatgctgaagcccaagctaggtgagaattttggaagatgaggctgggatcctgagatcccmggcagggccacacttattttgggctggaaaatttcaagacctgaagcgcatcttgtgggggggcaatcctgtctctgtgcttctccgtgaggcagcccaggctcccgttgcgggcttggtgcccatgcttcgcttccccaggggtggggcaatttggcatcctcttcctgagccctccttcttccctgtgtctttcagtaagttcttcttcccaggtggggcccctggctttgagcggcatgggtcagagcatcctgtcagggtcatgggccatgagtgaggcagcgtcggttcgtcgagagtcagcctttgggccactggggttttctcagggagccaacaggttacccatcaggagggatggttcctccaggagggtcgcttccttgggaatctgactctaggagcatgcatttcctgaagctctgcagggtgatggtggtccaggcgggaaagggttccttcagcccaacataatgcagttccc

SEQ ID NO: 519741 - DNA, 640 bp, Homo sapiens
gtaagtggtttctgggccagtctctttgtctggtcatgacctggttggtggccctagcttgtgccgagtggtcccggagtggcccagggggttgtgtgtggggagccagcgtgggcagcggaggtgctccctggggcctgcagtagggcacagcctctgcatcttgtgtgagcccagtgacccgcctgtcctgtccttccagggttgggtggcagggagggccaagggtgccctgcgtccgtgacgggtcagcgtttccagcaaatgggtccatggagggagagcctagctgagccggcgggctctaccaccttcatgaggttctgtttggacacctgtcctactcctgttcccccagatggtgaccacrgaggaagacttgtgttgggcccaatggccctcggccagtgtccgtctgccaggtgccagcccccagtgcgctgaagctcaggccattcctgatgccctggcctcctgcactgagttgtggtgagcccatccgggtcctgctggatacatgggcggggaggggggtgccctgggttgtgttgatgatgagaaccttatattatcctgaagagaggtgatgacttaaaaatcatgctcaataggattacgctgaggcccagcctaggtgaga

SEQ ID NO: 519742 - DNA, 640 bp, Homo sapiens
gtaagtggtttctgggccagtctctttgtctggtcatgacctggttggtggccctagcttgtgccgagtggtcccggagtggcccagggggttgtgtgtggggagccagcgtgggcagcggaggtgctccctggggcctgcagtagggcacagcctctgcatcttgtgtgagcccagtgacccgcctgtcctgtccttccagggttgggtggcagggagggccaagggtgccctgcgtccgtgacgggtcagcgtttccagcaaatgggtccatggagggagagcctagctgagccggcgggctctaccaccttcatgaggttctgtttggacacctgtcctactcctgttcccccagatggtgaccacagaggaagacttgtgttgggcccaatggccctcggccagtgtccgtctgccaggtgccagcccccagtgcgctgaagctcaggccattcctgatgccctggcctcctgcactgagttgtggtgagcccatcygggtcctgctggatacatgggcggggaggggggtgccctgggttgtgttgatgatgagaaccttatattatcctgaagagaggtgatgacttaaaaatcatgctcaataggattacgctgaggcccagcctaggtgaga

SEQ ID NO: 519743 - DNA, 666 bp, Homo sapiens
catccggttgccactggatgcctaagcagggaggggggttccctgggttgggtcaatgatgagaaccttacattgttctgaagagagatgatgacttaaaaatcatgctcaataggattacgctgaggcccagcctaggtgagaattttggaagaggacgctgggatccctaggtccctgacagggccactgtattttgggctggagacctggagtccttgaagggcatctggagggggcccaaacctgtctctacgttcctccatgaggcagtccaggctccctgtgcgagcttcgtgtcggtgctcagattccccttggtggtgcatgtgggtggctcatccctgagcccctgttctccccttgtgtctttcagtgaactcgtttgcccaggaggacccctggccttgagcagcataggtcagtggatcctactggggtcatgggccatggaccaggccacgtggggtcactgagggtcagcyttcaggacaggagggattcctcagggagacaacctgaatccccactggtgagggattggttctccagaagggccgcctccttgggaatctgacccaaggaggacaccttccctgaagtgctacaggagtgacattggtccaggcaggaaagggttccattagtcccatgcaggtcagctcc

SEQ ID NO: 519744 - DNA, 666 bp, Homo sapiens
catccggttgccactggatgcctaagcagggaggggggttccctgggttgggtcaatgatgagaaccttacattgttctgaagagagatgatgacttaaaaatcatgctcaataggattacgctgaggcccagcctaggtgagaattttggaagaggacgctgggatccctaggtccctgacagggccactgtattttgggctggagacctggagtccttgaagggcatctggagggggcccaaacctgtctctacgttcctccatgaggcagtccaggctccctgtgcgagcttcgtgtcggtgctcagattccccttggtggtgcatgtgggtggctcatccctgagcccctgttctccccttgtgtctttcagtgaactcgtttgcccaggaggacccctggccttgagcagcataggtcagtggatcctactggggtcatgggccatggaccaggccacgtggggtcactgagggtcagccwtcaggacaggagggattcctcagggagacaacctgaatccccactggtgagggattggttctccagaagggccgcctccttgggaatctgacccaaggaggacaccttccctgaagtgctacaggagtgacattggtccaggcaggaaagggttccattagtcccatgcaggtcagctcc

SEQ ID NO: 519745 - DNA, 629 bp, Homo sapiens
ctcaagtaaaataaaagtataaaagcaaaatgaatggtcactataactactttagaagtatgattattatttcctcaaatgtaagattctgtgtaatcactgaaattattcagtgtgttgatactcatcattgaagcatttataaagtaaacattattaaataataatgtattacataattgctaaagcaatgatattgtaaaattaaatccttcaccaattgtgctttttgacacttttttttatttctacatctatagatgagaattattgttaattaaaatactagacatayccattttgttagcattattcctggtttaattttgtatcaggcttgatagaggcctcatactctcatttgattctctcaaaatgaaaagttaacataaaagcttttgcccttccatcagtaaactcaggcacatgtgctcctgctgctagattaccaaaactacctcagtctcctttccctaattttctaaatctttcatctgttttagagggacatggttgttttatccatgtctttccaaactttcataaaaagatccattggtaaacaaagtactcttttaaaaaaattatcttatttagtttgtttcactatcaaatactagatcttattc

SEQ ID NO: 519746 - DNA, 662 bp, Homo sapiens
ttgcacagcagggatatattaatcttaatcaatttaatttggtaagataaatatttgcatttttttactattgctcatggaagtttttcttaaaatttagtcttctgaatttactaatttattttagttattcattttagatataaatgtttattttctctctttggtaaccacataatttaaattgagatatttatgagtgtatatgtatatacttgttttataagtaatctttactattttatttttgtgtgtgttgtcattttgcaatacaaaaacctgtattctaaaaacataaaatcctacaaaactaggacttacgttataattatgacattgcattaactggctttactttcttaattaaaattacttgtaatatttgtagataggtaatagatataaacataaatatatagttttctacaaaatattaaaatatattaatatcagttatagttataaatataattttcaaaggaatagttcaaatttcattgttttcagctagtagtattttaattagtacagtaattttgatttatttaaccccagaatgacattcaatttyatataataaagttgtttgggtgtaataaaaatgtaaaaacaatcacaacattttaaaaaagtatttttaatgcagaaatggtttgccttta

SEQ ID NO: 519747 - DNA, 662 bp, Homo sapiens
ttgcacagcagggatatattaatcttaatcaatttaatttggtaagataaatatttgcatttttttactattgctcatggaagtttttcttaaaatttagtcttctgaatttactaatttattttagttattcattttagatataaatgtttattttctctctttggtaaccacataatttaaattgagatatttatgagtgtatatgtatatacttgttttataagtaatctttactattttatttttgtgtgtgttgtcattttgcaatacaaaaacctgtattctaaaaacataaaatcctacaaaactaggacttacgttataattatgacattgcattaactggctttactttcttaattaaaattacttgtaatatttgtagataggtaatagatataaacataaatatatagttttctacaaaatattaaaatatattaatatcagttatagttataaatataattttcaaaggaatagttcaaatttcattgttttcagctagtagtattttaattagtacagtaattttgatttatttaaccccagaatgacattcaattttatataataaagttrtttgggtgtaataaaaatgtaaaaacaatcacaacattttaaaaaagtatttttaatgcagaaatggtttgccttta

SEQ ID NO: 519748 - DNA, 525 bp, Homo sapiens
ctgcatctatgttgctgccaaaaaaaaaaaaaaaatcataattttgtttttttatggctgtgtagtattccatggtatatatatgccacattttctttatttagtccccccactgaaggacacttaggttgattccatgtctttgctattgtgaatagtccagtaagcaatatattttcaaagagtaaaataaacttctgataagtaaataatgtccctaagtattttcaatgcattataaaagtgaactaaaaattttaacatgaatgctatttaaatatctggaaagtaaaagttttaccagatttttcttctggcaatgatcaattgwgattctccttgttatctatttggaacacatataggtatgtgccatgcaaacgtgtttagactagtgtatctgtattcatatctttattcatttatacattcacacaatggcttaacagatattttggcacctattttgtttaatactttgttaggagttaggtgtcgcatagtgaaataaataggcagactcag

SEQ ID NO: 519749 - DNA, 589 bp, Homo sapiens
tgtctgcaaactccgccccaccaggctcaagccatcctcagcctcccaagtagctgggattacaggcgtgcaccaccatgcccagctaattttctttttttttttttttttttttgtagagacaaggtttcactgtgttgcccaggctggtcttgaactcctgggctcaagcgatccacctgcctcagcctcccaaagtactgggattacaggcgtgagccacggcacccggtcgagatggaacatcttaatttcagagttgccttcaggactgttgattgaaccccataaatatttttagtcttttgggacttttaaactcctttttgaaacctaagcattgccacaaacaaactaaccttcaccacgaccaaacaacccagaactcggaccctggtcctcgggctgccctacaggaagcacccctagtcctcttgctgctctgctagatgagacrgcaggctcaggttcctccatgaggcccggctttcagtgctctcctgttacacactgcaaggaagcttccagatcgtggagcacattgttgaggaaaagacaccttggggagaagggggaggtgcagagtgtg

SEQ ID NO: 519750 - DNA, 627 bp, Homo sapiens
caggttcaatacattaggactctctttctgtagactttatgttctgaaatattggggaggggggtgtatttccaggcttattccatcttatatgagccatgtcctagtattttgctgagctgcctttgaattcccaaatccgatgataatctttctatttttctgcccctcttgttactacttcatcattttctgctaatcttgtaagcattttgtaggctgtgttttccctccctccagctttttagttttccaatcttggttttagttatctagcaaacagccttcacttgatgatgaacctgctaatatagtgctgttattagggagagtatgaattgaatagtacaagatagatcttccattggtgaggcacagggaccataacttgcaggaaatattctacagttagcaggaatgtgtatatagcgtatattagaaatactgaagttcagtattctggttacatgaattctctttgatattaggcatttctgtattatactgctttttttatttactgttggcttctacatattcttcacatcggggacttggcggtaaaataagctgcattttcctarctgtgattgtagaggtaagcaagaattctttgggtttccagcc

SEQ ID NO: 519751 - DNA, 582 bp, Homo sapiens
tgtctgttgtcttacagtggcataagcataaaacagatttttttttgacatgtattatagcacctgctggctttatttccctcccttataccataatattgcttgttgatttgtatcaacggatttgcatcttctgcccgccacacacacacacacacacacacacacagacacatccaccccactccccccactagtgactaggtacacttgaattcgaagtraatagcacacacaagagatatgtccagcacgtgattttcacaggcctgatttcacagcggtgctggaggcaaacctcgcagcctctagcctgtgcagaccgcatcatgacaaattgtataaatatgtgcaaattgtccagatgatgtcatgtgtgccccagcctgctctccaagtgggcagaacgcttcagggaaggtcagggcaggccttgctctgaattcaattgaggtaattgcattcaatttgcttaaatgtatcacagagaaaagccctgtctgttgatctcaatcgtattaagaagtttattttccgccagggccggactccacggcctcacggagaggaagccttctctcg

SEQ ID NO: 519752 - DNA, 582 bp, Homo sapiens
tgtctgttgtcttacagtggcataagcataaaacagatttttttttgacatgtattatagcacctgctggctttatttccctcccttataccataatattgcttgttgatttgtatcaacggatttgcatcttctgcccgccacacacacacacacacacacacacacagacacatccaccccactccccccactagtgactaggtacacttgaattcgaagtaaatagcacacacaagagatatgtccagcacgtgattytcacaggcctgatttcacagcggtgctggaggcaaacctcgcagcctctagcctgtgcagaccgcatcatgacaaattgtataaatatgtgcaaattgtccagatgatgtcatgtgtgccccagcctgctctccaagtgggcagaacgcttcagggaaggtcagggcaggccttgctctgaattcaattgaggtaattgcattcaatttgcttaaatgtatcacagagaaaagccctgtctgttgatctcaatcgtattaagaagtttattttccgccagggccggactccacggcctcacggagaggaagccttctctcg

SEQ ID NO: 519753 - DNA, 454 bp, Homo sapiens
ctgacaaggagcagtgaagccctgggcagaaaagaacagagctaatggaacatggacttgtccctcacactccagagctctgtcaacrtatgaggttggtgctaaaacataaacacaagcacaccacctcattggatgcagccgttccttaggcccacagctacttgcctgtgtcccatggacaggaaagactagcatgatgggtgaaaggaaagacttgacggagagatccaggaagtgggccatagatgggattaggaggaggaatgcctacccagtggagttgaatttaaaagaaattcacccacaaaaggctgtctgtcgtgcattggccagctccagtggtacagagttttggtgaactcttgagtcagtgagtcttagatagatgtgctgcaatcatataaagtatgatgtgtagggtaaatggcatggcagattccaaagaaccaaa

SEQ ID NO: 519754 - DNA, 517 bp, Homo sapiens
ttaggagaaatacctaatgtaaatgacgagttaatggatgcagcacaccaacatggcacatgtatatatatgagacaaacctgcacttgtgcacacgtaccctagaacttaaagtataataaaaataaaataaaataaaataaaataaaaagtaacccacccaaggtcgaattaagaacttgagctatctttttaatcactactctatatagacatttgttgaataaatggtcaaatgtattttgatcaagcatatgcttatttaaatatcacttttttttgaattttatgaatatttattgaccatttggaaaaatgtaagaacagamtctcatggaaaatgtaagaacagaatctcatggaaaatgtaaataattttcaatcatgcaaacttaacatttgatttatacacttgcaggatttactctgttgtgtgaatatgcatactttagaataaaactggtatcataccaaaagaaaaaaaaagaaaatgtggcacatatacaccatggaatac

SEQ ID NO: 519755 - DNA, 603 bp, Homo sapiens
ctgtaaatatcttgttgactaagaatgcctaacctcctgggaatgcagcccaatagagctcatcctcattttacccagctcctattcaagatggagtcactctggttcaaatgcctctgacacaacttcatccaaaataacccaccaggtagaccattctgcctgtatcagaccagggctagagcagatactgcagstctgaagggaaatgtctgctttggacaggctccacatgaagggctcagagatgtggtttgcaagggtatacttcagtgcccactggtcctctggacttccacaggtgaaaaagtcaaggagataaaccattaaggctttcagaaaggcagaagatggggaccatctttagggtgcagaggccctcatggcaggacttatcacactcagaataatgttattctttcctacaaagaggaatggtgtttacatcacatccatctctttccaacatgtctgctttggaaaccagaagaagtgagggtgtaatgcccagcacaaaaacagacatctgccactcatggtcacacaccatcaactcagccaaataactcattttccaaatgcataatacctcttacacttgga

SEQ ID NO: 519756 - DNA, 455 bp, Homo sapiens
aagagaagaagcgtgacatacatcggatacaggagctggagaggagcttrtccgaactcaaaaaccagatgggtaagatgaggagctaggatgtgacctcggagcaggactgggcaatcacggaggatcatgatggggagtggcttagagatggccccagggaggtgggtgggtggaagggctttgaggcagagggaaagaggtctgtgccaggagacggcaagttttgtcatctccatgagcctcagggtccccatcagcaaagagggaggagtgcccgttgtcagccacccacagtgctctctatgtgaaagtggcttggaaattggctaccattgggtgcgaggaatgattagcagtgaggccaagtttgggaagcctgagaggagctgtgcatcaagaggaggttttttttttttttttgagggggatgtgggtagaggggttggggaatc

SEQ ID NO: 519757 - DNA, 297 bp, Homo sapiens
atgtgcagaccccagggggcttcctgttccacaagctsccctctctttttcctctccacccttgctgttgggcctcccttccaaatctgcctaacaaaggcagcaggatctttaatactgttcagctttgtcaatggagacaggatactctagaaagttgagagattccctggtccagtctgggggagggaaaaaatatgcagtgtagcatagatggttgtacttgtccactcagacacatgctcatacttattagatggatgtatcagatgcttcaaaagtcctgatgcgtagtag

SEQ ID NO: 519758 - DNA, 236 bp, Homo sapiens
gaacgttttaggcatcagggcattctggggggcatcttccagggacccctcctataccctgccctgccctggctctctagtgagaaattgcagttgcttggacagtggggctgacccaggacaaatgcatatattgggctggtcttcagggtgctggggtaggggcaggggcacttcagggataggaagsaggggcctgtgtgttccagaagtacagaggaacctggtgccggccg

SEQ ID NO: 519759 - DNA, 614 bp, Homo sapiens
ctggagcggctgtgcgggctgcgtagcggtgctgggtcgggccgacgtgccacccacccggagccggtgagtgcagccgcccgccctccggtagatctgcggcctggcggagaagtcgggaggggacaggaagggagggcgggccccgggccctcctccgtctcagccgcctgcggaggtgctgcccacgcctggaggcccccactgaccctcagacccgcgtctgcgcccctctccccgcaccccgaggcagagttgggaaagcagtggtcttagaccccccacctcgggcactcggaagagaacggcggagacaacccctcctcttccctggctggcgcagcgccagcctcgagctcctcggtagcccccgggcagggagggccsgagggtgggcgcggcatcttcagcgactcttcgaagtcccttccgcgtctcatctttcaaggctgttgcagaggcggcttgcttcccacctgtccatctccataaaaatccctaaacgaaacatgcccacgtgtccggagattttcaggacttggtgcatttcagatgaaggcttttccagaagcttccccgtagaagaggatcaggcatccaactggttaaggtca

SEQ ID NO: 519760 - DNA, 490 bp, Homo sapiens
ctgctcgggaagctgaggcaggagaattgcttgaacccrggaggccgagattgcagtgagatgagattgtgctactgcactccagcctgggtgacagagtgagactccgtctcaaaaaaaagaaaagaaaagagcagaaccttcagatctaggttcaaaccagctcatccttccaggggctcacggagctccctgttttctcaccactgcctccctctctagccttcttatcctgccccaaacctgtcttctgttcgatgaaactgcctttggctcttcttagtgtttctgtccgtggttttcacttgctgccccctgctcaagcacttcttcctttttctcccaactctgcccctgttccctcaatttataatggtaattcctggtcttccagcttccacttggccattgcatcctcagagaagcctgcctgtctgctttaggtgggaaggagactccatctctgtgcttccaggacatcttgtacttc

SEQ ID NO: 519761 - DNA, 657 bp, Homo sapiens
tgctcgggaagctgaggcaggagaattgcttgaacccgggaggccgagattgcagtgagatgagattgtgctactgcactccagcctgggtgacagagtgagactccgtctcaaaaaaaagaaaagaaaagagcagaaccttcagatctaggttcaaaccagctcatccttccaggggctcacggagctccctgttttctcaccactgcctccctctctagccttcttatcctgccccaaacctgtcttctgwtcgatgaaactgcctttggctcttcttagtgtttctgtccgtggttttcacttgctgccccctgctcaagcacttcttcctttttctcccaactctgcccctgttccctcaatttataatggtaattcctggtcttccagcttccacttggccattgcatcctcagagaagcctgcctgtctgctttaggtgggaaggagactccatctctgtgcttccaggacatcttgtacttcctcctgttcttccctttttactgagttgttctgcttgttgaggggagaggacagatgcagagggcaggggctgctcctcgccagtattgtgcccccagcacttagctgagtgccggcacgtaggaagcacgggtggtgcctgtggatgagctcacgcgctctgctgct

SEQ ID NO: 519762 - DNA, 657 bp, Homo sapiens
tgctcgggaagctgaggcaggagaattgcttgaacccgggaggccgagattgcagtgagatgagattgtgctactgcactccagcctgggtgacagagtgagactccgtctcaaaaaaaagaaaagaaaagagcagaaccttcagatctaggttcaaaccagctcatccttccaggggctcacggagctccctgttttctcaccactgcctccctctctagccttcttatcctgccccaaacctgtcttctgttcgatgaaactgcctttggctcttcttagtgtttctgtccgtggttttcacttgctgccccctgctcaagcacttcttcctttttctcccaactctgcccctgttccctcaatttataatggtaattcctggtcttccagcttccacttggccattgcatcctcagagaagcctgcctgtctgctttaggtgggaaggagactccatctctgtgcttccaggacatcwtgtacttcctcctgttcttccctttttactgagttgttctgcttgttgaggggagaggacagatgcagagggcaggggctgctcctcgccagtattgtgcccccagcacttagctgagtgccggcacgtaggaagcacgggtggtgcctgtggatgagctcacgcgctctgctgct

SEQ ID NO: 519763 - DNA, 525 bp, Homo sapiens
tgtgggcaccggggcaaggagggaacactggagcggctcagccggcactgagctgagcagtggcagaggccaccgcctggcagatggggaaaggcagagtgggtgagcgggcactgtgtatcaccccctgaggcgtgctgagctcgagcctgtgaccacctgtgctgtggagatggagacaatgtaattgggaagcaggcctggcctccccctrccacagggacaggctggtcttagaggcaccgatggggcagctttcctagtaggagtcatgatgagctacagaggctcacagggtgtcatggagcacgaggaaaggtgcagggaatcctagagaaagtcttgtgtttaaggagcaagacaggaaggagaaaccagtcagtgagatgggtcaaatgtaagtggagaaaggaacgtccaagcagaagcgggctgtcgctatggtgaatcatgcagagatgaaggcgggacgatggagcagtggccccttgggcttggcaggtgatcaaattcgaggtcatgatg

SEQ ID NO: 519764 - DNA, 595 bp, Homo sapiens
agagatgaaggcgggacgatggagcagtggccccttgggcttggcaggtgatcaaattcgaggtcatgatgaccttcaggagagcactgtgtgcagagtgccagcagtgggaagggaccgggtgggagggaggacgtggaatgtgagggtggtctcccctgcaggaagtttggccttggaggggatgaaaatgaagggcagggaggagtcgcgagcgaacaagcaggagggtgttcgactgctagagctgagctaagcgatgcctaaatcaaaggaacttgtttcttcaagctcttctggcagtgatyctgacagtgaggttgacaaaaagttaaagaggaaaaagcaagttgctccagaaaaacctgtaaagaagcaaaagacaggtgaaacttcgagagctctgtcatcttctaaacagagcggcagcagcagagatgataacaagtttcagattgggaaaatgaggtacgttagcgttggagattttaaagggaaagtgctaattgatactagagaatattggatggatcctgaaggcgaaatgaaaccaggaagaaaaggtattgctttaaatccagaacaatggagccag

SEQ ID NO: 519765 - DNA, 608 bp, Homo sapiens
tctgtcattgatgatgcagtaagaaaactgtaaaatccgagtcatacaaacaaaacctgtacttttctagttgtttgaatctgtctttttacattggcttttgttttctaaatgttgttctccaagcaattgtatgtttggattgcagaagaatttgtaagatgaacttttttttaatgtgcattattaaaaatgttgagtggagcaattgtcacstttattaaggaggattgctttgtgcccaccacctagtgtaaaataaaatcgagcaatacagtcttaaatgttgtggccttttttgatcataagagttggtactgtttaaggccaaaagtaatagtttttataaatcttttagtttcaactcagcttttacaataaaaaggatttgtattgcattgagtttataaacttttggtttgtgaaatccatatttgatctgttttcttccaatcaaatgtttatttggaaagtcagtgaaactgtcaaaatgttacctcaataagatatttataattgtatgagaactacaatcaccaaatcgactgtcttcagtattagcagatctagtttgataaacaaatggcttgtgtgaaaaccgagcaggt

SEQ ID NO: 519766 - DNA, 608 bp, Homo sapiens
tctgtcattgatgatgcagtaagaaaactgtaaaatccgagtcatacaaacaaaacctgtacttttctagttgtttgaatctgtctttttacattggcttttgttttctaaatgttgttctccaagcaattgtatgtttggattgcagaagaatttgtaagatgaacttttttttaatgtgcattattaaaaatgttgagtggagcaattgtcacgtttattaaggaggattgctttgtgcccaccacctagtgtaaaataaaatcgagcaatacagtcttaaatgttgtggccttttttgatcataagagttggtactgtttaaggccaaaagtaatagtttttataaatcttttagtttcaactsagcttttacaataaaaaggatttgtattgcattgagtttataaacttttggtttgtgaaatccatatttgatctgttttcttccaatcaaatgtttatttggaaagtcagtgaaactgtcaaaatgttacctcaataagatatttataattgtatgagaactacaatcaccaaatcgactgtcttcagtattagcagatctagtttgataaacaaatggcttgtgtgaaaaccgagcaggt

SEQ ID NO: 519767 - DNA, 488 bp, Homo sapiens
tgcctgtgagcaggtcgtgtatttctcggcttcccttatccaactttgcatttctatttctagcatattgggttgattcttttgaagctgcctctgtgcasattacacccatgaacttagaccagttgcctttatgtatgatcgtatttatactgagaagttactgtgttttttgactttcttttctatttgctacatattagttcggtctaaacgtttggtcttctggtctccatagttctacattggttaaatgcaactcacttctgggagtagtggtgacattcaactagtaggctttttaataaactacagaagttcattactctcatgtaaggaaggaaaactaatgtaactttcgttaagtatgaaaagcgttggatatccttatagttctttagagttaagggtgagatgggtttagaaagtggccaggcacaagttattttaaaataaaaaatctttggctgtttgttccaatatattaa

SEQ ID NO: 519768 - DNA, 543 bp, Homo sapiens
gctggcaacttctcccccaggtgccttccccctgctgccggcctttgctccttcacttccaacatctctcaaaataaaaatccctcttcccgctctgagcgattcagctctgcccgcagcttgtacatgtctctcccctggcaaaacaagagctgggtagtttagccaaacggcaccccctcgagttcactgcagacccttcgttcaccgtgtcacacatagaggggttctgagtaagaacaaaacrttctgctgctcaagccagtctggcaagcactcagcccagcctcgaggtccttctggggagagtgtaagtggacagagtcctggtcagggggcaggagtgtcccaagggctggcccacctgctgtctgtctgctcctcctagcccttggtcagatggcagccagagtccctcaggacctgcagcctcgccccggcagaagtcttttgtccaggaggcaaaaagccagagattctgcaacacgaattcgaagcaaacaaacacaacacaacagaattcctggaaagaagacgactgct

SEQ ID NO: 519769 - DNA, 651 bp, Homo sapiens
ctgaaggtacttttggagaaaatctataaaatcagctaaagccctacgtcaccatggggctatgggtgttataragtgagggaaggagggagggagggagggagagattctgtcagtgtgtgaaccagtgagtgagcatataagaaggatgagaacaaataaatgaaggagtgaatgaatgtgtgacagagtaagttaactaatttaatgaccaagcaaatgtgtgattgtgtgaataagcaaatgaataaatgaacagattatttctccttggtatttgggggccttacttaggtttttgcattgcttgatcccttggtaggggtctcatgcatcatttggaagggtctctgcctcctcagattttaaattgcagattttaaattacatatatattttgaaaaattgccacaaaagcagcgctacttgaaaactcgattaattactaatgttctttttatcaagtgctagttgttgcttgtaatctttaaaggtagcgaaattaaaagaattaagaaacaattatgtccggaaaaaaaaacccctatccaaatctaatcaccctctgatggagagcttcgtgctgacatggctgggctggagagtggggagatgtggagggggaaaagtgcccacgcatcactgaggcta

SEQ ID NO: 519770 - DNA, 361 bp, Homo sapiens
gccttatataactgaactgcatatcctttttgtcttttgcacttcttgtatttgcttctttttttctctcttagtatttagaaaaataactttctttgaaaaaaatccaatctgtatcagttatgctaagtggacaaaaatgtgaaatagtttgttagataaaaatgttaagttgaggtttgttagagtgttacagaggagttcaatgacttttgtgaggtcagagagctggaaaatgataaaactgggagttcaacccaaccaattttggctccagagtytatgcacttaaccacttccctgagtaaatcgcattcactgagagaaaagtgagagtcagggaaatgtagagctggtacct

SEQ ID NO: 519771 - DNA, 594 bp, Homo sapiens
atctcctgcaggtgtctagggatttcaagtaagtagtgttgtgaggggaatacctacttgtactttccccccaaaccagattcccgaggcttcttaaggactcaaggacaatttctaggcatttagcacgggactaaaaaggtcttagaggaaataagaagcgccaaaaccatctctttgcactgtatttcaacccatttgtccttctgggttttgaaggaacaggtgggactggggacagaagagttcttgaagccagtttgtccatcatggaaaatgagataggtgatgtggctacgtcagggggcccgaaggctccttgttactgatttccgtcttttctctctgccttttccccaagggccaggacccctggatctctgggcagagcagacgcaggcccctataatagccctcatgctagaarggagccggagcctgtgtataaggccagcgcagcctactctggacagtgcagggttcccactctcccaactccccatctgcttgcctccagacccacattcacacccgagccactgggttggaggagcatctgtgagatgaaacaccattctttcctcaatgtctcag

SEQ ID NO: 519772 - DNA, 603 bp, Homo sapiens
gtcttttctctctgccttttccccaagggccaggacccctggatctctgggcagagcagacgcaggcccctataatagccctcatgctagaagggagccggagcctgtgtataaggccagcgcagcctactctggacagtgcagggttcccactctcccaactccccatctgcttgcctccagacccacattcacacccgagccactgggttggaggagcatctgtgagatgaaacaccattctttcctcaatgtctcagctatctaactgtgtgtgtaatcaggccaggtcctccctgctgggcagaaaccatgggagttaagagattgccaacatttattagaggaagctgacgtgtaacttctgaggcaaaatttagccctcctttgaacaggaatttgactcagtgaaccttgtacacactcgcactgagtctgctgctgatgatactgtgcaccccactgtctgggttttaatgtcaggctgttcttttaggtatggcggcttttccctgggtgtcagtaatactcaagcacttcctccgagtcaagaagttaatgatgccaycaaacaaatgaagaaacacctaaagctggccaagg

SEQ ID NO: 519773 - DNA, 589 bp, Homo sapiens
caggtaaccttgactaagttacttaacctatctaaacctcagtttcctcatctgtgaaatggagacagtaatcatagctatttccaaactgttgtgagaattcaatgagttaaaggtataaggtcctcaccacagcgcctgcccacatagtcagtgatcactatgtcctgaacactgtaattacttcgccatattctctgatcatagtgttttgccttggtatgtgactagaatttctttctgaggtttatgggcatggttggtgggtatgcacctgcctgcaggagcccggtttgggggcattaccttgtacctggtatgttttctttcaggtgtggttcaataacaagggctggcatgcaatcagctctttcctgaatgtcatcaacaatgccattctccgggccaacctgcaaaagggagagaaccctagccattatggaattactgctttcaatcatcccctgaatctcaccaagcagcagctctcagaggtggctcygtaagtgtggctgtgtctgtatagatggagtggggcaagggagagggttatggagaaggggagaaaaatgtgaatctcattgtaggg

SEQ ID NO: 519774 - DNA, 652 bp, Homo sapiens
tgttgttcaactgaaaccaaattataagttgcatggcagtaaatgctatcatgctgatcattttgagtttggccagtctatattatcatgtgctaatgattgaattctccacccatttttctacttgtatgaccttaatttgatggcacctgttccatcctcatgagtttgctacaattatactggtgccaacrcaatcataaacacaaatataaacttgggctttgaaatcttgtgccagaacttggctttaaagtaagcatttaaaaaatccatatgtgtttattagactttgtttagatgactgttgaaatgaaaacaaagtgtttaaaatcctcttagagaacttaaatataatccctcagcaatatgtatacagatcttcctttgagaaaaactgattgtgttcagcctctcatgttacaaatggggaacctgaattctgaggtctctagtgagagaacagggactagaatctgtggatcctatctgttttaataataattgtaaagtataatagataatattatattaataaaataaaagcaaacacttagaatgagcttccatgtgtgaggcactaactgattaggcattattaactagatttattccttttaaggccccgcgatgtactgttatttccacatgt

SEQ ID NO: 519775 - DNA, 652 bp, Homo sapiens
tgttgttcaactgaaaccaaattataagttgcatggcagtaaatgctatcatgctgatcattttgagtttggccagtctatattatcatgtgctaatgattgaattctccacccatttttctacttgtatgaccttaatttgatggcacctgttccatcctcatgagtttgctacaattatactggtgccaacgcaatcataaacacaaatataaacttgggctttgaaatcttgtgccagaacttggctttaaagtaagcatttaaaaaatccatatgtgtttattagactttgtttagatgactgttgaaatgaaaacaaagtgtttaaaatcctcttagagaacttaaatataatccctcagcaatatgtatacagatcttcctttgagaaaaactgattgtgttcagcctctcatgttacaaatggggaacctgaattctgaggtctctagtgagagaacagggactrgaatctgtggatcctatctgttttaataataattgtaaagtataatagataatattatattaataaaataaaagcaaacacttagaatgagcttccatgtgtgaggcactaactgattaggcattattaactagatttattccttttaaggccccgcgatgtactgttatttccacatgt

SEQ ID NO: 519776 - DNA, 569 bp, Homo sapiens
ctagagctgtggttcttgataactgtgaactcttttggggtcacaaatagccctgagaatatgatagaagcaggagctctggcctttctgtccatacctgaacaggtccttgggttaagagcccctcgtccagggcctattaatcttgatcctcataagcagcatccatgtatwaaggccgcaaaccaaactgtgccagaccgaatcctaggaccaagcccaaatatgtcccatcatccttttggtaagaagctcattgtaagaaagaaagaggagagcaagaggatgacctagtgcatggggcctcattgttttaattagtgacaaaacaacaataataacaacaaaacccccgaagcttcacagatgacatcagaccccaagcctgtgtgtttttcaggtgcccttgaggagctttgtagctggcagaggaggtgaaactgacaaatgtttggcagatggaggagagtaccagaggggtttgagatgagctaaattccaatctaaccgcaggtgtgaggaagaggcttggattgggaccatggagatgggggttctactcccagtca

SEQ ID NO: 519777 - DNA, 569 bp, Homo sapiens
ctagagctgtggttcttgataactgtgaactcttttggggtcacaaatagccctgagaatatgatagaagcaggagctctggcctttctgtccatacctgaacaggtccttgggttaagagcccctcgtccagggcctattaatcttgatcctcataagcagcatccatgtataamggccgcaaaccaaactgtgccagaccgaatcctaggaccaagcccaaatatgtcccatcatccttttggtaagaagctcattgtaagaaagaaagaggagagcaagaggatgacctagtgcatggggcctcattgttttaattagtgacaaaacaacaataataacaacaaaacccccgaagcttcacagatgacatcagaccccaagcctgtgtgtttttcaggtgcccttgaggagctttgtagctggcagaggaggtgaaactgacaaatgtttggcagatggaggagagtaccagaggggtttgagatgagctaaattccaatctaaccgcaggtgtgaggaagaggcttggattgggaccatggagatgggggttctactcccagtca

SEQ ID NO: 519778 - DNA, 461 bp, Homo sapiens
ctgctggcatcacccatgctagccaaagggccttagggaccccgcatgctcttgcggagctgggggtgtgcattatggtggggctcctccttctctccctccctccctccatggagaggagaacaaggaagtgagggcctgcattccattgaaaatgagcctgcccggccagcctggtgcagtaacacacgmctgtaatcccagcactttgggaggccaagctgggtgaatcacctgaggtcaggagtttgtgaccagccttactaataacgtggtgaaaccctgtctctactaaatacaaaaaaattagccaaatgtggtggcacatgcctctaatccaagctacttgggaggcttggacaggagaatcacttgtatctgggaggcggaggttgcagtgagctgagatcacgccactgcactatagcctgggcaacaagagtgaaactctgtctcaaaaa

SEQ ID NO: 519779 - DNA, 453 bp, Homo sapiens
ggcattccttgttaacttgacagggtgaagctgtaatttttcaaaaacagtaaaagctggtttctcctaaactattytccttgtggtagtagagatcagtgggtcagaaacaactcctgaccacttggtttccttttgagccgcgtcataaggaggcaatctgtaaaactagcacaggtctcccgctgttccactggctcacccacatgattagcagagtgcacgaaaaaataaaacttctattaaagaatcatgctgagcacaagatcagagaggttgtgacattgcaaactcgatagatgcagggggcctgggagactggcgttctccaaagggctcccaacaccatctctcctctgatttctgtgacaaatgtggaaagctacttgcttggaggtactgggggaactgatgggggaactttcatcctgttaggaactccgctttccattc

SEQ ID NO: 519780 - DNA, 439 bp, Homo sapiens
cctacggcactagtctacagggggaaggacgctctgtgctggcagcggtggctcacatggcctgtctgcactgtaaccacaggctgggatgtagccaggacttggtctccttggaagacaggtctgatgtttggccaatccagtccttcagaccctgtctgaaacttgtatcttacgtgaacttaaagaataaaatgcatttctaccccsatctcgcccccaggactggcacgacaggcccacggcagattagatcttttcccagtactgatcggtgcgtggaattccagccaccacttctgattcgattccacagtgatcctgtcctctgagtattttaaagaagcctgggaataaaaagtaaggtgcttttaaagtgtgacaagggtcaaccaatatagtcagactcatccttaaaagaccttaagtcactcatccc

SEQ ID NO: 519781 - DNA, 446 bp, Homo sapiens
cacccttcccatcacaggatctggcgcgatgctgtgggaactgttgcaggcgttggctctgaagctgctcagagtctgccctcacagcaaaagggaactcctgactgcctggcacttaggaggagctsacagcctggccgtaggtccagggtttaaggctgtgcggtgggtagaacagagaaagccgagatggccacggggtgtggctcacaattcactgttcttggcaggaagggggcagccactcaccattgtcaccccagtcagtgttccaggagttggcaaccagccagtagggtgtgccattctccactccccagcccaggatgcggatggcatggccacccatcatctctccggtgacgtgttggtacactcctgaaaagggaagaactggctgagaccgagaccgggccactgtcccacgccccacagcaccccccaca

SEQ ID NO: 519782 - DNA, 528 bp, Homo sapiens
ggtatgttactctacacaaccacaactcattaccagatttaagaaaattacccctccaccgcgcggtggctcatgcctgtaatcctaccactttgggaggctgaggcggatcacttgagatcaggagttcgaaaaccagcctggctaacatggtgaaagcccgtctctactaaaaatacaaaaaaaaaaaaaaaagccaggtgtggtgatgggcactggcaatcccagctacttgggaggsaggctgagacaggagaattgcttcaacatgagaggcggaggtggcagtgaaccgagatcgcaccactgcactccagcctgagcgatagagggagtgtgtctcaaaaaaaaaaaaaaaagaaagaaaaagaaattaagaaagaaaagaaaatcactgacagacatcccaaggcacccctgaaacgtgacctcccttcaattcacttcccaatccaaccaagagcaacagaaaatatctgttacccctaaaatgggtgcaacttctcttccaactcccaggtccagcag

SEQ ID NO: 519783 - DNA, 720 bp, Homo sapiens
gtgctctgttcatttatcccttttattcttttttcttttcacggatgggctttagatttccatttgtggcctctcctccttttagatctaggtaaaatggacaaaaaccttccgttttcatggtttctggtggcttaaaactgtccctaagatgtttgcaagcctccaggcaaagaaggaagtgctggtggaggaggctgtggttgtctttcattcatgctttgatgtcttgtctctaagaggactctttctgcatgtttgtctcttgggcatgcttgatccggctataaaattcagcctcttgcttgatttctatgtacactggaatcatagtgagtttagacttttctggaggcttaggggtaggcaatgaggatgaggagggggtgaccaagagatagaggagagatttacttggtagaaatgcatccagaacacaggcattgcctttcagttaacgttctttggtgacccttccaggctagatttcatttcactctgaacttcccatctttttggttccctttcrccctcattctcagatttctctccattcctttcagtggcaaaacaactcatttcttccctgttcccccaagaacagcctccctcatgatctgcaggctcagagctgactttcgtcccacaagatgtcatcttccccaaccaagtctctctacgctaaagatagttccttcactggttagagttctggggcca

SEQ ID NO: 519784 - DNA, 512 bp, Homo sapiens
aagcaccaggaaggaatggcggccacagtagaccgtggggcattcttttgaagaagtttcacgtggagcctttcatagccatgcctttgaaatttgtttttgctgctctctgtacttccaatgccctcccctctctccatktgcacctgggagctcaggccaagaatgaatgcatctgttttccgcagtgttattgatccccgtggtgggaagtgaactctccctttcgtaagcctgctggagttcattctctgtcgtcaccttgctagtggccttgtaggtacttgtaccttgcagcataagtgccactaccctgggttgccctgaagggagagatggcaccctacacttccctgccctcactcaggactggttcctgcctgcctcctccctcagctccttcctgctaaatgagtccatggatgagttatgggagcccctcaggcaatcccccactggcctcaggaggtcttggcactcactatgcaatacagttagaattctctgggaag

SEQ ID NO: 519785 - DNA, 547 bp, Homo sapiens
gaggttaagcaccaggaaggaatggcggccacagtagaccgtggggcattcttttgaagaagtttcacgtggagcctttcatagccatgcctttgaaatttgtttttgctgctctctgtacttccaatgccctcccctctctccatgtgcacctgggagctcaggccaagaatgaatgcatctgttttccgcagtgttattgatccccgtggtgggaagtgaactctccctttcstaagcctgctggagttcattctctgtcgtcaccttgctagtggccttgtaggtacttgtaccttgcagcataagtgccactaccctgggttgccctgaagggagagatggcaccctacacttccctgccctcactcaggactggttcctgcctgcctcctccctcagctccttcctgctaaatgagtccatggatgagttatgggagcccctcaggcaatcccccactggcctcaggaggtcttggcactcactatgcaatacagttagaattctctgggaagcagacggaactgaaccataactattatcg

SEQ ID NO: 519786 - DNA, 512 bp, Homo sapiens
aagcaccaggaaggaatggcggccacagtagaccgtggggcattcttttgaagaagtttcacgtggagcctttcatagccatgcctttgaaatttgtttttgctgctctctgtacttccaatgccctcccctctctccatgtgcacctgggagctcaggccaagaatgaatgcatctgttttccgcagtgttattgatccccgtggtgggaagtgaactctccctttcgtaagcctgctggagttcattctctgtcgtcaccttgctagtggccttgyaggtacttgtaccttgcagcataagtgccactaccctgggttgccctgaagggagagatggcaccctacacttccctgccctcactcaggactggttcctgcctgcctcctccctcagctccttcctgctaaatgagtccatggatgagttatgggagcccctcaggcaatcccccactggcctcaggaggtcttggcactcactatgcaatacagttagaattctctgggaag

SEQ ID NO: 519787 - DNA, 597 bp, Homo sapiens
tccagggaggacacggattcttagaggacactattcaagcyactacacttggtttcttcatacactaatagacagcagtctacactgctgaggtcagtgtgaggctggagctgagaaggggtagctgcccttgggcaccacgcccaccggcactgtggaggcggcttggtgaatattcctcctcttgccgcccgtccttgctggggtgagctggatgaatgcagcaaggacagtccttcaagctgcgtcttgcatgttggtttccgacgctgccggagcgcactgccatgtggccctgggtgtctctcccactcatctgggtgctgatggggctgtcctttctaggttccagatcgtggacatcctcatcaggaaatgccttctaagctgggggaggcggtaccttcaggggacactcaggagtcactgcacattaagatggagcccgaagagccacactccgagggggcatcgcaggaggatggggctcaaggtgcctggggctgggcacccctaagtcacggctctaaggagaaagctctcttcctgcctggcggaggtaggagagggacggggaagaggcgctttcccagggag

SEQ ID NO: 519788 - DNA, 544 bp, Homo sapiens
gggaagcttgcttgagctggggaagtcaaggctgcagtgagctgtgattgtgccactgcagtccagcctgggcaacagagggagaccccatctgaaaaaaaaatgctgcaccactgaccttgggtctccagcttgcagatagcagattgtggggcttctcgactgccataatcatgtgaggcaataccttagtgtgtgtgtgtttatatatatacatatacacacacataaaagctctctctctctctctctmtatatatatatatacacacacatacacatgtatatatagattctgttattctgtttctggagaaccctaatacatatcctatttctcattgtcaaggagctcagtctgcactcaagcccaaatacccaaatccgtccccatatcccttctttgtgcatctatctcttgagaccactccttgtactaattttgtatcaagcaaggtccaatcaggagaagggaagcacacagtaatttgaactgggaaaatttaatatatagaattaagctataaagggcttagactgggcg

SEQ ID NO: 519789 - DNA, 336 bp, Homo sapiens
cctccccacacggccatgtctgacctgggccagggctggggkggggttgggtgggcaggcagccaggagagcggggcccagggagagaccccgctgtctgcgcagggaggagctgccttacagccgcactggcctcctggtggagcagagcggggactacatcaaggtcagcatccggctggtgctgacattcctgtggaacggagaggacagtgccctggtgaggaagccccctcgccccttgccccttcaggcctggccacaaaacccccaccgggggtcgagggatgcctccctgggcttggggtcacggggcttggggcatgttgccagtgg

SEQ ID NO: 519790 - DNA, 609 bp, Homo sapiens
gccaggttcgggggtggggggttcctgaccaggctggaggggctggaatttgggctggggcaggcagacgctctccaagcagccatgcgtctgacagagaccctccctgggycccctgcccaggacaatacccagcacccgaggcggacgttggtgctccaaagaagaggaaagtgcagagcagagagacatgcacacagaagcacacgcgtggactaggcacatgcgccccacacttacactggcacacacatgtgtgcacacacaggccaaaacacaagggcagcagtgtttgtggggcagacagggccaagggtaaagggctgccttgccccagcccatcagttttgggctccccttcaactctggtggctggcgaggagggtgggccccggggagggtgtctctgcttccccttcctggccacgttcctggggtgaccagccttcacccacaggtgccccgacgtcctcgcccacccggcgcgtgagctttgttccacccgtcactgtcttccccagcctgagccgtaagcagatgctgcccctgccagccgggaagggggtgtttgccagtcccaaaggtgggggcccagatctaggggtgcag

SEQ ID NO: 519791 - DNA, 609 bp, Homo sapiens
gccaggttcgggggtggggggttcctgaccaggctggaggggctggaatttgggctggggcaggcagacgctctccaagcagccatgcgtctgacagagaccctccctgggccccctgcccaggacaatacccagcacccgaggcggasgttggtgctccaaagaagaggaaagtgcagagcagagagacatgcacacagaagcacacgcgtggactaggcacatgcgccccacacttacactggcacacacatgtgtgcacacacaggccaaaacacaagggcagcagtgtttgtggggcagacagggccaagggtaaagggctgccttgccccagcccatcagttttgggctccccttcaactctggtggctggcgaggagggtgggccccggggagggtgtctctgcttccccttcctggccacgttcctggggtgaccagccttcacccacaggtgccccgacgtcctcgcccacccggcgcgtgagctttgttccacccgtcactgtcttccccagcctgagccgtaagcagatgctgcccctgccagccgggaagggggtgtttgccagtcccaaaggtgggggcccagatctaggggtgcag

SEQ ID NO: 519792 - DNA, 609 bp, Homo sapiens
gccaggttcgggggtggggggttcctgaccaggctggaggggctggaatttgggctggggcaggcagacgctctccaagcagccatgcgtctgacagagaccctccctgggccccctgcccaggacaatacccagcacccgaggcggacsttggtgctccaaagaagaggaaagtgcagagcagagagacatgcacacagaagcacacgcgtggactaggcacatgcgccccacacttacactggcacacacatgtgtgcacacacaggccaaaacacaagggcagcagtgtttgtggggcagacagggccaagggtaaagggctgccttgccccagcccatcagttttgggctccccttcaactctggtggctggcgaggagggtgggccccggggagggtgtctctgcttccccttcctggccacgttcctggggtgaccagccttcacccacaggtgccccgacgtcctcgcccacccggcgcgtgagctttgttccacccgtcactgtcttccccagcctgagccgtaagcagatgctgcccctgccagccgggaagggggtgtttgccagtcccaaaggtgggggcccagatctaggggtgcag

SEQ ID NO: 519793 - DNA, 612 bp, Homo sapiens
ctgccgtgtgggtggatgtccggccactgcccagccacctctctgtcccaggaagctgctctcctggggcatgtgcacctcaagtgggtgcagcaggcccagacccacgggggcccctggaggcctgctggatgcccgcgagctgcaaggagttaattcctggccttgtgggctggcaaactctgactcacagagcaataaaattcttgtgttttaaaaatcagtatattagcttaattttatagatttcagaagtgctacttgaaaataaaagtctcctaattatatttatgatcccaacgtgagtgaatttgactccgttcacggcgaagaagctttgtgtaaaatgccgggaagccttcgtgctgactcggccctcgcagaccataaaacacggctggtgggtccgagcccggcagggatatggggtcacagcaaagtccctattaatgccatgtccacctcgctgccagggagagtggggctgcagcagggtgcgaccgtcacagccctaactctgtgatggatgcctgctgttgtgatcatggacatgaggatgtgaggyggtcataatacaggagtgggctggaggcagggaaaggggttggtgcc

SEQ ID NO: 519794 - DNA, 571 bp, Homo sapiens
atggtgcgtgtctcttagcagtaagaccttgagaaggagccaggcagggaggaatgggagggtgaaggagtgccttttgtggaggggagtcggacacagatgggatttcagcagagacctgatggaattgagggagtgggtggtgtgtgcttctgcaggaagagcacccagacagagggcatggcacatgcaaaggtcctgtgttgggaacgtgcttggtgcatgtgaagaactgtgcagggaaggtgctggagataggacgggagggccacgagggttaagatcctgagagcaatgcggggggtgygagtgatgagggacaacatcagtcctctcttggcttctgtactttaataaaatcattttgttttgaagcaattttagacctacagaaaagttccacgacagtactgagagttcctgtggactcctagtattaacatcttaataacggggtgtattgaccaaaaccgacacctgatacattaccgtgaactcaactgcagatctgattcaaatcccgcgtttttctagcatccggtttctgttctgtgatccccacgttgctttc

SEQ ID NO: 519795 - DNA, 571 bp, Homo sapiens
atggtgcgtgtctcttagcagtaagaccttgagaaggagccaggcagggaggaatgggagggtgaaggagtgccttttgtggaggggagtcggacacagatgggatttcagcagagacctgatggaattgagggagtgggtggtgtgtgcttctgcaggaagagcacccagacagagggcatggcacatgcaaaggtcctgtgttgggaacgtgcttggtgcatgtgaagaactgtgcagggaaggtgctggagataggacgggagggccacgagggttaagatcctgagagcaatgcggggggtgcgagtgatgagggacaacatcagtcctctcttggcttctgtactttaawaaaatcattttgttttgaagcaattttagacctacagaaaagttccacgacagtactgagagttcctgtggactcctagtattaacatcttaataacggggtgtattgaccaaaaccgacacctgatacattaccgtgaactcaactgcagatctgattcaaatcccgcgtttttctagcatccggtttctgttctgtgatccccacgttgctttc

SEQ ID NO: 519796 - DNA, 591 bp, Homo sapiens
gaagaggatgcacaggcacacacgcacagacatatgtgcacrgatgggcgtgtggacgtatgcacacataggtacccatgtggacacactcacgtgtgtgtgcacgttcaggctcagacacgtgcctgcatgcacacgtgcacacgtgcacacccagccctggacctcaggcaggcagggagagagacccccttggggccgcgttccatttgcacatttaatccagaaactgtcagcatgggaagcctggatgagaacaaaatgtcaagtgtgtgccgagaggcgcaggccagccccttttcctggcggggcgatgatctggtcagtttccgagcaccatgtgctgagaatgatgcgtgcattcagagcagcatttggtggggaacctgggggaagggcgggcgtctttatttcattttagctttctttagcggggcctgtgtctcttctcactgaccgttttctgaaactggctggggagggtcagggatggctgctgtcctcgggggagggactgagctgggcccttttcgttggttagttctcagtgtggcctacccagccaggtccctggacctggcggtggctatg

SEQ ID NO: 519797 - DNA, 596 bp, Homo sapiens
agcctccgtaggttgctctgcctggagcttcaatctagtcctgcctcctgtccatcgtgatcccctgaatctcagcacacatagtatttttgataatacatattttccatgaagttttgaagatcctatgtatttaaatttattttcaccaattttatttctcttcctcatatcccagagttaactaattttctaaacttggtgttcagtactaccatttttgttatttcacacactacataaatatctaatacaaaaacactatcttgtattgcactgacaaaatatatacgtatttttagaaacttcttgtttttcatctttatttgtaataattgattcatgttgattcataaagctttgctcaggtatggttaaacaactgctaaattccagtattctaytgtatgaaaacgccaaaatttgtctatctaatttttgactgatggtcatttctaattttgcctcatagcaaaaagtgctacagtgaaaatatttgctttatatacaagtctttatataaaagtgcagtggattcactaggctacatacctacacacacatacacatgtaattttttactttttgggttagtg

SEQ ID NO: 519798 - DNA, 339 bp, Homo sapiens
ttaaacacattcattcacgaagcaattcaatatgataattttcatttaagtcaaaagtaaaatattattatagcagttacattcaygattatcccaatttccaacaaatactcctgacagccagctttggtctcattgccataatatcaatctctatattatcatttctagagacagatgcacatgctatggccatgaccataattctcctctttagaatgcagtggctggctttctgtgcagcagattagacactctattaagtcatatagatgataaatgataaaagatagatagatagatagatagatagacagacagacagacagacagatagat

SEQ ID NO: 519799 - DNA, 339 bp, Homo sapiens
ttaaacacattcattcacgaagcaattcaatatgataattttcatttaagtcaaaagtaaaatattattatagcagttacattcacgattatcccaatttccaacaaatactcctgacagccagctttgstctcattgccataatatcaatctctatattatcatttctagagacagatgcacatgctatggccatgaccataattctcctctttagaatgcagtggctggctttctgtgcagcagattagacactctattaagtcatatagatgataaatgataaaagatagatagatagatagatagatagacagacagacagacagacagatagat

SEQ ID NO: 519800 - DNA, 667 bp, Homo sapiens
ctggtattaaacacattcattcacgaagcaattcaatatgataattttcatttaagtcaaaagtaaaatattattatagcagttacattcacgattatcccaatttccaacaaatactcctgacagccagctttggtctcattgccataatatcaatctctatattatcatttctagagacagatgcacatgctatggccatgaccataattctcctctttagaatgcagtggctggctttctgtgcagcagattagacactctattaagtcatatagatgataaatgataaaagatagatagatagatagatagayagacagacagacagacagacagatagatggtagatgggggtgggggagtgaggggaaccaggcttttggttatgaacctaatctaacttcctgtgtgacattaatgtaactctctattgaagagtttctgtacttttgactaaatctctcaactagagctataatatttcaaaatttccagctttctgacaaactagttgaataagagaccaggtctaagagcagagatgagctgtagccctatgaggaaaatgatcaaaatttggaaaattgaatgtacttagaatagttgattacagatagctatattcttccaaaatcttcttcagtaaatagacttttagaataca

SEQ ID NO: 519801 - DNA, 644 bp, Homo sapiens
gacttagaagatctagaaatcataacatccaaaacaagctataggcaagattttcacttctataattcttggtcttcattcataaaaatcgagaccacattaatgcttacttcaaaggagctgaatgtcagcagaggctaaaaaatgtagtttactggatcatattaagaattacaagttttatttgaaagaatatttccatctaaattatcgttctaaacatctaaagaatgtgtcaagcataaagactagtctatctagctgaagtacagagaaggaattgtagagagtagaggttagtggggaggctaattaataggttgtcatgtcagtacaagtgagacgataagtctagcttgcactaggatgctgacatcagagaaggrgacaaatagattcaagaggaattggcagataagtgtctcagaatatattgatgaatgcaaatgaggacaatttacggacagccagaattctggtctaaacagctagataggtggtggtgccacgtaacaggagggatcattgagggatacaggagaatcaggtttaagggtgaaaatcatgattataatattggttaggttcagttgaaccagtcttttggaaatggaagtgaatgtgtgaaggtaattgagtatcaa

SEQ ID NO: 519802 - DNA, 644 bp, Homo sapiens
gacttagaagatctagaaatcataacatccaaaacaagctataggcaagattttcacttctataattcttggtcttcattcataaaaatcgagaccacattaatgcttacttcaaaggagctgaatgtcagcagaggctaaaaaatgtagtttactggatcatattaagaattacaagttttatttgaaagaatatttccatctaaattatcgttctaaacatctaaagaatgtgtcaagcataaagactagtctatctagctgaagtacagagaaggaattgtagagagtagaggttagtggggaggctaattaataggttgtcatgtcagtacaagtgagacgataagtctagcttgcactaggatgctgacatcagagaaggagacaaatagattcaagaggaattggcagataagtgtctcagaatataytgatgaatgcaaatgaggacaatttacggacagccagaattctggtctaaacagctagataggtggtggtgccacgtaacaggagggatcattgagggatacaggagaatcaggtttaagggtgaaaatcatgattataatattggttaggttcagttgaaccagtcttttggaaatggaagtgaatgtgtgaaggtaattgagtatcaa

SEQ ID NO: 519803 - DNA, 550 bp, Homo sapiens
attttagtgaattaaaactcatatcaaggggggcaaatacaaaagctttgagtatgaaatagttttggtacaagtacaaaggaaatacaaactgtcaatgtctgagatatttttaacacaccaaaagttgtacagaaacaattaataaagattgaaacaaaggaggaaattgactttgttttgaggtgaytatgtgggagtcagtgagaaacatgcagtttgtgaccctaaaattttctttggatcactttggtgtgagaactgctatgtcactgatggagttggagaagggtttagagccaagtatgtattcttaatgatagtgagaaatctgaggaaattgtttaaagggacttttaagaattaagtctggaaattccttgtaaaaaaaaaattgaggacagtcaggagaaaataccagcaaataaaggggacattgaaaccattcattcagattaaatttgtgcagaataaatgtagagaaaaacaaaactaaaaactaatgcttgaggaattactccaatccagtgggaggagaagaaagagaagg

SEQ ID NO: 519804 - DNA, 600 bp, Homo sapiens
gatgttctatgtacttggttatagagagtattcttttctgctcctaattttaaaatgaatgtttttatgttttaccactgatcatcaaatttatcaggtgaacctagttacctgttagaaycttactagttagctgtttttttcatgaatgttgttaaattttattgaatgtttttaaagtatccatcgaagtgatcatataattttgctcctttaacctgttaatgtagtgaattacattaatatataatacataattatataatatatttacatatatgttaattaataacccaagttatctaaaatatatataacaggaatttcagcttcagagagcttaattacagtaataaatatatctatattagtacttaaacaactttgcatttctgaaacaatctaagctgatcatgatatattatcttttttctgcattgctgggctcagtttgcaaacagtaagtttaggactttttttgcatcattttttgggatgatattggcttaaagtgtttctttttcatactattattttcaggtttataaaatgacttctgttgtgtaagccgtaagattggcattatccgttgcctaaatg

SEQ ID NO: 519805 - DNA, 453 bp, Homo sapiens
tcaggctggagtgcagtgtcgcgatctcggctcactgyaagctccgcctcctgggttcacatcattcttctgcctcagcctcccaagtagctgggactacaggtgcccgccaccatgcccggctaattttttgtatttttagtagagacagggtttcactgcgttagccaggatgctctcgatctcctgaccttgtgatccacccgcctcagcctcccaaagtgctgggattataggcgtgagccactgcaccttgcctctttatgcactcttaacctgtctcttctcattccttcgtcaccactggactttgggtacctacgggtgatgttaaggctggtccccaacaattgttatttgtggaaactttccagtacccacgtatagccagcagcccctttaagggaacataactctccctggctggccaacaaatagcccggagccaagcag

SEQ ID NO: 519806 - DNA, 453 bp, Homo sapiens
tcaggctggagtgcagtgtcgcgatctcggctcactgtaagctccgcctcctgggttcacatcattcttctgcctcagcctcccaagtagctgggactacaggtgcccgccaccatgcccggctaattttttgtatttttagtagagacagggtttcactgcgttagccaggatgctctcgatctcctgaccttgtgatccacccgcctcagcctcccaaagtgctgggattataggcgtgagccactgcaccttgcctctttatgcactcttaacctgtctcttctmattccttcgtcaccactggactttgggtacctacgggtgatgttaaggctggtccccaacaattgttatttgtggaaactttccagtacccacgtatagccagcagcccctttaagggaacataactctccctggctggccaacaaatagcccggagccaagcag

SEQ ID NO: 519807 - DNA, 453 bp, Homo sapiens
tcaggctggagtgcagtgtcgcgatctcggctcactgtaagctccgcctcctgggttcacatcattcttctgcctcagcctcccaagtagctgggactacaggtgcccgccaccatgcccggctaattttttgtatttttagtagagacagggtttcactgcgttagccaggatgctctcgatctcctgaccttgtgatccacccgcctcagcctcccaaagtgctgggattataggcgtgagccactgcaccttgcctctttatgcactcttaacctgtctcttctcattccttcgtcaccactggactttgggtacctacgggtgatgttaaggctggtccccaacaattgttatttgtgraaactttccagtacccacgtatagccagcagcccctttaagggaacataactctccctggctggccaacaaatagcccggagccaagcag

SEQ ID NO: 519808 - DNA, 569 bp, Homo sapiens
tcagcatactcccgcgcttaatgaaatggtttcccccagcatccccagctggtgcggtctgaaccattcggaacttcccagaggggggcaccggaataggggcggyggaaaagggtaattgtcgggcagcggcccctgcttcccagtcagacctcggagttgtaggactcggactgtgttcctgggcttgcgagagctagggaggcccggctctcctcgcggtgcaggacgcgctcggacggctcccgcacccccaccgcagtgttgggtggtggtacggctcagggagtcacgcgcctgggtctcggcggggctgcgggaccgcgagtgagtgtggtcgctcctggttctgccagctcccctgagagcctgaacccgggcttgagagcctcgccaccccgggtgacatccctgccgtgggcttgggggctctgggtgtgattccgccggtccgggtcccgcagcgaccacctacccagcgcagtcaggggtggggctgggacccagagcgggaccccggctgccgagtccaggtgtcccgcgggcctcgatttggggagcaggtaggc

SEQ ID NO: 519809 - DNA, 569 bp, Homo sapiens
tcagcatactcccgcgcttaatgaaatggtttcccccagcatccccagctggtgcggtctgaaccattcggaacttcccagaggggggcaccggaataggggcggcggaaaagggtaattgtcgggcagcggcccctgcttcccagtcagacctcggagttgtaggactcggactgtgttcctgggcttgcgagagctagggaggcccggctctcctcgcggtgcaggacgcgctcggacggctcccgcacccccaccgcagtgttgggtggtggtacggctcagggagtcacgcgcctgggtstcggcggggctgcgggaccgcgagtgagtgtggtcgctcctggttctgccagctcccctgagagcctgaacccgggcttgagagcctcgccaccccgggtgacatccctgccgtgggcttgggggctctgggtgtgattccgccggtccgggtcccgcagcgaccacctacccagcgcagtcaggggtggggctgggacccagagcgggaccccggctgccgagtccaggtgtcccgcgggcctcgatttggggagcaggtaggc

SEQ ID NO: 519810 - DNA, 482 bp, Homo sapiens
ctttccaagggcgacttctcagtcctctcatttatctaacacgtgaatgtggcgcttcctgtgtgtcaggaaggcactttggaggcgcagttctgcgatgaggagcgctacgactcaaagcagggcaggggagggtgtcggggtggaggggagctcttctggtgggctggcaaggggtactctgagcaggggagcaagtggaggccgagtggtgaggagtgagccaggtgacggtgtgtggagcattcctgacctttgtccccagccctgccctctcctgtcctgcagcctgcatctttgctgagtyctcagggccttccagctagaagttctgccatctgttaaatgcgtatgtttcctctcccgctgcctgtctgcctccctctcggagtgcacctacagagcactagccctccattccctgccagccacacccagggtctccctctctgactcccacacctgcctcactgccagcccag

SEQ ID NO: 519811 - DNA, 559 bp, Homo sapiens
gtggtctcgccatgtccgtggtctcgccacgtctgtggtctctctatgtttatgctcttgccttgtctcaccgtgtgcgtggtcttgtgacgtccatggttttgcggtgtgcatggtctcaccgccagcagagggtggagccaggacacacgccgtccccaggagcctgggcctgaggaccttcccctctgaagtgtgcccctgctctggcggcgacctcaggtgcacacgtgctcatgggaatctgagggactgcggccatccttgttttgccatcattgttgttgtcatcactttcattgttcttgttcccacaatcattattgaattccaggctgtagggatggatgaggcaggatggagagcctgttgaagaggctccctctgctctgcccaggggcaggtggcggagcagtggcacaggctatgcctagaagacagasgaccacccaaccctgccagccctgggtggcggaggtgcccactggcctagaggaaagcagtagaggatggtggttacttacatcttgtcagcttagaaatgacccccgctcaaatt

SEQ ID NO: 519812 - DNA, 597 bp, Homo sapiens
caggtcacgtgctattccatgtcacactgctgtcaaaggtgagaacacttctgcctttaagccctcagtccaggggaggaaataagaccacatccatacgggggcatctcaactggattccacctgaagtcactgtaattttggggggagataataaatcaacattttgtgtgatacatactgagatttttcaaattgacaagttcccctaaagcatagactgtcttctgcagagggaactgcaacagygtggatgactgaaatgagctgagactcacccgccaggtgaggaggcccctcctgagagcaggtgagcgggctcatgcctcggaaacatcgtctgcaatggccaactcaaggccgctctcagctaccaagcacttgtgggagctgctcacgcgaataaaacctgagcctgccctggggtcctgacccgaacgagtgattccacaaagcagaagcaacggcccacagacctgtgccccagtgcgtgggaatgatggtgcacacagtgtggttaaggtctggcacgtgtcccgagcagaacaacctcagccccaacagcctggagtgcggcccacctagtgacttgcacca

SEQ ID NO: 519813 - DNA, 487 bp, Homo sapiens
aatgtctaccaaaccctgcagattcacgtacacttatgtatacatacgtttctagacctatatatccatatccatgtgaagctaagcatgagttctgtatctatgtagctgtatctatttgaagctaagcatgagttcatactgatgtctccaaccctaatccagggccacaagcaccatgccggcctcctgctgctcctacctcagcagtgagaagctgctgccaggatctgtcatccgcgcatctgattgtccagttccagcgcacctgcatcctgatttcagagctgctaacctgtacacccatgagaaacaacctcatcagctactatgccatgcttggacgcagttacccrtgtctttagtctcacagactaatattccgaaagtcaggtaggtcaacatcatttttcttcactccctttagtgaggttgtttcatttatgtgtaatacacttacacttttttgtcaaatttagcattcctt

SEQ ID NO: 519814 - DNA, 570 bp, Homo sapiens
gtcccaacttgtggcctccaagccgatcaggctgctcagagacagtggcagcagcatggctcacacacagcacatctagcacagacaagaaacatttgtggctgggtacagtgattcacatctgtaatcccagtgctctgggagactgatttgggacaatcgcttgagcccacaagtttgaggctgtggtgagtatggtcataccactgcactccagtctgggmaacagactgagaccctctctctaaaacaacaacaaacaacaaagcatttgctatttttcacagtcacttatgttacttactcttttcttctgttatccagttttcaacttagtttaagagattaatgattgtttcttaggtgacattcttcccgggagattatagcacactcaaatgaaagactcttcataaaccccagccaacacacggtcaaaaaccttcccacagtcacccactgctgctgggttctttagtgtcctactcacttccaatccacatttcacctgggcttgaccccacttattttttagctcactgataagttgagtactgtgtaacttgataa

SEQ ID NO: 519815 - DNA, 570 bp, Homo sapiens
gtcccaacttgtggcctccaagccgatcaggctgctcagagacagtggcagcagcatggctcacacacagcacatctagcacagacaagaaacatttgtggctgggtacagtgattcacatctgtaatcccagtgctctgggagactgatttgggacaatcgcttgagcccacaagtttgaggctgtggtgagtatggtcataccactgcactccagtctgggaaacagactgagaccctctctctaaaacaacaacaaacaacaaagcatttgctatttttcacagtcacttatgttrcttactcttttcttctgttatccagttttcaacttagtttaagagattaatgattgtttcttaggtgacattcttcccgggagattatagcacactcaaatgaaagactcttcataaaccccagccaacacacggtcaaaaaccttcccacagtcacccactgctgctgggttctttagtgtcctactcacttccaatccacatttcacctgggcttgaccccacttattttttagctcactgataagttgagtactgtgtaacttgataa

SEQ ID NO: 519816 - DNA, 588 bp, Homo sapiens
cctagtactttgtggtgtatatgcaccacattttctttatttaatgaaccgttggtggatacttaccttggttccatgaccttgctrttgtaagttatgctgcgataaacatgggagtgcagtgcctttttatataatgatttctttccctttgggtagatacccagtagtgggattgctgggtcgaaaggtagttgtacttttagttctttgagatacctccctactttttccatagaagttgaactaattgacatacccaccaacaatgtatgagcattcccatgtctggaagagttttcccaggttttctcccaggatctttatagttttaggtcttacatttaggcctttaatccatcttgagttaatttttgtacaggtgagtgagaggggtccagtttcattcttatgcatatggtcagccactattcccagaaccacttagtgaatagggtgtcctttccacgttaagtgttttgaagagccattggctgatttttttcctagcattatttcttgagcaaaatccttcagtagaatgttgatgaaagtggtcaaagtgattatttatgtattgtttccaat

SEQ ID NO: 519817 - DNA, 588 bp, Homo sapiens
cctagtactttgtggtgtatatgcaccacattttctttatttaatgaaccgttggtggatacttaccttggttccatgaccttgctgttgtaagttatgctgcgataaacatgggagtgcagtgcctttttatataatgatttctttccctttgggtagatacccagtagtgggattgctgggtcgaaaggtagttgtacttttagttctttgagatacctccctactttttccatagaagttgaactaattgacatwcccaccaacaatgtatgagcattcccatgtctggaagagttttcccaggttttctcccaggatctttatagttttaggtcttacatttaggcctttaatccatcttgagttaatttttgtacaggtgagtgagaggggtccagtttcattcttatgcatatggtcagccactattcccagaaccacttagtgaatagggtgtcctttccacgttaagtgttttgaagagccattggctgatttttttcctagcattatttcttgagcaaaatccttcagtagaatgttgatgaaagtggtcaaagtgattatttatgtattgtttccaat

SEQ ID NO: 519818 - DNA, 588 bp, Homo sapiens
cctagtactttgtggtgtatatgcaccacattttctttatttaatgaaccgttggtggatacttaccttggttccatgaccttgctgttgtaagttatgctgcgataaacatgggagtgcagtgcctttttatataatgatttctttccctttgggtagatacccagtagtgggattgctgggtcgaaaggtagttgtacttttagttctttgagatacctccctactttttccatagaagttgaactaattgacatacccaccaacaatgtatgagcattcccrtgtctggaagagttttcccaggttttctcccaggatctttatagttttaggtcttacatttaggcctttaatccatcttgagttaatttttgtacaggtgagtgagaggggtccagtttcattcttatgcatatggtcagccactattcccagaaccacttagtgaatagggtgtcctttccacgttaagtgttttgaagagccattggctgatttttttcctagcattatttcttgagcaaaatccttcagtagaatgttgatgaaagtggtcaaagtgattatttatgtattgtttccaat

SEQ ID NO: 519819 - DNA, 588 bp, Homo sapiens
cctagtactttgtggtgtatatgcaccacattttctttatttaatgaaccgttggtggatacttaccttggttccatgaccttgctgttgtaagttatgctgcgataaacatgggagtgcagtgcctttttatataatgatttctttccctttgggtagatacccagtagtgggattgctgggtcgaaaggtagttgtacttttagttctttgagatacctccctactttttccatagaagttgaactaattgacatacccaccaacaatgtatgagcattcccatgtctggaagagttttcccaggttttctcccaggatctttatagttttaggtcttacatttaggcctttaatccatcttgagttaatttttgtacaggtgagtgagaggggtccagtttcattcttatgcatatggtcagccactattcccagaaccacttagtgaatagggtgtcctttccacgttaagtgttttgaagagccattggctgatttttttcctagcattatttcttgagcaaaatccttcagtagaatgttgatgraagtggtcaaagtgattatttatgtattgtttccaat

SEQ ID NO: 519820 - DNA, 617 bp, Homo sapiens
tgtgtgaattctaccctaactagctagttgtgtcagcaccatttagtgaataatctgttttttgccccactattagaattgcagcttttgtcatttactaaatgtgtttgggactatttctgattggtcttgttattttattttgatctcttgtgtattattttattttgatctcttattattttattttgatctctttgattaccatatactttaaattactatcattttataattttaatacagatggggttagttacctgttcattactctttttttcagactttgacaattctggtctatgtgttcttctagatgaactttagaatcattctgtgacattcaaaaagaaatcatagagatttttattgaatgctgaatattgattgggaatactgaaattgtaggtgaagtttggggaaattgacatctttatatactttctgtcctgtgttcaaatagatttttatgtccctcaatagattttcacactttgcttcaaataagtcctgtacagataagtctcgtatattcgtatatttcttatttcttttaaaaaawttagacccatgaatgggagtttgtttgtttattttattcaacaaatattgtagag

SEQ ID NO: 519821 - DNA, 534 bp, Homo sapiens
tcgtttaaagtcatcctgagcttggcccaccagctcatgatactgagatacaagcttagmctcaaattgagctgcttggacctttttgaccacattatccagatcaactatcatgttgtgaagtttatatgaggcttggccccagcaacctcttctttctttgcattttcagtcacacttttcatcttctctacctcttctttggctttgagaagggcattggcagcttcatctactgcctttctgtgttccttcaacgcaccttgcactgtgtggcacttagcagacttcttcttgccctcaatctcagaattgtccatggcggctttcaatatgttggagtgtgcattgacagcctggaccacagtgttctgagctgcaatcgcctgcagagtgacatttgcagtttgcctcagagcatcttcaaagctcttggctagagactcagttttaacttgttcttgtttttcctcttgtgcaaggcaagctgcaatttcttcacatggtcgttcccttatagaagatgaggatgct

SEQ ID NO: 519822 - DNA, 603 bp, Homo sapiens
cgtttaaagtcatcctgagcttggcccaccagctcatgatactgagatacaagcttagactcaaattgagctgcttggacctttttgaccacattatccagatcaactatcatgttgtgaagtttatatgaggcttggccccagcaacctcttctttctttgcattttcagtcacacttttcatcttctctacctcttctttggctttgagaagggcattggcagcttcatctactgcctttctgtgttccttcaacgcaccttgcactgtgtgscacttagcagacttcttcttgccctcaatctcagaattgtccatggcggctttcaatatgttggagtgtgcattgacagcctggaccacagtgttctgagctgcaatcgcctgcagagtgacatttgcagtttgcctcagagcatcttcaaagctcttggctagagactcagttttaacttgttcttgtttttcctcttgtgcaaggcaagctgcaatttcttcacatggtcgttcccttatagaagatgaggatgcttcttctgaaagtgcaggtgtgggttttccttcatcaattgcagggtgatcagtttttaaagattcctcat

SEQ ID NO: 519823 - DNA, 603 bp, Homo sapiens
cgtttaaagtcatcctgagcttggcccaccagctcatgatactgagatacaagcttagactcaaattgagctgcttggacctttttgaccacattatccagatcaactatcatgttgtgaagtttatatgaggcttggccccagcaacctcttctttctttgcattttcagtcacacttttcatcttctctacctcttctttggctttgagaagggcattggcagcttcatctactgcctttctgtgttccttcaacgcaccttgcactgtgtggcacttagcagacttcttcttgccstcaatctcagaattgtccatggcggctttcaatatgttggagtgtgcattgacagcctggaccacagtgttctgagctgcaatcgcctgcagagtgacatttgcagtttgcctcagagcatcttcaaagctcttggctagagactcagttttaacttgttcttgtttttcctcttgtgcaaggcaagctgcaatttcttcacatggtcgttcccttatagaagatgaggatgcttcttctgaaagtgcaggtgtgggttttccttcatcaattgcagggtgatcagtttttaaagattcctcat

SEQ ID NO: 519824 - DNA, 603 bp, Homo sapiens
cgtttaaagtcatcctgagcttggcccaccagctcatgatactgagatacaagcttagactcaaattgagctgcttggacctttttgaccacattatccagatcaactatcatgttgtgaagtttatatgaggcttggccccagcaacctcttctttctttgcattttcagtcacacttttcatcttctctacctcttctttggctttgagaagggcattggcagcttcatctactgcctttctgtgttccttcaacgcaccttgcactgtgtggcacttagcagacttcttcttgccctcaatctcagaattgtccatggcggctttcaatatgttggagtgtgcattgacagcctggaccacagtgttctgagctgcaatcgcctgcagagtgacatttgcagtttgcctcagagcatcttcaaagctcttggctagagactcagttttaacttgttcttgtttttcctsttgtgcaaggcaagctgcaatttcttcacatggtcgttcccttatagaagatgaggatgcttcttctgaaagtgcaggtgtgggttttccttcatcaattgcagggtgatcagtttttaaagattcctcat

SEQ ID NO: 519825 - DNA, 648 bp, Homo sapiens
agcaacatggatggaaccgaaggtcattaaagacaaatattacatgttctcactcacatgtgggagttcacaaagttgatctcatggaagtagagagtagaatgatattaccagaggtgaagaacggtgtgtgttagaggagaagtgagtttggttaatgggtacaaacatagttacacagaaagaataagttctaatatttgatagcagcatagggtgactacagttaacaatgtattgtatgtctcaaatcagctagaagagagagtgtaaaatgtcctcaacacagagaaatgatagacaaggtgatgaatatcctgatttcatcattacgtatcctctgtgtgtaaagtatttcatatgccccayaaatatgtaaacatattatgtatcaatttttaaaaagtgccatatgtagatcagtgatgggagtgtgtgctgcagaactaatccagttctgtaaacctgagatcctccgcgacccgggaagcaggacatccaccaaccacatgggaaagcccgatcctcagtgctctgaggctttggccatcaatgcagggcttgctggcctggagcaggagtggacagccagtggggaagcgaggccactccaccacaggcgggtaagtcaccgctgtggccactgca

SEQ ID NO: 519826 - DNA, 648 bp, Homo sapiens
agcaacatggatggaaccgaaggtcattaaagacaaatattacatgttctcactcacatgtgggagttcacaaagttgatctcatggaagtagagagtagaatgatattaccagaggtgaagaacggtgtgtgttagaggagaagtgagtttggttaatgggtacaaacatagttacacagaaagaataagttctaatatttgatagcagcatagggtgactacagttaacaatgtattgtatgtctcaaatcagctagaagagagagtgtaaaatgtcctcaacacagagaaatgatagacaaggtgatgaatatcctgatttcatcattacgtatcctctgtgtgtaaagtatttcatatgccccataaatatgtaaacatattatgtatcaatttttaaaaagtgccatatgtagatcagtgatgggagtgtgtgctgcagaactaatccagttctgtaaacctgagatcctccgcgacccgggaagcaggacatccaccaaccacatgggaaagcccgatcctcagtgctctgaggctttggccatcaatgcagggcttgctggcctggagcaggagtggacagccagtggggaagcraggccactccaccacaggcgggtaagtcaccgctgtggccactgca

SEQ ID NO: 519827 - DNA, 630 bp, Homo sapiens
tgtgtacacgcatgcacacacccacacgcacacacccacgtgcacacccccatgcacacgcacccacttgcacgcccatgcacgcacacacgcgcgtgcacccatgcgcacgcacccatgcacacacacgcgcgcacacacccacgtgcgcacccacatgtacacacccacgtgcacacacccacgcgtacacacccacgcgcacacaccgctgtccccagccgtgcagaacgatcctccctgagtccccggctccgacccacacgcagcactcgctaaacgcttcccacgcagtcgttttgctgggttgcgcttcacccacttctcagagggggcggccgaggcagaggtgtcggggatcgagcagctccgggcctcaggggtcgccccgccaccgttttcctttcccagatgctgggacgggggcagggaggggctccccaggctgaacccgactaggtcaccctagaagcgaggcgagcttctcttctgtttttcttcggcgcccctgagcccctgacagtgcccaagctgcccatgggattggattcgccagagcctcctacgcagaccccacccagggccaaagccaaccccaagccccamcaccttggtggtgtgggatgaaaa

SEQ ID NO: 519828 - DNA, 277 bp, Homo sapiens
agaccccagcttgggacagggcctgtggcccctccagcagcacgcactgtgcccacccgccactggtgaggagattccaggagaaacactgccacccaagcagcaccccacatggctggcctccccgcaccgggccggcaccccacagtgccagtcacccaccccacttggctggcctctctacaccgggccggcaccccacagcgccagtcacccaccccacrcggctggtctccccgcaccgggctggcaccctgcaacgccagtcacccacccc

SEQ ID NO: 519829 - DNA, 487 bp, Homo sapiens
tcaactggaggctgccatcatctctttccatgcggcctcaatgggcagttcacaatgtactggctttttcacagcyagccagggagacagagtcctcccaagacgagcattatgacctcatgtaatgggatcatgcacatcccatcaccctctctgtggctccttgtgtctatacacgtgtcacagtcccaaccacactcaaggagtgtggggcacacagccagtgaccactaggaggtgagggacatggggccaccctagagtctgtctcccgctgtctggacaatgtcatggctgtgatacctttgcacataccttgtatccacccaggagtatctacaggatgcttgcttagtgattcaggcttaaaggcatgaggttttgaattgtgatgtgtagcagcaaactgcctgccaaagccgtggagcaacctcagcccagcagcaagtcatctgggtagtctgcccacaccctcgccaacccatgt

SEQ ID NO: 519830 - DNA, 487 bp, Homo sapiens
tcaactggaggctgccatcatctctttccatgcggcctcaatgggcagttcacaatgtactggctttttcacagccagccagggagacagagtcctcccragacgagcattatgacctcatgtaatgggatcatgcacatcccatcaccctctctgtggctccttgtgtctatacacgtgtcacagtcccaaccacactcaaggagtgtggggcacacagccagtgaccactaggaggtgagggacatggggccaccctagagtctgtctcccgctgtctggacaatgtcatggctgtgatacctttgcacataccttgtatccacccaggagtatctacaggatgcttgcttagtgattcaggcttaaaggcatgaggttttgaattgtgatgtgtagcagcaaactgcctgccaaagccgtggagcaacctcagcccagcagcaagtcatctgggtagtctgcccacaccctcgccaacccatgt

SEQ ID NO: 519831 - DNA, 487 bp, Homo sapiens
tcaactggaggctgccatcatctctttccatgcggcctcaatgggcagttcacaatgtactggctttttcacagccagccagggagacagagtcctcccaagacgagcattatgacctyatgtaatgggatcatgcacatcccatcaccctctctgtggctccttgtgtctatacacgtgtcacagtcccaaccacactcaaggagtgtggggcacacagccagtgaccactaggaggtgagggacatggggccaccctagagtctgtctcccgctgtctggacaatgtcatggctgtgatacctttgcacataccttgtatccacccaggagtatctacaggatgcttgcttagtgattcaggcttaaaggcatgaggttttgaattgtgatgtgtagcagcaaactgcctgccaaagccgtggagcaacctcagcccagcagcaagtcatctgggtagtctgcccacaccctcgccaacccatgt

SEQ ID NO: 519832 - DNA, 575 bp, Homo sapiens
ccccagatccctgccagggtcacctctgctctaacaacatgacagcagggaacaaaccccaggggaggtggacgctctcacggtgcccttttgtctctaaagcggggagagatcttacaattcttctttttctctgccaggatgttgccttgggggtgggcacctcccttctccaccccacaccaccttccacacaaccacagacacaaggctggggcactggcccaaatgtcacaggtgtgcagccacagggctcttacctttcacagcctgtcagcccccgaccctggttccccagtccctcaccatgctgcctggccctgcctcctcctcctccctgccaggtgccttccagagcttcacagcctccttctccacctcccacaactccagtccctcttctcagatcagtggggcaagcctggctttgtttacctggaacccgagaccctgccctggtcagcacccaattcgagagctctgctcagcagtgagaatgagacaccgtgacaatgcggctgygcaccggacacctggctcagcgcaggcagcgcacggacagagtctgcggtgtg

SEQ ID NO: 519833 - DNA, 278 bp, Homo sapiens
tgccctgctgcatagggcaaggattcaggctttccttgaaatgggacaaacgtgtggatgtgaagttcacatctgcaaactctgcccactgggacaggccgatggctcagggctgtctccaggtgccctggaggcccctcacagggagtagatacagcacccagtgcccagggcctcccttgcccagaaccatgtgaccagctagttyctccctgtccccagcacggcccataggagtgtagtgggtgggcaggatccataggtgagcagtgggtgga

SEQ ID NO: 519834 - DNA, 436 bp, Homo sapiens
tgctcataacgttcttgtgatttctttgatccctctgtctgcagttatttctgtattttcagtctctatttttatttatattttcctctttttttgctcaatattgtcaaaatcaatatatcttttcaaagtatgatccttggtttttgctactcatattattttattkttctctatttcattgatttctgccagtatctttgtcatttccctttttcttattactttgggatcattttgttacattgctgttttttccaattatttcatttgtatgattagttctatttcttttcttttttcttttttttttttttttgaaagaaggtcttgctctgttccccaggctggagtgcagtggtgctgtcatagctcactgaagcctcaaactcctagactcaagcaaccctcccacctcagcctcttaagtagctgg

SEQ ID NO: 519835 - DNA, 436 bp, Homo sapiens
tgctcataacgttcttgtgatttctttgatccctctgtctgcagttatttctgtattttcagtctctatttttatttatattttcctctttttttgctcaatattgtcaaaatcaatatatcttttcaaagtatgatccttggtttttgctactcatattattttattgttctctatttcattgatttctgccagtatctttgtcatttccctttttcttattactttgggatcattttgttacattgctgttttttccaattayttcatttgtatgattagttctatttcttttcttttttcttttttttttttttttgaaagaaggtcttgctctgttccccaggctggagtgcagtggtgctgtcatagctcactgaagcctcaaactcctagactcaagcaaccctcccacctcagcctcttaagtagctgg

SEQ ID NO: 519836 - DNA, 353 bp, Homo sapiens
ctgcttctgggatcccagactgggcccagagtccccatccacagaagggccggcaggcctgagaaaggacagccaggtcgccagggaggggatgtggctcgcccccttcttccctttctctggaagtgcatttacctccccccacacacaggcggggttgcagggcccttcccagccagaccctgcagtgcagctctctgggaggccccccagggcagtggtttcctggctctgtgcttcctaggatcctggaagccgactgggctggggytggggggtggagccccatgggagaaggatctcctgcaggaatggcctggatgggggcttgggggtggacatgtgccagagac

SEQ ID NO: 519837 - DNA, 492 bp, Homo sapiens
tgcccaagtagatgggactacaggcatgcaccaccacacccagccacaagaattttgtcaataatacctctcttattaatgttagccatgatttggtaaatataagctccaaaaagctaaagccatttattcaaataagtgactttattaaagtcattgtttaaaatttaagtacatcaagaaaatgaaaatttataacaatatatttcctcttaaatgtgagtaagcttagtacaatcatgctaagaaaacaaaataatttaattgataagaatcatgttttggcaaaaaaaaaaagtcatcaatacaattactctaagatcactaaagaactaggaaaacaagagcataattaggaaatcctttgttccagggcatgatgagatgaacttgccttataaagtcatttatcacaaccctaagttgcataaatgtaatgataaaaggtccattaccaaatttgcacttgsaaatcatttcaagataccctcc

SEQ ID NO: 519838 - DNA, 455 bp, Homo sapiens
ccccccatacaatacaagatcttccttcctcagttcccttaaagcacagcccagggaaacctcctcacagttttcatccagccacgggccagcatgtctgggggcaaatacgtagactcggaggtaggcatccgtgggggggcgccggctcgggcgtgcggggagtgtccgcttctgctatctgcctctccaaatatcccgactgctgccctggccccagccctctctccacttcggagcactcctctggcgttggcaccgctgaggaatgggcctgggcggggaggtgaagagaagccaggaatgttttatgttttcctaatggagagggggcctmgggagcccctgagctaggaggacacggaaaaggggattggggtcctgagattgggtctgttgggcccaggacgcgttttctggatgggtctaggatgctcccctgtcgcgggaccccc

SEQ ID NO: 519839 - DNA, 592 bp, Homo sapiens
tcagctaaagtgagttttgtagaagttcctataactacacttttatcctagcaaatgagcctattgacctcagcaacagacggcccatactccttgggacggtgagatggttcctatccattcccaggttgaaagtctagtgacaggtccccactgcacgtggcattaagacagtcagataattgtgtcaggtcttgtgctgaggatgagtcagaatacaagatgggcatgttcccccaactaaaacgatgggaagtgattttcttaaaaatactacagtggatggaaatgcctaggactaaagacaaagaaaatacgtacttattcatatacatatgaaagttactttaactagactaacaagtcacttgtgcacaactaagcaaatttacaaaaccaaaaacaatgtatgcctcttggtttcttctatctatggacacctgcacttagatgtggaaagctgcttctttwgtagctacctgggtcagcctgccctgagctaatggcacattcaggttggagttccttttcatactttcaggatgtgcttggtgagattaaaaataattggactgggttattggccagactt

SEQ ID NO: 519840 - DNA, 606 bp, Homo sapiens
acgaggaaagatcccagcagatatctgcttacttgtcattagccacaaagcctttttcagttgtaaagggggctggggaatacaagtatcttacattttcaacctctataactgaggttgaaagggaagaaaaggttgaggttaagtactgggcaagccaataaacactgtctgccacaaaaggaatcccatgcccagatttatccatttccttttctttttcttagaaatacctatgaaggacatcacacctgttgaatagcccacatttgactaggcttacaaattttagtatcactgtttactttcaaattaggragatctttcttgatttataggaatgcaaacaattaaacaaacaaaaaacaaataaccacattaaaaaattggcaaatgacatgaacagtcacttctcaaaagaagacatacatgcagccaacaaatatacgaaaaaaaatgttcatcatcactaatcattagagaaattcaaatccaaaccacagtgagagaccatctcatgacagtcacaatgggtattactaaaaagtcaaaaaacaacagatgctggtgaggttgcagagaaaacggaacacttgtacactgctg

SEQ ID NO: 519841 - DNA, 534 bp, Homo sapiens
gtagtggttaagaacacaggctctagtatcaggttgcctggatttgaatcccacctctgctacttactagttgtgtgaccttaggcaartgacttaacctctttgtgcctcagtcatcatcttctgtaaaatgaagatgtacccacttcagagcattttaaggattaaatcagataatgcatgtaaagtgcctaacacagtatttgatacatagtaagagctatttaaatgttcatcattattgttaattttacagggacatctattagcagcaggttttagtatatacagtctactatcaggttttctaggagtttataaacagttttttcatcaaagcatgtggtaggtggaggaaggatgctaccatacaggaagtcaaaacacctgggttctagatctcactttgtgacccattgctggggagcaaagaaaacagagaagtatctgattccagatctgcagaccaatttctttgatacttccaggctgtctcttagttattcttaattcttgaggattaccctgcttagg

SEQ ID NO: 519842 - DNA, 534 bp, Homo sapiens
gtagtggttaagaacacaggctctagtatcaggttgcctggatttgaatcccacctctgctacttactagttgtgtgaccttaggcaaatgacttaacctctttgtgcctcagtcatcatcttctgtaaaatgaagatgtamccacttcagagcattttaaggattaaatcagataatgcatgtaaagtgcctaacacagtatttgatacatagtaagagctatttaaatgttcatcattattgttaattttacagggacatctattagcagcaggttttagtatatacagtctactatcaggttttctaggagtttataaacagttttttcatcaaagcatgtggtaggtggaggaaggatgctaccatacaggaagtcaaaacacctgggttctagatctcactttgtgacccattgctggggagcaaagaaaacagagaagtatctgattccagatctgcagaccaatttctttgatacttccaggctgtctcttagttattcttaattcttgaggattaccctgcttagg

SEQ ID NO: 519843 - DNA, 534 bp, Homo sapiens
gtagtggttaagaacacaggctctagtatcaggttgcctggatttgaatcccacctctgctacttactagttgtgtgaccttaggcaaatgacttaacctctttgtgcctcagtcatcatcttctgtaaaatgaagatgtacccacttcagagcattttaaggattaaatcagataatgcatgtaaartgcctaacacagtatttgatacatagtaagagctatttaaatgttcatcattattgttaattttacagggacatctattagcagcaggttttagtatatacagtctactatcaggttttctaggagtttataaacagttttttcatcaaagcatgtggtaggtggaggaaggatgctaccatacaggaagtcaaaacacctgggttctagatctcactttgtgacccattgctggggagcaaagaaaacagagaagtatctgattccagatctgcagaccaatttctttgatacttccaggctgtctcttagttattcttaattcttgaggattaccctgcttagg

SEQ ID NO: 519844 - DNA, 390 bp, Homo sapiens
tgcccagcatatttcgtggggcacactgggtcagtagttcacagatagacccattcattcatttcttccttgaatacctgctctgataagctctgtgcttgttcctggaaatatagccatgagcaataaagtcatggtatctgtcttcacggagcttataaccccaaggggaaaacaaataatcccacaaataacaatgataatactcattggggctcacctgtactgaaggccccctctgtgccagcccctgtgctaaatactttcctcatattatttcatgttattctcagtacaaccctgggggtaagcacgatgaycaccttcttacagatgaggggatggaaacttagtgagtctcttaggttaacttgtcccaaggagcctggc

SEQ ID NO: 519845 - DNA, 561 bp, Homo sapiens
atgttggctgggcttgcttgtgagtgtgtggtcattttgtgggtcagcttgtgctggccartcccagtagcttcattcactcgattggtagttggttggttagaggctgaggtgagggagtgactgccaaaggtctctcatctttcagtaagctattaggggcttgttcaggtggtggcaggattgttaaagcatcagacagtatctacaagacctctagaggacaaagctgagaagttcccatgagaagtggccaaatagcacttctgctgccttttatttgcgagagcaagacacacggctagattaaagagacagggaaatagactcagtctcttgatgggaacagatacaaagtatattgaccatattgcagtctactaaaccaaacacaagctcatgatattcccaagtacttttctggttttagagtttactgcttccagcttttgttatttgaatgaaaaaactcaaaatgaactcataattgctcagattctcagggaaataagcacaccacacacatcacaatattcttattcttatttgcagaaaaaaata

SEQ ID NO: 519846 - DNA, 630 bp, Homo sapiens
ggtttcagaggcagtgatgagttcccaaattggataaagagagctatgaacattgactggcaatactttggaagcctaggatgactgttcagccagctaggacaggagcagaccctgtgagatgtgtggaaaaggatccttgaaaagatggtgctatggtttggctgtgtccccacccaaatctcatcttgaattgtaactctcacaattcccacaygtcatgggaggaccccagtgggaggtgattgtattaagggggccgatctttcctgtgctgttctcatgacagtgaatgagtcttacaaggtctgatggttttaaaaacaagtttctctgcacaagctctctctttgcctgctgccatccgtgtaagatgtgtcttgctcctctttgccttccatcatgattgtgaggcctccccagtcacgtggaactgtgagtccaattaaacatctttcttttgtaaattgcccagtttcaggtatgtctttatcagcagtgtgaaaacaggctaacacagatgggataagggagagggagctggaggtttagaaacagtgctatggatggaggtctgagcagggaggaggatggatggagaacaatcctgttcagaggagggcgacaggg

SEQ ID NO: 519847 - DNA, 627 bp, Homo sapiens
acagttgtttggtcaaacactactccagatgttgctgtgaaggtatattttagatataattaacatttacatcaattgactttaggtaaagcacatttccttctataacatgtctttgttcataagaacaaagaccaagattccctgaatggagacagaatttcttcttcgactgcaacgttgaaattctgcctgagtttctagcatttgaactcaagactgcaaaatcgactcttacctcagcctgttggcttgccttatagattttagatttgccagcccccacaattgcgtaagccaatttcttaaactatgctgttrgtttttctttctctgggggaactctgggaagggatttgggggttaatactgaccatggtaaagatctgcttgtccatggaccatagcacaaagagctactgtctcgccacatatgtgcgtggcttctgcagtgaggctcatggaatgggaagtcacataggagggtttccccagcagattcctggcaggaaagagatgacccattccaggagttcattgaagaagctatttcagaggtcaaggggtaaaggaatcaaggcagtggtgtacccagtggggagcatcagtgaaatctgttagtgccct

SEQ ID NO: 519848 - DNA, 650 bp, Homo sapiens
gctagaggacagttgtttggtcaaacactactccagatgttgctgtgaaggtatattttagatataattaacatttacatcaattgactttaggtaaagcacatttccttctataacatgtctttgttcataagaacaaagaccaagattccctgaatggagacagaatttcttcttcgactgcaacgttgaaattctgcctgagtttctagcatttgaactcaagactgcaaaatcgactcttacctcagcctgttggcttgccttatagattttagatttgccagcccccacaattgcgtaagccaatttcttaaactatgctgttagtttttctttctctgggggaactctgggaagggatttgggggttaatactgaccatggtaragatctgcttgtccatggaccatagcacaaagagctactgtctcgccacatatgtgcgtggcttctgcagtgaggctcatggaatgggaagtcacataggagggtttccccagcagattcctggcaggaaagagatgacccattccaggagttcattgaagaagctatttcagaggtcaaggggtaaaggaatcaaggcagtggtgtacccagtggggagcatcagtgaaatctgttagtgccctggggcctgaagggac

SEQ ID NO: 519849 - DNA, 397 bp, Homo sapiens
ggcaactcttcagggaggccctcctccaggtggtgactcagaaacaggctgctttcctagatgctctgctctttcctgagatcttctctgcagtcagtgtttgggtccaggaaaagagaaggcaggagggatcgtgccagaggtcttctaggggacagacctggaagtgggatagattatttttgtttatcttccgttggctagacccagtcatgtcggtctactttagctgtgaaaggaagatagaaagtctgtctgagtgctcaagaggaaaagaaaactgagttcaagggagcacgcctaactttacgaacgtcctccttttgacttttttcctctacctaagacrttgtgaaaatatttctgttaccgatttagaaagtttagtgatgttctt

SEQ ID NO: 519850 - DNA, 308 bp, Homo sapiens
gcaggtgtatccattgggtggatcctggaggagaggtattcacctgcacatttcaggaacagtgtgctgtctccactgctctagtccaawtgacatgtctgactcggcaaagaaaataagtcagaatagggcaataaaatctaagacacaaaggagaagaggagtagtaccagtcagaaagatggaggtaaatttaccccagatggggagggaatggattttaaaatggaaaaaaaaaacaatacatgctacaacagatgaatctcactagcataagcgtgagggacagaagtcagacacaaaagctg

SEQ ID NO: 519851 - DNA, 308 bp, Homo sapiens
gcaggtgtatccattgggtggatcctggaggagaggtattcacctgcacatttcaggaacagtgtgctgtctccactgctctagtccaaatgacatrtctgactcggcaaagaaaataagtcagaatagggcaataaaatctaagacacaaaggagaagaggagtagtaccagtcagaaagatggaggtaaatttaccccagatggggagggaatggattttaaaatggaaaaaaaaaacaatacatgctacaacagatgaatctcactagcataagcgtgagggacagaagtcagacacaaaagctg

SEQ ID NO: 519852 - DNA, 374 bp, Homo sapiens
atgcataatgactgctccctgtggtggcagaaagtgaccctgccttaaagaacagatgagcacttctgacttcrgggacccagcattgggcacaggcaaaggcaccttgagatgttaaaatatccactgtagcgactaacaccattcaggaaaatgcttctccacctctgtcttctgctcctcaaagcaaaagataacagtccaaatgccatgaaagactgtgggtctattattgacaaataaaaacaagggatacccaattaaattgaaatttcagatcaacgatgaataatatttttagtataagtatgtcccaagtatattatagttgatccgtcaatagtattagctacttttgttcttggagatggata

SEQ ID NO: 519853 - DNA, 374 bp, Homo sapiens
atgcataatgactgctccctgtggtggcagaaagtgaccctgccttaaagaacagatgagcacttctgacttcggggacccagcattgggcacaggcaaaggcaccttgagatgttaaaatatccactrtagcgactaacaccattcaggaaaatgcttctccacctctgtcttctgctcctcaaagcaaaagataacagtccaaatgccatgaaagactgtgggtctattattgacaaataaaaacaagggatacccaattaaattgaaatttcagatcaacgatgaataatatttttagtataagtatgtcccaagtatattatagttgatccgtcaatagtattagctacttttgttcttggagatggata

SEQ ID NO: 519854 - DNA, 374 bp, Homo sapiens
atgcataatgactgctccctgtggtggcagaaagtgaccctgccttaaagaacagatgagcacttctgacttcggggacccagcattgggcacaggcaaaggcaccttgagatgttaaaatatccactgtagcgactaacaccattcaggraaatgcttctccacctctgtcttctgctcctcaaagcaaaagataacagtccaaatgccatgaaagactgtgggtctattattgacaaataaaaacaagggatacccaattaaattgaaatttcagatcaacgatgaataatatttttagtataagtatgtcccaagtatattatagttgatccgtcaatagtattagctacttttgttcttggagatggata

SEQ ID NO: 519855 - DNA, 660 bp, Homo sapiens
caaattttgaataagcctgacaagcattcaacagctttcagcagtgggaaagaatgtttatggagggggcaagaatgttttcaagtccaagagcagacattaacactgaggcctgcatgagtactcttgaagaatctttttattttattgtattttatttttaaagtactggttacaaagacggctaacatatctctgtagccaaattttcatgagtggcctcctcccaaggctgtccagtttggactgagggagccattgaccccagtctttacctgctgcagacttttctttcatgaagcccaggagaacatccaaggactggtgggcccttactacctttatctaagtgctgatcacactgttccaaaggcacttggaattggtagaatttagggacaggaaggaartagacataattgcacagtatcttacacgattgggatccccgaccaaacatctcactggagtcatgctgttttcggagagtatgaaactctattcttggcacagcaaatgtagccatgcaattttagcctaagaaaccacaacttggttcttaaaaacattaatatctcaagcacattctctcccaaaccacgttaatattcatcttcagagatgtgctgaattttattgctggggtcatggttcaattag

SEQ ID NO: 519856 - DNA, 575 bp, Homo sapiens
ttttatcctcaaacatttcttctctctctagtctctcgttttgaaattttaactagtccttatcattcttattcaccctttcatattttctgtcttgttgtgtctgtgtgcatcattccacatttcttcaaacctatattctaatttgatactttcatgttcagttgctccacaaaagtagggcctgtgtctctcttgctcactctcttccacacctgaaacctaggaggtgcttaaaagcatctcttgactgaatgaattagttttacatttggtgggatattgaggcttagagataccagagacttgcccaatggcccaccatagctgcacagtaggatggtacagccctaggtctgactccaaagcctgtggatcagtaaatgagtgaatgaacaaatgaaagtaaaaaataataagaaaacaacttcgtccagagagtaaaaatgcaagtcatgatactttacrcatcttctcctgatcaccgaaatgaagaagttttctcagagcttttctctctttccattcccaatatttagaattaatccctcaaaatatctctttatatgactcca

SEQ ID NO: 519857 - DNA, 594 bp, Homo sapiens
tttgtcaaagctcatccaactctacacttaaataagtgtattttaacatacttaagttacactttaataaacatgacttttaaaaataagcgttaaactagtggcaggcagaccagctaggagaacactgctgagggggaggagcagtgaagaaagggaagggacttgawgaggagtagcctgcctcagaaaaaggaacacgagagagacaggctttctggaagtgcaagagtttacaattataaatagagaaggcagaatgataaaatacatgagcagatgtgacaataaaactcaaagtagcccctccacagaggggaataaacaggaaggttctggtaagtctgacaaaagcaagggagaaaagcattcatgcaatcactcatacatccatgcgttgactcactcgtgtccactcgttcatgcatgatgcatgcatgcattcagtgtttattttgtacttaacagtgggaagtagccaagggcaaataagcatatggagagttgaacctaccttctaggagcagagttcctgagtgcaaagcccaactttagattggtttaatggttccatgtttacctcatagcagttac

SEQ ID NO: 519858 - DNA, 594 bp, Homo sapiens
tttgtcaaagctcatccaactctacacttaaataagtgtattttaacatacttaagttacactttaataaacatgacttttaaaaataagcgttaaactagtggcaggcagaccagctaggagaacactgctgagggggaggagcagtgaagaaagggaagggacttgatgaggagtagcctgcctcagaaaaaggaacacgagagagacaggctttctggaagtgcaagagtttacaattataaataragaaggcagaatgataaaatacatgagcagatgtgacaataaaactcaaagtagcccctccacagaggggaataaacaggaaggttctggtaagtctgacaaaagcaagggagaaaagcattcatgcaatcactcatacatccatgcgttgactcactcgtgtccactcgttcatgcatgatgcatgcatgcattcagtgtttattttgtacttaacagtgggaagtagccaagggcaaataagcatatggagagttgaacctaccttctaggagcagagttcctgagtgcaaagcccaactttagattggtttaatggttccatgtttacctcatagcagttac

SEQ ID NO: 519859 - DNA, 444 bp, Homo sapiens
cacccactttgaaagtatagaattcataaaatctgaaaccacatatgtgtataaaacccatgcaagagtgggtaggaactaaaaggaggagaaaaagtagtcctccccttcaggagtgttctctcttatcccagcccctttcatgtaatgaatgggtgaatgggtgaaaatgaaattatttaggcattgactgacaggtaggaacagaaactcaggcttctagtttattattatttattattattgaatctactgtttctaaagatgagaatsgcttttacttccaaagttctagaggagaggaacaacgttaagcaaccttaaacaaatattagcactgtgaaaggtgcagggtcatataaagaagtagaagtgccgacaatgaaaattctatccaactgtcaatcattccatatcattacttcatttttttaaataaaggct

SEQ ID NO: 519860 - DNA, 486 bp, Homo sapiens
ctgacaactggcactgcctctggagggacctctatgttctagctgctgtctggagattttattcatataccatggatttcttagtctagtctctcagttctcagatactactactaattaaacatgactcagaaacatgcatttttaaatgtaggccacaagatcctaaagccagtctgagataacattggatctrgaatattcaaatatgggctccaaattctgtaccattacacaaaaccattcaacttctgaaaaatgtggacacgtgtgagttctacctgcaagatgcaaatgtttcattgataggaaagaacctgtggttgggctggggtttgtgtgtgtgtgtttatatttatttgccacatcccacccttcctcccccatctcttggctcagaacctaacttcaactctcccgaatccccaaggccactcccaactaggattttttaaataccttaaccatttcaaactttccttccct

SEQ ID NO: 519861 - DNA, 547 bp, Homo sapiens
caaaatccactcagcatagtgtaataccatgtcacttagaaagagctccagcccctcctcactggagcaaatcccatctgctggccccacactcagaatctttaatggcccctcatagatggctgggtgcaggccaccgccttgaagagcagcagagccaggggttaagtgcatgagtcctcttctccggagaccattctgccttcrctagctgtgtaacctggggcaagttatttagtctttctgattcttacttttctcttttgtaagatgggctgatactaccacctgcccctcagagccactgtgagtaacctgtgagatcatgcatgtaagatatttagcattctgcgtcgcatacagcaagcccaacatacatgttggctatttcttccttaaatatgtattgatatttcaagtgatgaaagtagtacttgcgcaatacaaaacaactgaaaaatactagactgcgtataagaggaaaaaagacaaacatgtcctcttcccattctctccccaaagagctgacaagtgttcaaaacttcat

SEQ ID NO: 519862 - DNA, 608 bp, Homo sapiens
gttatttgttgtttctcataagaaacttacaatttaagtcaaatttaaaagatggtgggtgcttctacccaagtcttaacatataaacagtattaattttcaccagtctaggaaaatctcaaaataattttccttcaatacagacaggtgtactagagaaatttcagtgtacttctagctttatggttcycattaatttattcagcatagtttgtgatctgtctatatttgtagggggtgtaaatttatgtgatgaaaagctaataggcgaggacgatagtgtttccactttttactccccaggagacaggaattgtttaaggttagctatagtgagtccgcttaagtcaacgccaagacaactgagaaactggcgaaaaagcagtgagaaaggaagaagaacccccaattttttctttgattgatttgaatgtaggctagttatacctttttggctgtttttagtaagaactatgttataaaatgaattggaggacctgttaccaccagacttaggaggtagtagttttccagtgacttttaatttccctaccagtcttttttttttttttttaaatacagggttctaggttagtgtaggaaaaaaa

SEQ ID NO: 519863 - DNA, 596 bp, Homo sapiens
ctgggttggatcatggtcaacagagttggggttttgagggattttttttttttggttgcttttttagagatggagtctcattctgtcccccaggctggagtgcagtggggtaataacagctcactgcagccttcacacctaggctcaagtgatcctccagccccagcctcctgagtggctgggaccacaggcatgcaccaccacaactggctaatttgttttgttttaaaaacaaaaagggacagggtcttgctacactggccaggttggtctcaaacttctgacctcaagtgatcctcccacctcagcctcctaaagtgctgggattacaggtgtgagccaccatgccyggccaagtttttaagactcaaaggagcagcttcaatttctgaatgggccacgcaaaggaaaagctgatttccttgtctggaagagcaagggttccttcttcatcctcatgcaggctttctctaattcattctcatttcctcctctggaacctggggctaaagaggacttgtgactagggcccgggagaaataactaagtactttacatacttaattgtaccagaggtaaattaataacacacttga

SEQ ID NO: 519864 - DNA, 543 bp, Homo sapiens
gcagtttcctcaccagcatcaccctcccctgtcagctgtggtaggaaatgccccaggctgagacttggaaaagctgcgctggagtcctgatgctgtcacttagtagcggggcattccctyccccgaacctcagcttccttatgagcaaacgagaactggcccagcacatctctcagctcccttcaacactctgtgcttctgggattcctgaaagatttccccaagtaacagtgcattatcttcccccagcctcacaggggtttccttagagtcactgcccccacaaatagcctctcagagtaaaagtttcccccatggcaagtttgcctcctcagcttccttacctccgaacaggagaaattatttgccactccctctcagagtatgtggactccatgtaggaagtgctggatatcagaaagggagagaaaatcagacacaatctcatgtgaattgttctcccttgagacagtttttcctctttggagagaaagcatggaagttttctttatttgagatttctcctttagaaaaaaaaaaaag

SEQ ID NO: 519865 - DNA, 404 bp, Homo sapiens
gggtaccctgtttgttttgttttttgaatggcaggtatggaaaatccaacaagtaaaaagagtttgagtactactctgtgagttttctccttcatttactcttgccctaccattaccaacattcttccactaggtgtctctgatagaggtgaacmtatgtaggacattatcatccactgacagattagggcaagggaattctaagtccacaccactccttctcagagaagcctgaccaaacccagccatactcacgcagagatagtcttttctcgaggttctggaggaagtcctactgtcaaatgtttctggtgggagagaaggtctgtgcaggcctaacaagagatagcataatattatcgtttctgtaacacctcaggtttccacaaacatttctcttttca

SEQ ID NO: 519866 - DNA, 581 bp, Homo sapiens
tgttctatgcttttacactagtgtatttttacccacagaaatgtatgattgagttttgctttgtctgactaaatgatgacaatcctatatattgttcctcaacattttaaaactcaagaatagatgttttttcacgtcatacctgtaaatcttccttaatctttcaacttacacatggtagttagtcacagtgtagtttttaaaagcattctcttattgatgaatatttctgttattttcaattttggtaaccattatatacaagacagcaatgacaattcttgcacacatctccttgtgcataggattgggtggttctctaggattagggttgccagagttagcaaataaaagtacaggaaacccagttacatttgaatttcttagcatttagtaagtgttttagygtaagaatgcctcaaatattgcatacaggacacacttacactaaaaaagtatttgctgtggatctgaaattcaagcttaactgggagtccattattttatttggtaccaatatgaaggatgaatacctataagtgaatttttgttgttgagtgtatacgcatttaaaattttac

SEQ ID NO: 519867 - DNA, 578 bp, Homo sapiens
tgccgaccaaaccgtgaggagacagaacccccccgtccctgacccccgtgctgcccagcccattcatgtgcaagcctcactgaccttggcagggaaggcagcatcgacctcaacagaggtttctgaagggggtcagaatacgccaccccaaaacatgtcactaattattttgagctaaaggcacttaaaaatatagcaggtaccaagagggcatattaaccccctccctgtttttcctgaaaggagataaaacccccatatggaagatgccctcctacaccagaaggtaagtgacattcttatcatcagggatggatcagaggagccaagagcactctgtacagacacacctggtgaacacaacccctcccctcctgcagcctccccaygtggtttagttttccacaaccacctccgttcaacctctcaccctctcaaagaagcacaaagttctcccacttccttgtcttcatttccttataaggctcccatgtcacataaaacttcaatgaatgggtacgcttttctcctgttaatctgttttatgtaattctaaatctcaggcccaacctaaaaac

SEQ ID NO: 519868 - DNA, 665 bp, Homo sapiens
ctttttccctccttcctcacctggaaaatgcaaatttagcattcaaaaactgaccctgcgtagctcgccctaagtgccctcaggtgagggtccatcctgtatgccacctcctgtgattagaattaatctgctgtgggtgctgtagcccttcctactctgggcgctccttcagaagagggaccagatgtccttgaacatctaggactcctaagccctccttaaatatgtatataatggaycaataattgaaaccaaaaatcatctccccgcatggagatttgccatgtacatggcagagtttctactcaggcaaaatagaaaaccactagaaaacatctggttttgaaaatgatggagttatgagatgcattttttatgaggcagttacggtttaaaggaaaaattttaaataatgcattctgtaaattcctgaactatagtctttacttcatctatatggcttccaaggaaaattccatattaaaagaattggacttttattgttttatgcattaatttattcactcacttattactcaacagtaaatcactttaaatatctattctaaagaattatatgttttaaatgcctacaatagggcatgaaaatatgaaagtatcaccccctagcaggattaagtggaaatatcatggtatgataataa

SEQ ID NO: 519869 - DNA, 489 bp, Homo sapiens
ggtctggaaacagaggctcaagggttaggagtgcaaaatgggtgtctggttctatcaggcctgggttgtgtgaggttggagtccttgacctcaggtcctctcagaacgctgcagagcactgccttgccctgggtctggtgtggggagggcagcccccatgagactggccaggcttggcctcattattgcctgtggtcggggcttgaagatcacacaagggattttggctggagtggcttcctcagccttgctgactcaggaacacytaagatgtgcaagggagtgggttggtttaggtcaactgggttaccctgcgcagacacaatttgatctcctcagagctggcaatagtggacaggatctgcctcaaccccttacacggtgcatctctgtggggatgtgcatggcaatgtccctccctgtgtgataggaactaggatggactgagtgtcagactcgcccatttctttccctcctcattccagtttt

SEQ ID NO: 519870 - DNA, 547 bp, Homo sapiens
gccttctctctggaaggaggcaatacaactttctctcagactcactaactcttgttatcagcaacgctcaaaaactaatcaaccaattctattggatgtgctatacaaatctttaacatttccatgtacgacattagtgtattcagatttctatatgaaatcaatagcggagaaaatgtaaacatagaaaaaaagtgaaaatgagtaagaggcaaagagaatgagtgagaggcaaaacacagcagaagaaaaaataatccgggttacagccccttgttatttcctttataaataacaactatgataacttaccatatattttttgttgttgttaacttgtttattatctgtctgtccagccagactgccagtctatgagggcaggtaccatgtcaattttattccctaaaatttccccatggtgcagaaattgctcaattaatatatttgttaaataaacacatgttcttatacttcactgttcatctggactgtgcrtgccagaataagcttccaccactttaaaaaatatgtattaattccacag

SEQ ID NO: 519871 - DNA, 534 bp, Homo sapiens
  misc_feature (1)...(534): n = A,T,C or G
ggacagcaacagggggaaggcagagtgcagctcccaccacgccgtggtccttggggtcctcagttggagatgagggctgcagctccccacctaggtcacagcccatgcccctctatcccagcaaccactggaccagcctntaccaaggccaccaccaagacagcaccaggccaccttcccaccagtcagcagcttcctctcaacctctattcgttagtaaataaattctgattcatgaagccataacaaaacaaactaaacaacaaaaaaacctatctaagacaccaacatccctgaaaaacaaacaaaccaaacaaacaaacaaaaaacaaatggtgctctgcattccctaaagtgaattcctttgcaagtacatgagttgctggggctgctgtaaggaagggccatagactaggtggttaagtttactgccccccagttccagggctggaagtytgggatcaaggcctccaagggccacccgcccccttagggtgntagggaagggtctattccagcctctccttactcata

SEQ ID NO: 519872 - DNA, 563 bp, Homo sapiens
acttgtgggcctggtgcactgtgttccctgagcccacagtgaggtttctggtgacaccaggataaggcttctgaaccccaggagcatctctgatcctgtgcattgattttttttttcatttttacttttttaaaaaataaaagtacttcattttgcctaaatacaaaagttccttatgtataaaggaaataaatttgataacaaaaccctttagttttctaatagggatacctttttaaaaaggtaagctcgggccgggtgcggtggctcatgcttgtaatcccagcactttgggaggctgaggctggcagatcacgaggtcaggagatcaagaccacggtgaaaccccatctctactaaaaatacaaaaaaattagccgggcgtggtggtgggcacctgtagtcccagtaactyggagaggctgaggcaggagaatggcgtgaacctgggaggccgagtttgcagtgaaccgagatcatgccactgcactccagcctgggcaacagagcgagactccatctcaaaaaaaaaaaaaaaaaaaaaaaaaaaaaggtaagctcat

SEQ ID NO: 519873 - DNA, 563 bp, Homo sapiens
acttgtgggcctggtgcactgtgttccctgagcccacagtgaggtttctggtgacaccaggataaggcttctgaaccccaggagcatctctgatcctgtgcattgattttttttttcatttttacttttttaaaaaataaaagtacttcattttgcctaaatacaaaagttccttatgtataaaggaaataaatttgataacaaaaccctttagttttctaatagggatacctttttaaaaaggtaagctcgggccgggtgcggtggctcatgcttgtaatcccagcactttgggaggctgaggctggcagatcacgaggtcaggagatcaagaccacggtgaaaccccatctctactaaaaatacaaaaaaattagccgggcgtggtggtgggcacctgtagtcccagtaactcggagaggctgaggcaggagaatggcgtgaacctgggaggccgagtttgcagtgaaccgagatcatgccactgcactccagcctgggcracagagcgagactccatctcaaaaaaaaaaaaaaaaaaaaaaaaaaaaaggtaagctcat

SEQ ID NO: 519874 - DNA, 635 bp, Homo sapiens
aacccctaactactatgctataaggagactattcttaccaataccagttgaggccccaggagtactaaatgctgaagatgcagaagttgagagtaattggaggactcagcaaaggtttagagttggcctgcgactttagttggaatgaggtgaaaattataattgccacccaaccagtggggagtgggaagattactaaacttggagtcagctgacctgatttagaactcactccactactaattagctttgtgaccttacagagattgcatagcctctagcctcagttttcctctctataaaatgggtatagctcctgactgatctaccttactgggatgtaatgacaatgagaaaatrtgaagagcagaatgctttaaacatgtgggctttgataagtggaattatgaccacgtgaagtcattcccagaagcaagagtctctcccaaattctttagattttttttttagcatctttttcttccgtcttactaggactctaatgaggatgcctatgagtataatacatggaacagttcccagcttagaatatatctctgatttttacttaaattcgtcattgcccatattcaggtttctattcagtccaaattatatgctaatgaggatggcat

SEQ ID NO: 519875 - DNA, 498 bp, Homo sapiens
gtgaatttcacttttgtctttccaaaatggttctgggcatcagatagagcacarcccttgcaccaacttgctcactattccctctgactgtgtgccttctgcacacggagcacaggttgccaacaggctgctctcaaatgtgcctgcatccttctgctccaccaatcaagttgaatgctttcctagaattgcatttgctcccaaacctgtttatgccagttgaacttggataatataattattacataaattgatgaaatatgagcataaaaagaaagttgtttccataaagactatattggaagtttcaaaagggaaattgctagcctgggcaacatggcaagacccagtctctccagaaaagaaaaagcaaaattagccaggcatggtgacacatacctgtggtcctggctactcaggaggctgaggttggaggatcacttgagcctaggacgtcgaggctgctgcattgagccatgttcacgccactgcactcca

SEQ ID NO: 519876 - DNA, 598 bp, Homo sapiens
ggtataaccgtctcgaaattatgtgagttattcatatatgagtgtttgctgtttttgtggctcggagaatccgttgtcatcatgttttcagagttcagtacagcaacgcaggctcttcacacagctctccttgaccatcactaccatgaacttgaacattggttcgctgtcactggctgtaatgattttgtatccccatgtagttttgaagatgtatttaggtgaaatagttcccgaaaggaacctggccttacgttgagctgtttcccttgcacattgggctctgtttataaagagataaaagggggagggaataagtactgcaggctaatgagcccaccagcactccaactaccccatggatagttgctgctaatttagttgccatgaatacatttctggaaggttgtctatgttgcaaccaagttacttttcatatctaaattttcttagggtggwgcagttttgaacacaattcttaaagacctcgttagagaagtgggaggtgttcaaagagaaggagaaccatccaaggggcatctttctgtttggattcttttgagtttcatttatgacagctcttacttaaaggcccttg

SEQ ID NO: 519877 - DNA, 528 bp, Homo sapiens
actttattgaagtttaacagaaaagaaacccttgtttgaaaggaagagattggctatatttagtactgggtaggatgtcagttctgaaaataaactgctcccagaactgaaagcaatcctctgcactgttgtcacctgcagcatgctggcctcccttatagaggagagtggaamatggtcatatcagctacctcagagtttctgacattcacaaggacttgccccactttgtctccttgtcccattcctaagttttaaaacttctgattaatgagaaaataatttatacagctgagaaaagtgaagtatatgttggtgtgtatgtggagcagggaagtatcctgctaagttaatacaggaatctaaacaccatgtggccaggtgcttaatgcaatattcaccacatccatggtacacatctggcataccactgtagacacagggacctagtcagaagtatgacaggccatatataaagatatatttgaagcatccgataggtgtcatagaggtaagttctctatgcag

SEQ ID NO: 519878 - DNA, 629 bp, Homo sapiens
ccagagaggtataatgaggcgtgtccaacccccacttcccttcatggcctgaaccagtctttcaggttaaattttaagagccctggccgaggaggaagtccatttagatggttgagggggccttagaattttatttttggyatacacttttatccccacaattccaataaaatgacacttgaaaatatcaacaataatatgattcatggtcccagtcaagttaacattttccatcttactgttacttcaaccttttaagcagcatatgtatatctgaccaagctcctcttgaaacactctcctatttcagcttctgtgaggccactttcacctgttttttctcctacctctctacacactttattgacttgtcctgttatggttgttattcctcgataagacctctgaatatcgaaattcctgtgggctagatgctggaccctctcgtatacatttctaccttggatgatctcattcctgtccatgggtttatatgccaactatgtgctcataacatccaaatttatatctgtaactctgacatttatgatttctggcatctaattaataaatgtttgttttaaaaaatgtcacacacacacatacacagaaagttcccattatccaag

SEQ ID NO: 519879 - DNA, 491 bp, Homo sapiens
ccctggcccatggccactgctcaacccttgggccctgtcagttcagggctgtgcagaaggagagttgcctgtgctcaggctcaggggttccgtccagctaaggaggcctactaggggactggggaaaggcctcatgaaggaccaggcctgtgatggggagggaagatggcagaggggacagtgggaagcagagcagcaggggtctcctccacgcctctctgtacttctcccacccacccttgcctrctcccctctgccctgggtatgtgcccttgtccacccaacacctctgcagtgccaagtccagccctgacttcttcctgagctgtggcccagcgttcccacaggcatttacctcacggatgcagcactgcccctcatcctcttctctgaaagtgtgtgggaaatgcttcttggtgccatctctctcccaccctgccttccctgcaccttctctatgaggtgtctgttgtctctgtacttgcctccag

SEQ ID NO: 519880 - DNA, 369 bp, Homo sapiens
cagccccctgagatatttttagagactggacctgaggcctctggaggctactgatgatgcctgctgtgaacgcagacactggtgtgatgcgatgcctgcgcctgcagcggcagtgccctgggcactatggttttgagcttgtacccagcgctgcttttgccttgctctgtgaccccaggcaagctgcctcacctctctgggccagtttccccatcgtacagtggtgctgcacaccctggccctgkccccgaggtggctgggaggtggctcctcaaacagccgctttctcatcagtgcccggtgctgggtcagggatcgactgaggctctgagctaactaggaaacacagtggccttggagggctgggga

SEQ ID NO: 519881 - DNA, 369 bp, Homo sapiens
cagccccctgagatatttttagagactggacctgaggcctctggaggctactgatgatgcctgctgtgaacgcagacactggtgtgatgcgatgcctgcgcctgcagcggcagtgccctgggcactatggttttgagcttgtacccagcgctgcttttgccttgctctgtgaccccaggcaagctgcctcacctctctgggccagtttccccatcgtacagtggtgctgcacaccctggccctggccccgaggtggctgggaggtggctcctcaaacagccgctttctcatcagtgcccrgtgctgggtcagggatcgactgaggctctgagctaactaggaaacacagtggccttggagggctgggga

SEQ ID NO: 519882 - DNA, 483 bp, Homo sapiens
ctgctggagcgagggccggccacgtatcacagccaaggagatgagcacaagcactacttactggcctaggttgtcagagaagttgatgctctcactcatctttcctccaatctttcccctatgcctggttgtggtattaagttacatgcagacaacaggggccagaagatgaacaatggcccatcccactctaggcatggctcctctccacaggaaaactccactccagtgctcagcttgcaccctggcacaggccagcagttgctggaagtcagacacctgcagatcaagaccacagcatcaagaccctgtgacctctcaaaggcctggtggaaaggacacgggaagtctgggctaagagacagcaaatacacatgaacagaaagaagaggtcaaagaaaaggctgacggcaagttaacraaaagaaaaatggtgaatgatacccggtgctggcaatctcgtttaaactacatgcaggaaca

SEQ ID NO: 519883 - DNA, 273 bp, Homo sapiens
aataagaatctccagggcttcacctgttagactggcaaaaaatccaaaagtaaacactttgtggagaaacaggcactcctagacattgctggtgggatacagaacagtacaattctgatggtaatcagttaacaaattaaacatatttattttatacttttaaacccaggaatcccatatttaggagtctactgagaccaaacagcatatgctcckggtgtttccctataatccgccactactgttggagcaagagggcccagcagtgtcccc

SEQ ID NO: 519884 - DNA, 429 bp, Homo sapiens
gcagaaccgcaggcccagatgtcagtttcatggttaagggtttaggtttgggttagagtttgggaktagtgtttatggttaaaattagaggtacagtaatggttgtaattggagttaggtttgggtttggctttgactttggggcttggtatggttcaggtttatgcctgggttgggctcctgatttaagcttggttttaaagtttagaagtttggactaaggttttattcagcttcaatgtttggcttcaggtttcagcttgggtttagagtttaggttttgggtcaggttacattcggtttaaagtttgagtttgtgttcaattctggttaaggattttggattggtgtaggggtcagggttcaggtcatgatctgtttggaattcagagtttggatttgggttcaagtttgggatcgaggtttatg

SEQ ID NO: 519885 - DNA, 683 bp, Homo sapiens
tgcagtgtagcgtctgggcctgagttagcaaagggtggccagagcagcctcgaggaggctgtagaaggggcacacacctttttgcggtgattaggtcagacggcccttgacccccaccccttcccggccccacagtgggattgattgtgttaatacacgaactcgtgtaactgcaaagttccttaaaagttagaattttaaatttctctgctttaagccatgcgaagcaccaatcttgtgaatacgcttttccggccartgcacagctcttgtcttgagaaggagccttcattggggggttacaggagcagagaaatctaaaacatgaatttcaaatgtggcgctctgtgccctttttcaaaagaattctaatttcttctctctgctcggtctcccccttttgtaggtgactttttcacagactgctacggctatcatgattttgggtcttcctagagcgtctaaaagtattgcacacaaaatcaactttttactccaatttcctccaactccaaaacccaaagtgtccgtgctgtgtccctgtgcttcactgggtttctcaaccgtggcttttcaccgcagcttgtctgaaactcttagcctgcagaatttaagacaatggcagtttttatcgtgatttgcctttgaacttggtcctattgaagttcacaataagtggaaaa

SEQ ID NO: 519886 - DNA, 683 bp, Homo sapiens
tgcagtgtagcgtctgggcctgagttagcaaagggtggccagagcagcctcgaggaggctgtagaaggggcacacacctttttgcggtgattaggtcagacggcccttgacccccaccccttcccggccccacagtgggattgattgtgttaatacacgaactcgtgtaactgcaaagttccttaaaagttagaattttaaatttctctgctttaagccatgcgaagcaccaatcttgtgaatacgcttttccggccaatgcacagctcttgtcttgagaaggagccttcattggggggttacaggagcagagaaatctaaaacatgaatttcaaatgtggcgctctgtgccctttttcaaaagaattctaatttcttctctctgctckgtctcccccttttgtaggtgactttttcacagactgctacggctatcatgattttgggtcttcctagagcgtctaaaagtattgcacacaaaatcaactttttactccaatttcctccaactccaaaacccaaagtgtccgtgctgtgtccctgtgcttcactgggtttctcaaccgtggcttttcaccgcagcttgtctgaaactcttagcctgcagaatttaagacaatggcagtttttatcgtgatttgcctttgaacttggtcctattgaagttcacaataagtggaaaa

SEQ ID NO: 519887 - DNA, 519 bp, Homo sapiens
tataaccatggacaaggcagctactcctactcgaactcctacaactctcccgggggcgggsgcggatccgactacaactacgagagcaaattcagtgagttggcttccagagcccctcggccgggccagggtccaggccccagcagtgcagcccacggagtggcagaagctcggcactgcccagacctctggctgagggccttaggaggaggacaagtggtgctggctgcgggcgggtgctaggaagatggggcgtgggacctcatggtgccgtctccgccactctctctggtgtgttctccgaaggcagggtagctgaggcctctgtcccgaggccctggctgtgggtgaggctgcaaggtgacttcctgggacttgctctagagagttttgcatccagcccctgcaagagcctgacctctccgccaccgcctttccgcttcctcatgcgcagacccagcaggcccgggctgcaccagtgacccagtggggctgagtaggtgtgtccttgggacccag

SEQ ID NO: 519888 - DNA, 521 bp, Homo sapiens
tacagacagtgggacatacacttgttctgccacaaataaggcagggcacaaccaatgcagtgggcatctgacagtcaaaggttggcaaattttatttccacttatcaagaacttacaaaatatttttgtttcatttctaaattttcacctttattgctaagttataaaataaaacttcctattttcttttgcttsttttttctttcacctcagaacccccttactttgtggaaaagccacagtcacaagatgtcaatcccaacacaagggtacagttaaaggctcttgtgggtggcactgcacccatgacaataaagtggtttaaagataacaaagagttacactcaggagcagcccgctcagtttggaaggatgacacctctaccagtctagagctctttgcagccaaagctaccgattctggaacctacatttgccaactaagcaatgatgttggcacagcaaccagcaaagccactctctttgtaaaaggtctggtctctacatctcctcactttctt

SEQ ID NO: 519889 - DNA, 460 bp, Homo sapiens
gaaaagcaggtactgctcaaagaagagcattctgacaacgtggtgatgcccccagaccaaatcattgagtctaaaagagagcccgtggcaataaagaaagtgcaggaggtacagggaagggaccttctttctaaggaaagcttgctttctggtattccagaagagcagagattaaacctgaaaattcaaatctgccgggctttgcaagcagcygtggccagcgagcagccaggtcttttctctgagtggctaagaaatattgaaaaggtggaggtcgaggctgtaaacatcacccaagagcccagacacatcatgtgcatgtaccttgttacttcggcaaagtctgtaacagaagaagtaaccatcattattgaagatgttgatcctcaaatggctaacctgaaaatggaacttagggatgctttgtgtgctattatatatgaggaaatagacatcctaa

SEQ ID NO: 519890 - DNA, 699 bp, Homo sapiens
ttgtctctgacgaaaaacaagatgagagtctgaaaccatcagaggaaaaagaggagtcttcctctgaaagtggtactgaggaggttgctacagtaaagatacaggaagctgagggtggcttmatcaaagaggatggccccatgatacatacacctttagtggacactgtttctgaggaaggtgatattgtacacctcacaacatccataacaaatgctaaagaggtgaattggtattttgagaataaactggtgccttcagatgaaaagttcaagtgtttacaagatcaaaatacatatacgctagtcatcgacaaagtaaataccgaagaccatcaaggagagtatgtctgtgaggccttgaatgacagcggaaaaacagcaacttcagccaaactcactgtagtaaaaagaggttggattttaaggataaaatagatcaaatgctaacattcactggattgtaatgatttagcttgcatcacttaaattttcacttatctgccacttccagaatgtaatttatttagagtaagaatgaaatcacagacataatcatggttatgaactcaccttttcccttactgccctgttgggtgctatgctatcatatccatggtactatttattttaaaaataaaacatattttcatatgtttcataataccaatagataagcttttagttaattttcatatga

SEQ ID NO: 519891 - DNA, 598 bp, Homo sapiens
cccagaaaagaaggtgcctgaagctattcctcccaaaccggaaagtcctccccctgaaggtaatgccaaagctatacaaactataggagaaaaataactgttattttaactaggaaattacatgttwaaaatcctactacataaagatgatataattctaaagaaaacaaatgtcaatcgctatccaaaatatcttggtgggtgtttatatgcaaaaggcatccatcattttcaccttttctaaacacaaattacaaatatctttgaagtgcctgaagtgctgccaccgaaggaagtggtcccagaaaagaaagtaccggtgcctcctgccaaaaagccagaagctccacctcctaaaggtaggtatcattacacattgtcagtcggggggccctggggaaagactgcatagaagtgtccgccgatctcacaagttgtatttgcttgggtaaatgtggagtcgatattccccctttatagcttctaactaaaagatactaatatcttcaaagttcctgaagctcctaaagaagttgtacttgaaaagaaagcatctgtggctgtgcccaaaaaaccggaagccccacgtgcaaaaggt

SEQ ID NO: 519892 - DNA, 593 bp, Homo sapiens
cccagaaaagaaggtgcctgaagctattcctcccaaaccggaaagtcctccccctgaaggtaatgccaaagctatacaaactataggagaaaaataactgttattttaactaggaaattacatgttaaaaatcctactacataaagatgatataattctaaagaaaacaaatgtcaatcgctatccaaaatatcttggtgggtgtttatatgcaaaaggcatccatcrttttcaccttttctaaacacaaattacaaatatctttgaagtgcctgatgtgctgccaccgaaggaagtggtcccagaaaagaaagtaccggtgcctcctgccaaaaagccagaagctccacctcctaaaggtaggtatcattacacattgtcagtcggggggccctggggaaagactgtatagaagtgtccgccgatctcacaagttgtatttgcttgggtaaatgtggagtcgatattccccctttatagcttctaactaaaagatactaatatcttcaaagttcctgaagctcctaaagaagttgtacttgaaaagaaagcatctgtggctgtgcccaaaaaaccggaagccccacgtgcaa

SEQ ID NO: 519893 - DNA, 593 bp, Homo sapiens
cccagaaaagaaggtgcctgaagctattcctcccaaaccggaaagtcctccccctgaaggtaatgccaaagctatacaaactataggagaaaaataactgttattttaactaggaaattacatgttaaaaatcctactacataaagatgatataattctaaagaaaacaaatgtcaatcgctatccaaaatatcttggtgggtgtttatatgcaaaaggcatccatcgttttcaccttttctaaacacaaattacaaatatctttgaagtgcctgawgtgctgccaccgaaggaagtggtcccagaaaagaaagtaccggtgcctcctgccaaaaagccagaagctccacctcctaaaggtaggtatcattacacattgtcagtcggggggccctggggaaagactgtatagaagtgtccgccgatctcacaagttgtatttgcttgggtaaatgtggagtcgatattccccctttatagcttctaactaaaagatactaatatcttcaaagttcctgaagctcctaaagaagttgtacttgaaaagaaagcatctgtggctgtgcccaaaaaaccggaagccccacgtgcaa

SEQ ID NO: 519894 - DNA, 593 bp, Homo sapiens
cccagaaaagaaggtgcctgaagctattcctcccaaaccggaaagtcctccccctgaaggtaatgccaaagctatacaaactataggagaaaaataactgttattttaactaggaaattacatgttaaaaatcctactacataaagatgatataattctaaagaaaacaaatgtcaatcgctatccaaaatatcttggtgggtgtttatatgcaaaaggcatccatcgttttcaccttttctaaacacaaattacaaatatctttgaagtgcctgatgtgctgccaccgaaggaagtggtcccagaaaagaaagtaccggtgcctcctgccaaaaagccagaagctccacctcctaaaggtaggtatcattacacattgtcagtcggggggccctggggaaagactgyatagaagtgtccgccgatctcacaagttgtatttgcttgggtaaatgtggagtcgatattccccctttatagcttctaactaaaagatactaatatcttcaaagttcctgaagctcctaaagaagttgtacttgaaaagaaagcatctgtggctgtgcccaaaaaaccggaagccccacgtgcaa

SEQ ID NO: 519895 - DNA, 481 bp, Homo sapiens
atcactaggttttctctgttttcaactagctgaaaataggaactctagttctaaatattcaaagtctaaatattagaaaaataaggagaggggatatgacaaaatgcttttcaaaatacatgcctgaggtgagactgcttgtatgtttgcatgtggtagcttccagaggaaatcttcagytttaatcttcaggttcatatctggagatataaattaagaacacaatgtcaggataccttttgttgttgttattaccaaataagtttacttgaagcagtggcactatatttctcacttcaaattactgttacggtagaagttggacacattcaactttgttttgatggtgactcagaggggatttttacatcaggtaggaggataggccagatcactgctaaggctccaagtctgtatatttggcatttagacctgtgataacttcatataattacctcaatcatcatgttgacaagaacag

SEQ ID NO: 519896 - DNA, 605 bp, Homo sapiens
caaggaggaaactgtaatgataaaaatgagcacagtttaataatacctatcagatactgaatgcttaatattttcacaggtactgcactgtttacacgcattatcttacttatcatattaacagtcttgtgtagttattatctgcaatttactaatgaagaacctgagcctgattccaaagcctcagttgttaactgatggaaaggaatgacagaagatagaacaggaagagataccaatttttttgtgatttgttttcaacgtgttctcctgatattttagggaaatcaagagaatgagtggagaggctctaaactcaagaaggggagggagcaatctgtttagctcacaggtgtcttctcagctcccagacagcgcttggaacacagtgtggactaaatagaaattctggttgctgaagtatttcagtagctatttcaggtggtgctctcaaccctggtttcatccrttttcctgaacacttcagtgctgtgcactgttctaagtatgactggtatttaagatggcatgctatattcgctggagggattaatgatattttttgagcaagccaaaacaaaggaaatgtcacccaaattcctcag

SEQ ID NO: 519897 - DNA, 510 bp, Homo sapiens
tagccaagaccttatagaagagaagggcccagattacagggctctttacaggagatatgcatttgagtaggcctgaagtaggcaagaggctattttcagttgctttcaaaacaccctagtgaccagcagggtattggagagtgctgacaaactagattagtgaaatcactatcacatgcattaaagcaggtcaagcaaggaagtggttcaccataaaatacaactccctctaagaatgtgtggatgttggcaattacttagcccaaatgatagattagtttcactgataatctcaatgcattaacaacaccccaaagggaacaaacaccgaaaccatcaaaatgagaagtctacctcaaaaaattttaagaattggttgtggggaataccttctkgtaaagtacaagaaaaattgattgtaaagatgatgatacgcaccagctcctctttccatactcccttatgcatatacatttcagttaaacccacaagctcagtctgtatattcag

SEQ ID NO: 519898 - DNA, 588 bp, Homo sapiens
cttcatctctgaaatgttcttttatataaaaaaatctgagcccaaaatgacaaaatgtttacaattgatctttctgagtggtatatatgggtgtttgttattctctctacttttctgtattttaaaagcttagaaagacaaaagaaaaagagagaaaggacagagaggtccgccaggaagtttattataactagcattctcgaacagccctcaagagagtggtgttaaagcctctcttccccttggagttgcaggaaaagtaattcasgatccttctttatttttacagacctcgcctatctcccaagtcagcagctcaccaaggttcccatgagtgtgtggagagaagccagtccttgaccttgcctgggcatcttaccgtgtctagctccgattccaagctgcagtttttgatttgcgggaacatctcgctgtatttgcttgggtaggcagatgcgaggtagcccttcacctgctccaggttgctggctgtcaaaaagccatcttcaaggtcaaaagtgttggtcagcagcagactcaccctgcagagcagaccatcggatcgaccttcactgatcagaaaggcag

SEQ ID NO: 519899 - DNA, 608 bp, Homo sapiens
catttatctgtgcaagcttctagcttgmttatttatgcttgcagcttgacttttcaggctgctttctgttggaaaagaaatggttttgggggctgctttttattaaaagaaaagccttaccaaggactcctgtaccctatctgcctaaattttttttaactactatattaaaaggtctgtaagtgggagctggccctaaaagtaggttgtagagattatttggatgtgccaacaagcttcatctgcagcttggactgtctccattggaaggcctctggcagattttgtaaaaagttatataacaattttactataggaaaaacttggctacagatatgaatttatattacccatcattggctggttccttatcctgaacattggtttccttggaatctgattttggcttgtttggcctttaaaaaccccagaagaatggggtttctgccagattattttctggttttcagtctcactgaatgtcacaaaggccttggtttatggttcccaactggtaaagaaacgtcaaactttgcctctcttagttccttctacatgacaatgggtggcagttgctcatatggaagcatttcttttccccctaaagc

SEQ ID NO: 519900 - DNA, 589 bp, Homo sapiens
atacacctttccaaggtcttgtaatactttcacattgtgaatakacatctttacaagacccagtagtacatgggtcaagtgtggcaaaacagacatcgcgagccagccaggagtcgaacctagaatcttctgatccgtagtcagacgcgttatccattgcgccactggccccgacttgctaaagccttctccgtgatagctgatcacccttatacagtttgaacgggcttccgggtaccaacgatccattttgcccttgcgccgcgctcccgctgctctgcctttccccaaaacgcgccccaccaatccgcagcggcttcgtcacggcgctcttcgtcgcactccaacccgccgcgtcggcggcatctctcgcgtgctcttgcttgcgcactaatttgtcctccaccgcctcccgttcaggccggctctcctgcgggccggggaaaggggtgggaagaggctgggagctgcggccgctgtgccagggtgaccggtagagttgtagccgaggtggcggcgcggggcggggcgggcggagagagaaggaaggaggtggttgtgcaggatggcgacggcggcctacgagcag

SEQ ID NO: 519901 - DNA, 505 bp, Homo sapiens
caaaacagacatcgcgagccagccaggagtcgaacctagaatcttctgatccgtagtcagacgcgttatccattgcgccactggccccgacttgctaaagccttctccgtgatagctgatcacccttatacagtttgaacgggcttccgggtaccaacgatccattttgcccttgcgccgcgctcccgctgctctgcctttccccaaaacgcgccccaccaatccgcagcggcttcgtcacggcgctcttcgtcgcactccaacccgccgcgtcggcggcatctctcgcgtgctcttgcttgcgcactaatttgtcctccaccgcctcccgttcaggccggctctcctgcgggscggggaaaggggtgggaagaggctgggagctgcggccgctgtgccagggtgaccggtagagttgtagccgaggtggcggcgcggggcggggcgggcggagagagaaggaaggaggtggttgtgcaggatggcgacggcggcctacgagcag

SEQ ID NO: 519902 - DNA, 650 bp, Homo sapiens
gctgctctctcaagatagctgactggttttaactagtgttagtacacttctcctaaagtttaaattatactactctttataccatgttgatacaacctagtgtcttacaagagctttaatgtgggtgtattttcagttatccttgatctttcagtaatgttttatttgtaggtagagattgcagacccatttgaatagactgaaaagctaaaggtcatgaatagtttgaatgtaaagatgatgatgccaaacagtcatcagtaagacacatgataaaatacttccacgcaaagtcagtactgatgagcgactgacttgctgacagtttcttagccagtttcttttcaccactgcgaatgcagactatgkcattcctaatgggattattttttcttccatgaaaaaacctaacatacattctaggagttatcacagttttattgctgttacactccagtttacataacttatagctctatcaatagtgcatttaagttaaggaatgttgcttttcttagaacaaatcatgcaaattgatgtagtcaaagtaactattgaaatcgaactaaatttctgtttctgttggtgagctttttgtatgtgatttttctttctttcctttcttttaaagtcaagaaagatgttcctcc

SEQ ID NO: 519903 - DNA, 650 bp, Homo sapiens
gctgctctctcaagatagctgactggttttaactagtgttagtacacttctcctaaagtttaaattatactactctttataccatgttgatacaacctagtgtcttacaagagctttaatgtgggtgtattttcagttatccttgatctttcagtaatgttttatttgtaggtagagattgcagacccatttgaatagactgaaaagctaaaggtcatgaatagtttgaatgtaaagatgatgatgccaaacagtcatcagtaagacacatgataaaatacttccacgcaaagtcagtactgatgagcgactgacttgctgacagtttcttagccagtttcttttcaccactgcgaatgcagactatggyattcctaatgggattattttttcttccatgaaaaaacctaacatacattctaggagttatcacagttttattgctgttacactccagtttacataacttatagctctatcaatagtgcatttaagttaaggaatgttgcttttcttagaacaaatcatgcaaattgatgtagtcaaagtaactattgaaatcgaactaaatttctgtttctgttggtgagctttttgtatgtgatttttctttctttcctttcttttaaagtcaagaaagatgttcctcc

SEQ ID NO: 519904 - DNA, 365 bp, Homo sapiens
tcacaagaccaatatttggtatactgggcacaatccatctggtggcaggtaagagaaaataagctaagatgggcaaagaaggtaattagcaaggtagttaaattgttaatattagagtgagtatacgatgaagtaatactttgtatcatgctttaagcagtaaatctcttggttaagtatttrtcattaatttttaaaagaaatactccccaaatggtaaaatttatcagcgtgagcttctattatttaaaaaaaagttttgtattttgttgtgtttcagttagagttgaaatccttagctagataattttcacaaatggagtatgtaaataaaatttttttttttttttttttttttgagttgg

SEQ ID NO: 519905 - DNA, 304 bp, Homo sapiens
gagatatatatacctgttgagagtgattgttttcttaatgtaattttagttacatgtttgctatttaaaaattttaagttgtatttttacacccaatttataagaatgtttctagaagaaaatatattattctaaaacatataacttaggataaacattttaaaaaataaaattatagcactgyctacctgagtaaaactacaggatatgctttttatactttagaatttcttttttattatatatatcaagaaatatatatcaatatcttcattctctactaggcatattttaaagaaataaa

SEQ ID NO: 519906 - DNA, 494 bp, Homo sapiens
gctgacaaaactctcccttggaggactggttctcccagagtacaaaacactggaagccagagttaatggaaagattttatttagagccgaactgagcacaatcagtcttccaagggtagacttcactcatggctggtagattacatcaggtgtgcaggcagaggatgggtctcagttcaaatggtaaaaggacaaagtcacaaatcagaagagagcctgtaattaagggccagagtgacacctgggatgccattacaagcttgcttaatgctgagaaggggccataggcagaagttgtcgattccactaccacacacaggaaaagccaaactactggccagcaaattgcactcagaggaataaatgatcatgtttacatttttatgaaatttcccctcttcctcctaccttgcagatggatttgaagccaattttttccaaagctgttttatgttgtattctttcaygcctgtccagttactgcgaaattggaa

SEQ ID NO: 519907 - DNA, 479 bp, Homo sapiens
tgtaggaactgagaggtgaatacttcacattctttccaaccacaactatgagttcaggcacaaagagtatccctgaagcttagagtgaaggaagaataccaagaaaacctaattttacactgaaccaaaatcttgtgtgcccttcttaagtgtaagaacatctcaacttaaaaatactatagactcaattcaaatagccctctaagaaccatgtcaactggttcatggagttgcaacggtggtgaaacccagtgcrtaagcagttccgtactcacaggctgggatgcctctggagcatgctctgatatttgatagctgcctccaggaccaagggatgtcttttttctgtcttttctctgaagagacaagtagaacactgatttgtgcccaagctttcacttttggattgtaaagagaagttctcttctaccttattaggagttagtaattgttctgtcagctttttctaagttgtcatc

SEQ ID NO: 519908 - DNA, 479 bp, Homo sapiens
tgtaggaactgagaggtgaatacttcacattctttccaaccacaactatgagttcaggcacaaagagtatccctgaagcttagagtgaaggaagaataccaagaaaacctaattttacactgaaccaaaatcttgtgtgcccttcttaagtgtaagaacatctcaacttaaaaatactatagactcaattcaaatagccctctaagaaccatgtcaactggttcatggagttgcaacggtggtgaaacccagtgcataagcagttccgtactcacaggctgggatgcctctggagcatgctctgatatttgatagctgcctccaggaccaagggatgtcttttttctgtcttttctctgaagagacaagtrgaacactgatttgtgcccaagctttcacttttggattgtaaagagaagttctcttctaccttattaggagttagtaattgttctgtcagctttttctaagttgtcatc

SEQ ID NO: 519909 - DNA, 627 bp, Homo sapiens
tcagatcaattggcttagaacaggaatgtccaatcttttggcttcccggggtcacactggaagaagaatcgyctggggccgcatgtaaaatacactaactctaaggatagctgatgagcttaaaataaatcgcataaaaaatcataatatttttaaaagtttacgaatttgtgttgggccacactcagagccgtcctgggcggcccatgggccgcaggttggacaaacttggcttagaatctaagaattataaagctcaaggagaaaatgattctgaggcagggcggtttcatagaagaggggagagccttgaagcaaagtatgcttctgaaactggtggagagttgctggggaaagctttcaagagaatggagagcagaccatttggactggacctagagagaaaagtaatagcatctgctctatgccacctgccagctctctccttcatccttcagtgttgtgacataggtattgttgctcttgttttaaagatgagggaattcttgtttttaaaaagacaagatcaaaaagatacgtaactggcttgggatgacacaagtggtaaagtggcagagctggaattccaatgcctggctctcagactaacatgggtgctttcacagc

SEQ ID NO: 519910 - DNA, 627 bp, Homo sapiens
tcagatcaattggcttagaacaggaatgtccaatcttttggcttcccggggtcacactggaagaagaatcgtctggggccgcatgtaaaatacactaactctaaggatagctgatgagcttaaaataaatcgcataaaaaatcataatatttttaaaagtttacgaatttgtgttgggccacactcagagccgtcctgggcggcccatgggccgcaggttggacaaacttggcttagaatctaagaattataaagctcaaggagaaaatgattctgaggcagggcggtttcatagaagaggggagagccttgaagcaaagtatgcttctgaaactggtggagagttgctggggaaagctttcaagagaatggagagcagaccatttggactggacctagagagaaaagtaatagcatctgctctatgccacctgccagctctctcyttcatccttcagtgttgtgacataggtattgttgctcttgttttaaagatgagggaattcttgtttttaaaaagacaagatcaaaaagatacgtaactggcttgggatgacacaagtggtaaagtggcagagctggaattccaatgcctggctctcagactaacatgggtgctttcacagc

SEQ ID NO: 519911 - DNA, 504 bp, Homo sapiens
gatgggggtctcaccacgtggcccaggctggtcttgaacccctgggctcaggtgatcctcctgcctcagcctcccaaagtgttgggattacaggggtaagccaccaccctcgccaccaccccccacccccagcctttaaagtgaggtagctatggtagaaaaatcatgtttctgggtgcctagatgctaacarttcaatgaatgttgaatagcacttgtctattacttggactaactgtatgagatacagaactagaaggctgtttgcttattgttcctcatctccattgttgcaatttaacaattgtggcttatttttcacgtggttatgacagggctttctcctttcagggaaagtgaaacttcaaatttgagtaaattggcagttgcaaggatgaagtcagtagtctacaacaaggcagtggttggggcggcgatgcttacccactcttgctttgcccattactcatatcgaaaggagaaggttcaagattaagaaaggac

SEQ ID NO: 519912 - DNA, 620 bp, Homo sapiens
ctgtaggatgctgccgctgagtgacagggcagtgaggagagaagccagggagagctgtgatttggagccttggtgcctgggaaaatagagatgcttctgtaagaggagtaaagccagaggccagggagagaagtgctccttgggcaacaagatttctaggcagaggtgtccatgggtgtctgggagtctagcgaaacaacttcttctcttcatgtccagcctaacttgcctaatcccgagtctgtccacayaggctcagacctgcctcctgttaaaatggatgggcagcccatgcctctaaggcccccctctatcttgcactcaagctggagcctgttctctctcagcttcttaagaatgttgcccatgctgtccccatcaacccctcccatctcagaattcttctcctctgctagatcatttccaacatcacacaaacccatctcctgtcttaaaaaccaaacaaaccctccattgacttcatgcatctctatagctactgcctcatttctgtgtcccccattctgtgtagaacgaagctctttgaaggagccgtagtcatactgtctttgcctccttacctcccatttctcttcagtctgattttcatgcctaacctc

SEQ ID NO: 519913 - DNA, 607 bp, Homo sapiens
cagtaaacttagtcagtaaattattacaaaataaaagcaaacacaaggatattgcaataaagcatagcagcatgtttcagaattttttgaagagtttagaatctctggtttttatttattttattttttttagagacaaggtctccctctgtcaccaaggctggagtgcagtggctcaagctatcctcccgccttggtctcccaagtagctgagactgcaggcatgcactaccgtacccagctaatgtttttattctgtagagacagaggtcttgctatgttacccaagttagtctcaaactcttgggctcaagtgattctcttgccttggcttcccaaagtgttgggattacaggcgcgagctaccatgcccagcctctgatttttaaaactgctgcaacataacaaagcaaatatctgcaggcttagggacagaaaccgaatataaaaatcattgcattagattgaaaagagccstattttcgtaggaagtttcagattaagcaattattaacaaggaagacaattttaaaataaatttttccttgtaattgaagatacagaaatattatacataaacaggacttctgaattacatacaaatcat

SEQ ID NO: 519914 - DNA, 634 bp, Homo sapiens
tggagaaatatttaaattgagggcaaaaaaggcactctaaaggaagtgaaatttcagctccagttaactaggcatgaaaagaacatagtgtgcatttgggaacccaataaggaagaaggcatcaagctgggctcatttctctgcctcaactacaggaatgtttttaaagagcaaacctgagcacaggtcaaaaacctggacaatgaaaaatcaatctctcagcccaagaaggactgtcccctgttatcatgggggcagtcatttaaagagagctcaaaccaggatcctgaggccaactctgcctggggcatcagcrcctctggactgggacaaagcagcagccctggggcaccctgggaatccacgtgggctgcttatggctcttcttcagaagtcaaggcgtgattcttaagaaagcagtcaaatactagagggtgaccccttttattaggttcatcatcttagccacagagagaccatagtgtttgtctatagcctgaaatactcaaaggccacagtgctgaaaagaggcggaggcttcaagcttctttgtcgccattaatcctcatcctgctggtctgtcccttttgcatcagaaaagctttctcgtatcttttttaaagaaggagaaaaa

SEQ ID NO: 519915 - DNA, 549 bp, Homo sapiens
atagtgtgcatttgggaacccaataaggaagaaggcatcaagctgggctcatttctctgcctcaactacaggaatgtttttaaagagcaaacctgagcacaggtcaaaaacctggacaatgaaaaatcaatctctcagcccaagaaggactgtcccctgttatcatgggggcagtcatttaaagagagctcaaaccaggatcctgaggccaactctgcctggggcatcagcacctctggactgggacaaagcagcagccctggggcaccctgggaatccacgtgggctgcttatggctcttcttcagaagtcaaggcgtgattcttaagaaagcagtcaaatactagagggtgaccccttttattaggttcatcatcttagccacagagagaccatagtgtttgtctatagcctgaaatactcaaaggccacagtgctgaaaagaggcsgaggcttcaagcttctttgtcgccattaatcctcatcctgctggtctgtcccttttgcatcagaaaagctttctcgtatcttttttaaagaaggagaaaa

SEQ ID NO: 519916 - DNA, 543 bp, Homo sapiens
gctgccactttctggacaactgtgatcatttcctccccctacwccctctcccatctgtcctctcacacgtcagagagagtgttctttatgaaatccacatcaattatgtcccctccttgcttaaaaccccgtggctctcacagcaaactctagccctccacgtggcttacaaggtcctgtggtgtggggctgccattcatgggccctgccatccaccctcaccccaccactgctgctgtcagctaccctgtcccttcaggtccttttcagggacagcaatgggtctaatttgttcatctaataaaaagcacaatacaggtattgtttgcctatgtttccagactttggggggacactttacagtgtattaacaattgaactcattctttaaatgtagagaacttcacctgaaaaggtcttggagggttgaagaaaagcctatcaagcatattacttggaaatgctttaaaataagtttattttgtgtttcaaaacttttcagacaccctagccatgtgtttgctgtttttgtcattcagatct

SEQ ID NO: 519917 - DNA, 636 bp, Homo sapiens
caacttactcagactgtcaacgacatgcttcagccttttgctttgtcctgtgtttcctctttcttaaataactagtcattttactttaggaaaaaattcactacacaaaattctttctcatagaaaatttttcttttgttcttttttaatcttccttaccaaaaatacatctttatacctgtacctttcttcacatctctcactctactacttactggttcctttctatcttgttctacgtcttttctaaatttacttctggaaacaagcctctggattgagactaaatttttttcttctcaatgaggaatacgttttgttgttttttgtttttttttttgagtcaaagtctcactctgctgcccaggctggagtgcagtggcacgatcttggctcacggcaagctccacctcctgtgtycacaccattctcctgctcagcctcccaagtagctgggactacaggtgcccaccaccacacctggctaatttttttgtatttttagtagagacaagggtttcaccatgttaaccaggatggtcttgatctcctgacctcgtgatccgctcacttgcctcccaaagtgctgggattagaggtgtgagccaccgcgcctggctgaggaatacattttta

SEQ ID NO: 519918 - DNA, 624 bp, Homo sapiens
tgtgcaattatgtaaagtgggctattttccagccatcatttgcatgcaatggtaaaaagctacttttatagtttagtttagatacaacacacattggaatactgttattgacttcatttcttcgagcacacatgatgcttcctaattattggggactttcctttttacggcacaataaacagattttctctgagtgcaagttcactatgcaagggttgcccacatagtggaaataaaaatctttaacttaagatgtttatttcttagctaggcagtctttctggcctgataagaaatacctgtatatccttccctgcagtcagagtgaacactaaaagagggatttgtatctactttgttttatttttttaaaatctgaatagcagcctttctagagtgtacaatccttcatttrgtttgtgaatttagagcatgagaattgctgttggtttagacctgcaattcatctcacccagagctctgtccttgacaggggtcctaggtacagacctaatgactagatctggttgtcttggacatcaatctgaaaagcctagtgatataatccaatatatgcattgttttcattcagcaacaacttattactaccatgactgaggcatt

SEQ ID NO: 519919 - DNA, 608 bp, Homo sapiens
ggagaggtgggtttgggaagagaatctacattcactcatccacccattcatttaacaaatatctatttaggacctactacatgttaggaactggagctactctggtgaataaaaacagttccagttcttacccatatgtagaagtcacagccttgagagagaggtagtcatcaaacaaatcactgcacaaacaaatgtgaaattcagcagtgacccatgttaggaaggagaagtacttggtgctgtgagagcataggttggggggatttacctggatggggggatcaagaaatgtatatatatttttttgagactacagagtcytgctctgtcccccaggctggagtgcagtgatacgatcttggcttactgcaacctccacctcccaggttcaccgcgattctccctgcctcagcctcccaagtagctgggattacaggcatccaccaccacgcccggctaatttttgtattttttagtagagatggggtttcaccatgttggccagtctggtcttgaactcctgacttcaggtgatccacccaccttggcctcccaaagtgctgggattacaggtgttagccaccatgctcagccaagcaatgcat

SEQ ID NO: 519920 - DNA, 627 bp, Homo sapiens
atttgcttccttatctgagcacattgttcttccacccttagatttgttctgcccttttaaatcagaagaaatttttgtacataacactttctcagatacttgacgataatccatatgcccttcagttatttctcttcctattttagcagccatatgttttacctactttggacgaactccatttggtcttttctaaagagagaggactgtactagattctcaaagtggcctgatctatgctggagttactacatgccccttggtataatctgcctattaatgtggcctgtaatttatttttaggatcaatgatatgacttagagagccatacagtccatttaaaccccaactctgtttttacaagatatatatatatatatgtaagccagtttccccattctgtatttatacaactgattgttttaaaatctgttcactcaacrgtcttttattgggcacccattatgtatcataaggtatgagccctgctcccaacaatctttcaggtcacagtgtacaaatatgtccacaagtcatagtgcatggattaggaggtgggccacatgggttggaatgtagcttatgccattttgacctttggtgcattagttaatgtctctgtgcct

SEQ ID NO: 519921 - DNA, 326 bp, Homo sapiens
gctaatgtaagtgttctgaacacatttaaagtaggctacagtaagctatgatatgccatagttaaatgtattaaatgcattttcagattatggtattttcaacttacaatgaatttatggtgatataaacctattgtaagtcaaggagtatctgcataggtttttttttttcccagtgaagaactagctttttagtttattygatgtttctgctctttttgcccattttctgattcagcaatttctatttttttcttaatattctttttttctgacttttatggttatgttgtttatatatatttaatcgtagttctgtctccatt

SEQ ID NO: 519922 - DNA, 361 bp, Homo sapiens
agaatggccttattaaaacaaayacggttgcactgttttatgcacgtgttatattgcagtgagcagatcagatgcaaacaggattctgtaaaaaaaaaaaaaaaaaagacaccttaagcatactctaaaggtactatcccacaaagacgaatgtagctgagtatttttctgcctttatgaaactgaaaatgattgaacttgttggattttgctttaaaacttcttgctgtggctgaggggcatggaaagtgtgcaatgagcatcttctatgggggaggcgctcattgaagtcactggcatgctctaaaactggcctgacagttgtgtttctctcactgaaaaaaagcaaagtgtgctatcc

SEQ ID NO: 519923 - DNA, 651 bp, Homo sapiens
taagaacccagccaatgagatgactgacatctcctatgacatctagttgggttctgtatttatcccattttttatgttccttttccttgggtttgtgtgtggttttaggacccctattgcaatgtgtcatttctgtcctggaattgataaagaacatgttcactaaatatgcccaagtggaagcagattttctagaagtgcagtgacatgcattgagaaggaaattgattagccaaagactttaattgacttgtctgagtttgtcattttaattattaggtttttaatgctagcaagtcagttaatagtaccaagagaacaactgctattgtcagggagtaaataatggtagtatagtcactgtagtgtgaaggttatttttgtatcatgtttcattgtgctagcctgtctgatttatggctgtaactagctggccctggctctggccctatctgctcacgcagtgattttaagcatgtctttctcaaaaagaccctgccaaagtatttatgggagtctctaggggttatcttatatgagctatgaattagcccgaccaccatcactgctactgctactaygccccagactctctgtgctgctgccttgccagcctgctgtgccctgctgattgtcctggatattgatgct

SEQ ID NO: 519924 - DNA, 651 bp, Homo sapiens
taagaacccagccaatgagatgactgacatctcctatgacatctagttgggttctgtatttatcccattttttatgttccttttccttgggtttgtgtgtggttttaggacccctattgcaatgtgtcatttctgtcctggaattgataaagaacatgttcactaaatatgcccaagtggaagcagattttctagaagtgcagtgacatgcattgagaaggaaattgattagccaaagactttaattgacttgtctgagtttgtcattttaattattaggtttttaatgctagcaagtcagttaatagtaccaagagaacaactgctattgtcagggagtaaataatggtagtatagtcactgtagtgtgaaggttatttttgtatcatgtttcattgtgctagcctgtctgatttatggctgtaactagctggccctggctctggccctatctgctcacgcagtgattttaagcatgtctttctcaaaaagaccctgccaaagtatttatgggagtctctaggggttatcttatatgagctatgaattagcccgaccaccatcactgctactgctactatgccccagactctctgtgctgctgccttgccascctgctgtgccctgctgattgtcctggatattgatgct

SEQ ID NO: 519925 - DNA, 632 bp, Homo sapiens
cagccaacctagatgagtgacatgtgagtaaaaaaaaaaaaagtgatgtttcaagcttctgagtttagaggtggtttgctatgcagaattattgtggcaactgatagactaattatgaccatgtaagtatttaatcgaggacttctcatgtttccatatgaaatttaaatgaacacaggattttgacttaaatctcaatacctaggaatagacacatttctgatctcttctctgttgacttcttattctattttcacctaaaagagagttcttactaaggaatgagctcccccttcccttccccctccctttaactccatctctggtggttcttccaaattccaccaagtttatttggggcttcagaatataagtaatgacttaatgagtgagaaaccacagtttatacttccttaaactgggcttatttccctyagtcccctttataaatgcagcatcagcatccccataggtctctctgcatggtttatgctgataagaaactgcagatcacaggtctgtgcactggtgtacttctcatgactctgtttcttcccaagtggtgtaatgaagtgtaggatttggacagacttaggcttgaatattacttctatgctttaatgtttgcagga

SEQ ID NO: 519926 - DNA, 570 bp, Homo sapiens
agaaacagcccccagttttaagccttattgacttaaggtgtttgaaatattcctctccaactggtaatcgtggccatttttcttytctggagtgcctgattatgtgccctgcaatggtcctgacatcattgcatgagtcagaacactgaactaatcatgctttgcccagaccgagtccaaacctccccgcattggtgagtcggcccctcacaggagaggccactccggaacagcaggctttaagtgataaccaacgtcccttcccccacagcatcccgtagtgtcagggcaggcttctccccctccttgcaagggattctgtcttcttggaacagagcaacatagggttaatatgacccacttgcttcctggggaatgaattttctgggtagcaaggctggaggggtggagataacaattactgctttccattctacctagcttagaatcctacatccttgggaaaactgaggcgcaattgagcgagaatgtcctagactggaatctggactctaaagatgtagtggaggttctgccatttgctcatcatatgaccttaggggaagtctc

SEQ ID NO: 519927 - DNA, 520 bp, Homo sapiens
gtatgttggaatgtgtctgagtatgtagtcatatgtgaattgcgtgatcacttgtgttgtggggtgtataaagtctgaggctaattgtgaacctgttggtgggtggattatttcagggtgtgtctgcatgggtatgcatttgaatatctgcttaccatattttctgaatgccagtgagtaygtatcttgtgtgaagactgaagtggagtaaaggtaggtgtatctgggtattagagtgctatgcgaatgctgagagggtttatgtgaccatatgtgcctgagtatgagcttaaatgtgcatatgaatggtgtgaatgtgaaggtgtgtacctgcttctgcatctcagtgaattctcctggcaaaacaggcttagggttgcctctctagctcctgttctcagagcttgctggtgttttatgactgagcatcccaggcacaatttatatgatgcccaaataacgaggctattcagcaaaagatcctgacagatggaccacaagttccctatatcccaacccc

SEQ ID NO: 519928 - DNA, 592 bp, Homo sapiens
tgtgttacctgtcttgtaagaagaagcctagcagagtgtcacatggctgagccatagaccagcagggtcaggatcagaacaagggaagggcatggctgagagtgagcacctgagtgagtacatgggtatgactctgagaccaagccaaatgggctgtttccccaaggtcacaagctactacacttaaaggycaatgctcgcctttcttctcatccctgccttgcttatctcaaaaccactatgctttgaggttgccccaacaaaagtgactgtttaaataaattgtggttatgtatgtgtaaagagaaatatgattcatctattaaagtgacaatggctacggctactgagatggaaagatgcataggatacattgatgaggtgctagtggggaaggagatatctaagaagcaggtagagtctcgttccacttttgtcaaatatctgtttgtaactaggatgtctcagacttcatcagcctgtgggaatgtctttcaactaatagcctaaattacaaaggctcccagtgctgcttggctgcaggaacagagcctccctcaaagggtcatccggttatttctgagggtgctcc

SEQ ID NO: 519929 - DNA, 594 bp, Homo sapiens
tgtgttacctgtcttgtaagaagaagcctagcagagtgtcacatggctgagccatagaccagcagggtcaggatcagaacaagggaagggcatggctgagagtgagcacctgagtgagtacatgggtatgactctgagaccaagccaaatgggctgtttccccaaggtcacaagctactacacttaaaggtcaatgctcgcctttcttctcatccctgccttgcttatctcaaaaccactatgctttgaggttgccccaacaaaagtgactgtttaaataaattgtggttatgtatgtgtaaagagaaatatgattcatctattaaagtgacaatggctacggctactgagatggaaagatgcataggatacattgatgaggtgctagtggggaaggagatatctaagaagcaggtagagtctcgttccacttttgtcaaatatctgtttgtaactaggatgtctcagacttcatcagcctgtgggaatgtctttcaactaatagcctaaattacaaaggctcccagtgctgcttggctgcaggaacagagcctccctcaaagggtcatcyggttatttctgagggtgctccag

SEQ ID NO: 519930 - DNA, 469 bp, Homo sapiens
ggggtggggggtccacctcctgagatctctcaccttctagtcacaggctgccaaggcggcaacgcagatgacctgatgtctcttgctggctggggccaggcagtatgttcctacagacacccacatagctgacgggctcgggaakgtctactgcaagggacttgtaagtgagtagctgttgggagacttatcatttgtctactgattggagtcctgacaagttaagaatgttctcctttggtcccctagggactcagcaggaggccccctccttacttagcctgagcaaagcagaggactgaagcaattacccagattattcaggcaaaagtccccacaaagtggccattgagatagggaagatgcaagtggcaccttcttttaaaatcctacattctctacttcagttgctttaaaacaacaacaacaacaaccaaaacctattgtgttgaagtgtctttagatgtag

SEQ ID NO: 519931 - DNA, 532 bp, Homo sapiens
cacaacaagaggccacagaccgcatggcttaaacaacggagactgattttctcgctgttctggaggtggctttctcttggggcttccctccttggcttgtggacggccaagggctgtcacatggcctcccctctgtgtgtgtcctgcctgtgaccacatctccccttggatgggatttccagtgatgggtgggggcccaccctgataactccaccttaacactatcatcttcgaagaggagaccctacttccaagtcaggccacagtcgcagtactgggggtwgggactttaacatcttttggaggcacgattcagtctgtacacccacggagaggctctctgtggtcatctttggctggcaggctcgatacatcttgcagggcttcagaggagggccaggatgtgtgtccaagtctgggaagctctggaaagatgtggggcttcagttccctgttggaggaagagcagagtgtgccggggttgggtagggcgggaggtggaggcagggagggctgattgttgccagctcgg

SEQ ID NO: 519932 - DNA, 532 bp, Homo sapiens
cacaacaagaggccacagaccgcatggcttaaacaacggagactgattttctcgctgttctggaggtggctttctcttggggcttccctccttggcttgtggacggccaagggctgtcacatggcctcccctctgtgtgtgtcctgcctgtgaccacatctccccttggatgggatttccagtgatgggtgggggcccaccctgataactccaccttaacactatcatcttcgaagaggagaccctacttccaagtcaggccacagtcgcagtactgggggtagggactttaacatcttttggaggcacgattcagtctgtacacccacggagaggctctctgtggtcatctttggctggcaggctcgatacatcttgcagggcttcagaggagggccaggatgtgtgtccaagtctgggaagctctggaaagatgtggggcttcagttccctgttggaggaagagcagagtgtgcyggggttgggtagggcgggaggtggaggcagggagggctgattgttgccagctcgg

SEQ ID NO: 519933 - DNA, 461 bp, Homo sapiens
ggcaggagagtttaagcagggagggtgaaactcactctgattggcagccctgtgaaagaggattggctgggcatggagatctaaggatgaggaaaggatatcccagagtgccagggcgcgcaaaccaaacttcacactctaggaagacagaggccagaggaaccaggagggcttcctggaggaggtggcatttactctgggcctaagagatcacaggaaaatggaggccagcattctaggcctggggaagagtttgggcaaaggcttggcagtaagagaataaaggtggggcttgatgggccagaggataagtgactcctcaaggtcacaagacaccctgatgrctgggaccccatctctgatggagcaaggcttctgatacccaactgaggcttggcgccaaggactgacatcaaggaagtggattcctgcaaacctggcacccgagggtccacttcctc

SEQ ID NO: 519934 - DNA, 608 bp, Homo sapiens
ctgcaacttgactctcgacttggccgggtccttctagtgcggcttatagcattcaacctcctctaggtggcgctgcggagcggggactcggctgctgatcgcggcgccccctggcggtctgttcccgtcaacatttagattaagcgcagagccggttccgccagggaagtgcgcgtcccggtgcccccgcstgatgagagcggatgacagattgcgggaaaaagttagaatgtaacgttagttgtatgacagagaggaccaagctgtgcagcagagggagacagaaaagggagggaccaagccacagcaaggaatgatcgtcaataacattaacgtctagaatttattgaccacctgctatgcgcgagccactgtcctaaacatctggtattcattcccttagttaacacacctctagtaagtgcgtgtctcaagaacagtgtctgtgtttcatttagggcctagcacacagtgggtgtctggcacatagtaggttctcaacacatttggaaatgaataatacaataatcctgcaatttttctctccaattaataatgtagaggcaaatattatctccatttagaaaactgaacaatggtcggagagt

SEQ ID NO: 519935 - DNA, 606 bp, Homo sapiens
cctgtgttaccagctaggtcctgcagagtccagccctgaaggcagtgatctgagaagcaggaccaatgagaatcaaagctggaaggggacttggttagctccagggcaaacctgcccattttagagatggggccactgggacccagagaagctcacacactacctgaacaagaccagaagcaggtctccagcctccaactcatcagtctttcccaggttgattagggtggaggagtttctcctttgaaygtaggaacaagtcatctttacatgagtattttggaaacttccagcacacatggaagaccaagacaggcacgttgcaggaagaatagatcgctggaagctatgaaccaatgggggagatggaatggaaaaagaccaattgcatcgtccaaaagccatttgactcaagggctgctgtctccctggttggaagggctcactaggggagggaagtatgtgtccccctgggaaaggcacctgcaaagtgctctcctttctactctccacacaaatgtggtgcagtgaagccaccagccctggaatctacaacttgagtgcagatccaagatctgaagcttcctggctgtgtgaccttaggca

SEQ ID NO: 519936 - DNA, 459 bp, Homo sapiens
ggggcctagctctgctcaagccagggcttggaggaaggtgaaggctctgctctgcccttcttctgtcatggctgagcggtttctttctagactcccttggcccgtcctttctggctgatccaagctggtgagatgggcgtgtgaatttcagtccctccaaggggacttgagcaattactctgactaggggaatgaggctcagtttttgcactggacgatcacagggcagaatacwtgtaaacagaaataatgtgctttcctttttttgtgaacactctaatatctcaatggctgaacacagtaccagactcacagtggggttcaataattggcaaatcatattgttgctacagtgtggaatgttcaacggcagaagcaggaagaagagaataattaaccaagctgggaggaagtggtgagtttcaagttgggttttgagggatgcataagagtttgatg

SEQ ID NO: 519937 - DNA, 664 bp, Homo sapiens
tcatcaaatcaatgctctgagtaggaatygctcctaacttcacttttcacctgaggaagctgtggcacagagaggctaagtaacttgccagagatcacacagtcagccaaaggcagagctgggaggtgagcttgggcagttctgtgccacagtttatgtactgtgataattctacacgcacacatgcttggaaacaaacaggctgaatgtgacgtcatgcattagtagaggcccatcaacccaagtaagttggcccagaggaatggtggaaaatggaaggcccctggctgtatatggccagcagatgtgatgacattttattaatgtagagttgtgaaaattctgaagtctcatatctaaattgtactcctctttaaaaattagatctggtgacaccaggctgacatccctgcatgacatcagacttcctgccttggcaggaagaaaagggtagtgctgccttctttcaatgagacttgtattgcccattgtgccccagtctccatcattccctatttctcttcacctggcccacctcgctccctcatgtgcacctctgtccagcccctgtaggtatttgagtctgtagcccctgaactcagaacctctctggcactaaaattatttggatctgttctatctcaacagctctgtgaagaagata

SEQ ID NO: 519938 - DNA, 523 bp, Homo sapiens
tatgcagagctgcatctagtcatatacctgtatgtgatggagagaagcagaaagagaggtggggggagagagaatgggagggagatagggaggcagacagagaagagaggataggaggggaaagaaagggaggaagacaaaggggcgaagagaaagacagaagaggggagaggaggagaggggaggggataagagggataaagaaagagaggaagagacaagcagagagagatgggaaggctgagagagagagtaagggaagagaggggaggtgaggggaaaggaaagaagggaaggagagaggagacagatggggaggaagagaggaaaatagaaggagatatctaaaacgatatttgccccccaccaaatgttaagtgattatcctyggggggaagaactttggaagttacactttcaattttgtattttaaaattgtgtgtatttttagtccacttacagatacactttttccaaacagcatacaacgacaagaaagtaacattcaaatattaccaggtc

SEQ ID NO: 519939 - DNA, 558 bp, Homo sapiens
tagctacaccacttctccctcaatttactgcctcttgtcttaatttggagccaatctagacactgtgtcatttcatccttggatattgctgtatgcatctctaagagatatggactatttaaaaaatacattttaaattctaaccactatgtcattatccccttgggtcattctaacrtgtgtcaagtctgagatgctgctgtggatattctgtgtgttctgggagggcaggggccagggcagtcctcatcaccgtaagcactcgccaatatcctgctgaatgtcagcagtttgaatgggaacgcggactgcacaaggagatcggggacgggaagagttaaactcttcacaggaggaaggagccagacttcactggcaaaaggaatttttttttctttctttctgcctttgcagccccaagcctggagcttggtactctagggaaggcaccaatcagattgttgcctgcatgttggaaaatatttatgtcacctaccaagctgggagcatactcagcaggcttcccggggcctcctgatagacaaggtcgcatcccag

SEQ ID NO: 519940 - DNA, 558 bp, Homo sapiens
tagctacaccacttctccctcaatttactgcctcttgtcttaatttggagccaatctagacactgtgtcatttcatccttggatattgctgtatgcatctctaagagatatggactatttaaaaaatacattttaaattctaaccactatgtcattatccccttgggtcattctaacatgtgtcaagtctgagatgctgctgtggatattctgtgtgttctgggagggcaggggccagggcagtcctcatcaccgtaagcactcgccaatatcctgctgaatgtcagcagtttgaatgggaacgcggactgcacaaggagatyggggacgggaagagttaaactcttcacaggaggaaggagccagacttcactggcaaaaggaatttttttttctttctttctgcctttgcagccccaagcctggagcttggtactctagggaaggcaccaatcagattgttgcctgcatgttggaaaatatttatgtcacctaccaagctgggagcatactcagcaggcttcccggggcctcctgatagacaaggtcgcatcccag

SEQ ID NO: 519941 - DNA, 558 bp, Homo sapiens
tagctacaccacttctccctcaatttactgcctcttgtcttaatttggagccaatctagacactgtgtcatttcatccttggatattgctgtatgcatctctaagagatatggactatttaaaaaatacattttaaattctaaccactatgtcattatccccttgggtcattctaacatgtgtcaagtctgagatgctgctgtggatattctgtgtgttctgggagggcaggggccagggcagtcctcatcaccgtaagcactcgccaatatcctgctgaatgtcagcagtttgaatgggaacgcggactgcacaaggagatcggggacgggaakagttaaactcttcacaggaggaaggagccagacttcactggcaaaaggaatttttttttctttctttctgcctttgcagccccaagcctggagcttggtactctagggaaggcaccaatcagattgttgcctgcatgttggaaaatatttatgtcacctaccaagctgggagcatactcagcaggcttcccggggcctcctgatagacaaggtcgcatcccag

SEQ ID NO: 519942 - DNA, 636 bp, Homo sapiens
cttaagatagtctttcctaggaatccttgcctcagagttggcttctgagagaaccagacaaagaagctgttktttctctctctgccccagctcttccaagtctagaatgtgctatgtgttttcaggggactgaatcagtgactcatcccactgggatgttgcaatagctgtggtgaccacgtctcagtgtgcatctcacacgcagacttcctgagagagggaggcattgattatgccacttgtcaccagctgatgtagcaggattttgtgccaaaccatcagagaaggagtttccatctctcgctccagcctcccagtggctgcaactgcacagggttctgacagtgaagctcttagtctagtccacaaaagcagattcccatcctgaaatgccctacttccctgctctaggcagacatcacgaatcaatcacagcctgacttcctcttgcatctttttcagtcaagcactccaggcaggtgctatcagtggttgggaactggcacacaagattaaacatattctatgggggaatgcctaggacagaaggctgcatgaaaggtatcacaataggaagtatggcatgaaatagttcttcaaaagagaaacaaaacaggcaagtacaaatgataaatg

SEQ ID NO: 519943 - DNA, 636 bp, Homo sapiens
cttaagatagtctttcctaggaatccttgcctcagagttggcttctgagagaaccagacaaagaagctgttgtttctctctctgccccagctcttccaagtctagaatgtgctatgtgttttcaggggactgaatcagtgactcatcccactgggatgttgcaatagctgtggtgaccacgtctcagtgtgcatctcacacgcagacttcctgagagagggaggcattgattatgccacttgtcaccagctgatgtagcaggattttgtgccaaaccatcagagaaggagtttccatctctcgctccagcctcccagtggctgcaactgcacagggttctgacagtgaagctcttagtctagtccacaaaagcagattcccatcctgaaatgccctacttccctgctctaggcagacatcacgaatcaatcacagcctgacttcctcttgcatctttttcagtcaagcactccaggcaggtgctatcagtggttgggaactggcacacaagattaaacatattctatgggggaatgcctaggacagaaggctgcatgaaaggtatcacaataggaagtatggcatgaaatagttcttcaaaagagaaacaaaayaggcaagtacaaatgataaatg

SEQ ID NO: 519944 - DNA, 617 bp, Homo sapiens
tctcttctagccctggcagggaaggtcaagacaaagctgctgcagaatggggtggacgtcggggtcaaatactcggagaagcaggagcggaacttcgacgacgccaccttgaaggccagccagtgcctcactgagctgcagatgggcaccaacatatgtgcctgccagtcgggcgcgacaacttagggcacgatgaggcatctctaccaccccaagaaccgtatcctgccctctggaccactcgaccatcagcctccagatgggtgcaaacaaacgctccagccagsgggcatgacggctcccgggaccccgcagcacatctacaacaccaaactgggagcccacaagtgtgacaactcctccatgtccctgcatatgggtgacacgcagagtgccaaccacagcgtccagggctttggcctgggccagcagatatactatcccaagtactgccctcaaggcctgcagccagtggggctcccttggatgccggcaactgcccaggaccaggggaggcccccgaggatcccccctgctcccaggaggaggccactactgaggcccccgaacatgctggctccctacatcatcgccctgtctgggtttgggggattttc

SEQ ID NO: 519945 - DNA, 617 bp, Homo sapiens
tctcttctagccctggcagggaaggtcaagacaaagctgctgcagaatggggtggacgtcggggtcaaatactcggagaagcaggagcggaacttcgacgacgccaccttgaaggccagccagtgcctcactgagctgcagatgggcaccaacatatgtgcctgccagtcgggcgcgacaacttagggcacgatgaggcatctctaccaccccaagaaccgtatcctgccctctggaccactcgaccatcagcctccagatgggtgcaaacaaacgctccagccagggggcatgacggctcccgggaccccgcagcacatctacaacaccaaactgggagcccacaagtgtgacaactcctccatgtccctgcatatgggygacacgcagagtgccaaccacagcgtccagggctttggcctgggccagcagatatactatcccaagtactgccctcaaggcctgcagccagtggggctcccttggatgccggcaactgcccaggaccaggggaggcccccgaggatcccccctgctcccaggaggaggccactactgaggcccccgaacatgctggctccctacatcatcgccctgtctgggtttgggggattttc

SEQ ID NO: 519946 - DNA, 617 bp, Homo sapiens
tctcttctagccctggcagggaaggtcaagacaaagctgctgcagaatggggtggacgtcggggtcaaatactcggagaagcaggagcggaacttcgacgacgccaccttgaaggccagccagtgcctcactgagctgcagatgggcaccaacatatgtgcctgccagtcgggcgcgacaacttagggcacgatgaggcatctctaccaccccaagaaccgtatcctgccctctggaccactcgaccatcagcctccagatgggtgcaaacaaacgctccagccagggggcatgacggctcccgggaccccgcagcacatctacaacaccaaactgggagcccacaagtgtgacaactcctccatgtccctgcatatgggtgacacgcagagtgccaaccacagcgtccagggctttggcctgggccagcagatatactatcccaagtactgccctcaaggcctgcagccagtggggctcccttggaygccggcaactgcccaggaccaggggaggcccccgaggatcccccctgctcccaggaggaggccactactgaggcccccgaacatgctggctccctacatcatcgccctgtctgggtttgggggattttc

SEQ ID NO: 519947 - DNA, 617 bp, Homo sapiens
tctcttctagccctggcagggaaggtcaagacaaagctgctgcagaatggggtggacgtcggggtcaaatactcggagaagcaggagcggaacttcgacgacgccaccttgaaggccagccagtgcctcactgagctgcagatgggcaccaacatatgtgcctgccagtcgggcgcgacaacttagggcacgatgaggcatctctaccaccccaagaaccgtatcctgccctctggaccactcgaccatcagcctccagatgggtgcaaacaaacgctccagccagggggcatgacggctcccgggaccccgcagcacatctacaacaccaaactgggagcccacaagtgtgacaactcctccatgtccctgcatatgggtgacacgcagagtgccaaccacagcgtccagggctttggcctgggccagcagatatactatcccaagtactgccctcaaggcctgcagccagtggggctcccttggatgccggcaactgcccaggaccaggggaggcccccgaggatcccccctgctcccaggaggaggccactactgaggcccccgaacatgctggctcyctacatcatcgccctgtctgggtttgggggattttc

SEQ ID NO: 519948 - DNA, 635 bp, Homo sapiens
cccagtataagagagggtggatgagagtctttctgcagtccattttcactgaaccattttccactggatgaatcatacaatccaggccatgggagaccaccatgaccttcccaagatctgaatctaacttagagagcagccaagagaccgtgagaagaaatggctccacagagggaactctgagtcccacactttttctgtaacctaagcagatacagtaagatgccattctcaatcctagcttaaaacagactgtgcactgtcctgggaaccaatggtgccggtcctgggaattaaggaaactcaggctgctgcttgcagaactagggcatgagcaggaggtaggcttctgctaccagaactgagaagtcagtgtggcatggactgcagctaccagtgctagaagcaaacacagacttcaggttttgagcaggacaagaattgcaacagaggcttggtgttragccagcttggggttcatatagctctgggctgagttgcaggctaggcacaaactgccaacacaggtcttatgcatcggctgtgacaggcaggactgggtagctagcccctctgggactgtggtgtgagagaggcataagtcccccaaccactggccaagcctgcagccctta

SEQ ID NO: 519949 - DNA, 635 bp, Homo sapiens
acataaaagtccatagtgaatttcagttctatttcctatcttcatggtttatttggtctccccaccataagctggggggggaaaaagggtggtggaaaacagtgcctgaaacccaatcaatgttargagtgtggtctcagagacaccttgaagttatgtgaagactaataccaaatactgcactgataacctggcattctactgtcaggggctctctcccttcagcttgaggcttatctaggaggaatccactttgctgcaaatatttgttttaattatcctgaacaaagttactacagaatgtaatattatgtaatatgatcaagtagttgtaatctttaagacaggaaatcaacatggtgatctgctccattttctccctgaggaggaaaaaaaatgagagaagcttccaaggaaggtcagttaaaggagatatgaaaaaccatttaattgcacacttaaaatgggtgaatttatggtatatgaattatatctcaataaagcttttttaaaaaaaactattgagaaaacctgtgagggagaaaaaaaaagggagctatgaagacaatgacagatcttaagaaataattctagattgccactaacctaacagctttcatggaaataaactgtat

SEQ ID NO: 519950 - DNA, 606 bp, Homo sapiens
cttgcaaatttcataaccagtcctgcatagcaagtaggggactatttaaacatctacatagcttctgtcctaaaggggctaccagactgggatgggagtaactatctcagttttaggaagaaaaaatatggtacgatgcagaggatttactgctgtgaagatatggatgaaatactagggcaagttagggaaagaatagattgatttttcaagaggtgtgatgggatggagaagagagtactgaatagaagtaacattgaggtgggccttgaaaaattcttttcatatttcacaaaaggtgataaaaggcattttaatgtgagaaaatagtatatgcaaatttgagagcattcattcaytggacaaatatttattggttgcttgttacgttccggacactatttcaggttcttggtatagagcagtgaccaaagcaaagtccctaccctgatacagcttgcattttcgtgagaaatctgaacaataaacaggtaagtgaataaacttataatgttaaatgatgagaagtaccgtgaagaaaaataaagcaagacaaaaggatagagaatagggagggcctttttataaaggagttcctgatgtggt

SEQ ID NO: 519951 - DNA, 392 bp, Homo sapiens
cgctgccagaagggtgcttgcgcccagggtcctatgtgtgtgcgagagagtgtgaatacgtgtgtgtgtgtgagtgaaagagagtgttcgtgtgtgagagagcagaaggggtgagctcagcccccggggcactcggaggtgaactccgggmtgagccgaagctcgccgcgctcccgggtgctgggcgtctgctcggctgatggctgggctgatgttgccgtggccgccgccgccgcgctctaaggctggtcgcggtggtgcaaaaaatgtttctccgctactcgagaccaaaaaacctgccctgtctactgagcatgcccggtttgacagcttcacagccgaggtttttttttttttctccttttccccaagactccaggttttagccgcag

SEQ ID NO: 519952 - DNA, 604 bp, Homo sapiens
gtaaaaaaggatgagttcatgtcctttgtagggacatggatgaagctgaaaccatcattctgagcaaactatcacaaggagagaaaaccaaacaccacatgttctcactcaaaggtgggaatttaacaatgaaaacaactggacacagggtggggaacatcacacactgaggcctgtcgcagggtggggggaggggggagggatagcattaggagatayacctaatgtaaatgacgagtcaatgggtgcagcacaccaacatggcacatgtatacatatgtaacaaacctgcacgctgtgcacatgtaccctaaaacttaaaagtataaaaaaaaagagttcagtaaatagttcttatttggctaaaatcttaggttcaaaagtcaaaagtattcttaaaccatgaataaaatattgaaagtttatagtttcctgggggagtaaaattcattcctaccgttaatattaacagggactgtgtgaatgactggataccaagccagaaacatggcataggaggttgttatatttctgaaatttccatcatattcccagcttcatcaaatataaccatcaaatgctttcagaacatagctacactctt

SEQ ID NO: 519953 - DNA, 145 bp, Homo sapiens
tagcaattggcaaaaatgtgtagagttcccaatcttcacctgcagaatcatatacttgtacagctgaaagtcttcttggaaccagttcagagattatttaatcaagtyaaagattattttactatactactgataaacatgcctg

SEQ ID NO: 519954 - DNA, 627 bp, Homo sapiens
gctgaagctttgggtgattttctgaatagatctaatttcaaaatgtcaggaaagctctttttaaacatatcaaggcatgtcataaggtatcaggtgtagtagaatctattaagcttactctaggaggctctacaaagcaaaactagataggcccaatggaagggtatcacaggcagacagatttgggctcaatatagaaagagaatttcctggcatttcagattgcataaaaaataaaataaaacttccttgacatcaaatcctatcctggagaatgtgcagaggaaactgaatrcaccttggcagggcaatggtagcagagtttccggcaattgtagggggaacaggctggatgacctctgaacttgtggccaacgtggagactctctgggaacatgacatggcagttgatttcttttgtctttttttggcacacaaaagttacaacggtagcctatgccatctataaatttaaaacaatatagaagggtataaagtaaaacatcaaagtcttccatttcctccaccatcccaaatccactgctcagaagtgaccactcagagtattttacatgcaaccctccagacattcatctgattacctactatgtttcaggcactgtgctg

SEQ ID NO: 519955 - DNA, 616 bp, Homo sapiens
ttacctactatgtttcaggcactgtgctgtactttacatttattgattatttaaccccaatcttcaacaatcctgtaaagtaggtacaagcatccctgttttatagatgataaaactgaggcttagagaatggtgcatggttaggacatgcgataaagccaggagttaaaacagagtcagctctgtctgattctaactctgggctcctatacataactgctgcagatgaaatggagatgggggtagacataggcaaacattactatgacggttatttcttagtgaargatcaatgatcctgaaacttttcaaattaccaatggccatacacaacttactgaaaatcaaaatatttatcacattccagtgacttatcaggttccaggaagccaccaggaatttctgccaccctgaccctcagggatctatttccaacagcagtgaccctgatcctcagggatccaattccagaaatctggagatttctgcttgtcagaagtacttaagcccagcttttggaaattcagattattctacagcagaagatttcaactctgactacactttaaaatcacctggtgaacatctgcaaattacctaggccagacctcatctc

SEQ ID NO: 519956 - DNA, 636 bp, Homo sapiens
catggttaggacatgcgataaagccaggagttaaaacagagtcagctctgtctgattctaactctgggctcctatacataactgctgcagatgaaatggagatgggggtagacataggcaaacattactatgacggttatttcttagtgaaagatcaatgatcctgaaacttttcaaattaccaatggccatacacaacttactgaaaatcaaaatatttatcacattccagtgacttatcaggttccaggaagccaccaggaatttctgccaccctgaccctcrgggatctatttccaacagcagtgaccctgatcctcagggatccaattccagaaatctggagatttctgcttgtcagaagtacttaagcccagcttttggaaattcagattattctacagcagaagatttcaactctgactacactttaaaatcacctggtgaacatctgcaaattacctaggccagacctcatctcagcagttctgaattaattggactaggagagggtgtggacactgggattttataaaaaagtctcctccaattcgtttaatgtacagccatattgagaaccactggtttaaagcaataacaaggctctcaaacatggaaatcaccctgaggataaat

SEQ ID NO: 519957 - DNA, 585 bp, Homo sapiens
ggccttggatgcccgtcgcagggcttcaagcctcgctgtgagaggcagttgggagccattgaagacgtcctgccgtcgtggcactagcactccagccctgccccctctgtcacccagaaatcctgtgctcccccttgggtctccagcttccctcaggttgtccccgaacctcacggcttcgcttgcctgtgttctcagagagttcctcaacacttgtgactcatggtggaagcatgaggcgtcaggccaggctgcagagtggctcaagccggagaccttgactccccccgccaccctcctaccccacactgcactgtctggtttaacttcaaggagggctggtgcttttgatccctgagccagtggggagtgtgtcaggaaccgcgggcagtgatgccagttctggcctgacttctaagcctcctgggctcttggaaggggcccaagctttgccatctgggatttccccgggcacctctgggcaagggctgagaccatccattgctgaatttctgaagctgagcagcccagggatgaaagccactccatctgcctcctgsggggacccagtgcagtgggcgagtt

SEQ ID NO: 519958 - DNA, 280 bp, Homo sapiens
tccagcactgccagcggatactgggtgagtttatgytaattaatgatacgaccttgagagagccactgacgctctctaagctttcatttcctcatctgaaaaggggaataataatagtagctgcgtcaaaatgagcacccaataaatgctagctgttaggattgctatcctggatctctcatcacgccagagaccgagcacagactcaagcactgtctgactccagactgtggttatttctaccgagacacaagctgccgtcagggacaggcctggttac

SEQ ID NO: 519959 - DNA, 612 bp, Homo sapiens
tgggtggtgacaggtggagctggcagcagtgctgaagtcctggggtgggaggtgccaggggaagggtctggtgatggggggcagggggggtcatcctggaaatgcaggccgggcccatctcccagtcsccctcaaatgaggtttgctgtgcttccaccgtgaagggacctcagaggtctgcctcttgagggagatctgggaagacttcctgaaggaggcaaactgcctccaaagagctgcagggctagttgagcatggaagggatgtggggtgtggagccgtttggtgcaggagatgttcctcccactttcagaggctgctgtggaagctggggctgacatgggccacgggccaggaggatgcgctggggcaggagccacctggcacagcgctgggcacacagtgggagcccaacatctgtgctcccttcatgctctaagcccttgcccacatctgtcaccggcgccatttacagaggaggagacaagggccaccaaccccaggccacatgttggccaggtgtagctggagatccgactgctgtctttacttgccctgtccaggcagtagtgcgcaggtggctggagaatgctgtggcccgggccctggccc

SEQ ID NO: 519960 - DNA, 243 bp, Homo sapiens
gggcaaagccatcaaacttctcgtgttcccatctcctattagaacaaagtggtaaactggggaggatgagctgggactgactcgggtgctgaagttcatccrcacggcattccagaatcttccaccggctttcctcaagaacatgtggacagtccaatgcactgagtgccctggctgggtggttccgcctgctgctggggggacgtgaacatagacccgccgctctggccccgctctgggcat

SEQ ID NO: 519961 - DNA, 461 bp, Homo sapiens
ttacaggtgctctccacctgcctttaaggttctgcctggccgggcgyggtggctcacgcctgtaatcccagcactttgggaggccgaggcaggcggatcacgaggtcaggagatcgagaccatgctggctaacatggtgaaaccccgtctctactaaaaatacaaaaaattatccgggtgtcgtggtgggcacctgtagtcccagctactcgggagagtgaggcaggagaatggcgtgaacccgggaggcggaggttgcagtgagccgagatcacaccactgcactccagcctgggcgacacagtgagactccttctcaaaaaaaaaaaaaaagaattagggcaggcgggcaaaaggtgtttgtgcatgacacatgagcctgtggggtagaggcgggagaggcggggtacagggacatgtgggacagatggttgctggggtagaagcctcctcctcaccag

SEQ ID NO: 519962 - DNA, 590 bp, Homo sapiens
tataaatccacagttaataaaattgttgttattccaaaagwaatgcatgcatcttctctggatgctatcaatatttttctattattcttaaatgttggcatttttatcatcatgtttttggttgtagatgtcttttctttttaatctttttttcctctctttttcacattggttaatttctattactctattcttggtcatctccagcctcctattgatcctacttagtggataacttgggttatcatcgttttaagttataaaattgttatctggttcttctttatatcttctggttctttgttgtggttgcctcttttccatttgtttcaagaatgtttatgcttacttgttggggcatatttataatagctgttttacagcttttgttagatatgtccaacatctgcttcatgatagtattgccatctgttgtttattttcttgtaaattgtgattttcttggttctttttatactgagtaattttgggctatatcctggatgttctgcatatttcattatgataagctgagttgtgtttaaatcctatttaaacatcaaaaatgttgatgtttttgttttcgttag

SEQ ID NO: 519963 - DNA, 537 bp, Homo sapiens
tttatgtgaacactgctgaagcaccatcgcgcacagaccgttttagacacggcacaaatccaaggctttggagcagtcactcagttatcctcatattataaatgaatagaccgaggctggtgcagccattatggggagcactatgacgctttctcagaaaattaaacgtagaagtacccaagacccaggaatcccttttctgagtatatattcraaggaaaagaaaccagcaccttacagaaacacctgagctcccaggttcattgcagcaccaagagatggaaacaatagaaaaacatcctctgtggatggaaatgtgcctaaagaaaatgtgcgatagacacggagggaaaggttctgggcctttaaaaaggagacaccgacatttgcaataacatgggtgaacctggagcagaatgtattaaatgaagccacacacacactctcacactcacatacactcacacactctcacacactcaccctcacacacactctctcacacacactcatactcacacacttacactctcacag

SEQ ID NO: 519964 - DNA, 537 bp, Homo sapiens
tttatgtgaacactgctgaagcaccatcgcgcacagaccgttttagacacggcacaaatccaaggctttggagcagtcactcagttatcctcatattataaatgaatagaccgaggctggtgcagccattatggggagcactatgacgctttctcagaaaattaaacgtagaagtacccaagacccaggaatcccttttctgagtatatattcaaaggaaaagaaaccagcaccttacagaaacacctgagctcccaggttcattgcagcaccaagagatggaaacaatagaaaaacatcctctgtggatggaaatgtgcstaaagaaaatgtgcgatagacacggagggaaaggttctgggcctttaaaaaggagacaccgacatttgcaataacatgggtgaacctggagcagaatgtattaaatgaagccacacacacactctcacactcacatacactcacacactctcacacactcaccctcacacacactctctcacacacactcatactcacacacttacactctcacag

SEQ ID NO: 519965 - DNA, 468 bp, Homo sapiens
tgtcagcgcagtcccctggcagatttggctccgaggaagatagaaggtggcgagcccaggtggtgactcactggacagagacagagaaataaaaagaacaagaagcaggaagaagragaggagtaaagactgggagatggaggaagaaaggaagggagggaggggaggaagcctgagtgtgcggggtttggtgggtgaggctctgggagaaagcccagcccgagagagcacgaggatggccagaccaccctcctcttccaatcgtgggtgcaggaagggctcggggccagccgggccaactctctaagtgacacatgccacatgctggggcttctccatccccactgcctcctggagccacagtatccagacaccaggggcctccagacagaaatgtgtcgctgggatgcttctgtgctgtgactcaacaatccctgtcctggaatctcaattcaagtcactccaaca

SEQ ID NO: 519966 - DNA, 468 bp, Homo sapiens
tgtcagcgcagtcccctggcagatttggctccgaggaagatagaaggtggcgagcccaggtggtgactcactggacagagacagagaaataaaaagaacaagaagcaggaagaagaagaggagtaaagactgggagatggaggaagaaaggaagggagggaggggaggaagcctgagtgtgcggggtttggtgggtgaggctctgggagaaagcccagcmcgagagagcacgaggatggccagaccaccctcctcttccaatcgtgggtgcaggaagggctcggggccagccgggccaactctctaagtgacacatgccacatgctggggcttctccatccccactgcctcctggagccacagtatccagacaccaggggcctccagacagaaatgtgtcgctgggatgcttctgtgctgtgactcaacaatccctgtcctggaatctcaattcaagtcactccaaca

SEQ ID NO: 519967 - DNA, 649 bp, Homo sapiens
gggaagctctctgcccagatcttctcctgcctggrtctgttgctcactgtgggtgcggttcggcagcgccccggagcatggccttgggggtccctcagtctggcagaagccacacccatgctcttcccctggttcctcacacgcaggacctaggcagctctttatcttgttggggatgtagcctttctaccccgtggcacagagccccagcatgggccttctctctctgaaacactgtgttggccatcacagaggaaggcctctgtgcatttttgttggattaattgaatacatgaacaaaacccagcttccttgccattgcaatgcaattcctacagcttgtatggaaagctgggcacccatcctgggccatcctggttcccaggaaaatgatgacctttattttgaatgcaggggttgcggttttgatttatgcctcattccccgggtctgtctatgaccttgcgggcagtacagggcacagttggctttggagcctaagcctctgaggactggagccagtgccacggttttcagggcatcttctgggctccaggagctccctggcctcgagttagcagcagccaggctctgacagtccctgtaaagccttggccagccctgcagactcactgcaggggccggcggc

SEQ ID NO: 519968 - DNA, 387 bp, Homo sapiens
ctgcggcccaggcttgaaggcgtccctgcctgggcatgcacaatgcacttgggatctaaactcagctttctttggaaaagctgggagcaaagacagcaagttcacaaaattctgmctggctgccgcctctttttccatcagccactgttatttcccctgcaggaccctggtcctcaagcccacctggccacacagggaccccactcctctttctggagagtctgagggtggacccagatcaaggcttttctatgcgttgttggaggatccttaggtatcatcctaaatgcttcctgaccactacgcccacatccgggaacaaatcactgctaatcatttgtttccacaagagaagagagtccatctttaagtttttttccaaggctg

SEQ ID NO: 519969 - DNA, 387 bp, Homo sapiens
ctgcggcccaggcttgaaggcgtccctgcctgggcatgcacaatgcacttgggatctaaactcagctttctttggaaaagctgggagcaaagacagcaagttcacaaaattctgactggctgccgcctctttttccatcagccactgttatttcccctgcaggaccctggtcctcaagcccacctggccacacagggaccccactcctctttcyggagagtctgagggtggacccagatcaaggcttttctatgcgttgttggaggatccttaggtatcatcctaaatgcttcctgaccactacgcccacatccgggaacaaatcactgctaatcatttgtttccacaagagaagagagtccatctttaagtttttttccaaggctg

SEQ ID NO: 519970 - DNA, 387 bp, Homo sapiens
ctgcggcccaggcttgaaggcgtccctgcctgggcatgcacaatgcacttgggatctaaactcagctttctttggaaaagctgggagcaaagacagcaagttcacaaaattctgactggctgccgcctctttttccatcagccactgttatttcccctgcaggaccctggtcctcaagcccacctggccacacagggaccccactcctctttctggagagtctgasggtggacccagatcaaggcttttctatgcgttgttggaggatccttaggtatcatcctaaatgcttcctgaccactacgcccacatccgggaacaaatcactgctaatcatttgtttccacaagagaagagagtccatctttaagtttttttccaaggctg

SEQ ID NO: 519971 - DNA, 387 bp, Homo sapiens
ctgcggcccaggcttgaaggcgtccctgcctgggcatgcacaatgcacttgggatctaaactcagctttctttggaaaagctgggagcaaagacagcaagttcacaaaattctgactggctgccgcctctttttccatcagccactgttatttcccctgcaggaccctggtcctcaagcccacctggccacacagggaccccactcctctttctggagagtctgagggtggacccagatcaaggcttttctatgcrttgttggaggatccttaggtatcatcctaaatgcttcctgaccactacgcccacatccgggaacaaatcactgctaatcatttgtttccacaagagaagagagtccatctttaagtttttttccaaggctg

SEQ ID NO: 519972 - DNA, 604 bp, Homo sapiens
ccctcccatgctcaacttgactctttctagggatacaaacaaacagttaggacgtgtctacaatgaccttagaacgcaggatcaacatctgcatggaacagtaaacctggaattgagaaacgtggcaagcccacccagcattgcaggcggtaagctcagcactgggtgcaccatgcccactcagcattgcaggcaataagctcagtgccaggtgcatcatgcccacccagcattgcaggcggcaagctcagcaccgggggcaccatgaccacccagcattgcaggcggcaagctcatcaccgggtgcaccatgcccacccagcattgcaggtggcaagctcagcagcgggtgcaccatgcccacccaacactacaggcggcaagctcagcaccggatgtaccatgcccacccagcattgcaggcgttaagctcagcaccgggggcaccatgcccacccagcattgcaggtggtaagctcagtgccaggtgcaccatgcccacccagcattgcaggcggcaagctcagcaccgggtgcaccatgcccacccagcattgcaggcagtaagctcagygccaggtgtaccatgcccacccagcattgc

SEQ ID NO: 519973 - DNA, 597 bp, Homo sapiens
cctctggaggggacggcagaggcttctgggctcctcctggggctgaaggaagcgctggggagggtcctgggctgcaccatacaaagatgcaaaaggcttaccatgggcagggtcaggggaagtgtgttcattattttaagtgtgaatgtttagtggctcctggagaaggtatggatagaccctgagcctcaaagccaccctgagcagccaagtctggacgccctgggggtggctcaatcccgcccatccctgctgcctcctgcaccaccttcctcagtcacagattccccggggcagagacagacaggcacgctcctcttggcaccctcccgtatggggccaccagtccctgccctggccccagtgagtgccctgaagggtggttaaagacttcaagagaacggagtctctctgttctagaagctgctcccacctcagcttggggctgacctctgcaagggacgaggccctcctgctccccagcgcccactgggtccctttctccacatccactctctgaccagctcggctgccccaagccctccttccacccacggatgcctgctccrctctctggggcgtctggaaaagggaagg

SEQ ID NO: 519974 - DNA, 560 bp, Homo sapiens
tgctatcaaaaatactcagtagagagctatttcttcttggtgaagagaaaaaaggacagtctttgggggagtaaaccattaataaacaaaggtggttgtgtgcttgcatgaaattgtatatttcccccctgaattagcttacataaaacctctcattgatagcagtgtcagtgatgggaactgcaggctttacctatgaccgaacatgcatggaaatgccctctgatggactcaggcatgatacatacatcaaacagccttgcacggtggtaaatttacagttattgaccttcaatacccaaagtaagccccttaaattgacatttgccaaaggctccaaataatttgactcgaatttcatgtaatacaaaagccactgggggagtggaatggaaaaagtagattctgggtcaattctgcattgacagcatgaactggaaaatcttaaggacaattgagaatatcagagaattttcattcaatagrgaaacaagaactggcacttttattgctgatacccctctagcctcagggtacctttcaagggtgtgacccagata

SEQ ID NO: 519975 - DNA, 513 bp, Homo sapiens
caatggcccaaaactctggctggcgtccctgtcccagccttgccagtgactgttaactatgacttcacctctcttggcctctatttcytcctatgtcatttacaaagacttgtgcctgcttcacctacatcagtcataaatcatgaggctgaaatgggcaccagaacataaaatcaggccatggcttgaatggactttaatggctatccaggccaaccactatttgatacacagggaaactgaggcccagagagggcaagtgactggcacaaagtcacacagctaaaaccagaaatcagaccttctcgtgctttccactatagaaggctggaagtatcctggaaagtttaaaagcttatgtaggtaaatgcaaagacaaatttctgtttttaagagttccaaaattgctaaattcagacactttgggtttgtatctttggcaaattcaggtgggttttggccatcaactgaaatttgaatctaaaaggcaataaagcagaatatgggttctca

SEQ ID NO: 519976 - DNA, 513 bp, Homo sapiens
caatggcccaaaactctggctggcgtccctgtcccagccttgccagtgactgttaactatgacttcacctctcttggcctctatttcttcctatgtcatttacaaagwcttgtgcctgcttcacctacatcagtcataaatcatgaggctgaaatgggcaccagaacataaaatcaggccatggcttgaatggactttaatggctatccaggccaaccactatttgatacacagggaaactgaggcccagagagggcaagtgactggcacaaagtcacacagctaaaaccagaaatcagaccttctcgtgctttccactatagaaggctggaagtatcctggaaagtttaaaagcttatgtaggtaaatgcaaagacaaatttctgtttttaagagttccaaaattgctaaattcagacactttgggtttgtatctttggcaaattcaggtgggttttggccatcaactgaaatttgaatctaaaaggcaataaagcagaatatgggttctca

SEQ ID NO: 519977 - DNA, 513 bp, Homo sapiens
caatggcccaaaactctggctggcgtccctgtcccagccttgccagtgactgttaactatgacttcacctctcttggcctctatttcttcctatgtcatttacaaagacttgtgcctgcttcrcctacatcagtcataaatcatgaggctgaaatgggcaccagaacataaaatcaggccatggcttgaatggactttaatggctatccaggccaaccactatttgatacacagggaaactgaggcccagagagggcaagtgactggcacaaagtcacacagctaaaaccagaaatcagaccttctcgtgctttccactatagaaggctggaagtatcctggaaagtttaaaagcttatgtaggtaaatgcaaagacaaatttctgtttttaagagttccaaaattgctaaattcagacactttgggtttgtatctttggcaaattcaggtgggttttggccatcaactgaaatttgaatctaaaaggcaataaagcagaatatgggttctca

SEQ ID NO: 519978 - DNA, 650 bp, Homo sapiens
cacccctgattttctcactatcttctcagatgtacctctatgacaacttattactagaagcattaacaatggcttcaccattaggtgtcaaagtctcaactgttcattttatatatctcagaagggcagagttttaagggagatgaagtttggagaagtgaggatgataatgatcaccaccaagggccagaaaaggtgggagacagcagaaaattgttttgagtcatacggggctgggaatgaccaatgactgatggcagcagggcttgattatgttactttctaatacttcctgaaatgcatggtatttttcctgtttgcccattggttcactatttaatagtgtgtgttgttgagacaagagattttattgacagctcrgagcaattaataaagaattctatcttcacacagggttttcttgaagaaggctcaatttacttggtattcagtctgtaagatcatgttcattctgctaaaaggatcatatgtcagtttttactcatacacaattcatcatgcagaaggtttttttaaatgattttgacaatgtttttgagatttaaaaaattaaaacatcctatatacctaaaaataatctctaagttcctttttaagactatgattatgattgcattaaaaatattaaa

SEQ ID NO: 519979 - DNA, 499 bp, Homo sapiens
gggaaatctgtaaattcacttctgaaggctcttcctgttgatggggaccagtacasccaagttgaaaaattaaaataagccaattaaaaaattttacaagtctgcacctccaggaaccccatgtccttgaatggcagtctctgatagacacggtgattgcgaaggcagccacgccagtggaggggcctgggtgtggacagcggctagagggatgtaaagggcctggcgccaccaggctggaatcctgacctgacctggacagcggcctgtgggggagtcagtgtcaggctcagccacacccacagccctagtctgtttgacatgacctgaagagagcttttgggatgacggttaactggaaaccatctcctggccaaagaagcctgttaacccccattcctggctgtgtttcccctgacattcccaagtccttctcttcagctctgggacacatttgaatctttctgatgatgaggggagatgccacccaccctgggaa

SEQ ID NO: 519980 - DNA, 584 bp, Homo sapiens
ctggttttaacacaaattttagagggacacaaacattgggaccgtagcagtgtcctattgatttttcacatgcttctgaaatttggaattatgacatagtcaaatggtttgggatgatccactttgtatgatgaatgatactctcatatgttgtgtgagacactgcactatcctgcctgcaaaagaccccctgaattcagatggayctgtggctatgtttaaaggattggttgaggagaaagtttgctcctgggttcattaggattactgaacgaggtaacagttttacaagatttcctccagtttcgggttggctttataaagaatcactatatttatcaggtattgctttctgttggatggttttcctgggtatttcaagggcattggggattgccagacctatcagcatgataaagttcaattgcatggccatctggacttcctttggggagtttctttgattgatatctttattttgtcaggatccaggaaagcacttaattttcatatgatgttcattatcttttagcaaattagatgctgctgggaattttctaaattccatcttctccttcagaaaa

SEQ ID NO: 519981 - DNA, 584 bp, Homo sapiens
ctggttttaacacaaattttagagggacacaaacattgggaccgtagcagtgtcctattgatttttcacatgcttctgaaatttggaattatgacatagtcaaatggtttgggatgatccactttgtatgatgaatgatactctcatatgttgtgtgagacactgcactatcctgcctgcaaaagaccccctgaattcagatggatctgtggctrtgtttaaaggattggttgaggagaaagtttgctcctgggttcattaggattactgaacgaggtaacagttttacaagatttcctccagtttcgggttggctttataaagaatcactatatttatcaggtattgctttctgttggatggttttcctgggtatttcaagggcattggggattgccagacctatcagcatgataaagttcaattgcatggccatctggacttcctttggggagtttctttgattgatatctttattttgtcaggatccaggaaagcacttaattttcatatgatgttcattatcttttagcaaattagatgctgctgggaattttctaaattccatcttctccttcagaaaa

SEQ ID NO: 519982 - DNA, 584 bp, Homo sapiens
ctggttttaacacaaattttagagggacacaaacattgggaccgtagcagtgtcctattgatttttcacatgcttctgaaatttggaattatgacatagtcaaatggtttgggatgatccactttgtatgatgaatgatactctcatatgttgtgtgagacactgcactatcctgcctgcaaaagaccccctgaattcagatggatctgtggctatgtttaaaggattggttgaggagaaagtttgctcctgggttcattaggattactgaacgaggtaacagttttacaagatttcctccagtttcgggttggctttataaagaatcactrtatttatcaggtattgctttctgttggatggttttcctgggtatttcaagggcattggggattgccagacctatcagcatgataaagttcaattgcatggccatctggacttcctttggggagtttctttgattgatatctttattttgtcaggatccaggaaagcacttaattttcatatgatgttcattatcttttagcaaattagatgctgctgggaattttctaaattccatcttctccttcagaaaa

SEQ ID NO: 519983 - DNA, 584 bp, Homo sapiens
ctggttttaacacaaattttagagggacacaaacattgggaccgtagcagtgtcctattgatttttcacatgcttctgaaatttggaattatgacatagtcaaatggtttgggatgatccactttgtatgatgaatgatactctcatatgttgtgtgagacactgcactatcctgcctgcaaaagaccccctgaattcagatggatctgtggctatgtttaaaggattggttgaggagaaagtttgctcctgggttcattaggattactgaacgaggtaacagttttacaagatttcctccagtttcgggttggctttataaagaatcactatatttatcaggtattgctttctgttggatggttttcctgggtatttcaagggcattggggattgccagacctatsagcatgataaagttcaattgcatggccatctggacttcctttggggagtttctttgattgatatctttattttgtcaggatccaggaaagcacttaattttcatatgatgttcattatcttttagcaaattagatgctgctgggaattttctaaattccatcttctccttcagaaaa

SEQ ID NO: 519984 - DNA, 464 bp, Homo sapiens
agctcctgcaggccccagagccagtcttggagccagaaccggctccccgagggtcatgatcacctggagggcmgcaggcatttttcctgggtccttccagcaacgctttccggagctggtggctttctgcctccctgggctccacatgagacacagaaaggaaccccaaggaactccctgctcttgggcacctcctttatttactgttcttgaggaagctccaatcagacctgactggggtcggtgagtttatttttaccatctgtgtggacgatccagatgggcccagctccaggcctgaggaagagcctcccttacaatctatccatacgtctcatggtttccagttccaaaacatggatcttccgtcatgtaactccttccagcatgactgactgacccgctccagcaccgcaagccatcagcatggactcagccatgacggtgtccctcccatgcccagg

SEQ ID NO: 519985 - DNA, 661 bp, Homo sapiens
acttggtgaacaaagataaataggatacagttcccttgggattagctcaaaataaatggagaagagaaagagaaaatctatgtgtctgtgggtgtctgtttttaaacacaaacccacactagttagtgtgtgagaaggggagacatatgagtcgacagccacctacttgagaatccctgttcagaaatagcttccctgcggacttgtccccaatgcctacagttccatcaagagagttaattctgtaggagagggaaggtggatgatgtgatagacaaatgatttgctagcatggtaactcctcagttcagaggcagtgttaatcacaaagcaaaaatgaaaatmttgcacaatcacaaatgggcgcccaggactgtatgttatttgtcaatcctgtgatcttcttggcctgagtacacacgatcttcatgttactgagcttttaccatttggaatatgtaaaccaaatcctaaatgaggttttccatttatcagtcacaacatgcaacatttttcttccttattaagaatggtattaaaagagtttatgagagagaaataaaatctgattttcaagttgtcaaaaaaaatcgtgatataatgcaatcagtttagccaggaaacaaaatggccaatataaactgttgcaggaactcccaca

SEQ ID NO: 519986 - DNA, 661 bp, Homo sapiens
acttggtgaacaaagataaataggatacagttcccttgggattagctcaaaataaatggagaagagaaagagaaaatctatgtgtctgtgggtgtctgtttttaaacacaaacccacactagttagtgtgtgagaaggggagacatatgagtcgacagccacctacttgagaatccctgttcagaaatagcttccctgcggacttgtccccaatgcctacagttccatcaagagagttaattctgtaggagagggaaggtggatgatgtgatagacaaatgatttgctagcatggtaactcctcagttcagaggcagtgttaatcacaaagcaaaaatgaaaatcttgcacaatcacaaatgggcgcccaggactgtatgttatttgtcaatcctgtgatcttcttggcctgagtacacacgatcttcatgttactgagcttttaccatttggaatatgtaaaccaartcctaaatgaggttttccatttatcagtcacaacatgcaacatttttcttccttattaagaatggtattaaaagagtttatgagagagaaataaaatctgattttcaagttgtcaaaaaaaatcgtgatataatgcaatcagtttagccaggaaacaaaatggccaatataaactgttgcaggaactcccaca

SEQ ID NO: 519987 - DNA, 623 bp, Homo sapiens
tataacacaactgtgtttctgaaacatttttcatatacttcctaagtatttcatgaactcatatgaacacaggggggaaagtaaacttacacagggcaggaaaaagagaaaagtttttyggtggaatttgaattaatgaaagtacaaataatgaaaaataactctgcagtcagatttcaggatttactggatgttttcccttctaaagagtctgagggttacaaaaacttctttccagggaaaacaacgaaactcatatgaatcctgggtttttcctttgagggaaagtttattgtaaacagaattgtaagggagggagaaaagtgcctatagcgagctctggcattaatgaaaacttgcagccaccttcagagctggtcctgtctgtcagagagtcaagagtgccctggaggagaagtgcctcccatcacatgagccacgtttgccaaatagaaagcaaagcctgggaactcgtcccccagagcagtcggctttggttccatttcctaccagagcaagcagacgggaagcatttcagcctgacaaagaggcatgcagaagccaaggctaaaagtagactgcatttcagaggttctaacactgaaagaacggaaaccatatgg

SEQ ID NO: 519988 - DNA, 487 bp, Homo sapiens
ccccttcgtgagcactttctcttttgaggccagtgaaatgtgttccctggggttgtattcctgagaaggcctcatttaaagggagccgccaaaccaagtgggcttagcaaaagcagtttgtcacctggcagcacgtgtgagcctcgcccggacgcgcctcagcgtttggctctccttgctagaattgtccacgctcactgtggaaaacctccgagggttccccacggtcagacgcctggcctgtggcacctggcagggacccctcrtgggcatcggagttgcctccgcagaacgcccaccaccagacagccccgtgtttgagcaaagctcttcgggagctgtttctcattatttgcttgcatccatttgattttctctgctaagcaaaaggctatggaaaaagccaggcttggaaatccatgatttcctggcagttaatgaatttcagccaaacggaaagcaaggtgaggttcccatgcgccactca

SEQ ID NO: 519989 - DNA, 487 bp, Homo sapiens
ccccttcgtgagcactttctcttttgaggccagtgaaatgtgttccctggggttgtattcctgagaaggcctcatttaaagggagccgccaaaccaagtgggcttagcaaaagcagtttgtcacctggcagcacgtgtgagcctcgcccggacgcgcctcagcgtttggctctccttgctagaattgtccacgctcactgtggaaaacctccgagggttccccacggtcagacgcctggcctgtggcacctggcagggacccctcgtgggcatcggagttgcctccgcagaacgcccaccaccagacagccccgtgtttgagcaaagctcttcgggagctgtttctcattatttgcttgcatccatttgattttctctgctaagcaaaaggctatggaaaaagccaggcttggaaatccatgatttcctggcagttaatgaatttcagccaaacrgaaagcaaggtgaggttcccatgcgccactca

SEQ ID NO: 519990 - DNA, 186 bp, Homo sapiens
ctagcagtcctcacggtcccattgattttcctggcaggttctgcgatgtraattctctcgcatctgaccacctgcgaactgtccatcacccccgttagagggaggccctctggggacaggccctttctctccaggttcacagagtcggggcaagtgggggcccctccatcagcctgagtacacttg

SEQ ID NO: 519991 - DNA, 647 bp, Homo sapiens
cgatatttgttatcactcaaaatgaagagtttcatacttacctgaaaacatgagtaatgcttcactttgtctcattttgagcagagtgcacaactgaattctaattacaaataacgatacattaatwtctaaagcattcaaataattatttaaaacatttcactaacaatcaaatgaaatgaaatcatttcacatgatattcgttttttcataagatcagagggtaggtttagggaacagcaataggatttcatgcaagtgcccatttctctcaagtttttctcccagcctggataactccctttccaatgggacctcacatgcctgcattatgttatatactggcagtttacagcagggcacttggttaaatcctgcagttaaaacctgcagttaaaacttgacaagtttgatggtatgtgaattaaatctttatttattttaaaaaagcaactcaggccaggtgtggtggctcatgcctgtaatctcagcactttgggaggccaaggcaggcagatcacgctgtcaggagttcgagaccagcttggccaacgtggtgaaaccccgtccctactaaaagtataaaaattatctaggcgtggtggcatatgcctgtaatcccagctactcagcagcctgaggcagga

SEQ ID NO: 519992 - DNA, 606 bp, Homo sapiens
aacaacaaaagcattctagagcgacttttaattactagattgcaatggacctccaaacagtgacatcattacagatctatagaaaccatgtgaaagtgtgcatgcttaaagtgtaattacctcagcaccataaatactgccctaaaataagatagcatctaataagatggatatatataaaatcttttaatagtcatgcccaaggctaataataaaaaatagtaycagcattagtggtaagtttaaccttatccaaaatattatttttgagaatcttgagagaacaagagcaagatggcagagtagaaagctaccctaatcgtcccttccacaaagacaccaagtacactactatctacacagaaaaaaaaaaaaaaaattggccaagcatggtagctcacacctgtaatcccagcacgttgcaaggctgaggcgggtggatcacttgagatcaggagtttgagactagcctggccaacatggtgaaactccatctctactaaaaatacaaaaattagctggtgtggtggcgcatgcctgtaatcccagatacttaggaggctgaggcaggaggatcacttgaactgggaagtggaggttggagta

SEQ ID NO: 519993 - DNA, 570 bp, Homo sapiens
atggaagaacaggtattcttgctacttgcattaagtattggctgaagcagagcttgattaaaactttgtccctgcattgacaatgtagctgtattctttctaagaggacaaattgatacagaaaaattcrctctggttctctgaatttagacaggcaggtgggcattaacatctcactcaaattaacacaaaatgcacttttcacaaactatgtcaaatgttacagttgtaattcttttaaaagcctgtacaatcgaatactgtttctacttctgtaaactacctctaggaaagctgagtgagatgaaaaacaatgcttcagtgaacaatttatgcatattcaagctgtggaaatctatgtatgaatatcaattatttttgcaaatgttgaagtggtattttcaaatcagttcacccttaagttcctaatctttttacccttaatgccatgcattgatcaagtatgtaacccaagaaatatttttctaccttcaaaatgaaggtacaaaaaatttacactgttgcttacacacatggatttaataagaagtaatttttagtaatcaaaaa

SEQ ID NO: 519994 - DNA, 669 bp, Homo sapiens
gttaagttccacctcttttccactaaaccattcagtttgakcttatggcttcaggacagtagcagtagacagggagtttactctgtggatgagatccaaaaagaaaccagtcacaaggctgtgtgagtcttaggcaaaggcagaaagctgggccattgagtgagcatctgctgatgaatggtgaggtcactagctattttccatgcttagcttccagctcagcttatactgtccagaaaggagattaaaatattcctgtctagagaggtggatcatcacatgaaaaaatatttcctggtcattcagttttgaagatatcaattgaaatgcttggttcacaccaaatcaatcaacaataaaactactggagaggtctcactcatgttagagtttcccataaaattatcctaattttcttttaaatatgtttgctagttctatgattattttccctaaagttaatttctttccatatcttgctctgtttggtttcatattttcattctccaaaaccatctctatgttgccaaagtgaggcactgccccatgactgcattatcagatgagccactgtctatgccgctaacctcctgtactaattctctgttttaaatacttaaagtatttcatttctttctggtcgaggtttgactaaaacaatatgaaagg

SEQ ID NO: 519995 - DNA, 669 bp, Homo sapiens
gttaagttccacctcttttccactaaaccattcagtttgatcttatggcttcaggacagtagcagkagacagggagtttactctgtggatgagatccaaaaagaaaccagtcacaaggctgtgtgagtcttaggcaaaggcagaaagctgggccattgagtgagcatctgctgatgaatggtgaggtcactagctattttccatgcttagcttccagctcagcttatactgtccagaaaggagattaaaatattcctgtctagagaggtggatcatcacatgaaaaaatatttcctggtcattcagttttgaagatatcaattgaaatgcttggttcacaccaaatcaatcaacaataaaactactggagaggtctcactcatgttagagtttcccataaaattatcctaattttcttttaaatatgtttgctagttctatgattattttccctaaagttaatttctttccatatcttgctctgtttggtttcatattttcattctccaaaaccatctctatgttgccaaagtgaggcactgccccatgactgcattatcagatgagccactgtctatgccgctaacctcctgtactaattctctgttttaaatacttaaagtatttcatttctttctggtcgaggtttgactaaaacaatatgaaagg

SEQ ID NO: 519996 - DNA, 669 bp, Homo sapiens
gttaagttccacctcttttccactaaaccattcagtttgatcttatggcttcaggacagtagcagtagacagggagtttactctgtggatgagatccaaaaagaaaccagtcacaaggctgtgtgagtcttaggcaaaggcagaaagctgggccattgagtgagcatctgctgatgaatggtgaggtcactagctattttccatgcttagcttccagctcagcttatactgtccagaaaggagattaaaatattcctgtctagagaggtggatcatcacatgaaaaaatatttcctggtcattcagttttgaagatatcaattgaaatgcttggttcacaccaaatcaatcaacaataaaactactggagaggtctcactcatgttagagtttcccataaaattatcctaattttcttttaaatatgtttgctagttctatgattattttccctaaagttaatttctttccatatcttgctctgtttggtttcatattttcattctccaaaaccatctctatgttgccaaagtgaggcactgccccatgactgcattatcagatgagccactgtctatgycgctaacctcctgtactaattctctgttttaaatacttaaagtatttcatttctttctggtcgaggtttgactaaaacaatatgaaagg

SEQ ID NO: 519997 - DNA, 673 bp, Homo sapiens
ataatcttcatcatctactatttatgattagttctacaataaactatatatgtaaatatatatatttgatatgtatgtatgaatattatatatatatmtctctctcacatactaccagttatacattcaaacaactctagtaacttttttctctctgaagcccatgttccagttgttttctcaggagaaggttcaagataacaagattctctgaattattacacacaaagcaatttgcctgcagtgttaaatttgagggtcagttcagattgatataaatcctgggctcattatggctctcatttaaggattataaatatgactctacattgccttctacataaggcaccaagcacataaagttttatgtctatcttttctttataaatgactcagatttttccttcacgcccatattaacttttatcttttataaatccaggtcagtttactagattatgccttacctttgaccattttgttaaaattttccaggtagattctgtaccattgaatatgtggttgatgtcagtgtatctgagttcagatgagggaccccatgggcctaggacatagacctatgaggaaggggtgccattgggctggtgctggtatctctgagggaacaaagtaaaactagtttcgtgacaaatctgcaagcaagaaacaacag

SEQ ID NO: 519998 - DNA, 673 bp, Homo sapiens
ataatcttcatcatctactatttatgattagttctacaataaactatatatgtaaatatatatatttgatatgtatgtatgaatattatatatatatctctctctcacatactaccagttatacattcaaacaactctagtaacttttttctctctgaagcccatgttccagttgttttctcaggagaaggttcaagataacaagattctctgaattattacacacaaagcaatttgcctgcagtgttaaatttgagggtcagttcagattgatataaatcctgggctcattatggctctcatttaaggattataaatatgactctacattgccttctacataaggcaccaagcacataaagttttatgtctatcttttctttataaatgactcagatttttccttcacgcccatattaacttttatcttttataaatccaggtcagtttactagattatgmcttacctttgaccattttgttaaaattttccaggtagattctgtaccattgaatatgtggttgatgtcagtgtatctgagttcagatgagggaccccatgggcctaggacatagacctatgaggaaggggtgccattgggctggtgctggtatctctgagggaacaaagtaaaactagtttcgtgacaaatctgcaagcaagaaacaacag

SEQ ID NO: 519999 - DNA, 598 bp, Homo sapiens
ttttacagtcactagaagtttatgtrtaggtaatggagttgtttaaaaatttagaattgtatttttcatttcttaactgtgtatgttttacttatttatttgatttgtctcactggttaattcctcccatacagtagagagaacaatagtgaaagaggacactttgtcttcttctggatcttaaatgaataatttattagttcaaacttcagtgtgatatttccgtagatgccttctatttgcttaaggatgcttctttgtattctattggggcgagatatttttattataattctatcttgaaaatgccaaatgttttttctgcctcagaggaagtttatatatttttttcattttactcagttaatgtggtgagtttgaaaattcaaatacttgaaaaatcacgttcccatcaaacactgcttcttactgtgcctttctaagaggactaccttcaacttgggcatttagaggatacttcccttcctatagctcagggtttttttgtattttttttatgtttaaattttagtgatatttcttttatgtgtttttaaaatattttatgggctactgcattgacccatttgtttcaact

SEQ ID NO: 520000 - DNA, 598 bp, Homo sapiens
ttttacagtcactagaagtttatgtgtaggtaatggagttgtttaaaaatttagaattgtatttttcatttcttaactgtgtatgttttacttatttatttgatttgtctcactggttaattcctcccatacagtagagagaacaatagtgaaagaggacactttgtcttcttctggatcttaaatgaataatttattagttcaaacttcagtgtgatatttccrtagatgccttctatttgcttaaggatgcttctttgtattctattggggcgagatatttttattataattctatcttgaaaatgccaaatgttttttctgcctcagaggaagtttatatatttttttcattttactcagttaatgtggtgagtttgaaaattcaaatacttgaaaaatcacgttcccatcaaacactgcttcttactgtgcctttctaagaggactaccttcaacttgggcatttagaggatacttcccttcctatagctcagggtttttttgtattttttttatgtttaaattttagtgatatttcttttatgtgtttttaaaatattttatgggctactgcattgacccatttgtttcaact

SEQ ID NO: 520001 - DNA, 598 bp, Homo sapiens
ttttacagtcactagaagtttatgtgtaggtaatggagttgtttaaaaatttagaattgtatttttcatttcttaactgtgtatgttttacttatttatttgatttgtctcactggttaattcctcccatacagtagagagaacaatagtgaaagaggacactttgtcttcttctggatcttaaatgaataatttattagttcaaacttcagtgtgatatttccgtagatgccttctatttgcttaaggatgcttctttgtattctattggggcgagatatttttattataattctatcttgaaaatgccaaatgttttttctgcctcagaggaagtttatatatttttttcattttactcagttaatgtggtgagtttgaaaattcaaatacttgaaaaatcacgttcccatcaaacactgcttcttactstgcctttctaagaggactaccttcaacttgggcatttagaggatacttcccttcctatagctcagggtttttttgtattttttttatgtttaaattttagtgatatttcttttatgtgtttttaaaatattttatgggctactgcattgacccatttgtttcaact

SEQ ID NO: 520002 - DNA, 533 bp, Homo sapiens
ctgatttttacagtcactagaagtttatgtgtaggtaatggagttgtttaaaaatttagaattgtatttttcatttcttaactgtgtatgttttacttatttatttgatttgtctcactggttaattcctcccatacagtagagagaacaatagtgaaagaggacactttgtcttcttctggatcttaaatgaataatttattagttcaaacttcagtgtgatatttccgtagatgccttctatttgcttaaggatgcttctttgtattctattggggcgagatatttttattataattctatcttgaaaatgccaaatgttttttctgcctcagaggaagtttatatatttttttcattttactcagttaatgtggtgagtttgaaaattcaaatacttgaaaaatcacgttcccatcaaacactgcttcttactgtscctttctaagaggactaccttcaacttgggcatttagaggatacttcccttcctatagctcagggtttttttgtattttttttatgtttaaatt

SEQ ID NO: 520003 - DNA, 623 bp, Homo sapiens
aaagatccttaaaacggtcttcagtaaagtcaaattttgtgacaagaattattgcatcaaagtcggggaaatacctcttagatcaaataagatacattgaaaagccaaaaattatttttatctcactttgggttctcataaggtctacccactgttacttggatatgagacttaacaaatggaaaagaagacaggggtactgtcacactgtattttcctayggcctaatgaccacaatggttgatgaactgcagtaaagtttctataatattttccatctattcatttgctcaatcaccttgtaatggttatgttggttaattccagtctttcatgggtaagcaacaaaatgagacttaatttgaaatatccagtatttttctattcttacaaataattttcaggatcaatgcactgaggattaggaatggcaatgtgtattactactctgataccaactatatccaatctaatgttggaatttgtttgacaaagtgttgtgtatttgaaaacaggcagcactgaataaaaagaatatgggcaaaagaaaaatggaagtgttttgaatagaagtctaaaatatttattgatcaatgctgaactgagtaagcaggagatgcctg

SEQ ID NO: 520004 - DNA, 605 bp, Homo sapiens
aaagatccttaaaacggtcttcagtaaagtcaaattttgtgacaagaattattgcatcaaagtcggggaaatacctcttagatcaaataagatacattgaaaagccaaaaattatttttatctcactttgggttctcataaggtctacccactgttacttggatatgagacttaacaaatggaaaagaagacaggggtactgtcacactgtattttcctacggcctaatgaccacaatggttgatgaactgcagtaaagtttctataatattttccatctattcatttgctcaatcaccttgtaatggttatgttggttaattccagtctttcatgggtaagcaacaaaatgagacttaatttgaaatatccagtatttttctattcttacaaataattttcaggatcaatgcactgaggattaggaatggcaatgtgtattactactytgataccaactatatccaatctaatgttggaatttgtttgacaaagtgttgtgtatttgaaaacaggcagcactgaataaaaagaatatgggcaaaagaaaaatggaagtgttttgaatagaagtctaaaatatttattgatcaatgctgaactga

SEQ ID NO: 520005 - DNA, 605 bp, Homo sapiens
aaagatccttaaaacggtcttcagtaaagtcaaattttgtgacaagaattattgcatcaaagtcggggaaatacctcttagatcaaataagatacattgaaaagccaaaaattatttttatctcactttgggttctcataaggtctacccactgttacttggatatgagacttaacaaatggaaaagaagacaggggtactgtcacactgtattttcctacggcctaatgaccacaatggttgatgaactgcagtaaagtttctataatattttccatctattcatttgctcaatcaccttgtaatggttatgttggttaattccagtctttcatgggtaagcaacaaaatgagacttaatttgaaatatccagtatttttctattcttacaaataattttcaggatcaatgcactgaggattaggaatggcaatgtgtattactactctgataccaactatatccaatctaatgttggaatttgtttgacaaagtgttrtgtatttgaaaacaggcagcactgaataaaaagaatatgggcaaaagaaaaatggaagtgttttgaatagaagtctaaaatatttattgatcaatgctgaactga

SEQ ID NO: 520006 - DNA, 624 bp, Homo sapiens
aaagatccttaaaacggtcttcagtaaagtcaaattttgtgacaagaattattgcatcaaagtcggggaaatacctcttagatcaaataagatacattgaaaagccaaaaattatttttatctcactttgggttctcataaggtctacccactgttacttggatatgagacttaacaaatggaaaagaagacaggggtactgtcacactgtattttcctacggcctaatgaccacaatggttgatgaactgcagtaaagtttctataatattttccatctattcatttgctcaatcaccttgtaatggttatgttggttaattccagtctttcatgggtaagcaacaaaatgagacttaatttgaaatatccagtatttttctattcttacaaataattttcaggatcaatgcactgaggattaggaatggcaatgtgtattactactctgataccaactatatccaatctaatgttggaatttgtttgacaaagtgttgtgtatttgaaaacaggcagcactgaataaaaagaatatgggcaaaagaaaaatggaagtgttttgaatrgaagtctaaaatatttattgatcaatgctgaactgagtaagcaggagatgcctgt

SEQ ID NO: 520007 - DNA, 527 bp, Homo sapiens
catcatttcaatttatctcaaagttttttattgcaacaattaaatgctttgaatgatacccaaggcatagttctatttcaacaaaatttcaaagttaatagttacatcaaattttgttggtgctcattgaatttggttattaaaaccataagtagtatgttttatgctgactgagggagataaaagtagtaatgtttaatattcaaactgtgatgactgaaaaaaaaaatgaggcctgtaaaatcttatttaaygtcaaattttaattaaacaggcttagcagaccaaaattaaaatctcaattatttttaaattattaatgacagacaactagattgagtgaacactggcatctcttttcaaataacttagtttagtggatgagttaaacataaactagttattataatgcagcgaagtatgtgaaaaatttaatttgaaccctacttagcttaaaatcctgacattctaggatgcaagtcctgcaaactttccatatgtaatcaacaattttctaaacatgcatg

SEQ ID NO: 520008 - DNA, 609 bp, Homo sapiens
tcttcttcacgggattttctatgtgtcagagacacttgtcccccattctgttttcctgtgtaatctcaaaattgacaagggtcttcactgtatgtgaaaaggatgtctgtgttgcttgattttatgtgtgactactgtttgcgattgtccttttcccaatatgacatgtaattttacagcacagatagtttttcaaaagaattacattcccaggcttagcagagggagcggcctacttrttgaaatgtgaaatcgaatctctgaaacagaaacaccaaattattacactaatctgtaaagtagctataaaacgttatttttcagagtgaagtatctgtcaagatggctagttttggtgtataaaagaaacggtattttattccttttatttctgtaaacagattaagtctgtgtgtgtgtgtgtgtgtgcgcgcgcgcgcgtgtgtgtgtgtgtgtacatgggatataatacaaatctacctcgacttataatgagttacatcctgataaccacaggccaagatgtgttatgatggatctggatatactcataagttgaaaatattttaggtaaaaaatgcatttagtacatttaacaaaaatactggc

SEQ ID NO: 520009 - DNA, 501 bp, Homo sapiens
cattctttgatgcatgttccctgtcttgggcagcttggaatactgtaagaaaataccatagaccgggtgacttaaacaactgacatttatttctcagagttctgaaagttgggaagtccaagattaaggtgctggtatatttggttcatggtgagggcccactccctctctggttagtagatggcctccttctctctgtgttcacatggcctttcctggatacatgtttacggagagagaaagagaagggtggttgggtgggaggtggtctagtatctccaccttttcttataagaacactaacattatcatgagaacaccacacttaggacattatctcaacctaggttcctcccaaaagctccatctccagatactatcacactgccaattaatagatcattgaaaataatctatkaatatttgaacaatgccaatcatcttcaatagattaattttagggagacacaaatattcagttcataacagttcctttccttg

SEQ ID NO: 520010 - DNA, 589 bp, Homo sapiens
aaaagtattcaaaatatatttctgtgtgcaaaacattttcataatggtcttgtttaaatgaaagtatttagaatagcacattgtaaaattatgctgcagagcacaagtatttttctctttagaagacacataataaaatagaatcatcagtgttttttcataaacatgaatctttagagtgttacttgatcctgcayaataagggtacttttttgcttaatgtaagcatagtatactaattcttttaaacttcagaaagcatatttacagtctaggcagatgggacatgaaggtcacacagcatgagcagtgaaatatctcatttacctagagttctagagagaattttaggaactcttatttattatcagtgcataaacaagagtaaactctacaaaactgtttgcaaaactctcctctttctactcagaaggctttccctagaataatcattatggagtctgtccatcctttactcattcactgcatggggacaggtgttagttatgagattggtgaatttagaaagctaaccaatttcatacctattttgggattctcaattcacaaacttttgtgcgtttcttaa

SEQ ID NO: 520011 - DNA, 484 bp, Homo sapiens
gatagatttaggtctcttccttttgctttgtgaaagcatctagtgtttaggtgtcagagagggagatatccttacaaagcagagattatcattacaggtttacatttcttacaaagagtttcaaaataaacaggtaaatgccaaaaacatatattttggagacggattaattcactagttggtctwttcaacttaacttgtttcctaatgagattaaattcatgcacaaataaccaaaccaaaaattaaaccaaaagaatactcaccagaaaggatgtcctttacaagagcagatcccccaaaatgtaagagttcactgaaaaggtgggagctcaaaccaagagaggacttatctcgcagcataaagacaacttgtacaagtgaagatcacaataggctcaggtgagtatcatacacaatttcaagtatcgccagatacttgaaagccttccaaaggctttctttgttactgtttggataacag

SEQ ID NO: 520012 - DNA, 484 bp, Homo sapiens
gatagatttaggtctcttccttttgctttgtgaaagcatctagtgtttaggtgtcagagagggagatatccttacaaagcagagattatcattacaggtttacatttcttacaaagagtttcaaaataaacaggtaaatgccaaaaacatatattttggagacggattaattcactagttggtctattcaacttaacttgtttcctaatgagattaaattcatgcayaaataaccaaaccaaaaattaaaccaaaagaatactcaccagaaaggatgtcctttacaagagcagatcccccaaaatgtaagagttcactgaaaaggtgggagctcaaaccaagagaggacttatctcgcagcataaagacaacttgtacaagtgaagatcacaataggctcaggtgagtatcatacacaatttcaagtatcgccagatacttgaaagccttccaaaggctttctttgttactgtttggataacag

SEQ ID NO: 520013 - DNA, 484 bp, Homo sapiens
gatagatttaggtctcttccttttgctttgtgaaagcatctagtgtttaggtgtcagagagggagatatccttacaaagcagagattatcattacaggtttacatttcttacaaagagtttcaaaataaacaggtaaatgccaaaaacatatattttggagacggattaattcactagttggtctattcaacttaacttgtttcctaatgagattaaattcatgcacaaataaccaaaccaaaaattaaaccaaaagaatactcaccagaaaggatgtcctttacaagagcagatcccccaaaatgtaagagttcactgaaaaggtrggagctcaaaccaagagaggacttatctcgcagcataaagacaacttgtacaagtgaagatcacaataggctcaggtgagtatcatacacaatttcaagtatcgccagatacttgaaagccttccaaaggctttctttgttactgtttggataacag

SEQ ID NO: 520014 - DNA, 484 bp, Homo sapiens
gatagatttaggtctcttccttttgctttgtgaaagcatctagtgtttaggtgtcagagagggagatatccttacaaagcagagattatcattacaggtttacatttcttacaaagagtttcaaaataaacaggtaaatgccaaaaacatatattttggagacggattaattcactagttggtctattcaacttaacttgtttcctaatgagattaaattcatgcacaaataaccaaaccaaaaattaaaccaaaagaatactcaccagaaaggatgtcctttacaagagcagatcccccaaaatgtaagagttcactgaaaaggtgggagctcaaaccaagagaggacttatctcgcagcataaagacaacttgtacaagtgaagatcacaatrggctcaggtgagtatcatacacaatttcaagtatcgccagatacttgaaagccttccaaaggctttctttgttactgtttggataacag

SEQ ID NO: 520015 - DNA, 528 bp, Homo sapiens
gaaggaagggctcattttacaaggaagtgtttttgacgattttgcatggttgtctttatctctaaagcataattacacttataatctgaaaagtatataaaagatagagatattaagttgtttgttaaaaataagtaatctgaatgttcagaatgacttcrtctcccttgttctatagtgcttctttcagtgttactagccatgtgatcctcagctttaaatcttacaggctttttcttgtgaagtggtaactgtaagaaccatgaacttggatctagttactacattcgccaattcttcattttgtggtagttgttgttatttttctttatgagacagggtcctgctctgttgcccaggctgatgtacagtggcatgatcacggctcattgcagccttgaactcctgggctcaagcaatcctccaacctcagccttctgagtagctggaactacaggcatgcaccaccatacctcaccattttctttttttgtatatatacatttttttttcggtagagaatcagtt

SEQ ID NO: 520016 - DNA, 545 bp, Homo sapiens
ctggcccaggccacagccaggcaccctactgggaggctctaggatgtgggtcaggcagatgaggtgctgtggaaatagtgataatggggacaaggacctgccattcttctggagcccttgcttggtgccaggtgctgtgaaggcacttcatgtacattgcattatccaatcttctcaastaccctatgagtaaggctctgccacgcctcgcactttatgggtggagaaactgaggcccaggtgataagtagcccacctgaggctctgctcagatgtggccaaggcaagattcagctcaggcactcgggttctggcatcctcactccagccccaacccctgtgtttccctgtgtgtgttcagaaccatggacttgcattccacttcagcttgggctatgtcatccccctctgagcctcagtttcctcctctgtacaatagctgcttcccagggtgacagtgagccttgagtaaatgactgctactcagagccagcccgaaaaatatccttcaagccttggctcagacatcgctgtctcggcaaggc

SEQ ID NO: 520017 - DNA, 639 bp, Homo sapiens
tgcctcccatgcagcagaagcttatggaatagygtaaattagggcatctccatgtcactagacctacagagtctatggaaggttgctaacttacctagtgaattccaagcatggaacaaacagttggaaagaaagagtctaaaagttcaaagaattgctgcttctctgatggcaagcaggcatgtgggaggctgggtcttggggtaaagagtcagagccacatttaggggaattgctgaaaacagattccaggagaaggtgtggcatggaacatcagatggctatttcacaaggcttttcaacctctggatcacaactgttctcttttttctttaattaggaaggattgtgtcctcagactttcttcagatagccccaaaaggccccatcctaggagtagaccagccttcctggctagcagaaatattactcaaaaagaaatgtaagtcatgacttccaggaacattgaggctcctacctcatttaccttaacccctatcgagtatgtttgccaggcttaaaagtatatattattattcaagtaatgcactattatattattttgtaaaaattcaaatatgtggaattttcagagtcaaaagtcaaatgtctttgacatctttgtcattccctttacct

SEQ ID NO: 520018 - DNA, 442 bp, Homo sapiens
gctgtgaggccctgttacagaggagcgcggccttgtgactaggagccacttcccgagtcgtgatttctgcatcccacagttttgctttttcaaccccrtgatagaaaagcctagagcttactcccctcacaccctcacactgcatccttcctgggcttgaaaccattcttaaaagaactgcactatttttttttttaacattctatatgcttcacacttactcgtttcatatttttatacataaaatcctcccactctctctccatcacaacctcactacctccctccacaaaatactttttttttttttaacagacattttcagaacatcagggatatatcctgccctgggatgctgatgaatggccgctttaagactcactgagacactttggtgcacggctcagagtgctctgaaggagtagttttaattcagcagttt

SEQ ID NO: 520019 - DNA, 628 bp, Homo sapiens
tgatcccaggccataatgtctttatccttttatttatttatttgtttattttttgagacggagtttcactcttgttgcccaagctggagtgcaatggcgcaatctcagctcactgcaacctctgcctcctgggttcaagcgattctcctgcctcagcctcctgagtagctaggattacaggcatgcgccaccatgcccagctaatttttgtatttttagtagacatggggttacactatgttggccaggctggtctggaactgctgacctcaggtgatccacctgccttggcctcccaaagtgctgggattacaggtgtgagccactgcacccggcctatccttctaaataaaagaaacagtatatgactgagctgtttctccccttatgaaagaactccaycctgttgccaccttgacttcttagtgttttagaagtcaagacaataggttagaccaagccaccctaggaaaaagaatgaacttgagtccccagtgctaaagtaaacccccaagacgaccaatgagcgagttgatggtgttggtcttacctgggccctggattgattggtccgttggtgtggggtacagacaggatgctggcatggggtgtggaggataaggaagtc

SEQ ID NO: 520020 - DNA, 603 bp, Homo sapiens
tgccaagaactttataattattttttgtttttatcactacgtaaataaactgagaaatgactattttttaatccattccctattttaatacattttttaatacattccctattatggcaatgaggaataaataaaagtcagtcaacttgcctaaggtcttgtaactgggaatggaactcaccctgcctccaagccaagttcccctcctcccaccccactttcccctcttttgtctcacaatgacagggatgcattatctagggatccagtaactaattgatctgtgattaccactcgtgatcaggctttattttcaggaattaactgcacttccaatcaaggtgattttyttccccatttttttcctagatgtagctaacatagagaaacccagagtgtgagggataagaaatatgtaaatcagtccctaagtaacagcataatttcacttaatccaccctggagagaaagcctccttggagagaaagagaggaaaatgtggcagggtaaataagcactcctcaagaaaaccacacctgaagaaccacaggtggttgggctttgcccataaactgttgggcttttattatgagaccagctttc

SEQ ID NO: 520021 - DNA, 652 bp, Homo sapiens
tgcaaatagcgtatctttgaatatatcataatttatataaccaatatgctgttaataaatatttatgaaagttggttttggttttaactgttatgaacatcgccgtggtaaaattcctacatttaaatctttgtgcacatacatgattattttctacagatatagttttagaaattgtactcttgggtcagggtgtaaggacaggtgttaataataaatgggctgggcgctgtgctcatgcctgtaacctcagcactttgagaggcagaggtgggtggatcagttgaggtcaggagttgcagaccagcctggtcaacatggtgaaaccatgtctctactaaaaatgcaaaaattagctgggcttggcggcacacacctataaycccagctacttgagaggctgaggctggagaatctctggaccccgggaggcagaggttgcagtgagcccagatcgcgccactgcactccagcctgggcgacagagcaagactcttgtctcaataaataaataaaaatacaaaaattagccaggcatggtggcacgcgcctataatcccagctacttcggaggctgagacactagaatcactggcaccagggaggcggaggttgcagtgagctgagatcgtgccactgcacgccagcctgt

SEQ ID NO: 520022 - DNA, 533 bp, Homo sapiens
tctgttcatccaagctaggcttggttgggtggctctatttaaggttgtggtagctgtggcatctctattcttcaactctctcagtgtggggcttgagttttaggggcagaggttccccatgggaatattcttctcacagctatggcagaaacataaggggacatgggaaaactatggggtgactaatgaggctctgtggtatgggttatggagggattctgtgtggtcagtgatgaggaaatctgtgtagttaataactaaggatctttgcratcagtgatggggttgtgtacatcttaaagcctagacctagagctgacacactcactctcacatgctcttggccaaagtaagtcacatgtgcaagtccaagttgaagagacagggaagtatactctgctcacgtgagggcaaggcaaggatgtagatgcaggaagggctgaaaggttggggccaatgacttcatctatcacgaaacaatggttttttttttttcttttaacaatttctctactttttttttccacccaaaa

SEQ ID NO: 520023 - DNA, 555 bp, Homo sapiens
gtggtttaacaagacctacaggtgattctgatgagcactagagtgcgagaaccagtgcattaaacatattccaggcacctacatgttcggcagctactaactgtagcacagtattctcccctttctgtctcaggatttgtgtagctctctgccccacccctccttctaagaggatgtcttccttccaccattatctcctttaacgggacagctatgtctcttctaccagcctccctcgtcatccggggattacacatccctcctctttactgcctcctcttactgaatttctatattccagtccttacctgcagaggcaagccggcctcttcagcctccagacaggcctccaaggggcttggactggtgctcctgctccccgaggggggcgctgctgcccctgcaggagctgcactggggagcaccacagcaggccgaggatgagggggtggctgcggctgcagagactggatggtgaaggtggaatagaggcccgagcgcatgtactcgttccggctgctgcgtgccaaacygcctgggcctgccattcctgca

SEQ ID NO: 520024 - DNA, 568 bp, Homo sapiens
tatgggaaaaaaggtgtatgagaactctctatgctttctggttaacttttctgtgaacctaaaattactctaaaaatagtctattaaaattatggacaattatctcaggcttttatgctacttgattatattattttatcacttgccctcaaccacacctattaccccatgaggagttcctcatgagtagttaacgaggaggagaaaatgtgggcttgatttacctacggatatgcatgctatgccaatatgaccaagaagaaatggttgtgaaaatcagtggtgaaaggaaacccttccagttagcagaatatttgtcagtatatgtggttttacacatcagtggaaggaaagatagctagacatatagatctagctcarttaatgagcaaaggctaacaggctggttaggaatttggaaaaatcataattgggaaatcagtaaaaagaagtcatgggaatgggggaaggtacttggatggaactcttagaatggttcctcttacaatagtgtaaacacattcatagcccatgcaaatgccagccgggggtatccatagcagaggag

SEQ ID NO: 520025 - DNA, 652 bp, Homo sapiens
attcctcaaatattgctatatgtaactttcaaaaaagatcacctctccacgagttcttgtccattccagcaaagggtgtcgttttccgccacagggctatggctgcagatgtagccaggcaaagcactatagaagctgatgaaagacttcaacttctgaattagttccctaaaagaaaaacaaaacatctgtgcataagaggcaagtaaactcagtatgagaaaagtttaatttccttatcagcatgacagaaaggctctgccaggctgattagagcaataaatgacttttaaagacattcttggctacaaggccacagtttagttttttttwaaaaatcaataaaatgatattagaaaaaaagttgactgccatataaggtgctgtttctatcagaaggatgatttaattccaacattcattttctaagacgttccacttccatttttcttattcagaatgctgttacctacattttcaaaggtgctgattacaaggtacactggagcactacatatcttttggtttctgagtgtaattgggtgcattgattgtaatttacaatgctattaccctagagatggtccgtttccatataggctctggctaatggttgcagatcagaattgcagggtgctcagaacagtataag

SEQ ID NO: 520026 - DNA, 226 bp, Homo sapiens
tgtgttttcttacgaaaacaaggatctttcccaagtctcccacctgctgtggaattccayccagtgcgtgtctagtcatctcttgcatttcatgtgcataacatttcactttagtcaacagtcatttgtctggaggctgctggagtcgttctcacaagacctccacctgtgggatgggtgcggcaagccagaatccacctaccatttgccacttcaccattcaaca

SEQ ID NO: 520027 - DNA, 510 bp, Homo sapiens
ggctcaggagggtgaaggcttgttttggaggtcatcccatttaatccttcccttctgcctttctctttgtttctcactgaagcccagaaagcttgcctggtcgtgattttttattattagtagtattaatactagtgtcttgcctttcggtttggatggcctgcagaactcatgcccagcagtgcacggccactaagcccactgaggcagggggcttaactgggctagggggcttctagctcccagcctctgtgggctatttttgcgggttttctcgctctctcccagcaagcctcgtgtctgtgggatgtacccagtctttcccgtgygcgcatttgaaaggagcagatgaaagctgctcctctgagcccgcctaattggagagaattgcagtttagaggtaagggttgggcctaataagcaagcaggggagggtgcatagaggagggggcgggctaggaggagaagagctttttatgaaaatgtgggcctccccactgtcattcccct

SEQ ID NO: 520028 - DNA, 591 bp, Homo sapiens
cacgccaacccttgaaagtaagaattatggctcttgttttacaccttaggacatggcggctctgagaagttggtctgactccagtgactgagctctttcccccgggcagctgtgtgctgtaagatgctacctctggagcactcccctctgccaatgtcttagagttcacactcaataaacatcttttcagagataagtacatgccacccactgctagccacacaccttgccaactctacttaaaaaataaaagcaaaaatcttcaagtattgattcataaggagcttgacgcattaatgagaactggtgtcagtgggtgacttgcgcagtcaccaaggggaggaaggcatcccattcctccttgctttccccagggaggaccccagggatcacctaccaaaaatcgtcaactcagccttcacayacgaatgcttggaacctggtgatcgataatgacaaagctgatgtttgttgatcgctgtgtagcagtcactgtgctaagaacttcacgtatatggtgggatagtatttcaaagcagggtgtctcaatcttgatactactgacatttggcaccagataattcttttata

SEQ ID NO: 520029 - DNA, 591 bp, Homo sapiens
cacgccaacccttgaaagtaagaattatggctcttgttttacaccttaggacatggcggctctgagaagttggtctgactccagtgactgagctctttcccccgggcagctgtgtgctgtaagatgctacctctggagcactcccctctgccaatgtcttagagttcacactcaataaacatcttttcagagataagtacatgccacccactgctagccacacaccttgccaactctacttaaaaaataaaagcaaaaatcttcaagtattgattcataaggagcttgacgcattaatgagaactggtgtcagtgggtgacttgcgcagtcaccaaggggaggaaggcatcccattcctccttgctttccccagggaggaccccagggatcacctaccaaaaatcgtcaactcagccttcacataygaatgcttggaacctggtgatcgataatgacaaagctgatgtttgttgatcgctgtgtagcagtcactgtgctaagaacttcacgtatatggtgggatagtatttcaaagcagggtgtctcaatcttgatactactgacatttggcaccagataattcttttata

SEQ ID NO: 520030 - DNA, 392 bp, Homo sapiens
tgtgaacacttgtaagccatgtgcctttgtccagtagcgtttcagtgctacctaagcatctctacagctattgtgtctgacctgctctggggattgaaacatatagttggaacaggaggcagtggctttttttttttcttcratagatttctaaaacctttaaatgaagtactgcatatatacagaaaagtacatagagcataagtatatagtccagtgagctatcacaaaatgaatgtacctgtgtaagtgccactcaggttaaagaatagagcattatcagcacccaagaaacccactgaatattccctccaatttatcatgctcttccttctctccaaaggttaccactgtcctgacttataacgccataggttagttttatttgcatt

SEQ ID NO: 520031 - DNA, 556 bp, Homo sapiens
ggtagaggaaaaagctttcctcccttacaccacctttgctcttccctgggagattggtctacatggaccacgtcaacaagactcctgggccgtctggtttcttgttggcttcaactgacaggcagcactttaggagactggggcagagaggagaggcagctctggagtatttctttctctccttgggaagatgactccatcaaatatcactgctcatcccaaactcacctactgtctcccttaccttctcccttacgacctrcagataatgagagctccactgctgctgctagtccaaagtttctgtaccagttcctgtagtttcacttaactacacccacaactttataattagttgcttgtaaataaactttcctcatatttagattgatcagagggtgtcatctgttttctgttgggaccctggatgatgtaggcatgaaaaccacttttgaggtgtgtgtatattggaggtagtgaaggagcagttagttaaaaggaaagaaagggcaggagaatggggaaagcgtcccaaaggaaaacagagctaagtctt

SEQ ID NO: 520032 - DNA, 556 bp, Homo sapiens
ggtagaggaaaaagctttcctcccttacaccacctttgctcttccctgggagattggtctacatggaccacgtcaacaagactcctgggccgtctggtttcttgttggcttcaactgacaggcagcactttaggagactggggcagagaggagaggcagctctggagtatttctttctctccttgggaagatgactccatcaaatatcactgctcatcccaaactcacctactgtctcccttaccttctcccttacgacctacagataatgagagctccactgctgctgctagtccaaagtttctgtaccagttcctgtagtttcacttaactacacccacaactttataattagttgcttgtaaataaactttcctcayatttagattgatcagagggtgtcatctgttttctgttgggaccctggatgatgtaggcatgaaaaccacttttgaggtgtgtgtatattggaggtagtgaaggagcagttagttaaaaggaaagaaagggcaggagaatggggaaagcgtcccaaaggaaaacagagctaagtctt

SEQ ID NO: 520033 - DNA, 502 bp, Homo sapiens
aagcgagagactccaggaaccagaccctggaccttgacctgtctattcttccttctgtaagaagacacgtaagtcacatcccttcccctatataccaagaaactatctgggagaggagctgcagagaaaagtagaagtgtgaaaaattggagtgattgggcatttttacttaaagatgtggggtatccattaaaggggctgtttaaatgactgcatcatcagctttgctgttacttccccactaaccagctcacccataaaagcatatcagttatgggaaaaatattaaaaccatattttctctgcatgttgaagttgtagttamgcaaattttgtaattccataagaactgaaactaatgtattttcttgttccttagctaaacaactctgggataaagaataggcttttagttgaacaatgctgagatcaggcaaaaacaactcagctacttgctccagtggatacccgctcctggaaaataagactgtggagctactga

SEQ ID NO: 520034 - DNA, 614 bp, Homo sapiens
gtagatggactcccttatcttgagttgattcataacatacactgaatgctgactagatgccaagtgccctgaagtgatagaaaataggctccttgcctcaaagactatatattttatttggggacttacactatacagatttgaaaatatcttaagccatctaccagtgctgttttaygcatatcatataaatatgagtcactgaagccactgaagtaagcacagtgaaaatttcaatggtcagagttgctatgtgatctaggttgccacctctatccctgtccagagaagcttgttgtcaattgataccaattctaagaaagagaactccagcaattccttaggaaaaaaaatataaatctcatgaatgaaacatagttgtagcccttgtgatggcagcagcgggccgtctggagcggccactgaaatcacactgaccgcagcagggaggtgctgctggggctacgtgttctgtggagctagtgggagccttccaagttgggatgggagctccctaggtgccactgcagccacccaagccacaacccgggcatccctgtgctctcaaggcccaggagcagggggaagcctgccctcctgggtgcagctacagc

SEQ ID NO: 520035 - DNA, 614 bp, Homo sapiens
gtagatggactcccttatcttgagttgattcataacatacactgaatgctgactagatgccaagtgccctgaagtgatagaaaataggctccttgcctcaaagactatatattttatttggggacttacactatacagatttgaaaatatcttaagccatctaccagtgctgttttacgcatatcatataaatatgagtcactgaagccactgaagtaagcacagtgaaaatttcaatggtcagagttgctatgtgatctaggttgccacctctatccctgtccagagaagcttgttgtcaattgataccaattctaagaaagagaactccagcaattccttaggaaaaaaaatataaatctcatgaatgaaacatagttgtagcccttgtgatggcagcagcgggccgtctggagcggccactgaaatcacactgaccgcagcagggaggtgctgctggggctacgtgttctgtggagctagtgggagccttccaagttgggatgggagctcccyaggtgccactgcagccacccaagccacaacccgggcatccctgtgctctcaaggcccaggagcagggggaagcctgccctcctgggtgcagctacagc

SEQ ID NO: 520036 - DNA, 565 bp, Homo sapiens
tacaaaacccaccaagcagccatgggaaatacgaaatggatcttcaaattacagaccctactgaagggggtaaggagtagaaggctgaaagaaagactgttcgttcactttcaagcatgcatcttccactgctgtgagacgccgatgcccaagtgtaagtggtgactggcacacatgacagccaccagcttctattctctggagccaacaaaggcccattccaggtgttgccctattccaggattccggccggcagggcagcttccagtgacacctgttttcctgtgattctaacagcacattcagtgcaaggcactttattatgagtggaatctttcaggcaaggataatatgtttccagagtgtcttagggactagaaacggagttaaggaatatgartaatatccacgagaaagactgaggagagaaaagtaaacaaaaacacataagaaagcagacacgaagccaggtgggggtgcaggcctctctagctggggaaggagctcactttgtccatggggttgacggagagggggtggcctcagggttgcagggtctcttgag

SEQ ID NO: 520037 - DNA, 565 bp, Homo sapiens
atcttatcttttcttttttttttgagacccagtctgggtctgtcgcccaggctggagtgcagtrgtgctatctcggctcactgcaagctccgcctctggggttcacgccattttcctgcctcagcctcccgagtagctgggactacagacgcccgccaccacgcccagataattttttgtatttttagtagagagggggtttcaccatgttagccaggatggtctcgatctcctgaccttgtgatgtgcccgcctgggcctcccaaagtgctgggattgcaggcgtgagccaccgcacccggccggtaacggtgaaccatcaccctacggtcgcctgacattgctggcaggtgggggagagccctctcctgccctgctcatgtctgatccctgtaacgtgggctcagacaaggagatcacggggtctgtctctcgccatcttcttgcctctacactgactttgctctcagcagccttgctgcgcgttggggagagaccaccatccagggcacagccttgcagggccccacgctcttcacaccagaaagaagaggaaactctctcc

SEQ ID NO: 520038 - DNA, 600 bp, Homo sapiens
tgcatttatcttatcttttcttttttttttgagacccagtctgggtctgtcgcccaggctggagtgcagtagtgctatctcggctcactgcaagctccgcctctggggttcacgccattttcctgcctcagcctcccgagtagctgggactacagrcgcccgccaccacgcccagataattttttgtatttttagtagagagggggtttcaccatgttagccaggatggtctcgatctcctgaccttgtgatgtgcccgcctgggcctcccaaagtgctgggattgcaggcgtgagccaccgcacccggccggtaacggtgaaccatcaccctacggtcgcctgacattgctggcaggtgggggagagccctctcctgccctgctcatgtctgatccctgtaacgtgggctcagacaaggagatcacggggtctgtctctcgccatcttcttgcctctacactgactttgctctcagcagccttgctgcgcgttggggagagaccaccatccagggcacagccttgcagggccccacgctcttcacaccagaaagaagaggaaactctctccaaatgagtcttacttggatcttgcttgc

SEQ ID NO: 520039 - DNA, 615 bp, Homo sapiens
ctgcatttatcttatcttttcttttttttttgagacccagtctgggtctgtcgcccaggctggagtgcagtagtgctatctcggctcactgcaagctccgcctctggggttcacgccattttcctgcctcagcctcccgagtagctgggactacagacgccygccaccacgcccagataattttttgtatttttagtagagagggggtttcaccatgttagccaggatggtctcgatctcctgaccttgtgatgtgcccgcctgggcctcccaaagtgctgggattgcaggcgtgagccaccgcacccggccggtaacggtgaaccatcaccctacggtcgcctgacattgctggcaggtgggggagagccctctcctgccctgctcatgtctgatccctgtaacgtgggctcagacaaggagatcacggggtctgtctctcgccatcttcttgcctctacactgactttgctctcagcagccttgctgcgcgttggggagagaccaccatccagggcacagccttgcagggccccacgctcttcacaccagaaagaagaggaaactctctccaaatgagtcttacttggatcttgcttgcgatatcctcagtgg

SEQ ID NO: 520040 - DNA, 615 bp, Homo sapiens
ctgcatttatcttatcttttcttttttttttgagacccagtctgggtctgtcgcccaggctggagtgcagtagtgctatctcggctcactgcaagctccgcctctggggttcacgccattttcctgcctcagcctcccgagtagctgggactacagacgcccgccaccacgcccagataattttttgtatttttagtagagagggggtttcaccatgttagccaggatggtctcgatctcctgaccttgtgatgtgcccgcctgggcctcccaaagtgctgggattgcaggcgtgagccaccgcacccggccggtaacggtgaaccatcaccctacggtcgcctgacattsctggcaggtgggggagagccctctcctgccctgctcatgtctgatccctgtaacgtgggctcagacaaggagatcacggggtctgtctctcgccatcttcttgcctctacactgactttgctctcagcagccttgctgcgcgttggggagagaccaccatccagggcacagccttgcagggccccacgctcttcacaccagaaagaagaggaaactctctccaaatgagtcttacttggatcttgcttgcgatatcctcagtgg

SEQ ID NO: 520041 - DNA, 653 bp, Homo sapiens
tcaggagcccactgcccagatgtaatgacgacagtaatccatttatgaagcagagccctcatgacctaatcacctctcaaaggtcccacctcttagcatggttgcattggggattaagttgtcaaaacatgaacttcagtggacacatccaaaccacagcaccaggatagggcycctggcgcgttagtaacacttctcagttagtatggagttggaagaagattgtagattaatttttggggaaatcccaacacttaaggagcaggcagaagaagagaaagccataaaagagcgtggcaaagaatctgtcataagagatataggaagaaatccagaaaggagaatttttgtggaattgagagaaacgcagtttcaagaaggagggtagtcacttgtaccaaatgtggaagaaaggtcaaaggcgttgagatgggaattgtatgcaccagatttatcacttaggaagctgtgtgaataccttcagcaagggcagtttctccactggagtggtgtttggcaaattttatttctttcctggtggggttggggagtgaaatttcagcttttaaatgtgtgaatgaagagtgaggaagtagaaagggagagtgtaaggtgtttactgggaagcttgttggtagaggaaggagagggaa

SEQ ID NO: 520042 - DNA, 570 bp, Homo sapiens
cccacctcttagcatggttgcattggggattaagttgtcaaaacatgaacttcagtggacacatccaaaccacagcaccaggatagggctcctggcgcgttagtaacacttctcagttagtatggagttggaagaagattgtagattaatttttggggaaatcccaacacttaaggagcaggcagaagaagagaaagccataaaagagcgtggcaaagaatctgtcataagagatataggaagaaatccagaaaggagaatttttgtggaattgagagaaacgcagtttcaagaaggagggtagtcacttgtaccaaatgtggaagaaaggtcaaaggcgttgagatgggaattgtatgcaccagatttatcacttaggaagctgtgtgaataccttcagcaagggcagtttctccactggagtggtgtttggcaaattttatttctttcctggtggggttggggagtgaaatttcagcttytaaatgtgtgaatgaagagtgaggaagtagaaagggagagtgtaaggtgtttactgggaagcttgttggtagaggaaggagagggaag

SEQ ID NO: 520043 - DNA, 570 bp, Homo sapiens
cccacctcttagcatggttgcattggggattaagttgtcaaaacatgaacttcagtggacacatccaaaccacagcaccaggatagggctcctggcgcgttagtaacacttctcagttagtatggagttggaagaagattgtagattaatttttggggaaatcccaacacttaaggagcaggcagaagaagagaaagccataaaagagcgtggcaaagaatctgtcataagagatataggaagaaatccagaaaggagaatttttgtggaattgagagaaacgcagtttcaagaaggagggtagtcacttgtaccaaatgtggaagaaaggtcaaaggcgttgagatgggaattgtatgcaccagatttatcacttaggaagctgtgtgaataccttcagcaagggcagtttctccactggagtggtgtttggcaaattttatttctttcctggtggggttggggagtgaaatttcagcttttaaawgtgtgaatgaagagtgaggaagtagaaagggagagtgtaaggtgtttactgggaagcttgttggtagaggaaggagagggaag

SEQ ID NO: 520044 - DNA, 458 bp, Homo sapiens
cctgtggactccagacttgccagttccccgaatcacatgagccccgattcctcccactctctctctctatctctgtatctatatatctcctgttggctctgcttctctggagaatcctgactcatacaaaactgaatcacaaaaatgaaaaggtagattcattcgtgtaatcaggaaagttgtagaagatgttctagaggacagatcagagaagtaccaagagtggaaaagggctttgtggctcctagtaaggttcgtcaaccatcagcatgggttttacctgggaggttgtttaagacacagattgtcaggcccagcccacgtgctttcatataakatgtgaggggcactactatagcccagtcactgcaagtgcagatgctggagtcagacccccacatcccagctcctccccttcatggctgtttaagcttggctgagttagttgccttctctga

SEQ ID NO: 520045 - DNA, 458 bp, Homo sapiens
cctgtggactccagacttgccagttccccgaatcacatgagccccgattcctcccactctctctctctatctctgtatctatatatctcctgttggctctgcttctctggagaatcctgactcatacaaaactgaatcacaaaaatgaaaaggtagattcattcgtgtaatcaggaaagttgtagaagatgttctagaggacagatcagagaagtaccaagagtggaaaagggctttgtggctcctagtaaggttcgtcaaccatcagcatgggttttacctgggaggttgtttaagacacagattgtcaggcccagcccacgtgctttcatataatatgtgaggggcactactatagcccagtcactgcaagtgcagatgctggagtcagacccccacatcccagctcctccccttcatggctgtttaascttggctgagttagttgccttctctga

SEQ ID NO: 520046 - DNA, 549 bp, Homo sapiens
caggcaactctggagaaaagttttggacttaagtcacagactaaggttctagctctgggcctggtgccaactgtggtaccctccgagaacaagtcaccttgcctgtctctgagctgcagattcctcattttatctgcaggatgcgggtactgatgatgattctaatgcctgtcccataggattgaaggtgaggattcaatcattcagacccagagatacaattttcacataaatggttgaccagcgaaatgtcttggcaacatggggacccctaggggcccactaagctgcttgcgtacacttggcaatgcgattccgggaaggctgtgtgggaatgcccctagcaggctgagcccagagcctccccacagtggaccctcagcagtgggagtcccctccccttgctcagtggtagtggggaagytgtgctcagtcagccaaccagccagaggccccggggaaaaggttggaaatgagactgaacacaccgacgctcggctttttccagacttgggcacctggagctcccctagacagggcaggtgccag

SEQ ID NO: 520047 - DNA, 607 bp, Homo sapiens
gctgcctgtcctgatgtccgagctcacctaggaatcccatctctgagctcctgtagctttctgggatgccatctgtgcctctgccctgagaataccatcctataattggctagccatgtgtctgtagcccaccaccatgctggagagctcctaggagccaagggctggatctgactcctgagtcctcagtatgtggctcagggccaggccatgggcagagtcagtattgtctaytgaatgaatgaccaatcctcagtactataagaatagtattgcaagccaagctccgctttcccataaaggaagctgtccctgggccaaaaactcagggttggttggctggacaaacagaatcagtcaggagtggggccaggcacctagagggagccttaccaggttgactgcatcccagtggtcaatggggcggtgggctgtattcaggtcacccagaatgatcacatggctgaaaaacacaatgtgggattgttagaaaggggtgcagcagtcctggcccatatactttttcctgggcccaagagctcagacaggccctctcccatattgaggcttcctagccaacagcaactcataacagcctacctctcca

SEQ ID NO: 520048 - DNA, 617 bp, Homo sapiens
taacattcctagcttttcccatgagctgggtgctgttccaagtacatgtatacagtatatgaactcatttaattcaacagcactttaaggtaggcagttatattatcccccattttacatgaggaaagtgagtcatgaaagggttaaactcacattttaggtcctataacttgtccatggataagccaggatttacatctaatcagtctggctccatacccttaactgctaagctatattataattaggttaaaaaaaaaagattttgttactgtttgcacattatccatatgggggcctagaagatttccttcattcgtggaagaytgggggtactctggccaatgatgatggtagaccactgggtaatgaactaagcaggagagctggatgatcctaatggtgaatgccttcaaaatatgcttgttctgatatcagattcagcaagcaataccctggaagactatggtttcatgtgtagcctccctacaggagaaaaatggtgcatgctgcccctctctatcactaccccctgcctacaggctgagtccaagcttcccacattcatagccttcgctgatatggtatgtaactttccactttggcttccatcactt

SEQ ID NO: 520049 - DNA, 526 bp, Homo sapiens
agctgctcactctcaaatgtcccctgattccttcaagcagggttagcctctctttggtgtcactgaggtccctaatcttggagttttgcactcatttcttgctttgtatgcaatttgtttgcatgcttgtctctgctaacagactgttagctcctaagggaaagagacaattatttatatttcatattcatacactatctagcacataatgaaatgaagcattgaatgaatgattgaaagaacaaacctaatatattgaatattatcactaattagaagatttgttgaaaataaattggtgcctatattatatatcagtctcttgtcaagttgggcagtgtgaatccaccctagaaattttatcacctstaggtattgagaaaaatgtgaagatccaaatctgtaaaactgagactaaactctagaaaagagtgattctgatagtctgctctgagcagttagccagactcctagcctgacatttcttctctttgaacacaaagacagtcttcccagaggggtgaca

SEQ ID NO: 520050 - DNA, 458 bp, Homo sapiens
gctgcactcactttcctgcttggcttcttggaatgacaaggacaatgagttactcgttttcacaccstcaaatcctagcacagggcctggcacagagtagggaatctgcaaagtttaatataatagcattgagccgggtgtggtggcttatgcctgtaatcccagtactttgggaggctgagttgggtggatcacttcaggtcaggagttcaagaccagcctggccaacatggtgaaaccccctctctactaaaaatacaaaaaatagctgggcgtggtggtggccacgtgtaatctcagctactcaggaggttgaggcaggagaatcgcttgaacccaggaggcggaggttgtagtgagctgagagattgtgccactgcactccagcctgggtgacagagtgagactccatctcaaataacagaacaaataaataagcaacaacagtgcacttgcgc

SEQ ID NO: 520051 - DNA, 474 bp, Homo sapiens
ctgggttcaagtgattctccagcctcagcctccctcctgaatagctggaattacagatgtgcaccaccacacctggctaatttttgcccaggaccacacagtatttttagtagagacggggttggccaggctgggctggaactcctgacctcaagtgatccgcctgcctcggcctcccaaactgctgggattataggcgtgagccaccatgcctggccactccccaaagttttaaaactggaagatttcatatttcagatccagattccctgtttctctgggggcattaggagatccrgtaactctgggcccaagttctcagccggcctgagcgccaccccaccgccacccattttgtttctttcctcacatgagcccaggcagagaggcctgggcacaattgagcagggggtgaagtctgcccctgtgtcctccagtccttaccacccctaaccttccaacctgggccctgct

SEQ ID NO: 520052 - DNA, 613 bp, Homo sapiens
agaggtcctgatttaattagtctggggtggggcccggccatcagtatttttaaaagctcccaggaggatcctacaggcaatcaaagtgaagaatcagtggcaggcagaggctccaaggacatttccgaggcagtccagtgccaggaagaaaagaaacagggtctcaagagggagaatgtgagcagcaatcagggcagcctccttgaggtggtgacattcagccctgtgcagatctggggaagagcattccaaacacagggaacagcatgtgcaaagtgcactgagtgggtttcaggaacagaaaagtgggtgttcctggaratgcatgagatgggaggtagggtaggagatgaggctggagaacgcaagagggcagagtgaaggaggctggattcctttagggtagaaggcagactccccctgtaggggagtgacaggatccatcacagagtatgtggctgctgtattggactgactgactgaggctggactctagaggtgctagaatggccaaaggaggccagtggggaaggctctggtcccatcccaacaggtgatggtggtagccaggagcacctgctgtggggaagccaggagacagtgcctccccaga

SEQ ID NO: 520053 - DNA, 351 bp, Homo sapiens
aaaaagtgttaggtttttttcctttctatccttacacatgttgaatttaagataaaataaaataattcgtatatattataaaagtatgcatacaatatgaactcactaatgtttaagtacattaaaaaaaggaattagaaaaacttgtgtcaaagcattctggtggctttccctaagtggcaggagatttttgttttctacctttttacatatttcatgttaactgaccactccacagttacaatataggactttcatgattaggcaaagaaaggccattcctgctttcccaacttcaagaaaaaaaaarggggggaatttgctctgaaaaataatgatgatgtcagtgat

SEQ ID NO: 520054 - DNA, 585 bp, Homo sapiens
ttgatggaggaatgaaagaagtggggaaggactttccaggagtgtggcagaggggggtccctaagaggaaagaggggagagaggggtaccaatggacaaactccaggaagctgcctcaggctagaacctttgcctgtccctcttgttcagccgatgaggaacagggatgcttacggtggcgatgaaggagctgtccagggtcattggtgagtcagagacggagctggggtttacccaggtctcgactcacagccccaccctggtgagaggcacaaacctccagcctgtctgctttttttggtgacctttcaggtcccatatctgcttctcccttctcccagtggcaagaacagtgctgctgggccccaggacctcgcttctgattggcagatctggcagcttggtcagggagggcctttgacctgcggtatgtggtaagcagaggaagcaggcacaggggctcagcytgcagggagtgagggggcaagagcctcttttctggggaaaaagacttcaaaacattcaaaccacctgatatcccagggctttctctagtgccatgaaatcagggaacccccttgggcc

SEQ ID NO: 520055 - DNA, 624 bp, Homo sapiens
tgaccttgggcaagtcagttcatcttcacctctcygcatcttggtttctccatctgtccaatgggtattttccccctccccattctcagagttgctgagctcaaatggggtgatgagcactaaggtgttttgaacaggaaaagtgaaaagggcttctgcagggcagctcctttgaagccccaatctccttgccctcacctgtcctcccaagaaggtgtaaagccttttgtggagttccacctaaaacagaggcctccggttagctccttcctcagaccctgctgggttatctgacaggcccatagcctaacctggctggtgactggctgcttctctctagctggcacagccctggtgtccaggctacgagagaagaggcctgggtctctgcccagtggcttctgcagcaaagggttttctagtcagatagaacagggtttgagccccagctctgccacattttagctgtgagctgtgatggttagttttagccattttacaatttgatggtgtcagtccgactgcaccatgggatacccagataactttggacttggactggaactaaaccactctcctgggtctccagcttgccgactcactctgcagatcttgggacttgct

SEQ ID NO: 520056 - DNA, 606 bp, Homo sapiens
tgttgaaaccgcaacccacaactggagaaacactatgcaatggggtgactccctgaggcttctttgccagatgaagtttttcaaggtaggtattccccaaagaccctcatactccatcggaaaaacctagagctccactccttggggttctactttagtaagttaaaggtgtayttttaacaaatctgagcaattctgatgggcagctaggtttcggaactactggtgagtctcaaaagccttattctcaaatcactgaatgtgcagggtttgtttgcacaatggaccactgtattttaaagcagaaatctccaactttatgaaattctcctcccaccaaaaaagtctaccaatttgagataagaaaacataacaaaacataatgtcatgcaacccctcactttgaagggtgggccatgaagacactgtcactagcagtatgaggactgaagtggtaaagccacctgaggacagaagttggattagatgagccttcttgtaaaatccctactagcctcatatttggttggggtgaccaaacccaataaatgtagtgttgctctttcctcaaactggggccccaggcactggcaagcaggtagtcag

SEQ ID NO: 520057 - DNA, 575 bp, Homo sapiens
tacctcaaggggttgttgtgaagataaattagatagtacatgcacagtgattgtttttataactggcatatagaaaatattcaatacatttcaggtttttttgtttgtttgttttgttattaccattatgactttgtttaatcagcaagcattaagtattctcacgggtcagggatgctggtgggaatgaagagctgaatacaagtcatgctgctctccaagagtatgcagtctggtaggaaagacagacttataaacagatgatcttagtataatgtaacgggtaccacagtggaaacgtgtcaagaatgcagacatgagggtagtaattaactgccttgagaagtcaggcaagcaggcttggagaagagctgscattagagctagatcttaggacgagttggaatcctcagggaaggaatgggcagaggcattctaggctgagagaatagcatttgcaaaggcatggagggcatgagaccaaatggaaccctggaaaattgtaagtccttttatattgctggagcttttggctgggagctggggaatggaaggaaaaaggggtcctgcatcct

SEQ ID NO: 520058 - DNA, 493 bp, Homo sapiens
agtcaggagctataacctctccatgacagacctcaaggaggctccctagcaacagcaaatggagttgtccagggttagggttggagacctggctgttctgtgggaattgcaagctttcttaagaaatctctattttattacagttatccttctttgtgcgattgcagtgggctgaatggaaacacctggtttgtgctgtgttagactgcatgcttgagtgtttgggatttcaagctcgctctctttctctcactattaggacttttctttttcttcttcctcttctctctattttggttctattctttttttttcttttttctttttttttttttttttttttttgkggtggtcactgctcagtgtaatgtgcagaatgatttgttttttgtttttttttttttttttggtccttcattgcatcctgccatacccatgagcaaacagtttggcattaattatatatcactgccaccctctgaactttgaaaac

SEQ ID NO: 520059 - DNA, 558 bp, Homo sapiens
tccgtccaggcccaagaggtatagccagaccatatgtgtgatggcagggtcccagtctggggttcacatgcagttggtggcaggacttgtcctcaggccagggggcactttgactcccagtgcagtgacctctgccaccccacaaagcctctctgtggagggggcgcattgtgtacggggaagcagtctcacaggttggcccaaactgctctgggacctcagagagaagggaaggcaatgaatgtattctttagccaacatctargcagggggccctgggatggctgggtggcaggtctgagggctgtaggtggccagagcccccatggggtaatgccaaaactcagatgcccagatgcagtcatagtgggtgggagagtgaagccggaaggataacccaaagagaaaagggaatgaaagcaatagccaacatttactggggaccagaaactgggacaagcattttataggacagtgtctcccttgcaagcctctcaataaccctaagaaagagaagacatttttacccgcccactatacagagggtgaaactgaatt

SEQ ID NO: 520060 - DNA, 598 bp, Homo sapiens
ctgttttcttctagatcatgaaggatgacggcttccctgaagccatgctgagatccctggggtactatcaataaacaagatgggggacatgggggtgagggggagacagaccttcattcctctgccaaggcagagccaacatgaataaaaatctcagaactgtggggtttttttgttttgttttgttttgtttgagatgagtctcactctgttgcccaggctggagtgcagtggcgtgatctcggctcactgcagcctccgcctcccgggttcaarcaattctcctgatttagcctcctgagtagctgggattacaggcgtgtaccaccatgcccggctaatatttgtgtttttagtagagacggttcaggctggtctcgaactcctgacctcatgatctgcctgcctccacctcccaaagtgctcggattacaagcgtgagttaccgtgcccagccaaagctgtgtttttaaagcctctgtcattagtcttaggttttgcaatccagggcaattccttagctctcctgagcctcagtttccttatctgtaaagcagggttattaatattaatatagatctcactgagttgataatga

SEQ ID NO: 520061 - DNA, 628 bp, Homo sapiens
ctggcatctgtgtccgagggcagtgctgagctcctgatggagggggagcggctgcaacccaaggtaggcagcagaacccacgcagtcccttctggtgctggaacctcagaggctcagaccagtcacatggcaactcagtggtggagctgggatgacaccccaaatctgagctcttcactaggccacactgcatcccaatgagaaccagagacttgcaagccacagagcaggcaactcttgaagcaatgccaggacgctagatcccctggtctccagccactggacacacactccatccactgctggacaagatgaggctcctggaaaagctaccacctatatggattgaagttgtgtttgaggtccatatctggacatgttcctgatgatgacaaatggtggctcagaagaatctaaagaacccagaaataaaggaggctatagtctgctttccatgtcctgcacatttgacaygaataatctaacccttagaaaatccccttgtcagtccagtaaacaaagacagggctgggattaagagtgaagatgtttattggggatagtgtctatgaaaggtggaagaggaggaagcaggaagaaaaactcttcaggccaagaggccagtcca

SEQ ID NO: 520062 - DNA, 403 bp, Homo sapiens
ggtttgaacccaagctatttggtaccagagtccacatttaatcatcctattatgctgctacttcctttcctggcctctctgaacttctagaagttcagcaacctggmctcttggaatcatgcctgtcctgtgtcctttatttcctctgaatgggtattgtggattaaattgtgtccctctggaagatatgttcaagcctttttttttttaactcttaagttctgggatacatgtgcagaatgtgcaggtttgtttcataggtatacatatgccatggtgatttgctgcacctatcaacacctcatctaggtttcaagccctgcatgcattaactgtttgtcctgatgctctccctcccctcacccccacccacaggccctggtgtgtgttgtttccctccctg

SEQ ID NO: 520063 - DNA, 543 bp, Homo sapiens
tgggtgtggcctcgtattagcactacctaggtaccctttgcgctaacggccagccccctgagctttcaggctctcatttatggtatgggtacagatgaccacaatagctcatggtattgcacagccagaggggagttggtgctgggggcctccttgtccaggtggagcaggaatgtccctgcaacagagtgccccgagggcccaacctcccaccacatgcagatgcagaaccctgtctcaggcccctcagctcgagaccaactccagatgccaggataactgggccccatcctttggcagacttacactggacttgtccataagcggcctcggtttccagccggcacccatgtttccccagccagtcccttctctgcgggcaaaatgaatggcatcccctagccttcactgacctgagctgccactcactgccacttgctgtggctgatgaatrgactagctgcttccaagactcgattctggtgggctttcacctgctcttcagagacatgaaaagcaagggttcctccttctcccttccag

SEQ ID NO: 520064 - DNA, 187 bp, Homo sapiens
tgtaccttcagcaagtcactctgcctctccaaatcacaatttctctgtaaacttggaagaaaggccctcttcttgaggatttwtataaggcttaaatgagatgtgtgatcatttgcttcatcctgtacctctgaagcatctttcaactttgaactctttaactctaggctctgaatttagattttgc

SEQ ID NO: 520065 - DNA, 646 bp, Homo sapiens
atagaaaatctggaagtcaagaaaccactttacctcctagctctgtcaataaccagccatgaatcctagagtgattcatttcacttctctgggagatggctccctcatttttaaaatgggaacttttgaccagatgattttccatataagaggcctttcatcaacatggctcactgcagccttgacctcctgggctccaatcttcctgtcatctcagcctcctgagtagctgggactacaggcacatgccacaccacactcagctaattttcatatatttgtagagatgagggtcttgccatgttgcccagggtagtctmaaactcctgaactcaagcaatctgcccgcctcagcctcccaaagtgctgggattacaggcatgcacaaccacacccagccaagaggccttgtttctacctggatgtttaatgagaggttaatctgttcatattctggagggtggcttttagaaatttagtgtgtatttgaattatatttgaaatatagataaccttcagttacccaaatattatgaaaagaaagattaaatagatagtaggtctctcaactaaaatcatagatatttaggtgcttcctgaggccttctaaccactgtcttctttgcacctgctcaggaatgacacc

SEQ ID NO: 520066 - DNA, 443 bp, Homo sapiens
tgctacagttaactgagactcagttgcttgttacaagaatgtagtctcaaggtaggtttwtatatatatatatatatatatatatatatatatatatatatataggtttatatacatatataatgtatatatataaaacatacatataacatatattatgctttatttatatatattaggttatagtttgcttcatttagagacagcattaggccaaagtttaatttaacaattcccctcttttatcagcctttgaattttgagaaattgaccataacctaggtccaatttttttcaccatcataatggacttgtttggtctcagtataaaattcacaattcacaatgtcgaatttgttggattattctttatgttttcctgatatttttgtttttctaactataatgagattagttgatgtacaacggatggctccatatga

SEQ ID NO: 520067 - DNA, 429 bp, Homo sapiens
agaggtaatattgattccttacagaccaagaccttctgcttcctcatccattatttccctctatacttaaatctatgcttggaatactgtatcccatgtttgagattccctgcttcatctcacaactctttaagtctcctcccttctttatttaaaacacccctcacccaaataccacggtaatgccttgctgctgatgaacaacattatgatttgtaacttatgactattgagaaacttgcaccaacacccaacaacaatgtgaatacyttttacgttcaggaattgtatagttgtatatgccttcatgcattgtgagttttaagtatatcttgttttgtactttggtaaaatgggcaactgaatgaatcaagaagtatttactcccacccccatcccaacccaaatgatttcttcccaacatattag

SEQ ID NO: 520068 - DNA, 639 bp, Homo sapiens
ggagatgagcaaaaaaacatggggcaagtcagagcctaaccccaggggaaaatggacaacctcatggggtgagagtttagggaggcacaaaggatgcgatgctcataagagccgcatttcttgagcacctactatgggatgggccctgtgctagaccttatgagtgttcgcgcctaatcttcatatgaccctccaaggtaggagctatttttgtgcccacaataataaggtagcagtttattaacccatgcactcattccatgaggtaggtactgttattgttcccatttcacagatgaggaaatggaggcccctgggaggctggcgaatactcaggtcacctaggtagtaagtggtaaagctggtctgtcaactcagatgggctgattctggagtccccccacttacccacctggctgcagctcagatgggcccagccaagtctccccaagacagcaagcagcccctgagacgcactgagcacrcccctgtcctcagtacggctccaagctccacagcagacgagtttgcccaggcaggttctcagactccccccaggcctggggatagggacctgagctgggtcaactgaagccgtgggtggcctggacctgctcttaaatggagaaccccatgggg

SEQ ID NO: 520069 - DNA, 498 bp, Homo sapiens
tctcctgcctcagcctctggagtagctgggattacaggcacgagccaccacgcccgggctaattccaggctggtctcaaattcctgacctcaagtgatccacccacctaggcgtcccaaagtgctgggatttcaggtgtgagccactgtgcccggccagattattcttaaagcaagtacacagtaactattcctgtttttaggagtcagctttagagttgagctccctcttctaacccagagtcagcctagcttcagtcagccacamcgccctgaagttaattaaccccttacttcagcaggcaggcagtaactacagaatgcccacggaccatctgggattgagggctgagcacccacagggaagcaggaagggaattcattttctgaggaactgtcatgtgttcaaagtttcataaattttattttaataattggccctcgagtttttttgggtaggtattatcatgatcattttctccacaaaaatactgaaatt

SEQ ID NO: 520070 - DNA, 563 bp, Homo sapiens
atttatgtggaaaacatttatatctatgtcccaaagactcaattcaacattttaaacaaaacaatatagaggaagtctcaggttctattccaaataatattggcagaattgcacatgtaaacattttgaaaagctcatgaatcttagggtggggaagtgcatgtgggatgttgctggacccaagggaggcattattccatgaggccacgccagtgctgggttaaatattarccctgaatgtgcctgggataggttgagaagcttcaaatggaggaagaaaagaaacagcccgatgtctcctaaaacctcatgtaaatgaatttatgaaagtaaacatcaagacaaagaggaagactgcatcttgcaagtgtttcacccaagagtattgagtagctcctctgaagatttgtcagaccccctcctcagagcagccaccaaaccatggtcagccgttcccaggccttgtgagtctgacaaatgcccaaaacaattctctctcacccaggtcctctccccctcctcctccaccaccaggacacacagaaactgcctcctcttttcag

SEQ ID NO: 520071 - DNA, 575 bp, Homo sapiens
attaacaaccttcagtaatttgatttggttcaacttatcattggtacacataagacaaagaaatgttgagtcgagatgattaaatgtgacaggtctaatttttaggtaaagaaataatactgtaatcctgaccaaggaattaacatacagtttctcagcaggctccaggaraatttcaaaagagagtcaaacagaattaaaaatagctttatcacaaaatatcccatgaagaaaagttatctttatataaacatcaccaattgaaatgggcttactcaattcactatgtgaaacataacttcatttctcatggcacctgggaatactgagatggaaataactccccctaatgaagagcttgctatgtgtttgagtttcttaacaagatggtcagctgtctctttggacaagtttggcattgggttaccattcagtttggctaaatgagagacctctctttattttcaagcaaacccttacattttattatctgtttaaagtgttgcctactatttatggaataaacatttccacttcattttaatttcatatcgtaggagaataataaagacagt

SEQ ID NO: 520072 - DNA, 426 bp, Homo sapiens
cgagaccagcctggccaacatggggaaaccccgtctctactaaacatacaaaaattcacygggcatggtggcgggtgcttgtaatcccagctactcaggaggctgaggcaggagaataatttgaacctaggaggcggaggttgcagtgagccaagatcgcgccattgcactccagcctgggcgacaagagcgaaactctgtctcaaaaaaaaaaaaaaaaaaaaaaaccatatatatctaacagtcaaatgtcaattaataaatctaaacaaagtgacagaattataaaagcaaccctgacaactatcacagtagtaaatgattcaagcaagaatcgtaaatagattttcattctgcaccaaatcccatagcaatcactgagtcaccatggtaaccatgctggccagggaaagctgggaggaaaaa

SEQ ID NO: 520073 - DNA, 426 bp, Homo sapiens
cgagaccagcctggccaacatggggaaaccccgtctctactaaacatacaaaaattcactgggcatggtggcgggtgcttgtaatcccagctactcaggaggctgaggcaggagaataatttgaacctaggaggcggaggttgcagtgagccaagatcgcgccattgcactccagcctgggcgacaagagcgaaactctgtctcaaaaaaaaaaaaaaaaaaaaaaamcatatatatctaacagtcaaatgtcaattaataaatctaaacaaagtgacagaattataaaagcaaccctgacaactatcacagtagtaaatgattcaagcaagaatcgtaaatagattttcattctgcaccaaatcccatagcaatcactgagtcaccatggtaaccatgctggccagggaaagctgggaggaaaaa

SEQ ID NO: 520074 - DNA, 666 bp, Homo sapiens
tggctccactcacccattctaaactctcctctttaccaaggagctggaagcttgcaaactactatgcccagattcttttgccaactggtttccagataggatctgccaatggaaaaacgtgatggaacaatataaattcaagaaagggagaagccatttgtcttgcatctgktggtacctccagttgtgctggtggtaggaatagcaactacctgagcatctagaggattggaaaccaccaagtgatatggagagaagtgcaaatggaatgtctttggaccagaaggggggttgtgcatggggagaaggtaggaattcaagtttggaagtgttaagtttgagatgactgttggatatccaagtagggatgtcagtaagtactggatagtctagaattcaggagtgatgttaggctgcaggtatacctttgaagttagtgatgtcatttaaagccatgagagtgagtgaaatcattgaagaaaaaagaactccaccactcaaatcctgaggacccctgacattcgaaactcagggagaaaaggaaccagcaaaagagcttgaaaagagtgaacaatgaggtaagaagtagaccatcaaacaagagtcagtgattaaccttgtcaaatcagtggatgagtcaaatatgataaggactgagaattgaca

SEQ ID NO: 520075 - DNA, 666 bp, Homo sapiens
tggctccactcacccattctaaactctcctctttaccaaggagctggaagcttgcaaactactatgcccagattcttttgccaactggtttccagataggatctgccaatggaaaaacgtgatggaacaatataaattcaagaaagggagaagccatttgtcttgcatctggtggtacctccagttgtgctggtggtaggaatagcaactacctgagcatctagaggattggaaaccaccaagtgatatggagagaagtgcaaatggaatgtctttggaccagaaggggggttgtgcatggggagaargtaggaattcaagtttggaagtgttaagtttgagatgactgttggatatccaagtagggatgtcagtaagtactggatagtctagaattcaggagtgatgttaggctgcaggtatacctttgaagttagtgatgtcatttaaagccatgagagtgagtgaaatcattgaagaaaaaagaactccaccactcaaatcctgaggacccctgacattcgaaactcagggagaaaaggaaccagcaaaagagcttgaaaagagtgaacaatgaggtaagaagtagaccatcaaacaagagtcagtgattaaccttgtcaaatcagtggatgagtcaaatatgataaggactgagaattgaca

SEQ ID NO: 520076 - DNA, 625 bp, Homo sapiens
ttgtttttttaattagctgaacacaatgacacacacctgtggtcccacctactcaggaggcttaggtgagaggatcacttgagcccaggaggctgaggcttcaytgagccatgttggtatcactgccttccagcctgggcgacagagtgagacgctctcttaaaaaaaaaaaaaaaaatcacaaaaaacaatcaaacaaaaccttttccttttggaaaaattttatatttgctaaaatgtttcaaagacagtacaaagagttctcatatatcacttacccagttttatccatttttatcatcttattttatcatggtatatgaaataaatgttagtatattactaaaccctaaacttaattcgtgttccaccgttttttttcccattaatgctctgtttctgttccagaattcaatccagggtaccatagtatgtttgaaagtcacacctcctaagtctcctggacttctacactttctgtcttcctttgtttcttatgtctttgaaagtcttgagggggactggcaagtagtctgtagaatgttttccaatctgggttcatattcaccagagaaaaagagctagaatggatagatcgatcaatacatagatggatagatggcaa

SEQ ID NO: 520077 - DNA, 609 bp, Homo sapiens
tgccccttcttctgtagttgtagtttaaaagcaaaatagacaactactttttgaaagggcaaaagcaaaatgatgaaagaaaataaaatatattattttacagagttcagtacttttaataacactggctttgaactcttgcttttcatttccaaaaccatgggggcaagataattcctccaaaggctaaaaccaagacagggtattggtggacacctggggctcagcaggccyggggagatagtgaaacctgagagttagagtttaccaggaaggtgtgataattataatttggctggaaaaaatagtaaaactaaattggttgggttgacaaatagccaaattactcagcaagttctaacatggagttgagacccatagagaacatggagatctgtcttaagaaacagaaggctaatgacaaggtgtagccttgagaaccaggaagggaacaaagactagtgtaatctattcattagcgttgttctgaaaaattgatctgggtacaaaaagtagtccaaatgataaaaataatgcattttctgcctacaaaaggaaagtacccttttttttttcagccagataatacacagatacaaaaaaaataag

SEQ ID NO: 520078 - DNA, 542 bp, Homo sapiens
actcttgcagtgataaattctcctctttcttcatgttgcatttttcccatgatgttcctcttggtattcggcaactcttttaaaagaagatacttgcaagcactgacctcacctttgactatttgtctgtctccacagttcttcgcagatattactgagcatcaccatagatgtccttcttcacctctttatccacaactgaagtatagccacctcaaagcctccagaggtgcrcaccttagatccatcagcacaaatctgcaaaagccatttctcactgagtggatgatgatgcgatgtatttgtcttctatcaccatctctctgattattttcaaagatatagctacatattattagtaatctagttagcactagtagaagcagcagcagtagcaaacatcctatataccctcctaaccccacctcattcttgtgagatgttgctactatttgaatcattatcccatttgtaacttaacctcaaataggagattatgggtttctttttctttctttttttctttttcccaatggggctaa

SEQ ID NO: 520079 - DNA, 542 bp, Homo sapiens
actcttgcagtgataaattctcctctttcttcatgttgcatttttcccatgatgttcctcttggtattcggcaactcttttaaaagaagatacttgcaagcactgacctcacctttgactatttgtctgtctccacagttcttcgcagatattactgagcatcaccatagatgtccttcttcacctctttatccacaactgaagtatagccacctcaaagcctccagaggtgcacaccttagatccatcagcacaaatctgcaaaagccatttctcactgagtggatgatgatgcgatgtatttgtcttctatcaccatctctctgattattttcaaagatatagctacatattattagtaatctagttagcactagtagaagcagcagcagtagcaarcatcctatataccctcctaaccccacctcattcttgtgagatgttgctactatttgaatcattatcccatttgtaacttaacctcaaataggagattatgggtttctttttctttctttttttctttttcccaatggggctaa

SEQ ID NO: 520080 - DNA, 682 bp, Homo sapiens
ttttgggtgctggaaatgttatatattttcatcttggtagttattacttaggtgtgtacatctttaaaacttgatcaaacctcataaagattagtgaacttgacackcatttgaccacatatattctacctcagtaaaaaatgtaaaaaacaataaacagcatttaaaatactaagatattgcaaatatgtcatccagatccaagtgagatatctggcacatattcatatgtacccctgtaaggagattatttcaagagtgaaagccaaattcattctttaaaaaaatattctatcactttctcaaaatcatgccatatggacagtgaactttcacagtctacatgtcagaaaatgtctttatttcactctgactttattaattgtttggctccaaatcattttctctcagaacatggagggagttgttacattgttttctagaatatggtgttgttaatgaaaagtttaaagttattttgatttttataactttaaaaattttctttgaaagctgtaagaaatttttttttacacacagtgttctgaagtttcaccataatttatgtagatacattaaatttctattacagcttaacaaattaccacaaatttaactgtttaaaataatactcatttattatatcacagtttgtgaaggtcagaagtccaggaaaggccag

SEQ ID NO: 520081 - DNA, 682 bp, Homo sapiens
ttttgggtgctggaaatgttatatattttcatcttggtagttattacttaggtgtgtacatctttaaaacttgatcaaacctcataaagattagtgaacttgacactcatttgaccacatatattctacctcagtaaaaaatgtaaaaaacaataaacagcatttaaaatactaagatattgcaaatatgtcatccagatccaagtgagatatctggcacatattcatatgtacccctgtaaggagattatttcaagagtgaaagccaaattcattctttaaaaaaatattctatcactttctcaaaatcatgccatatggacagtgaactttcacagtctacatgtcagaaaatgtctttatttcactctgactttattaattgtttggctccaaatcattttctctcagaacatggagggagttgttacattgttttctagaatatggtgttgttaatgaaaagtttaaagttattttgatttttataactttaaaaattttctttgaaagctgtaagaaatttttttttacacacagtgttctgaagtttcaccataayttatgtagatacattaaatttctattacagcttaacaaattaccacaaatttaactgtttaaaataatactcatttattatatcacagtttgtgaaggtcagaagtccaggaaaggccag

SEQ ID NO: 520082 - DNA, 514 bp, Homo sapiens
accttcacaatgaccctcctcagtgtggggcttgggatcaaggcctatgtacaaccgtgaaaaagctttatactttaatttcagcttcttaaaaaatctcccaaagtattggatttcactaaatgatatatttcttttcttttttctctacttattgtaaatatccacattatgtttaagttagtctgtagatctacattagaagagatactattaatcaaaaaaawgcctaagaagtaataagcatgtgaatttatttccagtcttacaggctagtgaaggattttgaattatattagatgacacaaataatgttttaggatgagaaattgcaaaactaactcatctcaaagtacatgtcagtttggatgaatgttttttcattctaacagtctaactattttttgtgtatattattatttgttgccagtgtccaaaaattagcatttcataaaatgtgaatatttctatttgcattattgctaagaagagatttgtccacaagcttttatga

SEQ ID NO: 520083 - DNA, 527 bp, Homo sapiens
attatatagttgttaaggacatcagtatgactaacatcagggttacatataagcgatcataaaaatatggctcaacgagggagtcaaggtgttttgaaggtatctttaagaaccaagtggttagttttgctcagttttgtttgatacaaagttgtaatttaattcatgaatagtaacagctctgacattttaccaatagggaactttacaaaactgtgcaccacactgaataaacggaaacctttggatctggctgaatctactagttagtaatgctgttcagaaattaatatatgatctgtggcacttttttttggaatggccatttactcagaatttttaaacagtattttattatggaatgtattatatttgtactctgaggaagcttaagatagtttggtgatacatataattcttttgaatttcaaataacacatttggtttatttttyccttcttaaactagaacacatcttcctggaagaattgggtgggcttatgttgtaaaattgcttctgtttcaac

SEQ ID NO: 520084 - DNA, 569 bp, Homo sapiens
ctgtcataacgatttgcagtagcaaaagcgcacagctcacagtcaggacaggctggaaaagtgcccctgaaactgctttgaaatcagtaacgccctgtaagatgcattcattctttcagtcctttcttcaccccctcaacaagcaggaatcagatctctccccaagctggctctgggcaggcactgtgctcggcatgaggccacacagcaagtgcctgctccgagtgggcactcggtgtggtgaccaggccagggtggggcagggcagggtctctgcaggtgcaaatgagggacacgaagccagtggtgaggccatggggttcacggaaagacacgctggggttggggcagctctgttccacatctattcacacagtggataaggacaagacttctaaggccacagactcctccctaaacacacagcaccttccatttttcttgggaagggaagggaagagatgagtcagagatcaygtgaacaatgaggaatgcaggcactacgaaaaacagcgcctggcatgtcaatgccccaggcagggctgggtgtgggggcgcagccagaggaa

SEQ ID NO: 520085 - DNA, 575 bp, Homo sapiens
gtggatgtgggggagcaggggaggccagggtgggcttcctcctagaggctacatctgcatcacgtatgggctgaccactgtccaggtggggtggggtgcaggaggaaccagggcaggaggtggcagggatgctccaaggccttgctggggctggggccccyaagaaggcggcctggggggagtgcagaggagtggggtggagtggcaagtcgggtccccaagtgtggggccagcatgtgggggagggtcagatgcacctaggtcactggaagcagcagaaagcgctgacacccaggagtgactgggagctatgtggagtcggccccgtgtcacaacaatcaattccaaaaggcaggtgacaaggtccaaggtgcggccctgtggggagccgggagggctggttgtcggatagaaggtgacatcccatgatgatggcaggagccaaatgccaaagtcctcacagaatagggtggcctggccaggaggtcaggcagggcagtgaggacacggatgggagatgagcgggagccaaggagccaagcaggagccagggaggaaggggccccaggctcagg

SEQ ID NO: 520086 - DNA, 575 bp, Homo sapiens
gtggatgtgggggagcaggggaggccagggtgggcttcctcctagaggctacatctgcatcacgtatgggctgaccactgtccaggtggggtggggtgcaggaggaaccagggcaggaggtggcagggatgctccaaggccttgctggggctggggcccctaagaaggcggcctggggggagtgcagaggrgtggggtggagtggcaagtcgggtccccaagtgtggggccagcatgtgggggagggtcagatgcacctaggtcactggaagcagcagaaagcgctgacacccaggagtgactgggagctatgtggagtcggccccgtgtcacaacaatcaattccaaaaggcaggtgacaaggtccaaggtgcggccctgtggggagccgggagggctggttgtcggatagaaggtgacatcccatgatgatggcaggagccaaatgccaaagtcctcacagaatagggtggcctggccaggaggtcaggcagggcagtgaggacacggatgggagatgagcgggagccaaggagccaagcaggagccagggaggaaggggccccaggctcagg

SEQ ID NO: 520087 - DNA, 463 bp, Homo sapiens
gcaggaggtggcagggatgctccaaggccttgctggggctggggcccctaagaaggcggcctggggggagtgcagaggagtggggtggagtggcaagtcrggtccccaagtgtggggccagcatgtgggggagggtcagatgcacctaggtcactggaagcagcagaaagcgctgacacccaggagtgactgggagctatgtggagtcggccccgtgtcacaacaatcaattccaaaaggcaggtgacaaggtccaaggtgcggccctgtggggagccgggagggctggttgtcggatagaaggtgacatcccatgatgatggcaggagccaaatgccaaagtcctcacagaatagggtggcctggccaggaggtcaggcagggcagtgaggacacggatgggagatgagcgggagccaaggagccaagcaggagccagggaggaaggggccccaggctcagg

SEQ ID NO: 520088 - DNA, 374 bp, Homo sapiens
tctctagccttccgtccgtttcaccagacttctctgtccaatgcttctgttaaataccgaggtccttcccttatgggcccttcgctcatgctgtccctgtgtctctatccaaaccacgtttatcctcccagacccagtggaatgccgttaactctttgcaggcttcaaccatcttcctaaagctgggcctctgcactctctaatccctgccctgctttgtcctcccctttcctgccttgcaccacgggctgcctggtgccatccctgtctgtgggatccatggccgtcttgcccagcgccatgcctgtttgtgggatccatgatggtctttgcagctcccacaacmgggtcatgtcaaaaggagtcaagactgg

SEQ ID NO: 520089 - DNA, 471 bp, Homo sapiens
aggaaacttgtcttccttcctccttccccttttcttcccatggggtcagcaccctggaaggggtaggaaatccagaaggaagcacgtgtgtggcgggaatcattcttgagagagctgcgggtgccacggggccagccacgctccttcccccgagaccgcctgcccaggcccctgctcggccagacccgcacacaaaggagcagcggccggagacgtggtgccctggtggacaggggctgtaccgtggcctcaaggaacgtgcatgggcagagaacagtctcctgtggtgaaagacagatgccgccgtgggtttcccctggtgactataaagcctccatcctacccacgttgcaaatgtcccactctgctccctcctgtgcctgactcactatccctgtctggagagcatctgtccgactcccaacrcgacacgccctccctcagtccctgactccctcccttcccttagtc

SEQ ID NO: 520090 - DNA, 602 bp, Homo sapiens
catatactgacctgccacagaaatcaaaagcaaatctttaaatataagttgctaaaacttagaatctgattttcaaactcatagactaaaatctggtttgtgaatattggtggtcaaatacaacatcggtcacaaaacaatgaatgaacattcttccaatgcaatgcaaattgagaggtgaaagtattttaaggaattttgaaaatstaaaatatctagtgctatagcaaaaagggtagtcaggtggtgatcagaagacacattcaagtctttttactactttgtgaactcagatggattatttaaagtccatgaattgaagttttaaatttaaagaatagagataagacaatcgtgaagataaacatatatattacattagaaatattatacatatataatttatataacatataatttacacatatgtataatttatgtatgtatatgattcttataggaggcgtgagaatagcatgtaaaatgctttacaatactaaggatataagtattatctggtaccatatcctatacagcataggtgatcaattgaatattgaacacccttccatttcttgtgcagttattatggcatttctttg

SEQ ID NO: 520091 - DNA, 430 bp, Homo sapiens
attctgtgttgtacagaattacagaattacagaattacaacacggctgcaccgtgctttgtttagcagcattcctggcctctacttattcaatgccagcagcaccctctacctaacccccaaccactagttgtggcaaccaaaaatgtctctagactttgccaaatgtctgttgggacaaaacatggccagttgagtgcactgttctagattgccaactccttaagagacaaggtatcttttcacccttgcttttcctatagtgycttgcacagtatttctgaaccaatcagatgttgcttaaaggaaaataaataaataaatggcaatagcatttataagcaggtattcctacagctttatgcctccaaagtcattgtcttgaccactcatttcagtgaacccatatggcaaggtctatccccagggtc

SEQ ID NO: 520092 - DNA, 655 bp, Homo sapiens
tctttgtaatttttatctttccatattaaagatattaactctgcctaacatgatggttcaaaatatttttcttagtttgcagtgtgtcttttaatttctttgagagctgtgtgtatatttataagatataattttcagtcttatawactcctgtgtatcaatgttttctttcattgtttctccttttacttataagcttacaaaaccttttcacacgaaatagtcaaaccatacatacacaaaatataaattaaacaaagaacttgtggggtccttttatgatttcttgcgtgctttcccactgccaggtaagcagccatggcacctggggtctgagccaacacctcaggctcagacatgcaaaacacaactgaccctcattgctgtccgagggcactatctcttttcacgactttgctattctctttccacccagacccaaaattctcttgtcttccatgaatttttctactctattgtcatccacatctaatgctttgtcacattatcttctacctcattcagtagtttaatggccatttcttcctccctttcgccacaaccctagcttgagccttcattgcttcctacctctgcaggtacaggcagatgggggatgaggggagagaaagagaaacattcaactgagataaat

SEQ ID NO: 520093 - DNA, 512 bp, Homo sapiens
taatattttctttgtaatttttatctttccatattaaagatattaactctgcctaacatgatggttcaaaatatttttcttagtttgcagtgtgtcttttaatttctttgagagctgtgtgtatatttataagatataattttcagtcttataaactcctgtgtwtcaatgttttctttcattgtttctccttttacttataagcttacaaaaccttttcacacgaaatagtcaaaccatacatacacaaaatataaattaaacaaagaacttgtggggtccttttatgatttcttgcgtgctttcccactgccaggtaagcagccatggcacctggggtctgagccaacacctcaggctcagacatgcaaaacacaactgaccctcattgctgtccgagggcactatctcttttcacgactttgctattctctttccacccagacccaaaattctcttgtcttccatgaatttttctactctattgtcatccacatctaatgctttgtcac

SEQ ID NO: 520094 - DNA, 440 bp, Homo sapiens
tacattttgttacagcaggtccaaaaaacaaaaaacaaaccaaccaaccaacccaagggtttccaagccacgaagccactcttccttgacaaagctcaacctcaaagctctaactcctctgcttacagtgtcagggcttgttttgggctttctttgggtgggtatagagtaagctactttagagcgtgctctttatgtatratatgcagacacttggtatcctaattttctgaccaaactgataatgaggtattaacatgcctcttctggttgcgtttgaactccccctctgtttgaattctagtatgtctgttctgctctcaggtctaccagagcctctagcaagtaagtagccatttagcaaagccttggtatgcctcactatggttaagtacagcataacccgcgaccaagaacccgggggggaggtttttatactg

SEQ ID NO: 520095 - DNA, 515 bp, Homo sapiens
gttttgaaaccaaacgggagactaccctgagtggtcctgacttaactggataaaagcctttgaaagaaacactggccctccttgaatgaaagactctccttgttggcttcataaagtaagaggccatagagaagaccatattgcctggaactataggtgtcctctggaaastgtgatcagccttctagccatggatagtaaaaagctgtccccccacccaccgccccaacatacagccaccaagaaatcaattctgccaacaacccaaagtagtgtgaaggggattgctccccaagttgagcctccagatgaagcacagcacaaacaaaatcttgattacagccttgtaagaccctaagcagaggacccagttaagctatgctcagactcctgacctatagaaactatacgattaaaaataatgtgttgttttaagctgccaagtttgtgtaatttgttttacagcaatagaaaaccaacacattatgtttactcccctggtatctcccctctac

SEQ ID NO: 520096 - DNA, 572 bp, Homo sapiens
aaaaccatcagatctcatgagacttattactaccatgagaacaatatggggaaaaccatccccatgattcaaattatttccctccagatccctctcacaacacataggaattatgggaatatgatttaagatgagatttgggttggggacacagagccaaaccatatcataacccatgcttggtctttagcaatttctttaaaaaaaaatagctacatgttcttactggcttatattgtgtctaggctcaagtatgcaaattcctgggtcctgtctttccccacttttacattagttcttttctctgcaactgcagtttataagatcaataaaattccttaatttgcagtttgtacagcttttttcttgtagtaagaagggtgggaacaatgtccattccagctctctacatctttgagctctcagctgatatttgaaaagatcctttaaatatactcgagaatattgcyaagattagactgtctttactcagcccaaagagtatcatgacttgcagtgatgccatagatatggaaataggtgagttcttatgttaccaatgtatagattgg

SEQ ID NO: 520097 - DNA, 510 bp, Homo sapiens
cccggtgatctatgttttggataatccactcccctgagcataaaggggcttgtgacataattctagataatagaatacagcaaatgtgatggttacatctgatgtgagattctgccttagcaagtgggggcaagagagactccctcttgctgacttgtgtaagaagggctgccgtcctataggaaggactgtgagaggccatgtggcaggaaccatggcagcccctggatgctgagagtggtccccmgctgataggtttggctgtgtctccacccaaatctcatcttgaattgtagctcccatatttcccacatgttgtgggagggaactggtggaagataattgattcatgggggcagtttcccccatactgttctcatggtagtgaataagtctcatgagatctgatggttttataaggggaaaccccttttgcttggctctcattctctcttgcctgctgccatgtaaggtgggccttttgccttccaccatgatggtgaggcctcc

SEQ ID NO: 520098 - DNA, 510 bp, Homo sapiens
cccggtgatctatgttttggataatccactcccctgagcataaaggggcttgtgacataattctagataatagaatacagcaaatgtgatggttacatctgatgtgagattctgccttagcaagtgggggcaagagagactccctcttgctgacttgtgtaagaagggctgccgtcctataggaaggactgtgagaggccatgtggcaggaaccatggcagcccctggatgctgagagtggtccccagctgataggtttggctgtgtctccacccaaatctcatcttgaattgtagctcccatatttcccacatgttgtgggagggaactggtggaagataattgattcaygggggcagtttcccccatactgttctcatggtagtgaataagtctcatgagatctgatggttttataaggggaaaccccttttgcttggctctcattctctcttgcctgctgccatgtaaggtgggccttttgccttccaccatgatggtgaggcctcc

SEQ ID NO: 520099 - DNA, 485 bp, Homo sapiens
gcaggtgtgtccacaatctcatgaacaactttatgggtttgctttctacagtatctgtccaggcacattctagttacttgacacatcctggtttcagtcccctgagcagaaagccgaggctgtgtttacccaggtggctctgccctgcacgtttcacgattgtctgacgtttaggaccaagctkcaggcagaaacagggagaaaagagcagttttatatgtcccttggtttcacagctccttgaagaaacagcaaatgaattacacagtagatctacactatactgaatgccaggagggagtcatcaccagccctgtattgtggctgctcctatgtcttgaaccaaagcagcatcctgctctcagacactaacttgggtttggatacttgagtgtttggagacccaaggtccaaataataaagcttggagaatgtgggcatcgatcccactacctcttgcatgctaagcaagcgctctaccgctt

SEQ ID NO: 520100 - DNA, 433 bp, Homo sapiens
tgcactaagagggcttgctgttgagctygggcaacatccattttgtcgaagtgtatttcccacctactttacggtttcagctttcaaaaactacaatcaatcctacttgaaaattactctgtatcaatcaacgctgcactaggaagattccatacccacgaccagaggagtctacacctttccagtatttcataggaccgtctgggttctgcgttaccaggatcaattgtacctgtcttttgctgctctttttcccttttccttccctcagaaaccttagtcactcttacactttccatggtctcctctgttgaaaagagacaggaggttctcagttcatgatagttcactgaccacctggataaatgaatgaagaaatagccatcaaacctgtctcttgatcatactactgtcttccttcatatctccactt

SEQ ID NO: 520101 - DNA, 585 bp, Homo sapiens
gactttatgtaactacagtagtttcctttaaatatacaaatgtcttttaaaaatgtacattgttacaggaaagttacttttcttcttatgcaattgatagcatcacagaaaaaggcaaatcactacacatttgcctgccattaatattgactgaaatcacaagccgttttctacccttaagcttcctgcctattctacatgttattactttgtgccaaagatggaaatttatcataaataaattcaatgcatattaaagagaggaagcattctcatggcagaggtggggagcactttttgtttccacttgtttataagggaatattttattcatttcttactctctctccggggtagcatgcaaacagagtcactcaactgtttcttgcagccccactctgtccctctgtctccatgcatatgtttgacttagatgagcctctctgggcatttgggaatgcgtgaagcgagctaagcctccctgatgagggttgccatttctgagaygaagctcttgcctgactgcttgctgtagttgcagctaaagtctggagagctgctgggaccttgtgcaaaggctcacgg

SEQ ID NO: 520102 - DNA, 560 bp, Homo sapiens
ggatctcttctttcctctgaataaagagaaaacaacttagaraatgggtactgtccactgaacgttttaggggctattattagcactgtttctttatgcccataggtcttttaccagtgaagcattcaagatggctggtacttcctcgttttcttcgacaggtgactaatgaagccgttctccacgttgtactgtatggacatgcggccccaagtgacaacatcgatcccactacctctcacatgctaagcgagtactctaccacttgagctcattcgtcacctaccgcaaaactttctgccctttcctttattcaggagtagatgtgcgcgattaccaccatttcttgcgtctcggaacaaaggaaatgtctggattattaatggggaaccaggactcgacctaaggcgagtctactcaaaaatggccaagggcaagggcatgatggctattcctctgcgagggagaggggaaaacgtaaccaggagaaagtggacactggaaaagtctggtgctgtaagatttcacgttccagattttcagggagagaagcgagcacg

SEQ ID NO: 520103 - DNA, 624 bp, Homo sapiens
ctggcaggtgtgtccacaagctcatgaacaactttatgggtttgctttctacagtatctgtccaggcacattctagttacttgacacatcttggtttcartcctctcaccagaaagccggggctgtatttaaccaggtggctctgtcctccacttttcacaattgtctcacatttaggaccaagctgcaggcagaatcagggagaaaagagcagttttatatgtcccttggtttcacagctccttgaagaaacagcaaatgaattacacagtagatctacactatactgaatgccagcaggaagctgtcaccagtcctgtattgttgctgctcctatgtcttgaaccaaagacactgagagcagtgtcttgctctcagacactgactcgggtttgggtacctaaataataaagcttggagaatgtgggcatcgatcccactacctcttgcatgctaagcaagcgctctaccacttgggctaattccccatatcagggaagctttgtttatccttagtgggtggcctggaacacaggtaatttcagggccttcagcgggaaagcagggctctactaagacagatcttctcattgatggcgcagggcaaggcacagtggctactca

SEQ ID NO: 520104 - DNA, 624 bp, Homo sapiens
ctggcaggtgtgtccacaagctcatgaacaactttatgggtttgctttctacagtatctgtccaggcacattctagttacttgacacatcttggtttcaatcctctcaccagaaagccggggctgtatttaaccaggtggctctgtcctccacttttcacaattgtctcacatttaggaccaagctgcaggcagaatcagggagaaaagagcagttttatatgtcccttggtttcacagctccttgaagaaacagcaaatgaattacacagtagatctacactatactgaatgccagcaggaagctgtcaccagtcctgtattgttgctgctcctatgtcttgaaccaaagacactgagagcagtgtcttgctctcagacactgactcgggtttgggtacctaaataataaagcttggagaatgtgggcatcgatcccactacctcttgcatgctaagcaagcgctctaccacttgrgctaattccccatatcagggaagctttgtttatccttagtgggtggcctggaacacaggtaatttcagggccttcagcgggaaagcagggctctactaagacagatcttctcattgatggcgcagggcaaggcacagtggctactca

SEQ ID NO: 520105 - DNA, 399 bp, Homo sapiens
aggtggtgatcccccgagtccagcccacccgcccagcagtgcgcaggcagccaggggttcaaggacccacccacatccgtgcctgacaagtctcccctccacccgactcctgctgcccttagcatatcctcccctcgagggcccccagtgagatttgctggcctgggtgtcagaatgcccctggggtcactcggaccatcttctttaatgtcttcacctgcttaggccatcgagtcagtggaaaggaaaaagcaagagaaaaagcaagaacaagaggacaacttrgccgagatcaccaacctcctgcgtggggacctgctctccgagaacccgcagcaggcagccagctccttcgggccccaccgcgtggtccctgaccgctggaagggcatgacccag

SEQ ID NO: 520106 - DNA, 609 bp, Homo sapiens
taaattgatatctgggaggggaagtcctcacccctcaatccagttgatataaatggatccatctgtcctttccaaatggctggtcctatgagcagtcagctccgtggtcaaaaagattcactgaacacccacagaatggtcaaacgttttggtgaatccatcataaatcaatgtgtggttttcctttgggaaggcaggcatgggctttgggtacaagagcgtcacggaagtgacagtggagtaccctgtccccacctccccacagaggagcccatcctaaaggggccacttccagccattctgactgcagtcactgcctcctgggccctgggtgcacgtaattggttctgcatggtgtttgttatggtttatgttgaaatcagaaagaaagaacttggtggggagggtgtcagagaccacatggttgactccctactggcgtctctactaacctgttcccaattagaggtttgtggggctcaggacctggagyttgtttgcaaagctctttgaccaaattcagcctctgagggccctttttggagctgtgtttcctttttaaaatgcaggctaaaaaagtggaggtgagaaacagcaagatcgtgcagc

SEQ ID NO: 520107 - DNA, 566 bp, Homo sapiens
gcagaggcctggggagaaagcaaacagacgtagaaatcttatggacattgctgctcatttcagtgaacccgaggccgtgttcttagcaaagcatcctaggaaacaccgggctaggcatgcgtggagaacatgggtcctcagactcycagctcctcaagggagatgtgctcaaattcatggtgacggtattcagatcgctcagggtaagggctttccaaattgagagaagccctcagtacagacctcttgcaccactaaataccttactcagaaattgcagcataatggtttgcatggctataaaagggcctggagtaagccatgttggccaggcctcatgcccaaattcctagggcattttctccatcctacagccccacactattggggctttgtagtaatgtctgggcggcacccacatgcgggccccccgttgccttgaaatgatggcccattggtgccctacctggctgtgtgcactgggatgacaggtcctgaggaacacggatggtggtggtgagagaggaggaggcagcatgaatctcaagccgctttctgacttgggc

SEQ ID NO: 520108 - DNA, 604 bp, Homo sapiens
tttgtttatttaaacccaacccactctgcttaaagccttattgcaaaacaggcactcctggggttctctggtttttcctcctgcctgggtccccttcaggtccgcccagtagccttccactgggaggctccgggctcagggacccgccctgccttccggccccagaactcctgtcctttcakccttcccggaaaaatcccagtggaagggtatatggcgggtggggaggtcctggaccgctcacattaaggagacggacttttctccttcctcccctccctccacacacacatttcccaacaggactctccagtggaaacctcgaattaaaaggttccaaagcaactccaccttttagatcaatataacgtgttcaaatccttgctactgggaagaaaatgctcacattgggcttcagcacaaagacactgtttcagcagctttgagcgaagttggctgagtatgcgtgtgacacacacacagacacatcgctccgggggagaaacccttccggttctccacagccgcccacggtcctcgttgagactggactcatctcagctcagctcagagatttggctgcaggatccgaccctcccttgcc

SEQ ID NO: 520109 - DNA, 604 bp, Homo sapiens
tttgtttatttaaacccaacccactctgcttaaagccttattgcaaaacaggcactcctggggttctctggtttttcctcctgcctgggtccccttcaggtccgcccagtagccttccactgggaggctccgggctcagggacccgccctgccttccggccccagaactcctgtcctttcatccttcccggaaaaatcccagtggaagggtatatggcgggtggggaggtcctggaccgctcacattaaggagacggacttttctccttcctcccctccctccacacacacatttcccaacaggactctccagtggaaacctcgaattaaaaggttccaaagcaactccaccttttagatcaatataacgtgttcaaatccttgctactgggaagaaaatgctcacattgggcttcagcacaaagacactgtttcagcagctttgagcgaagttggctgagtatgcgtgtgacacacacacagacacatcgctccgggggagaaacccttccggttctccacagccgcccacggtccycgttgagactggactcatctcagctcagctcagagatttggctgcaggatccgaccctcccttgcc

SEQ ID NO: 520110 - DNA, 552 bp, Homo sapiens
cccacaccctctgctcccatccgtgatccagccctaaagggttgagagtaaggttccttgcaccaggctgcccaggtcaagccagtcctaaccctcggtttccaggtctttaggtagaggtagcaggggcacctgagcacgcgtgtgagctcaggagcccatctccagggaacctgggccacagtccaggcttacaccagcttgggccttgagaggaagcctcaggtgratgagggctggcagcgcctgctacaggctattctcaggaccaagcactgtgccctcacttcccccaggcctcccgcgcacctgagcctgctcaacaccaccaactcctgacaccaaggagagaaggccttcctccaacaggccaaggacatcatccaaatctaggtccacagcacagcatccatggtcaggaaaccacagtaacagtaacaataacaacagtaccatcggccagcctcagtggctcacacctgaaatcccagtactctgggagtccaatgcaggagaatcacttgagcccaggagttcaagaccagcccagac

SEQ ID NO: 520111 - DNA, 552 bp, Homo sapiens
cccacaccctctgctcccatccgtgatccagccctaaagggttgagagtaaggttccttgcaccaggctgcccaggtcaagccagtcctaaccctcggtttccaggtctttaggtagaggtagcaggggcacctgagcacgcgtgtgagctcaggagcccatctccagggaacctgggccacagtccaggcttacaccagcttgggccttgagaggaagcctcaggtgaatgagggctggcagcgcctgctacaggctattctcaggaccaagcactgtgccctcacttcccccaggcctcccgcgcacctgagcctgctcaacaccaccaactcctgacaccaaggagagarggccttcctccaacaggccaaggacatcatccaaatctaggtccacagcacagcatccatggtcaggaaaccacagtaacagtaacaataacaacagtaccatcggccagcctcagtggctcacacctgaaatcccagtactctgggagtccaatgcaggagaatcacttgagcccaggagttcaagaccagcccagac

SEQ ID NO: 520112 - DNA, 567 bp, Homo sapiens
cacccaaggcagaggagccagcaaggagggcgccacactcaggggtgctggaaggcgaaccgactcagaacagccaccagtgtaggcccccgtccacacctaccagcagccgggccgcccctcaggtttcagagaggcgcctcttactgcccagtracaaacaacaacacagtgaagaagactggtgaagccaggagccagccctaagcaccgcctcctgcctggggccccacggccctccccggtgggatgctctgcagaccctgctctgctgttccacatccccaaagcactcgcactccacaatgcggaatccagtgtgtgcgtgggcctctctgaccatcagcgtgccgtgtccctggggcccagcacacggcctggcaccaaagaactggcagcaaatgaatgggtgagtcaggtggattttacagaagttcctgggtccctgggcaaatctagtacagaagtaaacccacatggcctcaaatagctcctcccgtgaaaagagcctttgtgtacctccaaaccactacctccccttttgtcaacttcttttgtttaaatgtg

SEQ ID NO: 520113 - DNA, 567 bp, Homo sapiens
cacccaaggcagaggagccagcaaggagggcgccacactcaggggtgctggaaggcgaaccgactcagaacagccaccagtgtaggcccccgtccacacctaccagcagccgggccgcccctcaggtttcagagaggcgcctcttactgcccagtgacaaacaacaacacagtgaagaagactggtgaagccaggagccagccctaagcaccgcctcctgcctgggkccccacggccctccccggtgggatgctctgcagaccctgctctgctgttccacatccccaaagcactcgcactccacaatgcggaatccagtgtgtgcgtgggcctctctgaccatcagcgtgccgtgtccctggggcccagcacacggcctggcaccaaagaactggcagcaaatgaatgggtgagtcaggtggattttacagaagttcctgggtccctgggcaaatctagtacagaagtaaacccacatggcctcaaatagctcctcccgtgaaaagagcctttgtgtacctccaaaccactacctccccttttgtcaacttcttttgtttaaatgtg

SEQ ID NO: 520114 - DNA, 567 bp, Homo sapiens
cacccaaggcagaggagccagcaaggagggcgccacactcaggggtgctggaaggcgaaccgactcagaacagccaccagtgtaggcccccgtccacacctaccagcagccgggccgcccctcaggtttcagagaggcgcctcttactgcccagtgacaaacaacaacacagtgaagaagactggtgaagccaggagccagccctaagcaccgcctcctgcctggggccccacggccctccccggtgggatgctctgcagaccctgctctgctgttccacatccccaaagcactcgcactccacaatgcggratccagtgtgtgcgtgggcctctctgaccatcagcgtgccgtgtccctggggcccagcacacggcctggcaccaaagaactggcagcaaatgaatgggtgagtcaggtggattttacagaagttcctgggtccctgggcaaatctagtacagaagtaaacccacatggcctcaaatagctcctcccgtgaaaagagcctttgtgtacctccaaaccactacctccccttttgtcaacttcttttgtttaaatgtg

SEQ ID NO: 520115 - DNA, 567 bp, Homo sapiens
cacccaaggcagaggagccagcaaggagggcgccacactcaggggtgctggaaggcgaaccgactcagaacagccaccagtgtaggcccccgtccacacctaccagcagccgggccgcccctcaggtttcagagaggcgcctcttactgcccagtgacaaacaacaacacagtgaagaagactggtgaagccaggagccagccctaagcaccgcctcctgcctggggccccacggccctccccggtgggatgctctgcagaccctgctctgctgttccacatccccaaagcactcgcactccacaatgcggaatccagtgtgtgcgtgggcctctctgaccatcagcgtgccgtgtccctggggcccagcacacggcctggcaccaaagaactggcagcaaatgaatgggtgagtcaggtggattttacagaagttcctgggtccctgggcaaatctagtacagaagtaaacccacatggcctyaaatagctcctcccgtgaaaagagcctttgtgtacctccaaaccactacctccccttttgtcaacttcttttgtttaaatgtg

SEQ ID NO: 520116 - DNA, 561 bp, Homo sapiens
tccgcaaaatacgaaaaatagaactaccatatgatccaacaatcccccttctggggatactcaaaagaactaaaagcaaggtcttgaagagatatttgcatacccatgttcactgcagcatttttcgtaagagccaaaagggtgaagcaaccyaagtgttcatgaacagatgaacgaataagcaacatgtggcccatccacaccatggaatattactcagccctgaaaaggaaggaaattctgacatttgccagaacctgggtgaacccggagaatattatggcaccaaaacctgggtgaacccagaggacattatggcaccagaacctgggtgaacccggagaacattatggcaccaagacctgggtgaacccagacaacattatggcaccaaaacctgggtgaacccagagaacattatggcaccaagacctgggtgaacccagacaacattatggcaccaaaacctgggtgaacccggagaacattatggcaccaaaacctgggtgaacccagagaacattatggcaccaaaacctgggtgaacccagagaacattat

SEQ ID NO: 520117 - DNA, 561 bp, Homo sapiens
tccgcaaaatacgaaaaatagaactaccatatgatccaacaatcccccttctggggatactcaaaagaactaaaagcaaggtcttgaagagatatttgcatacccatgttcactgcagcatttttcgtaagagccaaaagggtgaagcaacctaagtgytcatgaacagatgaacgaataagcaacatgtggcccatccacaccatggaatattactcagccctgaaaaggaaggaaattctgacatttgccagaacctgggtgaacccggagaatattatggcaccaaaacctgggtgaacccagaggacattatggcaccagaacctgggtgaacccggagaacattatggcaccaagacctgggtgaacccagacaacattatggcaccaaaacctgggtgaacccagagaacattatggcaccaagacctgggtgaacccagacaacattatggcaccaaaacctgggtgaacccggagaacattatggcaccaaaacctgggtgaacccagagaacattatggcaccaaaacctgggtgaacccagagaacattat

SEQ ID NO: 520118 - DNA, 278 bp, Homo sapiens
cgggtctgccccacatccacagagctcagcaggcctgccacctccctgcccttgcgtggtgctgcctggagggatggaagacggacagccagacagggacggaggtgtgctgacctcagctctgcccctcctgacctactggctcctcatccatcgggttgtgggggacgctgggcagtcactggggttacctggcttctcccatgctcctaggttctsaaagcagatggggtggctgggggtgaccccccagggcctgcctatcctgagtcacagct

SEQ ID NO: 520119 - DNA, 278 bp, Homo sapiens
cgggtctgccccacatccacagagctcagcaggcctgccacctccctgcccttgcgtggtgctgcctggagggatggaagacggacagccagacagggacggaggtgtgctgacctcagctctgcccctcctgacctactggctcctcatccatcgggttgtgggggacgctgggcagtcactggggttacctggcttctcccatgctcctaggttctcamagcagatggggtggctgggggtgaccccccagggcctgcctatcctgagtcacagct

SEQ ID NO: 520120 - DNA, 644 bp, Homo sapiens
tggcatcaagaagctgaaacgactttgttatagagctgagagcagattctcaagcccacttggtttggtgccctgcacattgcacctgcctggcaacatgacaggggtggccatggcactggccatgctgggggccagggagggacaggatgggctggtgacctcccgacacagctcctctcacaaacctcagtggatcctgaggttggaggtcctgacaccaacatggcacatgaaataagacccttggaggctggcctgccccaccctatgcagtgcttccragttgtcccctctttaggcctcctgttcctgccaaaccctgaggtcctcagaagcctctgctaagagctgacctgggagcccagggcctgcctgggcagagactgtgcccaggagccagtgagctgccctgactcctgggaaggcagccagcacctgcaccagcctgcccgggcgcacctcttccctccagctaactctggtgcagctatcaagacccagcctggttatcacctcccataagaagcctcactgacccctaggctgggccaggtcctcccatgggttctccagccttgggatttccctctgtttcagggacagagcaaggagttatacgtaacagaaaaaaacagctcaga

SEQ ID NO: 520121 - DNA, 516 bp, Homo sapiens
gtgtccctgcttgggggggtctgtctccctaggagatgctgcccccatgaaggcagcgctggcctcgacctcattcacccaggagtatttatttatttatttatttaattttttgagacggagtcttgctctgacgctgaggctggagtgcagtggcgtgatctcagctcactgcaagctccacctcccgggttcaygccattctcctgcctcagccccccaagtagctgggactacaggcacctgtcatcatgcctggctaattttttgtatttttggtagagatggggtttcaccatgttagccaggatggtctcaatctcctgaccttatgatccacccgcctcggcctcccaaagtgctgggattacaggtgtgagccacctcacctggcccaggagtacttattgatcttccctctgtatttgaccctctgctcagtgccacacagtggaaggagctggtcttggccctctggggtcatcattagggagacagtaatacaggacagtgaca

SEQ ID NO: 520122 - DNA, 516 bp, Homo sapiens
gtgtccctgcttgggggggtctgtctccctaggagatgctgcccccatgaaggcagcgctggcctcgacctcattcacccaggagtatttatttatttatttatttaattttttgagacggagtcttgctctgacgctgaggctggagtgcagtggcgtgatctcagctcactgcaagctccacctcccgggttcacgccattctcctgcctcagccccccragtagctgggactacaggcacctgtcatcatgcctggctaattttttgtatttttggtagagatggggtttcaccatgttagccaggatggtctcaatctcctgaccttatgatccacccgcctcggcctcccaaagtgctgggattacaggtgtgagccacctcacctggcccaggagtacttattgatcttccctctgtatttgaccctctgctcagtgccacacagtggaaggagctggtcttggccctctggggtcatcattagggagacagtaatacaggacagtgaca

SEQ ID NO: 520123 - DNA, 516 bp, Homo sapiens
gtgtccctgcttgggggggtctgtctccctaggagatgctgcccccatgaaggcagcgctggcctcgacctcattcacccaggagtatttatttatttatttatttaattttttgagacggagtcttgctctgacgctgaggctggagtgcagtggcgtgatctcagctcactgcaagctccacctcccgggttcacgccattctcctgcctcagccccccaagtagctgggactacaggcacctgtcatcatgccyggctaattttttgtatttttggtagagatggggtttcaccatgttagccaggatggtctcaatctcctgaccttatgatccacccgcctcggcctcccaaagtgctgggattacaggtgtgagccacctcacctggcccaggagtacttattgatcttccctctgtatttgaccctctgctcagtgccacacagtggaaggagctggtcttggccctctggggtcatcattagggagacagtaatacaggacagtgaca

SEQ ID NO: 520124 - DNA, 589 bp, Homo sapiens
agatgcctccagaatatgagtacaaggatatgaatacagcactgtttataacagagaaaatatagaaatctgctacgtgcctcttagggagatggtcattaaaggagctctgaataaccatacaatggaatgatatgtgtagctggtaagaagaatgaatatttttccacatcaatgcatataaatattgttgagtaaattgttgagttaagggggaagtagagtacagaacagtgtatgtccaatatgtccagtctatttattttaaaattttttttctttttgagacggagtctcgctctgtcgcccaggctggagtgcagtggcgygatcttggctcactgcaagctccgcctcctgggttcaagcaattctcctgcctcagcctcctgagtagctgggactacaggggcacgctgccacgcccagctaaatttttttttttattttattagaggtgggatttcaccgtgttaccgaggctgctctcgaactcctgaactaaggcaatccaccctccttggcctcccaaagtgctcggattacaggtgtgagccactgcgcccggccttaaacgatttttaacagc

SEQ ID NO: 520125 - DNA, 637 bp, Homo sapiens
tttattaaggggaaggggagagtttaaaaacccaaaccgttgtggttttaaggtgtttcatttttaaaagggagagagaatctatttaaagctatttcagatcagggattgtcatccttttttgtccaatgtattccttgttctttaaaaaaattttttttagaggaaactaatattagtctttgtgttcactaactcttctggtcacttgtatttatttattcattcattcatcagatatttgttgccatctgaaagaactggcccagtgggtctgaaagctcgcttgagaataggaaacttgagacctggccccctgtgggtaggagaacaaggaccacctgggttctccagtcttgaacgagaatctcactcttatcagaatgtttttcttaacctcagcgtatgatgaggaaatttacttatctctagctaggatttgacaaattccaacatcaaatgatcaaaacatttgccactgaggcttcactggtgagatccgttctccgtcctcgggtgcagtcccttgggggctgctcctcggactgygccccgcacacctgttatcgagggtgtgagaagcgcctaagctggtgacatgtgatctgggacgccttcatttctcgggccaggagta

SEQ ID NO: 520126 - DNA, 614 bp, Homo sapiens
tgctatcttgattatccccaggagtagggagattgattttatggcccaaaacaggcccaaaaaacagagcctgtcttttttttcttttggttatttagtttttatttcataatcataaacttaactcttcaacacagctaggcatggaagggaacaaggaaaacatggaatccaaagggaactgcagcaagagcacaaagattctaggatactgygagcaaatggggtggaagggtgctctcctgagctacggaaggaatagtctggtggttaagataaaatggaagtcaaacttatcgaagttgtctgcagtcagcaatgattatcttcttgctggtcttgccattcctggacccagagtactccatggcctccacaatcttcatgccttctttcaccttgccgaagaccacatgcttgccatccaaccactcagtcttggcagtgcagatgaaaaactgggaatcgtttgtgttgggtccagcatttgtcatggacaagatgccaggacctgtatgctttaggatgaagttcttatcatcaaatttctccctgcagatgggcttgccaccagtgccaatttggcgtgtgaagtcaccaccctggcacataaa

SEQ ID NO: 520127 - DNA, 561 bp, Homo sapiens
ccaaatattttaattgtctccttttgtgggcacataggactgtgttttcctatttcctggaactaagccataaccatgtgwcttactttgaccaatcaaatgtgagcagagtaacttgtgccacttccaggtggggtcttgaaaaagacagtgtgggattctccacatcccgtttttcttgctttagcaatcatggaagaacagagatagagcctccctcagcctggatccttgagtgaggacactgtagattgaaggcttctgtgtttccacaacagatatgtggcataggcaagaaataaatttttgttgcttctagtcaccaagatttgggggttgtcacatggcataacttagccacattaggcctaacctaatctcttgactgacatagtatcggattcatcttcctagcccttcagaatccagcaagtgtctttgtgtagaagtgcctcaaggtagatgtgttgcatgaagtacactaagaaactctgtttctggactgaagtcaccactaccttgtgcctgagatgatgaaaaggataaaatgggcctgcccta

SEQ ID NO: 520128 - DNA, 561 bp, Homo sapiens
ccaaatattttaattgtctccttttgtgggcacataggactgtgttttcctatttcctggaactaagccataaccatgtgacttactttgaccaatcaaatgtgagcagagtaacttgtgccacttccaggtggggtcttgaaaaagacagtgtgggattctccacatcccgtttttcttgctttagcaatcatggaagaacagagatagagcctccctcagcctggatccttgagtgaggacactgtagattgaaggcttctgtgtttccacaacagatatgtggcataggcaagaaataaatttttgttgcttctagtcaccaagatttgggggttgtcacatggcataacytagccacattaggcctaacctaatctcttgactgacatagtatcggattcatcttcctagcccttcagaatccagcaagtgtctttgtgtagaagtgcctcaaggtagatgtgttgcatgaagtacactaagaaactctgtttctggactgaagtcaccactaccttgtgcctgagatgatgaaaaggataaaatgggcctgcccta

SEQ ID NO: 520129 - DNA, 598 bp, Homo sapiens
ctgatctaaatatattgttttcattttttcattacagaagaaaatagaagttatagaaaaaacgtttttaaaaatcacccatatcagagaaaactactgttgatctctaagcattttcctatatacacacaaaaacgccatataaacatccattatactgttttgtcatcttccctgcagatatacttacatctaaccagctacccatccagggaagactgttgctgaggaaagactgatttctatctgtacatgtatccagatatttcagtaagataaagagactatggataggcataaacaatcttgtctcactggcattagccattctacgtctttccttcttccatctttataatcttctttctctgagactttacacttttttggttccaccttccatccctagtctatttctgtctcaccatgtacagttgtttcttctgttcattattaatatatttgcattgtagtttcatatgatctagacatgakttaaaaaacaaatacgtttgccacaattatacattcaacatggatttgaggaactctgactaaaggaagagtcagctaaatgagctaactgagcaggcagggc

SEQ ID NO: 520130 - DNA, 553 bp, Homo sapiens
ttttcagggattgattccccccccacttgccagcgttggtgttggtttgactttgcttgagccagaggggttaaataacttgcctaaagccataaaatcagtgagtgacagttgaagattcaaactcagttgaagtaagaaacggcataggaggacttggtgatttgaggttgagagcggtcacagaagagggagaaaaatgctgaaaggaaaggcagggcgctggactcgtgctttgtccttagcgtgtctgccttgggctgctcctgagtatgtgagcrtaagattaggctataaaatagtaacagtctttgcaaaatatgctagaactgaaacatccaaaaggagaagtttgcttatcacaaaagtcccttaggtacactgttttattacagggatatggcaatggcccaataatatttttggaagtgcctccaaaacttgaagcacattcctgtaaatacaattaatggtggcaaatatttgtcctttgagagaataatttatatttagataaaatgtcatttagaaccaaatacaatgaataagaaac

SEQ ID NO: 520131 - DNA, 565 bp, Homo sapiens
tgtaatatacaggctaccaatctttggctttgtaacttcgtttgactatagtgcaacctgatatggttgacttattaggttgaattattttataccgctacgaggcactttttgtttaaaataatgtatgcctcttccagaagatccctgcacatcacacattcaaaactaactagattaccaggacatgggaaaatggtgtcatatgtcttagttgctgaaggttcactttatcttgaataataaaattacagatctacctagaattgaacttaattgcacaatattgtatttcctttgccaattaacccaatggaggtttgaagtaatatatttgaaaaatgctttgtmatctgaaaagcaccaggcacttgttaatcgttgtcattactatattggaaaaactacctgtggccacttgcaatggagaaaaaagtcttaacactgagcaaagaacagctcaacccttaggcaagtactttatcatcaaaacattttccgatgaccatgattcacagcagatgtaaactaactccagtgtttttcaaactagtggtcttgaccc

SEQ ID NO: 520132 - DNA, 608 bp, Homo sapiens
ccagctactagcatcactaggcctcagtgccagattccacgggccagatgtctatccctggtccactcagctatgatgaggataatgctttcagattcttgtttacctcagcctgggagcaggttcttttatatcatggcacaagcagctcctctaagaaggcaatgattagtatttgaaccacaaggaacaggagaagtgaggggtcaatgtggtcagacttactaaggagtacttaaaggccactgcaaaacyaggcacctgatcctctaattgagaggggaagtttgcaagggaaaggtgtttgatatatggcaagttgaaagggtggagaggctgagcgccagaggtgagctgaaaggtaatggtaacaatagaggcctagggatacattagtcgacttagagagaaaagagaggaatggcaattgctgaggatgcaagaagttaccttgaaagaaggaaaagcaggatttattgactggttataaaggcagcttttagctccagggatagggacaaggttgtgtggctttgggacataaagaaaggagaaggaggaggaacctgaatgtcaggagagacataatgcttctggtttggaaatgt

SEQ ID NO: 520133 - DNA, 519 bp, Homo sapiens
tgaaatggctgaggaatgctctactaaatccatgcagggccctttgtgccaggccctttgtcactcatctggtgtccatctcagcctcacacctgcctgtggcatctccaaagtctctgatgggactttgggtgcctccttgcygggtcagtcagagtgatcatgttgcctgctcatgacattgcctccaggttctcaaacaacctaggatcccagttagtgagccagcacatccaggattggcctctcccaattcccaacatcccaggatccaatatagttagatagttattacacctttatgatgttattttcacttgagttatcttgaacattggcttgctcatgagttatttcgcaaatgcagaatgaacctcagtgtacatatcaatgtgcatgataggaaagcaatacagtatagttcagaaacaaccaccatacaaagatactagcatcaagctgtcttcttctctgattatatagtgattgaatagctcctaagatcaatagacccaattt

SEQ ID NO: 520134 - DNA, 683 bp, Homo sapiens
agtactagcttgagaatgcaatgagaaaggcaattaaggcaagaggatataaattattctagttacatgtagaattttgtacccacttatattaggktgatgcaaatgtgactgcagtttttgccattactttcaacttactttaacctacttagttacatctacttacaaaaaatattactttcttctttctacttttcatctactttcatcttacttttaacctacttagctacatccacttacaaaaaatattctatcgatactttctgattctctttttaaattgactcctattattcttcactggttgtaatagtgacatgtcttcattacaactttgtaaagtacataaaatataaagaaaaaaaaattaaaaatttcttaccaagcagggaaaatcactttgacctttatatgtgtttccttctaattttttctacttgtatgtattttgcttcttagcaaaattgggataatgccatacatatatttttatatcatgattcctctccctccccaactataacgtaagcatattctcagattattagtgtttggaaacagtttaatgactatatcatgtgccatgatatggacagatgcatgaagtggtatgtgtaggggttaagactggaatatggagtgacacagcctaggtttgcaaaccagctctgctgctc

SEQ ID NO: 520135 - DNA, 683 bp, Homo sapiens
agtactagcttgagaatgcaatgagaaaggcaattaaggcaagaggatataaattattctagttacatgtagaattttgtacccacttatattaggttgatgcaaatgtractgcagtttttgccattactttcaacttactttaacctacttagttacatctacttacaaaaaatattactttcttctttctacttttcatctactttcatcttacttttaacctacttagctacatccacttacaaaaaatattctatcgatactttctgattctctttttaaattgactcctattattcttcactggttgtaatagtgacatgtcttcattacaactttgtaaagtacataaaatataaagaaaaaaaaattaaaaatttcttaccaagcagggaaaatcactttgacctttatatgtgtttccttctaattttttctacttgtatgtattttgcttcttagcaaaattgggataatgccatacatatatttttatatcatgattcctctccctccccaactataacgtaagcatattctcagattattagtgtttggaaacagtttaatgactatatcatgtgccatgatatggacagatgcatgaagtggtatgtgtaggggttaagactggaatatggagtgacacagcctaggtttgcaaaccagctctgctgctc

SEQ ID NO: 520136 - DNA, 644 bp, Homo sapiens
aggatataaattattctagttacatgtagaattttgtacccacttatattaggttgatgcaaatgtgactgcagtttttgccattactttcaacttactttaacctacttagttacatctacttacaaaaaatattactttcttctttctacttttcatctactttcatcttacttttaacctacttagctacatccacttacaaaaaatattctatcgatactttctgattctctttttaaattgactcctattattcttcactggttgtaatagtgacatgtcttcattacaactttgtaaagtacataaaatataaagaaaaaaaaattaaaaatttcttaccaagcagggaaaatcactttgacctttatatgtgtttccttctaattttttctacttgtatgtattttgcttcttagcaaaattgggataatgccatacatatatttttatatcatgattcctctccctccccaactataacgtaagcatattctcasattattagtgtttggaaacagtttaatgactatatcatgtgccatgatatggacagatgcatgaagtggtatgtgtaggggttaagactggaatatggagtgacacagcctaggtttgcaaaccagctctgctgctcgcca

SEQ ID NO: 520137 - DNA, 591 bp, Homo sapiens
aacgacccactcagagtccccagagatggttttgacaatacaacttgactgccatgaccagaagtatccctcctgcagagacacatttaaagtaaaagcaaggaaaagtttgttataaacaccgctaaatcaaaaaggctgcataagaaagagaaagaataaaaggaagatatctttcctttgtcaatacatctttgctacagcaaaaattccagatgagttttctttggtcggtagattagagaatacaccaacaagctaaaaagaaataagggtctataaatagttctatctcagatagmggattgaaggccatttgtgaacatgttcctacacaatttgcgacatgatccatgagcaagtccaatattatgccatcattgtgggagtcaatgggttaagacccagaacttaattgtctatagtttgggccattgaaaaacttaacgcagatatttagcaaagcgttctggagcagcgcagaccacactctcagaacgagatttctctggggcacactgtgcaggatcccacaggaccagctacaaagctatcagcatgaatgaagcattatcggcagccccttcccaa

SEQ ID NO: 520138 - DNA, 588 bp, Homo sapiens
ttccagctcaagtagtcaggcaggaggagttcccttttactcagcctatttgttcaagtcttcaaytgattggatgaggcccacccacattaggtggatgatctgcttttctcagtctattgacttaaatgctaatctcatccaaaaataccctcaaagacacacccagaataatatttgaccaaatgtctgggtactccatggcccactcaagttgacacatgaaattaatcattaagtcttttaaaattcatttattttcatttttaaaatatggatttctggctcctcttgccataattcaaatattacagcaggggagactcattgctatgtagtaacagaaaggtggagaaggtagaggttgccaccatcctcaccctgctctgtgatactgtgccctgcactcacttgagtttcttgactggcctctgcaccatctgaatccggcatctcccagttgaagctgtattgttaattagagttgatgttggtctttgagaggtttgtgcatgtgtaaatgtgtgtgtgttcctatagttattatctttgagacaatgagaaaaacgaagagacatatacacaact

SEQ ID NO: 520139 - DNA, 588 bp, Homo sapiens
ttccagctcaagtagtcaggcaggaggagttcccttttactcagcctatttgttcaagtcttcaattgattggatgaggcccacccacattaggtggatgatctgcttttctcagtctattgacttaaatgctaatctcatccaaaaataccctcaaagacacacccagaataatatttgaccaaatgtctgggtactccatggcccactcaagttgacacatgaaattaatcattaagtcttttaaaattcatttattttcatttttaaaatatggatttctggctcctcttgccataattcaaatattacagcaggggagactcattgctatgtagtaacagaaaggtggagaaggtagaggttgccaccatcctcaccctgctctgtgatactgtgccctgcactcacttgagtttcttgactggcctctgcaccatctgaatccggcatctcccagttgaagctgtrttgttaattagagttgatgttggtctttgagaggtttgtgcatgtgtaaatgtgtgtgtgttcctatagttattatctttgagacaatgagaaaaacgaagagacatatacacaact

SEQ ID NO: 520140 - DNA, 356 bp, Homo sapiens
tttcctgatactgtggttttgctcaaactatttcctttgcctggaatacccttccctctctctaatttataaacccttttcatccgttaagctcggttttcactgcctgccaggatggatcagtcctttctctgctctctgacagccctttctttgtgaggcacttgtctgttcttgcccttgtcgcagtttatggagttggttaggtttctctttcttctctgtgagcatgggagatgggaagaaaacgaatacttttcagtctttgccctgtgcggagttccacacaaggcacataggatcctccagctcccagcccagagtacatagygtatgcaaatttgagtggatgtttg

SEQ ID NO: 520141 - DNA, 455 bp, Homo sapiens
gatgcagattggctctggcagggactgagcggtggcagggaggccttgttagtacctgggcagacaagctggcacatatcacaacgtgttaaggactcagggccgtgatagctcaggcccggcttgccccctcccaggaacaaaatcccttcagtggaatgaattaataaayaagcctcagtttccccatttgtaaaatggcccctggttatagagaagctcacatgggcaaaggatcatagccttaagcacctactatgtgcccatcacctactttgtgcaggcggactgccagcccctcctccccacagcaggtcgaagacatgcattttcacttctctgaaatgaggatgtgtattgccttcgtcagtgccttgctgtggctatgtggctgcgtagctgtgtggaaagcttttgttcccatcttctgataggatcaagggagggccaggatc

SEQ ID NO: 520142 - DNA, 529 bp, Homo sapiens
cccctcttcaacagcctgtaagtgtgaccacactcactgataacacatcctcagctgcctgctgggccttaacacaggtgaccaggctcctgcaggggagttcagggtagatgttacatcttccaaagagatgtgtagatttaattcaatcctaataaaaatcctggcagtctgtggaatttgtgaagactttataaaatgattttaaagtgcttctagaagaatacttttacttacagcctacatttacttcttgatgctcttaaatatttaatcaagcacttatcaaatgccaagtgcttctgagagcactgagtgtgcaagattaaacaaaacagacttggccctggcctccctttgcttacagtctagaaggaagattctggtctagagagtaatrgggttagaggttgggtaggaattgatttactgggttatctaggaaggcttcatttaggaggtggcatttaggctgaaaccaggctaagaaagaagcaaccaagcaaaggcggggcccctttcctccacc

SEQ ID NO: 520143 - DNA, 604 bp, Homo sapiens
gtaagttttgctgccagtgaatttactgcaaaatttcttagttcttgaatttcagaattatgtacctgtatgtcaagaatgtacaatacctatttgtcttttgtctcaatatcattttggcttctcatcattcaaaatcttattagcaaccctgacattttgtggtttgagtacctattttgaaaagtaaaggagccaagttagtgggagttgttaaaagttgcatttatgaactgttgcattcagctgcattattgacaaaaatggtccccgttaattttttaaggtctggaacaaaaagaatgcaaatgaaaaaggaagaagccagacttctaagcttcctccaagatttgccaaaaaacaggctacagggatccagcaagcacagtcttcagcctcagttccacctctagcttcggctccacttccaccttcaacctcagcttcagttccagcctcaacctcagctccacttccrgcaaccttaactccagttccagcctcaacctcagctccggttccagcctcaactttagctccagttctggcctcaacctcagctccagttccagcctcacccttagctccagtttcagcctcagcc

SEQ ID NO: 520144 - DNA, 585 bp, Homo sapiens
gtcataaatgcaaatggttacatctggtggtacatgaaatgcttgagatctggatgtgaaacaaaagcatttctattgcacccaagcctaaaacctatcttgttaccttgccttttaaaacactgtgagcatgaagcagccaaccaaaagatgcctgccatttgccatttaagaagcattggagtaaaaagaaagaatggagagaatggatatttactgggggaaggcctttccttattcactggtagggataagggctcatgtttaaatgatacactctcacactcccaatttkagtaatggagcaaagataaagaggcaaatggaaagtctgaaatccctagggtcttagggtcttagattttctttaaatatctttgtgtgtgtgtggtttttgaaagattatatttggcacttaaatactgatacatgtatatacatacgtatattctgtattaacatcatttttttactataaaatgtccgttttattgcagatggagtctgcacgcaaagcatgggagaattctccaaatgtaagggaaaaggggtctccagtaacttccacagcacctccaattgcaa

SEQ ID NO: 520145 - DNA, 454 bp, Homo sapiens
cgtcaggcacgtcagcaagagcagcrgcagcaggaaccagaggaacgtcttcagggacgagaagcgcctggaccacgcgggagggcaggacgggggaggcggaggtgtgaggggagctccaggcctccacgttccacccagggagtaccctgagatgttttcctgggtgctgaactagagctaaggaggatagcttgagcttctcactgtgccagggccagcctggacacgtcagagcctttcctgctgggcaggtcttagagtgatgggacaattttgactgaattttactgatgttattaaaaatagtgtggtctttgaaaaactcaaaaatttttatatggacaggtcctctaagtatgcaaatatagaaaaaaaaagtaactccttaaataacaacaaggaacctgtttttggtgacacaaacccatccttgccccttgtttcagtatgg

SEQ ID NO: 520146 - DNA, 608 bp, Homo sapiens
tgcctcactcagaccacgacttttaattttttattctccatcagggattgtagattttctgatggttacacatttatagatccaggcagggtacctccatgggcttgtaggaaccagacttgtagctgttgtacctgttgctttagatgattaagttcaactatctggcgatcartattaacaacaggtttgttcctggtttttcttgctctgtcagcatagcgaagggtatttagtttcctctagattggagccagcaggactcacacagcctattataagagtatggttattaccacttagagaaccttgaagcagtcgagccaacttggaatctccgtaggacacaaagtcaccctttttgtcttctccaagagcactgattacatttcccaagcatagaaggcctcggttaatattaataccctcttttagatgatccccttcagccttggttttcttctctctttctgatccagcgaggtctacaagatgtagcttggagcgaaagctgctattcttgtcacttttctttctctgctctatggagattgtaaagatggcatgagattgggatgactgggggttcatagctgtggaggccacag

SEQ ID NO: 520147 - DNA, 442 bp, Homo sapiens
ggctctgtactcagaggttgttagtatataggaatatgtcttagactcagaatatcagtggttacacaaagtctaaggacataagccacccagaattcacagatataagaagtccataatagsaggaacataggatcttgcaatctcattgctccatcatcttcaacctatgcttccattttgaggttaaggcatcttgcctgttttcaagctggcaggaattgaaagatgacattttcccattagaggcatgacctacaggttttgtgcaatattttaatatatattccattgaccataaatgagtcatattacctcatgtgcctgtgatgagaataaggaaagtttcaaatggctttaaagggaagcatgataataagcagtcagcagaggtcttaaattgattgtatctcttaccagttacatttcaatagaaaatgac

SEQ ID NO: 520148 - DNA, 606 bp, Homo sapiens
tttaatagtgaaggtgtgatcaaactgtttgaaatatatattagagaacaggtatttattaagaattttaatgtattctcaaggacaactagaatgattctaggaagtaaatggatattttacacctagcatggtgtctagcatgtaatagatgctcaatataaatgtttgtaaaactttttccttcattcatgctgattcattgcrtaaatcatttaagatattgtaaaaggagtaatgtatcgacttccaagtttgtaaatgaaaggctgtgttttatattttacaatggtaagaaaacaaaacaataatatttattgaatgctaggaactgtgccggacacattacatacattcttttagttcattctcttaacaacttatatagtaatagcttacttttagagatggaggaactgagcctgaaataaatcaaatccatggccacaaatcatagctagtctgactccaaggtcctggtttttcctctgtatcacagaatacatattatcccataattatctcagataatgcatggttacttctaggagagcactggtgtaacttttggctacttgtataaaattcatctgataacctaagaat

SEQ ID NO: 520149 - DNA, 538 bp, Homo sapiens
tgtatcccgcctcatctccctgaactttttgaggacagctataggcaggtacaagccctgattggactcattacctcaatcattcttttaattcgatatctatattgaattacctactttatgccaagagctgacctaggacctgaaggaacaattgaatggaatagttgagttccctgctcaataatcttaaatgtacttgcatgtatttgaatattaggcatctctatgaccttccttacgtgcagacagtttaatttgaatagaggagggcatttttccctctcatatcaattctagatacctttatggcaacaagaaaagaaaaaaccatcctgaaatgtttcttagaaatatatagtccaataktcctaattcaatagatatttattgggtgtgtattataaccatacacccttatctttatctttcagatgaataaaagaatcctaagggaggtagtatggcctaaatgtttgtgtcctcccaaaatttcagtgtctaagccctaacccctggtggggttatatttgaagat

SEQ ID NO: 520150 - DNA, 477 bp, Homo sapiens
tgtctggctgtgtcaccgaggttgcaaggcaatggcacaatctccactcactacaacctctgcctcctargttcaagcaattctcctgcctcagcctcccaagtagctgggattgcaggcgtgcaccactgtgcccagctcattttttgtatgtttagtagagaccggtttttgccatgttggccagactcatctggaacccctgacctcaggtgatccgcccaccttggcttccttaagtgctgggattataggcgtgagccaccacgcacagcctgatttcctgatttaaacggcacacaggaccctgactcgtcttccattcccaaggcctttccttctggtgtcagcagaggggactttgtgctcctaacatatgctgcccaatgggcttgcacgcccactgccaagtccagctccacctccaggcccttgccctactcttccttggcctttggaaaatcccatctttcatgc

SEQ ID NO: 520151 - DNA, 529 bp, Homo sapiens
acttcttaattccctttgtcgcatgctagctaattaactagagctaattaggagtctccatgagctacactgtgtactacatgctgaggacaaagcagtgagccagacaaagttcctgtccctaggaacttacattccmctggatgcatatcagcctccataatgctgttgggttgaattgatgcaaaatgggcccaaaatagttggccaagtggaggtctcagagaggatgcaaaggggcgccccaaagcagatggatcacctatgcaaccctttaaaatgtagaaactttgggagacatagaaggcttggtgacttctaagttatgaactggaaaagtgcctcatgccttatgtgaattacatggtattcaagtgagtattcccatcctatgtgtgtaccgagtaacttagggataggacacagataatgaaaatgaatttgcagtgtcaccttttccatgaaccttgatcattctcttttgttcagctttaaattaaaaaaaaaaatcaatcaactttctttggag

SEQ ID NO: 520152 - DNA, 369 bp, Homo sapiens
atgctgttgggttgaattgatgcaaaatgggcccaaaatagttggccaagtggaggtctcagagaggatgcaaaggggcgccccaaagcagatggatcacctatgcaaccctttaaaatgtagaaactttgggagacatagaaggcttggtgacttctaagttatgaactggaaaagtgcctcatgccttatgtgaattacatggtattcaagtgagtattcccatcctatgtgtgtaccgagtaacttagggataggacacagataatgaaaatgaatttgcagtgycaccttttccatgaaccttgatcattctcttttgttcagctttaaattaaaaaaaaaaatcaatcaactttctttggagga

SEQ ID NO: 520153 - DNA, 512 bp, Homo sapiens
ttttgatgactaagttttgtaggagctttttaatcaaatgcacctaagaaaaccccaacactttaggccctttgaacatattacacttttttgcttcctctttcctctttttccttaaaaccataatttggaaatttgattctgccttcccataaaagagaattattttcaaagaaattatttgggtctaaattaacatgttacttaattgttctgcttgaatctaggtatatgattagtcccatatgaattgatgttccaaataatttactctcattgataactaatattttctatttccctctattgttttgtggtggtggtggtggctgtggatgaacatcattctcaaatatattatrattcccttcctcatcaagcccagcatgataaacttcagttttgcctgatggttcatcatcttatttctgtgtgtaagattgttggatttgacattaaacatttggaaactattttataattgataacttgtgctttctcagctttgagta

SEQ ID NO: 520154 - DNA, 535 bp, Homo sapiens
taaggcgtctgacttcggatcagaagattgagggttcgaatcccttcgtggttaagtggggttcgttttcgggcatgaaaattttattacccatttcattccaagaaaaaaataaatcatacactctctgggttttctgaatcctttttttcttccatctcctctcctttaaagggaagaaggagacattctcaaaggccttaggagaacaagtgacagagtgaagaaagactggaaagtcaaaactgaaatacagccatctactactttggagctgtcaggttctccccargtttggattttaagcacctgcgtttcggttttgtaggcttagattcaattcaaggattcaattccttgaaaaaaagaaattcagatctataagccaagctgtctcaaactgtagcgtctcagactaatgccaggccccagtggctagcacagtaggaaacctgttgcttcttctgatttagcactaggccaaaaactcttcacatttcttttttagtctacatccgcgtgtaccaaggagttt

SEQ ID NO: 520155 - DNA, 561 bp, Homo sapiens
ttgtagtaagaatagaggtaaaattttgcctccactacagttcaaaaacataaagattatattatatatttttaagacatagggtctcactttgtcacccaggctggaatgcagtggtgtaatcatggctcactgcagcctcaaccaccaatcctcctgcctcagcctcccaagtaactagaactacaggtgtgtgccaccacatctagctgatttattttttgtagagacagggtctcgctatgttgctcaggcttatcttgaactcttggcctcaagcaatcctcctgcctcaattcccaaagtactgggttacagatgtgagccaccatgcccagccaaaaccataaagatttktattatgacttgcaaggagcaaagactatgtgtttcagtcagctattgctccattaaaacacacacacacacacacacacacacacaaatgcttaaaaacatacaataagcatctgtgtgtgtcagttgaaggtcaatagttctaggccaaattatatgaatggctgtaccttaagatgtaagtacacttcagcttacctgctt

SEQ ID NO: 520156 - DNA, 535 bp, Homo sapiens
gttgcacaggctagcctcaaactcctaggctcaagcaatccacccaccttggtttacccaaagtactgggattacaggcatgagccaccatgtccaacctttctttggttgtttctgactcatttcatcacaatcagagaagtcagtctgatgctaatgttctgtgaaattaggcaaaacagaagaaccccatgamttagcagtgactgcctggccgattcctgacaatatgcaggcctagtgaatacggtcagaccagttcctggataccaggggctgttttctcacctatacccaataaaattacaaaaacaataatattgtgtatgtgtgtgttttgacatgatgtagcattaaaaaaataaggccgggcacagtggctcacacctgtaatcccagcactttgggaggccaaggctggaggatcgcttaggcaacatgacgaaaccccgactccacaaaatatacaaaaaattaaccgagtgtggtggctggtgcctgtagtcccagctacttggaaggctgtgttgagagg

SEQ ID NO: 520157 - DNA, 615 bp, Homo sapiens
tgaggttgaagttctctaaaacggaagcatgtttcgagttatgggaaaacaaagtgcaggctaattggcataatttataaaggtgaaattataaatgcttgggcaaatttcagccattcctggataccggagggagtcgttattacttccaaacattttttacttgagattttcatcgaaaatgttcacaggaaaaaaaaaattacagttgcagcgaggaggcaacagaacctagaactccgcgcggcaggtgagaattcaaccacttaaccaccggtgctaaacgtagttacatggatttgttttcttttacatctatcatcatatctcccttaaaaaaagtgacaatgtatgttctctgtctataatgttttaaaaatccagtcaaatattatgtctaaatattctgagtaaacgtttgaacatagaagtaagtaaatacgtaagaatatttttcagaacgtttgaacgtagaagtaagcagaaagtctgctgatacgtgacccttggagactttcaaagtgaaaaagacactcaagcctgtaatcccagcattttgggaggccgaggcgggtggatagcttgaastcaggggttcgagaccagcctggccaa

SEQ ID NO: 520158 - DNA, 654 bp, Homo sapiens
tttccattcttcctgggtaaagtccactatcacatccttgaaagtcaccgmttcctgaaataccaaacatatttctgcttagccataagcatttacttaggaaaggggtaaagttagcaatactgacagaagtaaggcagtctataggatgtctgcaaaataatcttgacattttctcctttatgaaataaatgtaaaaacagtgcctcatccattgggttattgtgagaattaaataaaacattccatgtgaaatgcttaatttaacgtctggcatataataagtgctcagtcaatatggccattgttgttgtccttcatcgtcatcattaccatcatcatctctgtgttccaaggtccgctaagtattaatggtttaactattatcatcaatattttttactacctacaatgtgcaagagcacccaaaggttttttgaaaaagagaggtggaaagacttgccctaatacatttcaaaagataaagtaatttaaaaatggcctagtctggaataaaacaaaatgaaataaaatagaaaatccagaaacagattcatatttataagagttaaaaggcattaagcagctttcaaattggttaaaagttagttaaattaaaagtaagttaaaagtgaaattagttaagatggatta

SEQ ID NO: 520159 - DNA, 590 bp, Homo sapiens
ttatttagagtataaaacaatctcccggcttcatgtgtgaagcctatttgagagtcagagggttccagcagagggaggaggawcatcagctacacctggagctctggggatgaaagaacccatgagggcctcatagattatagggctctgactcctccagggaaagatgatccagtgttctggcctatcttggcctgtggttctttgtgatccatggagtgagagtgtccacaatcgcctgctgtgtggtatttccctgacttgagcctttgctcataaccagcatagcccacaaacaccagccgtatccctcaattcctgacttctgctttcctgtctttacagaagaaccccagctgtgctaatggtcctgtaacctctcagctcagggccatgagaccttctctctgcatgaatctcgcctcctctgcaccccacacttccacaccacttcctcatataacgtgttatctgactacacaaccctggaaatgatgttcctcctgatgtgttcccaagcattcttgctattctgcttcctctagaagccagggaactttagctgaccaggtctgtgtcttgggcacctg

SEQ ID NO: 520160 - DNA, 590 bp, Homo sapiens
ttatttagagtataaaacaatctcccggcttcatgtgtgaagcctatttgagagtcagagggttccagcagagggaggaggaacatcagctacacctggagctctggggatgaaagaacccatgagggcctcatagattatagggctctgactcctccagggaaagatgatccagtgttctggcctatcttggcctgtggttctttgtgatccatggagtgagagtgtccacaatcgcctgctgtgtggtatttccctgacttgagcctttgctcataaccagcatagcccacaaacaccagccgtatccctcaattcctgacttctgctttccygtctttacagaagaaccccagctgtgctaatggtcctgtaacctctcagctcagggccatgagaccttctctctgcatgaatctcgcctcctctgcaccccacacttccacaccacttcctcatataacgtgttatctgactacacaaccctggaaatgatgttcctcctgatgtgttcccaagcattcttgctattctgcttcctctagaagccagggaactttagctgaccaggtctgtgtcttgggcacctg

SEQ ID NO: 520161 - DNA, 590 bp, Homo sapiens
ttatttagagtataaaacaatctcccggcttcatgtgtgaagcctatttgagagtcagagggttccagcagagggaggaggaacatcagctacacctggagctctggggatgaaagaacccatgagggcctcatagattatagggctctgactcctccagggaaagatgatccagtgttctggcctatcttggcctgtggttctttgtgatccatggagtgagagtgtccacaatcgcctgctgtgtggtatttccctgacttgagcctttgctcataaccagcatagcccacaaacaccagccgtatccctcaattcctgacttctgctttcctgtctttacagaagaaccccagctgtgctaatggtcctgtaacctctcagctcagggccatgagaccttctctctgcatgaatctcgcctcctctgcaccccacacttccacaccacttcctcatawaacgtgttatctgactacacaaccctggaaatgatgttcctcctgatgtgttcccaagcattcttgctattctgcttcctctagaagccagggaactttagctgaccaggtctgtgtcttgggcacctg

SEQ ID NO: 520162 - DNA, 446 bp, Homo sapiens
ggccgtgagggagagtgaaattaactgctcccttcacaagggaattgaacccctgaccttcacctcattagcacagcactccaatgcagcaattcctaacctcaattttatatcaccccagggtgtctccacttatctcaagcgggagctgcagaattcctccaacaaaattaattttaattcaccttaatttaaacattaaatayggactatgaggcagcaacttgcaggagtggggaagaatggctgttgttaataaatcccaccaccacaatgcactgttatccaaacaccccaaaacaccctctcgaacccactgagccaaacagtgtggggaggaagaagtctataagtaagcagcaggcatggaaggcttttaaattgcgggggaagcaacacccaaccctaccaaacatctgcatttcatagagactgtttcatgtggt

SEQ ID NO: 520163 - DNA, 446 bp, Homo sapiens
ggccgtgagggagagtgaaattaactgctcccttcacaagggaattgaacccctgaccttcacctcattagcacagcactccaatgcagcaattcctaacctcaattttatatcaccccagggtgtctccacttatctcaagcgggagctgcagaattcctccaacaaaattaattttaattcaccttaatttaaacattaaatacggactatgaggcagcaacttgcaggagtggggaagaatggctgttgttaataaatcccaccaccacaatgcactgttatccaaacaccccaaaacaccctctcgaacccactgagccaaacagtgtggggaggaagaagtctataagtaagcagcaggcatgraaggcttttaaattgcgggggaagcaacacccaaccctaccaaacatctgcatttcatagagactgtttcatgtggt

SEQ ID NO: 520164 - DNA, 115 bp, Homo sapiens
cgcgcgcccccaccccgggcccgcgctgacctctagctccccgttctcggcggcgtcgtrcagcgcggtcccgccccacaggtcagccgagatctccccgccgtgcagcagcagc

SEQ ID NO: 520165 - DNA, 428 bp, Homo sapiens
ttttgtggatctggtgagtgcctgcacgcatagttccccgggaattttctgaatttgaattctcatggtatttcaagtggctcagttgtctctttcttttcttttcttttcttttcttttctttttttttttttgagtcagagtcttgctctgtcacccaggctggagtgcagtggctggagtgcagtggcgcgatctcagatcactgcaagctccgcctcccgggttcacgccattctcctgcctctgcctccccagtagctgggactacaggcacccgccaccacgcccggctacttttttgtatttttagtagagacgaggttttaccgtggtcttcatctgacctcgtgatccgcccgcctcggtctcccaaagtgttgggattacaggcrtgagccaccgcgcccggccagttgtctctttct

SEQ ID NO: 520166 - DNA, 643 bp, Homo sapiens
ctgggagcgcaggtgctgggtggaccctggtgggctaaaygctgattgggcccagtgtcacaaggctgggactggttctccaactgtgaaaggggccaagacaaggatcaggacagtccgaggccacccccatgcagtgatgaccacggcccgttgtgaaccccgtggactttactcaagtctgtcacagcacttctcatgccatttggcagtgacttgctttccagatggagctcctggagtgctgggataatgttttcttcatatctgtatccacagcacacagcacagcgccaatcaagtctacagaggagctcttaggaaacgttttctcagtggtcaaaaagagaaggggtggaaccctccactcatctcccctcacattctgtgccatcgattctctcagaatcccctgtattccccattttactgaatcttcagcatggctcctcccctaaacaggatcccaataacccatctgaggtccaggaacagacacctgtgatgagctgtgaccaaaaaaaaaaaaaaaaatggcattgataaggaagggatgtcattacatactacttgtctgggctgcctcataacctgatgcatccctatgttacagcagttaccccctcctattaaaattacctgt

SEQ ID NO: 520167 - DNA, 350 bp, Homo sapiens
ctgggagcgcaggtgctgggtggaccctggtgggctaaacgctgattgggcccagtgtcacaaggctgggactggttctccaactgtgaaaggggccaagacaaggatcaggacagtccgaggccacccccatgcagtgatgaccayggcccgttgtgaaccccgtggactttactcaagtctgtcacagcacttctcatgccatttggcagtgacttgctttccagatggagctcctggagtgctgggataatgttttcttcatatctgtatccacagcacacagcacagcgccaatcaagtctacagaggagctcttaggaaacgttttctcagtggtcaaaaagaga

SEQ ID NO: 520168 - DNA, 350 bp, Homo sapiens
ctgggagcgcaggtgctgggtggaccctggtgggctaaacgctgattgggcccagtgtcacaaggctgggactggttctccaactgtgaaaggggccaagacaaggatcaggacagtccgaggccacccccatgcagtgatgaccacggcccgttgtgaaccccgtggactttactcaagtctgtcacagcacttctcatgccwtttggcagtgacttgctttccagatggagctcctggagtgctgggataatgttttcttcatatctgtatccacagcacacagcacagcgccaatcaagtctacagaggagctcttaggaaacgttttctcagtggtcaaaaagaga

SEQ ID NO: 520169 - DNA, 350 bp, Homo sapiens
ctgggagcgcaggtgctgggtggaccctggtgggctaaacgctgattgggcccagtgtcacaaggctgggactggttctccaactgtgaaaggggccaagacaaggatcaggacagtccgaggccacccccatgcagtgatgaccacggcccgttgtgaaccccgtggactttactcaagtctgtcacagcacttctcatgccatttggcagtgacttgctttccrgatggagctcctggagtgctgggataatgttttcttcatatctgtatccacagcacacagcacagcgccaatcaagtctacagaggagctcttaggaaacgttttctcagtggtcaaaaagaga

SEQ ID NO: 520170 - DNA, 564 bp, Homo sapiens
ctagctttaggtaaacgtaagagggtcacgttagtatttttaaatcattggaagttggtttgttttgttttttcttaagtgggactcatttatacttcaatacacagaatggatatttagaggaagtcgtttttgacctaacacrgatgagcatttccaattgaatagcgctttctgataatggggctgcccactacaagtgaataactgggtttctctaggctggagctgcagacaggtcactatgtgtatggaggattgtattaatatgatcgtggctctttatagctctgcattactaatattctgttttaaagtctctcctcaatatccaatgtctctgtgtgaatgatggtaaggagtgggtaacagtaacaatcatcctgttgttgacaacagatgataagagaaagcccaactttacactctgtataaccttacaccaatgccccattcctcgtctaattttttttacatgttaacacatgaccttggcattactaaataagaagccctctcacttagaacccgatgcagtatgataaaaattattttgagaacaat

SEQ ID NO: 520171 - DNA, 564 bp, Homo sapiens
ctagctttaggtaaacgtaagagggtcacgttagtatttttaaatcattggaagttggtttgttttgttttttcttaagtgggactcatttatacttcaatacacagaatggatatttagaggaagtcgtttttgacctaacacggatgagcayttccaattgaatagcgctttctgataatggggctgcccactacaagtgaataactgggtttctctaggctggagctgcagacaggtcactatgtgtatggaggattgtattaatatgatcgtggctctttatagctctgcattactaatattctgttttaaagtctctcctcaatatccaatgtctctgtgtgaatgatggtaaggagtgggtaacagtaacaatcatcctgttgttgacaacagatgataagagaaagcccaactttacactctgtataaccttacaccaatgccccattcctcgtctaattttttttacatgttaacacatgaccttggcattactaaataagaagccctctcacttagaacccgatgcagtatgataaaaattattttgagaacaat

SEQ ID NO: 520172 - DNA, 564 bp, Homo sapiens
ctagctttaggtaaacgtaagagggtcacgttagtatttttaaatcattggaagttggtttgttttgttttttcttaagtgggactcatttatacttcaatacacagaatggatatttagaggaagtcgtttttgacctaacacggatgagcatttccaattgaatagcgctttctgataatggggctgcccactacaartgaataactgggtttctctaggctggagctgcagacaggtcactatgtgtatggaggattgtattaatatgatcgtggctctttatagctctgcattactaatattctgttttaaagtctctcctcaatatccaatgtctctgtgtgaatgatggtaaggagtgggtaacagtaacaatcatcctgttgttgacaacagatgataagagaaagcccaactttacactctgtataaccttacaccaatgccccattcctcgtctaattttttttacatgttaacacatgaccttggcattactaaataagaagccctctcacttagaacccgatgcagtatgataaaaattattttgagaacaat

SEQ ID NO: 520173 - DNA, 564 bp, Homo sapiens
ctagctttaggtaaacgtaagagggtcacgttagtatttttaaatcattggaagttggtttgttttgttttttcttaagtgggactcatttatacttcaatacacagaatggatatttagaggaagtcgtttttgacctaacacggatgagcatttccaattgaatagcgctttctgataatggggctgcccactacaagtgaataactgggtttctctaggctggagctgcagacaggtcactatgtgtatggaggattgtattaatatgatcgtggctctttatagctctgcattactaatattctgttttaaagtctctcctcaatatccaatgtctctgtgtgaatgatggtaaggagtgggtaacagtaacaatcatcctgttgttgacaacagatgataagagaaagcccaactttacactctgtataaycttacaccaatgccccattcctcgtctaattttttttacatgttaacacatgaccttggcattactaaataagaagccctctcacttagaacccgatgcagtatgataaaaattattttgagaacaat

SEQ ID NO: 520174 - DNA, 476 bp, Homo sapiens
aaatccactttacttaatgcggacctctgtctctggtgtgcaggtcctctgtgtccaaagataattagcactttataatgctaattattataattaggtctgagaaaaaaatcattagggggtaggyccgttcactgattttcaactgccccctctatttaaaaataaggtcatttttctatgaaatacctttaggagctcaaagcagaaagagggttatagaaaatcctgtgtaggtataagcctgagtttttaatattcttataattctgtgatgtgtctggaaactgaaccgggaggaaaacagtgaacctatttagtccaggagactagaaatcaggactcagaagagtaaacatttctgtaatagttagtcctcaaatagtcattcattgaccttccactgggtgtctggcaatgtgcaagctgcttctagatgctacctcatgtaacaaccatcacagttgcacagagca

SEQ ID NO: 520175 - DNA, 476 bp, Homo sapiens
aaatccactttacttaatgcggacctctgtctctggtgtgcaggtcctctgtgtccaaagataattagcactttataatgctaattattataattaggtctgagaaaaaaatcattagggggtaggcccgttcactgattttcaactgccccctctatttaaaaataaggtcatttttctatgaaatacctttaggagctcaaagcagaaagagggttatagaaaatcctgygtaggtataagcctgagtttttaatattcttataattctgtgatgtgtctggaaactgaaccgggaggaaaacagtgaacctatttagtccaggagactagaaatcaggactcagaagagtaaacatttctgtaatagttagtcctcaaatagtcattcattgaccttccactgggtgtctggcaatgtgcaagctgcttctagatgctacctcatgtaacaaccatcacagttgcacagagca

SEQ ID NO: 520176 - DNA, 476 bp, Homo sapiens
aaatccactttacttaatgcggacctctgtctctggtgtgcaggtcctctgtgtccaaagataattagcactttataatgctaattattataattaggtctgagaaaaaaatcattagggggtaggcccgttcactgattttcaactgccccctctatttaaaaataaggtcatttttctatgaaatacctttaggagctcaaagcagaaagagggttatagaaaatcctgtgtaggtataagcctgagtttttaatattcttataattctgtgatgtgtctggaaactgaaccgggaggaaaacagtgaacctatttagtccaggagactagaaatcaggactcagaagagtaaacatttctgtaatagttagtcctcaaatagtcattcattgaccttccactgggtgtctggcaatgtgcaagctgyttctagatgctacctcatgtaacaaccatcacagttgcacagagca

SEQ ID NO: 520177 - DNA, 502 bp, Homo sapiens
cagcagcaataggaagcattgcagtcacatagcccagtttggcatcttgtattattttaacaaactctccatcaatccacctgtgtatcattttagtctgctaacaccaagaacaatatgttgcatgtggaagaccttaataactacttgttggatgcatactctgagagcttattatacactcggtagtatgctaaaccctttggatacatccctgtcctcctatctatcagtgtggaggagaattggacattgaacaaataattttacaaataaaacagacattgatttatgtgacaagtgctgtcacagaaaaaccacagggagacrtgacagggtagagtcggggaaacctaacttcaacgtggggtcaggcagagccttccaggacactcccagctgaagccaggactggacataccctcgcttggttccagttttaaagacaagacactttgcccaaggaggtgacccgagttgagcactcggagcgtccaccatc

SEQ ID NO: 520178 - DNA, 569 bp, Homo sapiens
gagacaaatgcaaacactcagaatgcaaacacacagtgtccaaagcagaagcagcaggaggggcgtgggctctgccccaggaattcaggtgcacagaaggagctgggcctgcagggatactttggggtttggtaaatgaaggcggggtcgtgcactctgcggtggacaacaagagagaagcctccccacacatcagggttacacgtggcttggggtatggcttgccaccttctcccgtttctccccacatgagcaagggcggtgtccattatctctcaagcaattcctacctccctggcactggtagatgctggacacatggtacctcctccagcctcacaacaacactgtcacatcgtcacctccatttctcagatgaaactcaaagaggtgacacttgtccagtgtcaggtggctgtgaagatcccagcacagtctccttgcatccaaggccctagctcttaccacattgttgatcctgggttgatggtgaaggtgtaagctggggttcctccccagcccctacctgtcrtgtgcacacctggccttctctgggggtgcatttccca

SEQ ID NO: 520179 - DNA, 613 bp, Homo sapiens
agatgtgtgttcccttctcctctgacccttcaggttccttaggggcaggtgagtgaccttggggcaatgactcattctctcagtgcctcagtttccccacatggaaggcagaatgagtgaatcctcctgtcagggtggttgtgagggccacgggggtggggctatgggcagctctcarcatggttcctggcagcaggtgctcaaatctgttagtgccagtgactcgagttgggtgcacagatgaccgttgacgggggtgaggtgtgatgtggtaccctgacttccagccctcacctgtcccactactgaccatctgaggaggccccgggcacccctgggcagcaggagagtgggtcgacattgagatagcccagaggtgagactcagagatgtgggcaagggacctttctgcccaaacagaaaagacggctatggggcagcctcgaccaccgctgatgggaaggaagactcagcatttagagaggcaggggcaagtgagtgatgaccagaaggtcaggtcaggcattccagcaacaaagcggacagagtgcagtgtgtcttcaggcaggccaagctccacccaccacgggggctgagggcaggcgaggagggt

SEQ ID NO: 520180 - DNA, 547 bp, Homo sapiens
acagtggttacctccagtagggtgtgggagatgaaattgttgcagggacctgagggacttctgtttcctcttggtgatgttctaattctcagactgcagttcactggtgtttgttgtgtgttgatgcgctctagagacatggataggtacaaggatagacaggtagatgtgtaacgtagattgcattgtattaagtatgtatggaaagttacatcacgcaaagaagaaatttaaagaagtaataaatgaaaaggttctagcacagggccctgcaatacaaatgatgtcagctaagattgcctgtgytctttccagtgttattttctggccaagaattacatcaaagtatttacatacatggtctccttcagtcttcgcagcagactgtgacatttaccccaattcacagataaggaagcagacactcagagaggccgacttgccccaggtcacacaattaaaaaggggatttgagaggccagcccaggtctgtgtgaccgcagatgggttcctctcagtcagtgggtccccacttctcacacagcag

SEQ ID NO: 520181 - DNA, 179 bp, Homo sapiens
gacttagatgagatctaaggttggaactcatcygactctgctccatcttgtcctgtgtgtccagctctttcagtggatctgaggcctctggggtcctgactcattgatatggctaggccctgtgtccccacccaaatctcatcttgaattgtaatcctgacgtgttgagggagggacct

SEQ ID NO: 520182 - DNA, 179 bp, Homo sapiens
gacttagatgagatctaaggttggaactcatccgwctctgctccatcttgtcctgtgtgtccagctctttcagtggatctgaggcctctggggtcctgactcattgatatggctaggccctgtgtccccacccaaatctcatcttgaattgtaatcctgacgtgttgagggagggacct

SEQ ID NO: 520183 - DNA, 179 bp, Homo sapiens
gacttagatgagatctaaggttggaactcatccgactctgctccatcttgtcctgtgtgtccagctctttcagtggatctgaggcctctggggtcctgactcattgatatggytaggccctgtgtccccacccaaatctcatcttgaattgtaatcctgacgtgttgagggagggacct

SEQ ID NO: 520184 - DNA, 469 bp, Homo sapiens
cctcctcctgcatgactctcaggccccccaagtgaaggcacccaactctgcccaggccacctcccctctcccaggtttcccctctcacaagtcactgccctccacctggtggctctgaccacctggcaggggagtggcatggatggatgccttcttctccttgaccacactcactttgagaaacttactttcccaggccaggcgtggtggctcacgcctgtaatcctagccctttgggaggctgaggcaggaggattgcttgagctcagaagttcgagaccagcctggtcaacatggtgaaatcctgtatctacaaaaaagaaaaaaaataaaaatacaaaaaattagccaggcgcagyggcatgtgcctgtagtcccagctacttgggaggctaaggcaggagaatcgcttgagccatggagatggagtttgcagtaagcagagatggcaccgttgcactctaacctg

SEQ ID NO: 520185 - DNA, 610 bp, Homo sapiens
tttgctagagtagagtacagctaggaggtgttcgacgtaaactcatgaaaactaagcgtgggtgttgtgtttttaccttctgttccgccgggccctcctcttgtggggagtggtttgcagagggaggtggggagccaccaggtggaagagatgagtacacctgccgcctctggaaagattcaaggctgcgaaagaccttcacaaatggtgcaggggaaaagacaaaccccgagagcaaaaccaaccatgcaccccaacaaagactggcaccctcacctcgtttaaacccctgcctggtagcccacgaaggggccaatggcagatcagaagccaggctgagtttcaggaggctcctggacccagaccaggacttgtttcactgacacctgcgggccagatctcaggtgctttcggggacccccgaggttctgccctggggatgggtgagacctgccttgcacagagaacccacaaccayagggcagctatgcacccagcatagagtggcatcatctcaggtttagctctcacagggagagaagtaaaggcagagaagttgctcttcccagtagaaggatgtcggctttggagttcaccagaccttagttcc

SEQ ID NO: 520186 - DNA, 587 bp, Homo sapiens
tgctgggaggggtgaaaaaggcaggagtccaactgagggctggccagctccctggcctcagacaactggagtacacatctcctttcatatgttatagctttttgatttttaaagtcaattttcttgaagcctttctttgaacttcaaccagcaatgataatgtccaaaacacatgctctcaacactaccacaygcttctcttcatgcccttccaatgggaggaagatggtggccaagtccacatggcactggaagttttcctcagatgcatccagaggaaatggaaacatgccttactaatactttcagtttcttctttcctagttgtggaaccatctaacgaggaccttctgggttctaatacttcacacacagtaacttatttatacctcacaaaaaccctgaaggtagatgtcaactttgctcaggagtgaagtcacccaggctagcgggtattctctccacaatggccaactcttgtttcctaaataattaaagctcatgaacatgccacaacttcttacatcaaaaatatataaacataaatatatatatacatgtacataaacacacacacacacacagac

SEQ ID NO: 520187 - DNA, 643 bp, Homo sapiens
ctgcatctgcttgtggtaacagcctctcagtgggctgacaggaggaggctcagcttgattcgggttttgaaacatgttaggctttgaagttcattttccatcccacgtaacacaacagagatgcagagcagcaggcctattgttccagcctcccccttccgcattttccacaaaggtcggcagagtaccctgaygactaagtctcattactgactacgaatcttccctgctaggggactccctccttcagacctgacctatagaaggagacttacggtagaagcttcatgaaatgataaactctttgtaaaactcataacaggcccagttaagaatccccatgggcttaaatcacatgagcagtggttctttaattattttgtatttttagtagagacagggtttcatcaaattggccaggctggtcttaaactcctggcctcaagtgatccacccacctcggcctcccaaagtgctggaatcacagtcgtgagccaccgtgcccagccagtagttcttgctttaaaatatcctggagtcatctcttagcctgagagatgctatttaattgcttataagggggtaaacctcaatattgcacttagaaacaaataatgcagaataaaagacatctcaaactcat

SEQ ID NO: 520188 - DNA, 643 bp, Homo sapiens
ctgcatctgcttgtggtaacagcctctcagtgggctgacaggaggaggctcagcttgattcgggttttgaaacatgttaggctttgaagttcattttccatcccacgtaacacaacagagatgcagagcagcaggcctattgttccagcctcccccttccgcattttccacaaaggtcggcagagtaccctgacgactaagtctcattactgactacgaatcttccctgctaggrgactccctccttcagacctgacctatagaaggagacttacggtagaagcttcatgaaatgataaactctttgtaaaactcataacaggcccagttaagaatccccatgggcttaaatcacatgagcagtggttctttaattattttgtatttttagtagagacagggtttcatcaaattggccaggctggtcttaaactcctggcctcaagtgatccacccacctcggcctcccaaagtgctggaatcacagtcgtgagccaccgtgcccagccagtagttcttgctttaaaatatcctggagtcatctcttagcctgagagatgctatttaattgcttataagggggtaaacctcaatattgcacttagaaacaaataatgcagaataaaagacatctcaaactcat

SEQ ID NO: 520189 - DNA, 251 bp, Homo sapiens
tggggaagacaggctagggaggggttatccaagcaaaaccagggattgagagggagggggaagttgacttttgaccacaaccatgtgaagtatgtgygaccaggtctactttcccagtgaggtaacctagactcataggggttgaaaaagttatccaaggctacaaatctagcctgtggtagatgcaggctcagtcctcaggacagccgaagcccatggccgggctgactctttgcaccactacctcagct

SEQ ID NO: 520190 - DNA, 251 bp, Homo sapiens
tggggaagacaggctagggaggggttatccaagcaaaaccagggattgagagggagggggaagttgacttttgaccacaaccatgtgaagtatgtgtgaccaggtctactttcccagtgaggtaacctagactcataggggttgaaaaagttatccaaggctacaaatctagcctgtggyagatgcaggctcagtcctcaggacagccgaagcccatggccgggctgactctttgcaccactacctcagct

SEQ ID NO: 520191 - DNA, 645 bp, Homo sapiens
aaggaggtcagaaaaaaaatattttaatgtgattacattttagtactcaaagtcatttctttagacatagataaccttttgtctgagatgatttaaataatcaggaaaggtttatttgtaaattcatagcataaaaatcatatgctaaaatttttacgtataaaatacactaagcatatagtcataggcatttatttgcttttggaatgaaattaccaatactaatattctgtaacacttataggaaacttagtggcataccttgaaactcttgaaattacttgtttttaatgagtgagaaggttaaatgatgacctgacctcaatcatttctgcatgcaattatttcttggcaatccctttctttatagaaatcaaagattaaaaagtccaaatttgctaaaacrgtagagtccaatttataagagaccaaattaactatggttcattattaaaacatcacttggaaaatgctggctgttttggaattgtagaagattttacagaaatattcatacaccaaagatagtgcaatttttatataaaattatataaggttagaccaagaaggaagcacgcagcaccacactctctacttcacaatgtgaaaactgaggtgatgtgagcctaagtttccaactggccc

SEQ ID NO: 520192 - DNA, 645 bp, Homo sapiens
aaggaggtcagaaaaaaaatattttaatgtgattacattttagtactcaaagtcatttctttagacatagataaccttttgtctgagatgatttaaataatcaggaaaggtttatttgtaaattcatagcataaaaatcatatgctaaaatttttacgtataaaatacactaagcatatagtcataggcatttatttgcttttggaatgaaattaccaatactaatattctgtaacacttataggaaacttagtggcataccttgaaactcttgaaattacttgtttttaatgagtgagaaggttaaatgatgacctgacctcaatcatttctgcatgcaattatttcttggcaatccctttctttatagaaatcaaagattaaaaagtccaaatttgctaaaacggtagagtccaatttataagagaccaaattaactatggttcattattaaaacatcacttggaaaatgctggctgttttggaattgtagaagattttacagaaatattcatacaccaaagayagtgcaatttttatataaaattatataaggttagaccaagaaggaagcacgcagcaccacactctctacttcacaatgtgaaaactgaggtgatgtgagcctaagtttccaactggccc

SEQ ID NO: 520193 - DNA, 475 bp, Homo sapiens
acacaaaattatctcattgttttcttctaytcggaaatcaaaataccctctcttcatttttttcatatgttctacattcataaggggacatttttcggtcctgttctcacgaattgttcctgttgccctcacccccttctttttcaaggctgacaacaatttgacacttgtaaagaagctatcaaaacacaggtgatagggatactgacctctctctaaaagaacatcagcgaagttcatcactagatttccacctaacccaagatcaggatcctcatctaccttcatagttgattcttcttgatagggttcaaaccaaaccagataaccctgtgtggttgtaccacaccaaattttatagccaattctaataggctttccattcaggaattggtcactatcaaagcattcacacattgacttatcaaagcaatagtattcttccaggggagcatacaagaggaaatttttattc

SEQ ID NO: 520194 - DNA, 545 bp, Homo sapiens
tgcatgataacaaaaattgtgttatgcttgctttagctggtatttttgcctagaacgattatatcgttcggacaagaagctattcctaagaaacaatatttttaatccaggaagtttttcatttttagaaatttatcttactatttcccaagcaaaagagggtagttacagattcactaagaatcatgtgctcacaatttttatttaataattattcctccttaaaatatattaatcacctgacttacaatggtggaaccatgagtgcatttttgcctttattgtcaataacgtcttctcagaagtgagccacaaaggtgcatagttcktggagttaaaggtctgaattaagacaatccagcataagtctcattaatgtgtgattattttgagaaaaggcaagaagtacctaagaatctccccctcactgtccagttccctgtttcatttaaagattcactgtaagtaactgaaaggctttccttgggaggatttatttgaatcagtctttcacatgcaaaggatattgtagaacatctcgtttt

SEQ ID NO: 520195 - DNA, 503 bp, Homo sapiens
tgcctttgagcaatgccacattccagtggggagtggttcccccacattcaccgcactagggcgggcgtgttgtgcctcgtgcctgcagccacccttgaagtgttgttgttaaacaacagtcatgaactctggaatgtctctggtcatttatagcgtgactgtgtcactctgtaaatgacactgtcaagcttcaaggcctagaatgaagttggtttgcttttcaatagatcatagtcccgcccaaaacaaagcttccaggcttttacaatgtacttcttactctgaaactcctaagagaatagaaatgctagggagataaaatacaggaatagactacaaatcacactccagtcatcttacaggccctttaaaacacatagaacaatttgaccatactatttgcaaataagcagctttctggaaattagctgggctcttcttaaagcaatttttgtcttctctcacycttgtcttgacttttccttctttggttcatttccttc

SEQ ID NO: 520196 - DNA, 563 bp, Homo sapiens
cacggtggctcatgcctgtaatcccagcactttgggaggccgaggcaggcggatcacctgaggtcaggagttcatgaccagcctggctaacatggtgaaaccccatctctactaaaaatactaaaattagctgggcgtggtggcacacacatgtaatcccaactactcgggaggctgaggcaggagaatcgcttgaacctgagaggcagaggttacagtgagcaaagattgtgccactacactgcagcctggacaacaaagcgagactccatctcaaaaataaatwaattaattaattaaaaaaagaacactggcctctgatccaccagaaagaatttcataagattcagtgataaagctcagctcgtggctttttaggtgagcccctcattcagactcttttagactctatttactccgacttcatgcacaaatctaaaagggtaggggatctgctttccagtccacagaagactagaaagacaaatgaaaaggcagagccagggggacagtgctggaaaccagcaccctgagagagggtagtggagggaactgatatccaa

SEQ ID NO: 520197 - DNA, 516 bp, Homo sapiens
tgaacaaggtgacactttgccttcttgtcgcagcactcatgctgtaaacaagtgactttccgcagtctattcaaagccatgtttttttcctctttatgtattttgttagtgatttcaccatttacaatgacctccgagtgtagtgcggaggtgcatctcatgttcctaagtgcaagaaggctgtgatataccttgtggagaaaatccatgggctagataagcttccttcgggcatgaatggtgctgttggctgtgagttctatgttaacaaaatcaacaatatgtataaaattagggatctttaaacagaaacacacatggcacaaggttatatattgatcagttgatgaaaatgttgtgaccagggctctcaggaacttaaccatatgtttccctggagtgatggttcagaatttgttaattcagtgtcccaagtgagtttatagaataaccaccacgaataatgagaagcaacggcacaaactttgtgtrcacaggcattttttgagagagaga

SEQ ID NO: 520198 - DNA, 649 bp, Homo sapiens
atttgcatgcacatttttaaaaacagtagtgaatgtagtcctaataattgaggatgagtgagatgaggccgcattaaaatgctctactgagtctcttatctcattttttaaaaagacctctgtcaccttggtcctccttggtacacattaataytgggtaaccatgcggtatggaacattatgctggttctttatagattcaatcacttcatcaacctgtttctgaagtgtttcccttctctacaacctcttataatcataaactcaagatactggtgggggataaaaaaatacatcataattttggatgtaagtgggaagacaaaatgaaatacaagaaattttgaagtaggtaggaagagaaagattacacaattaaatagtaagtcagacattttgtatgtatattgggagtttgttctggtacaatcaagtaccagtttacatagttcaggcaaccatgcagcaggaggacatgaggggaaaaatcaatttagcagaataactcatctctagccttaaagtcatggaggctcttcagaccattatggactcaaaagtataccttgtgccctcagaagagtacatcagccaaaccaagagctaagacttgcagcttatgagggccagaggccagggatgccctcag

SEQ ID NO: 520199 - DNA, 649 bp, Homo sapiens
atttgcatgcacatttttaaaaacagtagtgaatgtagtcctaataattgaggatgagtgagatgaggccgcattaaaatgctctactgagtctcttatctcattttttaaaaagacctctgtcaccttggtcctccttggtacacattaatattgggtaaccatgcggtatggaacattatgctggttctttatagattcaatcacttcatcaacctgtttctgaagygtttcccttctctacaacctcttataatcataaactcaagatactggtgggggataaaaaaatacatcataattttggatgtaagtgggaagacaaaatgaaatacaagaaattttgaagtaggtaggaagagaaagattacacaattaaatagtaagtcagacattttgtatgtatattgggagtttgttctggtacaatcaagtaccagtttacatagttcaggcaaccatgcagcaggaggacatgaggggaaaaatcaatttagcagaataactcatctctagccttaaagtcatggaggctcttcagaccattatggactcaaaagtataccttgtgccctcagaagagtacatcagccaaaccaagagctaagacttgcagcttatgagggccagaggccagggatgccctcag

SEQ ID NO: 520200 - DNA, 563 bp, Homo sapiens
catttgggctgccataacaaatgccatagactgaatggctttggcagcaaacacctacttctcatagttctggaggctgggaaatccaagactgccagcagatctagggtctggtgtgggctgcttcctggtttgcagaaggctgtcttttcgtggtggaagggtcaagggagctctccggagcctcttttataagggcactaatcccattcacatgggctctacccttatgggctcatcacctcccagaagccccacctcctaatactatcgaattggagattagttttcaaaatatgaattttggaagacacagcatttagctcttaatatgaaagaatagaatagaattgcatttaacatttgcagtaataaataaaagtttcacatgaactggaaagtctcatgttgtgcattttggaagacacagcatttagctcttaatatgaaagaatagaatagaattgcatttaacatttgcagtaataaataaaagtttcacatgaactggaaaggctcataagtrcattctctaagttcaacatcaacaaaagagcctgaga

SEQ ID NO: 520201 - DNA, 524 bp, Homo sapiens
tgacaggcagtgggggagctcaccgcccacttcaggacccagacagccatggtccaggcactgctgtgggctggagaaagctggaaaggacctgcctgtggcaggaatctctgggycccttgaccatgatctccacactcaccacgtgtgtaccaggagggcagatccagacacaggagccagaaggaagcccacgcgagccaacagaacataacctctgggcaggaagagggaaatgcactctattgcccagtaccctagcatgactacctaccatgagcagaggtctatccaaacaggcagaaaaaacctggcacatgtacatttatcaaacagttatggagcatctactgtacatatttacctagtaggtacttgtggccaacactagcagtcatcctctaatacccattctcctcttccttagtcatgaaatgaccacctagaatagagactacacctcccagcatcccttgcagctagctgtgaccatgtgaccaagatctggctaatgggatgagaat

SEQ ID NO: 520202 - DNA, 617 bp, Homo sapiens
ttcctgcagaacttggactgggcgctccctatttagaggttaataatggtcagtggctttctcttcctttctaactttatttggggtgtgcctagccttgagatctgggttgtggccatgaataggtctctgtagtccaagaaacatttctcagactacggaagatgtgtggaaagacagtgccaagctgcctgccgctgtggcagcaccaacggagaagaaaaacaagccaaaggatgcgggtgtgatcagggcctgcgcaggggttggagtggtcatttggggcttccagagggataatgacaagtttatccacaggagtaaagkgttagagcagccagaagacgcttgtgtaatgtcccagcaaatcaatttaaagacttaaatatgacaacatgctaaagaaagcctggaaggaattggtgggtgaaaaggaaatctgccggccttcaaaagtgaaaaacgaagcaaaatggagctccaaaaaatggtggctcaacgagaccccagtgggcttggctagaggctccggaacagaaggcctcagtcacctcattgtattcagcacagtctctaaagctgagagcaggaaatcctgttgccccacccatgtcctc

SEQ ID NO: 520203 - DNA, 616 bp, Homo sapiens
gtgaataataaagcgtattcatttccaaaaacttagaagacaatgttagggcagatattgggaaagaaactgactaattgacccaggctttcatttcaggctcagtttggtttccattgcctaacacaactctcctacgctcctgtgcctcttcagaaatggcttctgattgaaacacaacctgtgtcttttgattgattgggaactgaaagatgttcctcttttaatctcatggatggaacccaatatatttcactttcttctttgtgctgatagacaaagyctcggaaaaaaatgctatttaaataatagctttcactgacagtagactcatgggaaaattgtccttccttccttccctccctccctccctccctccctcccttccttccttccttccttttttccttccttcctttttctgaagtgtatggaccattattgcttttactttgtcttatttggcttatgggaaaccgtgggactcctcatatatctatgtgctgagctgacataagggggactattaaccgcttctatgcagcatttattttgctgaagagaaaacatggagtgtggctttgttgaaaagctccccatcattcacagttcactg

SEQ ID NO: 520204 - DNA, 616 bp, Homo sapiens
gtgaataataaagcgtattcatttccaaaaacttagaagacaatgttagggcagatattgggaaagaaactgactaattgacccaggctttcatttcaggctcagtttggtttccattgcctaacacaactctcctacgctcctgtgcctcttcagaaatggcttctgattgaaacacaacctgtgtcttttgattgattgggaactgaaagatgttcctcttttaatctcatggatggaacccaatatatttcactttcttctttgtgctgatagacaaagcctcggaaaaaaatgctatttaaataatagctttcactgacagtagactcatgggaaaattgtccttccttccttccctccctccctccctccctccctcccttccttccttccttccttttttccttccttcctttttctgaagtgtatggaccattattgcttttactttgtcttatttggcttatgggaaaccgtgggactcctcatatatctatgtgctgagctgacataagggggactattaaccgcttctatgcagcatttattytgctgaagagaaaacatggagtgtggctttgttgaaaagctccccatcattcacagttcactg

SEQ ID NO: 520205 - DNA, 480 bp, Homo sapiens
aaaacatctcgagacattgctaaatgtcccctaggggacccctacactgaagttggctggagctctggggatcagggaggacatctgcaagcgtgcttatgagttgtaagctctaagaggggagggacattgcacagggcaggtcaggcacattgtaagygctcttaaaacattacagttgagaagaatttcagagtaacatttatagccaagaaagatattcttcccccaacttgggcattcccttgatgttaaattgtcctgtgcgtcaaaaccctaaagaactgcagggaagcctataaccccaaaggaaggcagagaaaggtcctgggggacaggttgtggggtgagttaacttattccagccaaggtgaaggagttgccccgggcttcactctgagacttggagcctagtgtgctaagctcccagttcccaaagtgaccattcccacgctgaatgtcattactgcctcatcagca

SEQ ID NO: 520206 - DNA, 480 bp, Homo sapiens
aaaacatctcgagacattgctaaatgtcccctaggggacccctacactgaagttggctggagctctggggatcagggaggacatctgcaagcgtgcttatgagttgtaagctctaagaggggagggacattgcacagggcaggtcaggcacattgtaagtgctcttaaaacattacagttgagaagaatttcagagtaacatttatagccaagaaagatattcttcccccaacttgggcattcccttgatgttaaattgtcctgtgcgtcaaaaccctaaagaactgcagggaagcctataaccccaaaggaaggcagagaaaggtcctgggggacaggttgtggggtgagttaacttattccagccaaggtgarggagttgccccgggcttcactctgagacttggagcctagtgtgctaagctcccagttcccaaagtgaccattcccacgctgaatgtcattactgcctcatcagca

SEQ ID NO: 520207 - DNA, 642 bp, Homo sapiens
ttggtcatgttgtccaagctgaaatgtgggtcccgctgttctgagtgggcagaagagccaggggaatcttttcaagcygagcagatattccacatggcatctgcacaaccacaaataaagttgtttatctttgtcactttaatattataacaaaagcattataaaaacaaggcagaaacataatgaactctaaggcccaataaatctcttggttaaatggccctcgtggtttctgaagttatcccagaatgggataatggcagaaatgaattaggtataaactggacaaattctcacctctcctgttgtttcttttcagccaatagtttcctaaaaactgggttatcagagacgctcttttagagtaaaacaattttttttttttacatttttaaaaacagagcttctctccaatgaatgtccagaaagaccatacatttcagggctggcctacaggacatatttcaaagtgatgtgtaatgtcattttagaagagtgagctgttttctgttgtttttttttaacttaaagacaaaatggccagggaaaaagctgccaagtctctgagtaatcttattgagggttcagctttctaagtatgaccttatgctagcaacagcccctgagtaacaagaaaacaag

SEQ ID NO: 520208 - DNA, 562 bp, Homo sapiens
ttttataaagatttttgtttttgaggatttttgttttgctttttgtttgtgctgttctaggtcctttgtgtttctatatgaagttcagaatcgatttgttcatttctacaaaaaaaagcctactgggcttttgattggggtgatatcaaatctataaatcaatttaggaagaactgacatcttaccgatataagtctttggattcatgaacacattatatctctccatttatttatatcttcyttaatttttctcaacagttgttttatggtttttggtgtacagagaactgtacaccaaaatatcatttctcagtatcaaagtattcaaagtacatcacttctcagtatcagactgtcaggaaaatgatcaatttccccttcaagactgacaagctaaaggcaccagaggcttaggcttcttacagcaacacaatgcagggactataaaaagcaaacgatagcacctatttcctaaagtcacgaatgttaagtgagtttaacatttatgcagtttaacgtaacaccggttgtgaaggtaaactgcctgggttcaaatccca

SEQ ID NO: 520209 - DNA, 438 bp, Homo sapiens
tggtgtcttctccacctgggagagttgtcctgcttttttttaagttgggataggccagtgagtcgggaagtttgttcatcttgggcttggggtacaggaggagttggtggggtgcctgtggccactccactgccctctgggattaggaggagacagtggggtcaggactcaccccctggcctgtgcttcaggtgatccctctctgtcctgtggatgtggggttgggagcaggtttggggtcctcgcctatccccattggctcttcttgggaagatgaatttatggggcacctgcaggtggccacgtgtgggaaggaatctcagaacttacatggatccatgcaaatgaggcttccttcaggcagacasaggaactctgagcctccctgatgctgcaggcacctgggtttggggaccctcttggagacaaatgcatgga

SEQ ID NO: 520210 - DNA, 608 bp, Homo sapiens
gtgagctgggagcagcagctcaggccaggcaggatggcactgagttgggagtagtggatctgacagccctctaacacgagggtctcgagagaggcagcaattttctctagcagagctcctaggggttcaagactgatgcggaacagcagcacgtagctgagattcagatgctttargtaaccgaggcttgggaactgggagagacacttcaagtcctcttctaataggttgccacaagttaattccaagttctccaaggggttctggaggcacctgtggagatcaagaagttagttctgggcaatggtaccagttagatgaaggtagtggggaataacctcaaggaaaatacctgcttcaaccaaacacaagtttgttcccaccatctgatgatggtcctcatggaagttgctgcatgatgaggaccctgatcgttcaggggctgtcccattttagcctcagccctttcaccattgcttgtgtgattgggtcaaggccataaaatctctaaagcctttttgtttttcatcttttagcagaaaacttcatctctgggctacaggtaccccgtgggagatgtgaacaaagaactcaactcagcaaggtct

SEQ ID NO: 520211 - DNA, 665 bp, Homo sapiens
taccattcatccaagatctcagctctccctcacgaggaatctaaggcatgttgctatattcctcatttttaaagtggtgaccctgagacttggctagggagaggaacctgcccgtgttcaggcagcaaatgatggacagacccctctggtgaggagctcagaggatcccctaaggagttcaatartctaaatgttgaaaagaactgattgacagactttcccttcctgcccaattcagaaggtccagcaccacccccaggaccccagtgagaatcccgcacttgggggcatttctaccatgtcctgtcacctgttcttctcaaggtgctcatctgctgtcaaactcagagcatccttcagagcccctctgagaagatgacctgaccccttctccactcacagaatctccaccagaataccaaagctcccccaggcacttgctcagggtctctagaatatttctgagcttctgtttccctcctgcagactgagctgtcaaggcaggtatctctttatgcatcctggatacctcagcccaaatctcctgaacaacagaacatggccacaatgctgggagaccttcaccccagagcagtcattgaggaattctcccaaaattctattgagctattttggtgaacatgagaagccataaagcagggagt

SEQ ID NO: 520212 - DNA, 665 bp, Homo sapiens
taccattcatccaagatctcagctctccctcacgaggaatctaaggcatgttgctatattcctcatttttaaagtggtgaccctgagacttggctagggagaggaacctgcccgtgttcaggcagcaaatgatggacagacccctctggtgaggagctcagaggatcccctaaggagttcaataatctaaatgttgaaaagaactgwttgacagactttcccttcctgcccaattcagaaggtccagcaccacccccaggaccccagtgagaatcccgcacttgggggcatttctaccatgtcctgtcacctgttcttctcaaggtgctcatctgctgtcaaactcagagcatccttcagagcccctctgagaagatgacctgaccccttctccactcacagaatctccaccagaataccaaagctcccccaggcacttgctcagggtctctagaatatttctgagcttctgtttccctcctgcagactgagctgtcaaggcaggtatctctttatgcatcctggatacctcagcccaaatctcctgaacaacagaacatggccacaatgctgggagaccttcaccccagagcagtcattgaggaattctcccaaaattctattgagctattttggtgaacatgagaagccataaagcagggagt

SEQ ID NO: 520213 - DNA, 594 bp, Homo sapiens
gaagtccagctggctttacctctcaatatttctagaccactcctcttaggaaagaaagatcaaagataacacccccaatgaagtatattctaatttggagccctgctttcagttggatatctaattttctattttcaagggcatttacagctctgccttaaataagttttatacacacacacacacacacacacacactcagccrtatattgatatacacgaatgagtcatgacgggtaaatttctataaactctacatctcacattagtttcagaaatgtctaaaaatgactgtgaactacctaggagccttataggtcacatttagttgggttgaactcaaaatctcatgagaacaaaatctgctgtgatttgccttgtccttgttctgactggaacatctaaggtagaggatccatagagacttctagctccagagggagccctttgacccattttctaccttccaattgcagagtttgactcacaagcccttcaagggatagcatagaatccttctagaactatgattagaaattcgagggatgccacttagactgtggatgaagattatttctaataaaatataaatgt

SEQ ID NO: 520214 - DNA, 594 bp, Homo sapiens
gaagtccagctggctttacctctcaatatttctagaccactcctcttaggaaagaaagatcaaagataacacccccaatgaagtatattctaatttggagccctgctttcagttggatatctaattttctattttcaagggcatttacagctctgccttaaataagttttatacacacacacacacacacacacacactcagccatatattgatatacacgaatgagtcatgacgggtaaatttctataaactctacatctcacattagtttcagaaatgtctaaaaatgactgtgaactacctaggagccttataggtcacatttagttgsgttgaactcaaaatctcatgagaacaaaatctgctgtgatttgccttgtccttgttctgactggaacatctaaggtagaggatccatagagacttctagctccagagggagccctttgacccattttctaccttccaattgcagagtttgactcacaagcccttcaagggatagcatagaatccttctagaactatgattagaaattcgagggatgccacttagactgtggatgaagattatttctaataaaatataaatgt

SEQ ID NO: 520215 - DNA, 612 bp, Homo sapiens
catgtattgttgagaaagtgtaattgtttgaatcccaatcttttatttttgattgttggttgtttttttttttttgtctttggaaaacatttagcatattctcagtttcccagcattctgaaatttcaaaatgttgtgcctatgaattctttttcattaataacaccggacacatagtgggtgctttcattctaaaaactcaggtctttcagttctgcgaaattgtctaattacttctgtagtagtttcctcctcttcataatatcttttcttttctgaaacacctatttttttttggatggacccactgggttgatcctgtagatttttggacaagggcgtggtgtttgtttttatatattccctcctattctcrctctttctttctctgtgtgttttgctttctgaaatacttcctcaactttatttttcaagaatgaatgtttcatttctgcaattgtagttttaattcccagtaactctttcttgttttctaaatgttcctttttatggcctcttatttgcattagagcagcatagtttgcatggaggttgagattataaaccgaagaagcagatttcctgggtacaaactgcagctcaactgcttaa

SEQ ID NO: 520216 - DNA, 522 bp, Homo sapiens
ctcaggtgtgtctttattagcagtgtgaaaacggactaatacaagccaaaatcctgctgtttagacagcatggtgcacttgctgagtgttagtcatttacagctcatgctacctgggaacttttggaaaagtcatgttttaagatcaattgtctccaaagtttacaccattggcttataagcaacccactggagtggttagcactgggtagcttgggaatggaagagagatgcctcccaggcatttcctctggtctgatggtggtaagggttgagtggacagaacaggggcagcattctgacaccacatctacatctcttttctcctcagtgagcagtatctctgcccttcctggagaagatcatatgagcagcttatctgcatatgatccccaccactccaccttctttcccttgtcatgagaataaggagaaactgtctatagcagagktgactatgaacaggctttctggacaggagcagatgtacccgttaggggcttctttcaaactgttaggcctt

SEQ ID NO: 520217 - DNA, 570 bp, Homo sapiens
tgtttaagccattccttagagattgatgcttacgctactcttacagctccttagggaataaaattacctctcgttttcactagcttaattcaatgtctgacaacttctctcagttgggaagttattccttctgtgtggcttaattacctattgttgcagtttcaatttggggtgaaggaaaagatagcactgactctgagatacaggttctgctaaaaaaaaatgtcrggttggacacaaatactcgctgtcaatgagtggtacagggcttagtcatgcactgtggaggcactgtgtcttctaggcagtgttctggggggtcccaggagctctgtgtgtgtgtctgcagggctgccaggatggatgggagtggaggtggcagttagcaaggacctagaatacttggctttggactcatacccataatggaacctgagcatgtttattctttctctatacttgcataagagcttgcaccaggagaaagggttctgcaaaaaaagaaataattgaaaaccaggaggtcagcatacatctgtccccaacaagccacatgatataggctgtcac

SEQ ID NO: 520218 - DNA, 503 bp, Homo sapiens
aagagtccgtcagcccctggcaagtggaatgatgagcactgcttgaagaaaaagcacgcattgtgttacacaggtagggccttctctactttgaaactttcctgttaaaaaaaaaaaaccctgccttctctggttggccaacataaccaccgagtcaacacaaagatacaaaggcaggacatgaaatcaaggggtaaattgttagtcaatcagtattattgagcaccttgaagaatataagatcagaattagagaaaactagctgcttaaaactagagggaaattttaatatcatccagctcacctgtctcatcttataamtgatgaaaaggacactcacgaggttttagtttctcaaggccgtggagcaggacagaagcaaagtgaggaccagaaaccagtctcccaaattttaggtgtagagcttttttttcacccctgtgtcttgtataacagagagtgtaaattggaaggaaatttagccctgcccctaggtgacacag

SEQ ID NO: 520219 - DNA, 466 bp, Homo sapiens
tccacacaactttggggaagttgtgggaagaactgggaatccctgaggacagtgatcacagtgattgaaactcttacaggcaagcctgggtggtgcagggcacagattacagttcattgctccatactgtcctgcctctgggtgtttcacagcaaggaggttgccactcaccacggcttcctgtgaccttccagttcccttctgcttttagttctttatttactctgaactttctcctcttgttgctgggtgcacatcaagtgaaatacccaaatgtgggctgggcaggaaggtaccatgcagwgtgcaatccactcgctgttgtaatacttctgagagagtgttatcagacaatttccctttttaatgtcctcccacccctccacatctacccctgctgtcagaaggcaaagccacagaagagctggaaatgggttctgtggtaccaacatcctcacccacaccc

SEQ ID NO: 520220 - DNA, 642 bp, Homo sapiens
caacccattaagtagtaaacacaaaattaagtcatttgagaccacataattataaaatgaatattgtaatatctgctttacagatgtggtaactggtgttcagtaattttaaataatttgtttcagataacatagctggtaagtagcagaccaggatttgtttttttttgtctgaccccatgccaaagcctttaacaactataccacctggctccaaagtcttaagcagttgtcaaattgtctttataccaaatggcaaaagcaaagcaagcaaaaccaaaacacttatggacccaagaagataattagaaagatagataataaggatggaccagaatatccagggaagattgtaaaggggaaatatttttactaaagaaaaaatcatgagtatacaatatgagaaaccaaatataactcaaatcagatttgttgtsttgccttctggaatacaaaatattacatagacaatatcttggattacatataaggacataaaatacctcaatttcagaattagatgttaaaataaaatttaaagtaaaatagtcatgactctcataaaacacaacagattttactcaagagttacctagggatataacacattttggtgacatatgttaggctgtgtacactgaa

SEQ ID NO: 520221 - DNA, 618 bp, Homo sapiens
ctgccatcagtccaatctttgcctacattatcacataaccatcttcatgtcatcttccctctgtgcatgtttgtctctgtgtccaaatttcccctctttattttattaaggagaggagggcaagggaacttctgggggaacgagggatcaaagargaagcttaagtgtctaggttatatcactgagcagcagagactctgaagggtaacagtggcttagagtctttagccctgtggtttgtcttatctctggctaacaggtgttggatgcagttttgtggagtatgcaaagcaggaaggctctaaatgagtaaatatctgtttatttgagctacatttataacaaaagaatgtgtgaaaatttgaccttagtactgatgggcttttgagctaataaatcctggcttgtgaaaaaaataaacaagatagggctaacatacagaggccatctttgactcatttgtataacagtgggtcatatggaaactacatttaatatgttgaagaagtaccaaactgttattcagagtggctacattctcacccgtaatgtatgagtgatccagtttctcctcatccttggcagcatctgatgttgtcactattttttattttagct

SEQ ID NO: 520222 - DNA, 582 bp, Homo sapiens
acaatgaacattgtccactattgcatgtctcagcaattcatagtggctgagagcatgggcacagagtcaacagactgagaccaaaactatcatttgctagtcccatgacatgactgctcttaatagggttccaccagggaattaagcactaacactccaaaacaattgttctatacaatgcattaatttatttcctatgttactagaatggtgttagttatacattcttggaagaattgaggaaatagtcactccagtcgttttctatagggcttaattatctcactgaacctcttgtgagagaagctgcaagcttagataaattatttactttttctacgcccgttttctcttttaatttctaaagtatagacaaaaattgtaccttgttcataattatttaaagataatgtaataagctaaaacatgtaaagaacttagaacaatgcaaggcacaatagtaaatgccatttctatcaacatcatatccatatttatatttttcacttctacctgtagyatgggtgctcagtaaatagttgaggaatgaatggatatatgcctgggtgaagatgaacagta

SEQ ID NO: 520223 - DNA, 637 bp, Homo sapiens
caagttttctcatctgcacatacagacaataaatctacatatcatacaaagtactgtgggaacatagaaaaatgtatgtgaacacatatggtgatgtaaaagttgctcataattgaattaagtgctcagttgagcctgaatgtacgtgaaagcaytttgaatttaaaaaaaactgttatacggaaattttgatgagtattatttttactattacttttgaatacccatatagtgttatactaataaccatatgaaatgacctgaaaagataattgtggccttttgagatatttaatgctatcacccaaccctaactacctacatcattgccaagaaatgcctacatttaacatctaggaagactttgtcaattcctatttgtttatgtgtgtgtgtgtgagtgtgtgtgtgtgcatgtgtctggagtctccaataattcttcaggaataaaaatccagtctttctcacttagttttacttcagataacttctttccctgggccctgggccctttgcaaatgtaaggatattctgtgctacttcttaaactgctgttataaaaaaggtttatgtgtttgacaaagttggagaggtattattgtatcatgttttaataagccatattcacctgggtttt

SEQ ID NO: 520224 - DNA, 637 bp, Homo sapiens
caagttttctcatctgcacatacagacaataaatctacatatcatacaaagtactgtgggaacatagaaaaatgtatgtgaacacatatggtgatgtaaaagttgctcataattgaattaagtgctcagttgagcctgaatgtacgtgaaagcattttgaatttaaaaaaaactgttatacggaaattttgatgagtattatttttactattacttttgaatacccatatagtgttatactaataaccatatgaaatgacctgaaaagataattgtggccttttgagatatttaatgctatcacccaaccctaactacctacatcattgccaagaaatgcctacatttaacatctaggaagactttgtcaattcctatttgtttatgtgtgtgtgtgtgagtgtgtgtgtgtgcatgtgtctggagtctccaataaytcttcaggaataaaaatccagtctttctcacttagttttacttcagataacttctttccctgggccctgggccctttgcaaatgtaaggatattctgtgctacttcttaaactgctgttataaaaaaggtttatgtgtttgacaaagttggagaggtattattgtatcatgttttaataagccatattcacctgggtttt

SEQ ID NO: 520225 - DNA, 590 bp, Homo sapiens
tgtgctatttacctttctgttcctgattcatttcacttagcataacattctccaggcccatccgtcttgccacaaatgactagatatcattttttatggctgaataatattccattctgtatacataccaaactttctttatctgttcatctgttattggacaccttggttgatttcaaatcttggctattgtgaatagtgctgcaattaacatagagggtacagatatctctttaatatactgatttcccttaggttatatacaaatacacttgtatacacacattcttgaaaagtatacaccaaaaatttacaaatttttgttttctagtgttctttcttttgtaagttttgtaaaatgagcatgtgttaataaaaaatatatgtattattttaaaacctataattctgtatcaaaatataaatatttaaaggaaaactagtaaaatatcccttaaataatccacatgaaacatttagctaatagaaagtgctatataaawattagttatgacttattactattatcatcatcactgattttcagcagaaatatttaaagttccttttttgtacttgaaacatgccac

SEQ ID NO: 520226 - DNA, 587 bp, Homo sapiens
cctatgtgattattggggcaggtgccccaatgaggtagagctaagaaagagcaggtcctcagagggcttgctggatattaggctcatgacgtctttaaaaataatagttatataaactttaaatatacacaaaagtaaaaagagaaaaaaaagccccatacatccataactcagattgaaaattttcaacattttgccacttttgctctatctaaaccccttattttgttgamtatttcaaagcgaaacctggatatcacattttttcatctgtacatattttagtatgtatctctataaaaatgaacattttcttacacaatcataatgctaatattatacttaccaaaatgaaaatgatttcttggtaccatctactacatagtccataatcaaattttcctgataagaccttttttttttagaaaagaatgtaaataccacagaaagcagtatagcaaagtgcttaagaataacgggctttgaagttaagtacaaataagtttgaatcctggttcttccacatacaagcctctgtaagatctgcctcctcctctgaaaaaggggatggtaatctctcatagagt

SEQ ID NO: 520227 - DNA, 652 bp, Homo sapiens
tggaggccattatcccaagtgaattaacataaaaaaagaaagtcaaataacacacgttttcatttataagtggaagctaaacaatgggtacatatggacataaagatggaaacaatagacactgattactccaaaagtggggagggayggaggcagtcaagatttgaaaaactacctactgggtactatgttcactgtttgggtgatgggttcactagaagcgcaaaccccagcatcacccaatatacccaagtaagaaaccttcatatatacatcctgaatctaaaagtaaaaagtaaagataaaaaataaagtttgagattaaatttggtggtcactgaaatttaagaattaaaaaaaaattgtccaagcacttaaaaaggtgagaaaagtcacctgtagagagggaaaacagaccccaatttgttcataaattgacagaaggcagaaaacgaggttaatagagtgctgtaggaaaataaatatgtccggtaaatagaatggtgaacaaaatcaaaccacataacctctcagtgatgtggaatctgtggcatcaaaagactaacaatgagcactggatccaccatgtctcctgtgataaatattgtgtcccctgtacattgtatctggcacattgaaggcgctcaataaa

SEQ ID NO: 520228 - DNA, 478 bp, Homo sapiens
ctgcagagctactgatgagaaatatctgtgtcaccttctggatcagggtacaaggtgttgcttcttttaatagaatgatgaataggttctttttccctacccttggtattctgtggactgacatttgctcagacttgcatggtttgattttatttcgtctctattagaagaagctagacttgtccataaatgtctggtttaaaggagaaatcaatactgttattcctctccaaarattaagcccagtctaggaagagaagattggagttttagacttgattagttatctatctgttgtgaagtgttgttgatgctcatagagtaaaggaaaaggaagtgttcaaaatataatccaaatcttctgaggatattttaagaacgtgctattttctcctgtggtgacattgttgaagatgtactcccaatcttaacagaaccattcattcattagataactattcgttgagcacctactttg

SEQ ID NO: 520229 - DNA, 632 bp, Homo sapiens
catcattggtgtggcaactgcaaagtttcactgggctggggatgcccatcatgctgcacatagctgtcctccctccccccagagttgtgcaaagcagcagacttgtaccacagatgagcagaggggtgaggctgatcagcccatggtgggatggcccttggcctccaccgtstatctctcttgtacccagccccactatgggcagagggagaaggcagagaaaaataataaagagtaaatggcagagtctacacacttacatccctacttcatccttagtgaccttgtaaattggcacacagggtccaggggagagcatgtgtcacagctcagttccagctcagctatttccacccctggagcacagaaagctggggcaacatcctggggcacagagggcaacacagtctccatgttttggtcctacttttctgtgctgccttggaaatgaatcatatgtgactcttcccaaccagagaagttgtgaacaccacaggtctgccatctgtattcatccaggggcttgttggggtcagtgcagctgggataaggagaaggagcagaggagaaagccccagtggaggcctggcggcaaagaccgccccttaccatgagacaccataacactgtgg

SEQ ID NO: 520230 - DNA, 632 bp, Homo sapiens
catcattggtgtggcaactgcaaagtttcactgggctggggatgcccatcatgctgcacatagctgtcctccctccccccagagttgtgcaaagcagcagacttgtaccacagatgagcagaggggtgaggctgatcagcccatggtgggatggcccttggcctccaccgtgtatctctcttgtacccagccccactatgggcagagggagaaggcagagaaaaataataaagagtaaatggcagagtctacacrcttacatccctacttcatccttagtgaccttgtaaattggcacacagggtccaggggagagcatgtgtcacagctcagttccagctcagctatttccacccctggagcacagaaagctggggcaacatcctggggcacagagggcaacacagtctccatgttttggtcctacttttctgtgctgccttggaaatgaatcatatgtgactcttcccaaccagagaagttgtgaacaccacaggtctgccatctgtattcatccaggggcttgttggggtcagtgcagctgggataaggagaaggagcagaggagaaagccccagtggaggcctggcggcaaagaccgccccttaccatgagacaccataacactgtgg

SEQ ID NO: 520231 - DNA, 632 bp, Homo sapiens
catcattggtgtggcaactgcaaagtttcactgggctggggatgcccatcatgctgcacatagctgtcctccctccccccagagttgtgcaaagcagcagacttgtaccacagatgagcagaggggtgaggctgatcagcccatggtgggatggcccttggcctccaccgtgtatctctcttgtacccagccccactatgggcagagggagaaggcagagaaaaataataaagagtaaatggcagagtctacacacttacatccctacttcatccttagtgaccttgtaaattggcacacagggtccaggggagagcatgtgtcacagctcagttccagctcagctatttccacccctggagcacagaaagctggggcaacatcctggggcacagagggcracacagtctccatgttttggtcctacttttctgtgctgccttggaaatgaatcatatgtgactcttcccaaccagagaagttgtgaacaccacaggtctgccatctgtattcatccaggggcttgttggggtcagtgcagctgggataaggagaaggagcagaggagaaagccccagtggaggcctggcggcaaagaccgccccttaccatgagacaccataacactgtgg

SEQ ID NO: 520232 - DNA, 632 bp, Homo sapiens
catcattggtgtggcaactgcaaagtttcactgggctggggatgcccatcatgctgcacatagctgtcctccctccccccagagttgtgcaaagcagcagacttgtaccacagatgagcagaggggtgaggctgatcagcccatggtgggatggcccttggcctccaccgtgtatctctcttgtacccagccccactatgggcagagggagaaggcagagaaaaataataaagagtaaatggcagagtctacacacttacatccctacttcatccttagtgaccttgtaaattggcacacagggtccaggggagagcatgtgtcacagctcagttccagctcagctatttccacccctggagcacagaaagctggggcaacatcctggggcacagagggcaacacagtctccatgttttggtcctacttttctgtgctgccttggaaatgaatcatatgtgactcttcccaaccagagaagttgtgaacaccacaggtctgccatctgtattcatccaggggcttgttggggtcagtgcagctgggataaggagaaggagcagaggagaaagccccagtggaggcctggcggcaaagacygccccttaccatgagacaccataacactgtgg

SEQ ID NO: 520233 - DNA, 449 bp, Homo sapiens
ttagagaaacataaagcatagaaggggaatagggagagtgggggttgggtgcaactttaaatagggtgaccagggcaggactcactgaggaagtaactcatgagcaaagctctgaagggagtgagggcatttccagtagtccagcttgaggccctagtatatgtgagacctgaggcattggcctggcttgccctagatgttcctcttctttttgagcctgcttgtgtttgtcggctattgggtgaggcttggcacaagcagttgggcccaagggcacccactcatccctcctgggcttggaaagctgctgtgctgaaatgaccccacccccatgcccctcctggggacagrggacagtcaaagagccactagaggctcccaaaactctcaaaggggcaaaccctctccccagaaccttatcagtttcctggtgcaggcactgctgagga

SEQ ID NO: 520234 - DNA, 549 bp, Homo sapiens
cttagtttttgctaattaggtgacaaggtggcaatcaagatagcctcaggttggggctgatcactgaaaagacctagttattagagggttgaaactttcagacccaccccattgacctctgggaagtggaggtgagcaggctggagagcaggctgtacaaaaactcttgaacaatgagactcagtgaccttccaagttgccgaacacacccaggtgctagaaagggcatggaaactctatataccaccgccctccccatgccttgccccacgcatcttttcaatttggctatcccttatcaccctcctccccatgccttgccccacgcatcttttcaatttggctatccctaagttgcatcttttatgataaamtagtaaatgtgaaaacaaaaacaaaaacaattggccataaatgcatgggtttatttctgaactcttctctgcttttaaaatgtaaatgtttaatccattcaatgtaatgtaatcttttataactattggtttaggtttactattttgttatttaaagtcagcttcatccctggga

SEQ ID NO: 520235 - DNA, 654 bp, Homo sapiens
tgtcctcaccccatcgggagcctaccccatcgcgccagggcttggggggaaagtcaagcattatcttccaggggaaacactaggcgggtgccccggctcgaaaccttctggtctcccattcccaggtctcgctccagcacttcctccgagctgctcttcgttctccggctgccctccagactcgtggaggcggtgtgcgaacttgaggagccatttgcagtcactgtgctgtccccgtaggtcaatgtcaggtcgccttcggtcaggatgaaatcagagtcttcctctctcagtggctcttggttctgaaaagtgcaaccaacaacaacaacaaaaatgagagactgatatcttccaggtttggcaccaaccccaatcccaatcccaactcctcatctgaaaactggggactatgaaacttgcctgccttgagcctctagcrtggtaactggatgtaaactgtagagggccgggcacggttgccaggactaggacttagaatactagaaaacagtttctaatttcaatgtctgacagcttggggttagtgaaaaagggaagaaagggagaccagcctggatttccagcttcccaatcaacacacaaagcaaggccagagtagggtaattgggcaaacgttgcaaataggtttca

SEQ ID NO: 520236 - DNA, 630 bp, Homo sapiens
acggtgctcacccagattaatggtgggtctgcctttcccagcccactgactcaaatgttaatctcctttggcaacaccctcagagacacatccaggatcaatactttgcatccttcgatccaatcaagttgacactccgtattaaccatcgcacccagccactgaagaaaaactgaaaatgttggatagactattttcaaactcttaaaagtgctctgatgcatggaccatttagtaaaagatactaagggtctcagctaagtgaaaacagaaatgcagagaggtaagtgtaggctggatctagtttctgctttgaaaatatttagcaaataaggtgaattttccttcaaatttcacagcattaagagagaaagcctaaggaggagtcccgtcaatgttagtggaatctagaaataataaagcccaagtgacttcattaaaaagtatctatttcaaactgaggtgcagatggaagagaaaaatcatctaacttaagaattcctaaccacaaattggccctcatacatgtttgctgtctgaattcattctaactggctgttaaacaaagcaaamcaaaaaaacctcagtctatgaatttagtttaaagttaccttgggcagataatgccat

SEQ ID NO: 520237 - DNA, 651 bp, Homo sapiens
tgctgaatatttgctttactctgagttctctttttggacaggaagggactctgataaaccacctctggttctttcatccccacctccatcactccatttttaggcaggagaactttcccaatgagacagtcttacaggtgtctcctgtaggatctttaaataccttcctactggctctcttctctgttaagggcttggatgattttctcaaagagaaacttttatgagggaatgmaggattcctaagcagtatctccctacccagtgccatgataaatatttggatgcaaagaaaacaggaaataagtcattgaatggagattgcagctccccagagagctccagatgacaggctcctggaaagtgttccaagttctgtttgttctccagtcctgagaacagtaatctttgcggctgtacttttcctcttctttccctagatttcacttttacaactttaaaaaagtataatagcttgcattatatgcttactgcacaaagttttaagacaaaagaattacaaatagcaaaattgaaatcatctgtgagcctccctcttccccactccagagaaacatatcattaatgtcattaatgtatatcttccatgttttctatgtgtagaaacatgtattttattttacagaattg

SEQ ID NO: 520238 - DNA, 466 bp, Homo sapiens
tgaatatttgctttactctgagttctctttttggacaggaagggactctgataaaccacctctggttctttcatccccacctccatcactccatttttaggcaggagaactttcccaatgagacagtcttacaggtgtctcctgtaggatctttaaataccttcctactggctctcttctctgttaagggcttggatgattttctcaaagagaaacttttatgagggaatgcaggattcctaagcagtatctccctacccagtgccatgataaatatttggatgcaaagaaaacaggaaataagtcattgaatggagattgcagctccccagagagctccagatgayaggctcctggaaagtgttccaagttctgtttgttctccagtcctgagaacagtaatctttgcggctgtacttttcctcttctttccctagatttcacttttacaactttaaaaaagtat

SEQ ID NO: 520239 - DNA, 466 bp, Homo sapiens
tgaatatttgctttactctgagttctctttttggacaggaagggactctgataaaccacctctggttctttcatccccacctccatcactccatttttaggcaggagaactttcccaatgagacagtcttacaggtgtctcctgtaggatctttaaataccttcctactggctctcttctctgttaagggcttggatgattttctcaaagagaaacttttatgagggaatgcaggattcctaagcagtatctccctacccagtgccatgataaatatttggatgcaaagaaaacaggaaataagtcattgaatggagattgcagctccccagagagctccagatgacaggctcctggaaagtgttccaagttctgtttgttctccagtcctgagaacagtaatctttgckgctgtacttttcctcttctttccctagatttcacttttacaactttaaaaaagtat

SEQ ID NO: 520240 - DNA, 624 bp, Homo sapiens
ttcgtctcttagtggacattaacctgagttcagaatcaccaaatcccacaccagctatctcctttcttggcagctacctcagccaggttttgatatctgtgaaaggggactcactgggaagaatatctcctcagtaacagccagaatattgaccccagtacactaaatggccttctatctgtgcctcataggamttgtgaggcagcctgtgtgtcctccttggctactttttttaggaccttcgttctaactttgtccacattgatatagaagagccactgagggaccagccaaagagggacaaaagtgtttctccatcaggcctgcggcagaaggcatctcgcctctgctccctggatcccacctggttctcttggtcaatggaggcagggttcctctcaagtagaggtcagagagctatgtgaaagagccaatcccaaagccaccaaaggattcattcaatagatgacaatctagatgaaaacaaaagcttgcaatctcatggttcccttcaccaaaagcatctatccacctgtgccctgactcagttgtgcacgtctcagaggtagtgagagttgaggagccctgtgtgccctgggaggctggggtaataaagggctcaga

SEQ ID NO: 520241 - DNA, 506 bp, Homo sapiens
tgttttttgtacccattttgtacctcttttcatctccccccatgtccccacacttcctgccstctggtaacccccaatctactccttgtcttcgtgagataagtgggggttcatttttgacttggttgtccttgtttgtgtttttgccctcgctgggtttatttgggtgagaaaataaaaatagcctgttggttaaatagaaatccaaaaccataacttattgctaaagaacctggagcacagaccctaaagaaatggccatgttctcactttggcctgagggtcacagtcttgtggagtgccggcattctaacataggctttgaagactccggtctttccccacctgcccaggggcctcctgtgcatgttgtggaagcatgtcagagatgttccggggccaggtgaaatgctcacatctgggggaaaagacagtcggctgaatccagatggaagactgagggtaatattgaagataggtgaactaacagagggaaataaaaacac

SEQ ID NO: 520242 - DNA, 506 bp, Homo sapiens
tgttttttgtacccattttgtacctcttttcatctccccccatgtccccacacttcctgccgtctggtaacccccaatctactccttgtcttcgtgagataagtgggggttcatttttgacttggttgtccttgtttgtgtttttgccctcrctgggtttatttgggtgagaaaataaaaatagcctgttggttaaatagaaatccaaaaccataacttattgctaaagaacctggagcacagaccctaaagaaatggccatgttctcactttggcctgagggtcacagtcttgtggagtgccggcattctaacataggctttgaagactccggtctttccccacctgcccaggggcctcctgtgcatgttgtggaagcatgtcagagatgttccggggccaggtgaaatgctcacatctgggggaaaagacagtcggctgaatccagatggaagactgagggtaatattgaagataggtgaactaacagagggaaataaaaacac

SEQ ID NO: 520243 - DNA, 518 bp, Homo sapiens
gcctgttgtaatgaccctggtctatagggttatctcagttttttatctgtgacataaacakttttggtttcttgaatttctccatttttagaaagtactcttatgtcgtatcatacaacatgagttagacccaagattgccaggaaacaaaaatattgggaagaatgaaaagcttgattatcctttaaatctaagaattagaacaaatatatttgctctgaagacaaatgagcagtgtattatatttgtttcttcccttgaacttgtagtgtatttttgagtaatttaatatagaggaacaacctattttggttttaaaacgatgaaaaatattttctagcagataccacaagaaatgctgtagtttgaggttgggtttattgtaaaatgttttcaggatgaagataatataagtcttccctactttcttttgttcttagtaattaaaggattctttgtctattagtatcaaattggttttgtgataaagagcaaaatatttattgacatttattcac

SEQ ID NO: 520244 - DNA, 481 bp, Homo sapiens
ctgttcctggtgaactaacctcttctctttttgccagggaggaggtggcagccattaagaattagtaccctagagaattttgcaatggtagtgggtcatgtagattgagtcaccttgaatcatggtaggtcaatgattggcctgccatggtaggatagacagtaatattgaacatagaatagggccgggattacaatgtggaacaattatactttatatggtcttgttggttttataatctatagaaaataaagttcttcatatcattttgactggtagtaaatgactctagggaccaaagtttaaaaaagggtgaaaatctctggatgagattcaagtgaaaatgaagcaggttaggagctgtagaccaactgataacctcaatctggaaccaaggaccaagcaggaccagtcagaagagctgttatrtgtaaatccgtgttgaatcactctccacttcagaaggagctttcaggcacac

SEQ ID NO: 520245 - DNA, 513 bp, Homo sapiens
agagctgcagataaaccagagactactcataacmgtgtactttttttttcccccatttctgatcccgtctcaacggaaggatgtaattgaggaagggcttgattggccagtgagtcttgaagctgacaccactgctggtggtattttcccctctccctggaaagcatcctgtttttagtgaacctattaaatgtgtagacaattaatggctttttgcttcccctgctgcagacttagcggatcccatgagattttgactaccgtctgtgctcagaacagtttgagccgtatggaggaagtctccgcaccagtcttactgttggtggtcaccaggaagccagcagtgtgtctgaactggacacatgtggccacttcctagcctccctttgtcctgccactggttggttggggctgggccctgggagaaacatagaatgtgagcaaatcagtccgtggcccctaagttccttgttggccccgaggcaggcaggagaggggcgggcacacagggca

SEQ ID NO: 520246 - DNA, 513 bp, Homo sapiens
agagctgcagataaaccagagactactcataaccgtgtactttttttttcccccatttctgatcccgtctcaacggaaggatgtaattgaggaagggcttgattggccagtgagtcttgaagctgacaccactgctggtggtattttcccctctccctggaaagcatcctgtttttagtgaacctattaaatgtgtagacaattaatggctttttgcttcccctgctgcagacttagcggatcccatgagattttgactaccstctgtgctcagaacagtttgagccgtatggaggaagtctccgcaccagtcttactgttggtggtcaccaggaagccagcagtgtgtctgaactggacacatgtggccacttcctagcctccctttgtcctgccactggttggttggggctgggccctgggagaaacatagaatgtgagcaaatcagtccgtggcccctaagttccttgttggccccgaggcaggcaggagaggggcgggcacacagggca

SEQ ID NO: 520247 - DNA, 555 bp, Homo sapiens
tgggccagactcggtggctcacgcctgtaatcccagcactttgggaggcagaggcgggtgggtcgcgaggtcaggagatcgagaccatcctggctaggctgaggcaagagaatcgcttgaacccgggagacagaggttgcagtgagccaagatcgtgccactgcactcaagcctgggcgacagaacaagactccgcctcaaaaaaaaaaaaaaaagacgtttattattctcgttatagacctgtgttacctcgaattctctatacaaktattcatttttaatttcatcaatttaaagagttatgcaaacttgtgcaacttgtaagtgacagagtctggctttgaacccaggacacctgaccattcatgctgctgcctctcaggaggggtggtggtgtgctttcttagtgatgattggagctttgctaacatcacttcctataatctcccacacaaccgcctcccaggcccagagcacattcagcgcatcatcatttacttttggcaccatctagtggaaccaacacttatctggagtccaaattgccaattcata

SEQ ID NO: 520248 - DNA, 280 bp, Homo sapiens
ccatgccagaataccaacaccagaagtattctgtattgagtgtaaatacagagaaaaacggctttttcccttttacactaaaggaatcaagtccaaactcccaagtgtgccaagaggccctgcacgtcctgaactgtgcttactgctcccacctcgtttttgtttttgagacagggtctcactctatcacccaggctagagtgcagtggcacaatcatagctcactacggccttraactcttggacgcaagcgatcttcccacctcagcctcctgagcag

SEQ ID NO: 520249 - DNA, 472 bp, Homo sapiens
aatattcttatccctggtttacagatgagacatctgaggcttcttgagtttcagtgggtttccagagctcaccacatggttactaaatagcagagccaggcctctaacttctctggctccaaagcagtcttycttttttttgtgtgtgtgtgtgtgtctggtttattttatttaacacagtaaaggctcatacatgctatagcacatatcagaattcatccctttctaaggctgggtaatactccattgtgcagatataccacagtgtgtttacccacttttctgctgaaatggataaacttggattgtttccaccttttaactacaagttgagcatcccctaatctaaaaatccaaaatgccccaaaatctgaaactttttgatcaccagcatgaagccagcagtctttcaatacgtgtgtatgaatggcaaactgctctcctaccgccgggaatttttaaaaccctattt

SEQ ID NO: 520250 - DNA, 634 bp, Homo sapiens
cagctgggctttttgtcttttttgtttgtttgtttgtttgtttgttttttgtagatacggggtttcactacactgcccaggctgcttttgaacttccagcctcaagcgacagtcctgccttgacctcccaaagtgctgggattataggtgtgagccaccaygtctagcccagttgctctgcctttctggaaaacattgttctcctgcatggtagtggggaagaatagtattataataatagtaatgacctcagatggttttgatataattacatgaaataatctataaaaatgctagcataggacttggcatttaggaaatagtcaatacatgctagcatacatacctgcatacatatatgaaattcttattttaagtttgtagaggaaagaagttgttagcacaactagttagctatcttggacaaagtgtgtacatgggagtgatgctgtatgaggatggtcatctccatcattatttataggggtgaaacattattgatccacatgactaagaaaaatgaacataagagacctctatatattgatacaaaaagacaatgttatcttgttgagtaaagaggttagaatgcaacatgtatatagcacaaacttgcaatgtagaactgtgttca

SEQ ID NO: 520251 - DNA, 634 bp, Homo sapiens
cagctgggctttttgtcttttttgtttgtttgtttgtttgtttgttttttgtagatacggggtttcactacactgcccaggctgcttttgaacttccagcctcaagcgacagtcctgccttgacctcccaaagtgctgggattataggtgtgagccaccatgtctagcccagttgctctgcctttctggaaaacattgttctcctgcatggtagtggggaagaatagtattataataatagtaatgacctcagatggttttgatataattacatgaaataatctataaaaatgctagcataggacttggcatttaggaaatagtcaatacatgctagcatacatacctgcatacatatatgaaattcttattttaagtttgtagaggaaagaagttgttagcacaactagttagctatcttggacaaagtgtgtacatgggagtgatgctgtatgaggatggtcatctccatcattatttataggggtgaaacattattratccacatgactaagaaaaatgaacataagagacctctatatattgatacaaaaagacaatgttatcttgttgagtaaagaggttagaatgcaacatgtatatagcacaaacttgcaatgtagaactgtgttca

SEQ ID NO: 520252 - DNA, 448 bp, Homo sapiens
gaacttaaaaacaacaaacaaatacagcatatggatagcgccccctcccctagagattctgatttatttggaccgcaataaggcccatccatccatccctgcattcattcaggtaactagacgcctatttatttatctatacattgtttcaagctctcaaggtaggattttttgtttatttttgttttgtttttgagacagtctcgctctgttgccaggctggagtgcagtggcatgatctcaactcactgcaacctctgactcctgagttcaagcgattctcctgcctcagcctcccaagtagctgggactacaggcatgcgccaccacaagcagctaatttttgtatttttagtagagacrgggcttcaccatcttggccaggacggtctcaatctcttgacctcatgattcacccacctcggcctcccacagtgctgggattaca

SEQ ID NO: 520253 - DNA, 448 bp, Homo sapiens
gaacttaaaaacaacaaacaaatacagcatatggatagcgccccctcccctagagattctgatttatttggaccgcaataaggcccatccatccatccctgcattcattcaggtaactagacgcctatttatttatctatacattgtttcaagctctcaaggtaggattttttgtttatttttgttttgtttttgagacagtctcgctctgttgccaggctggagtgcagtggcatgatctcaactcactgcaacctctgactcctgagttcaagcgattctcctgcctcagcctcccaagtagctgggactacaggcatgcgccaccacaagcagctaatttttgtatttttagtagagacagggcttcaccatsttggccaggacggtctcaatctcttgacctcatgattcacccacctcggcctcccacagtgctgggattaca

SEQ ID NO: 520254 - DNA, 682 bp, Homo sapiens
taaattgagacagtgtatgtatcttatrttaagcagattgaaactgaacttaagagatcttttagaaataaaaaatataatgaaaattaaaaactaaatggacaggttaaacacaatattggatagaaccaaaaagaaaataagtgagttggaagttagactaaacaaattatgctgaagacagtacagaggaggaaaggaaaatggataggtgaaatagaggttgaaaaattagagtatctaatcatatctgcaaaagaaaaattgaattgggggaaggttatatttaaggttatatttaatatctgagggcttttcatcattggaatttattaatgttcaaggaaacctggaaagttttctaacacattaaaggagctttaattataagttccaaattcttcttagaagaagagaaccagcaggcccagacatttttactggtgagttctatcaaatgttttcaagaaatggattatttccattttataaaaacaactccagaataaaaaaaggtccatttgttcgttcattttatgaggccagtacaaccttgataccaatgttatatgagaaatgtgtaagacaggaaaattacatgccaactttcctcatgaacctaacggcaaacattttaaattaaaagttagcaaattaagtttagaaatctgtaaaaaagata

SEQ ID NO: 520255 - DNA, 682 bp, Homo sapiens
taaattgagacagtgtatgtatcttatgttaagcagattgaaactgaayttaagagatcttttagaaataaaaaatataatgaaaattaaaaactaaatggacaggttaaacacaatattggatagaaccaaaaagaaaataagtgagttggaagttagactaaacaaattatgctgaagacagtacagaggaggaaaggaaaatggataggtgaaatagaggttgaaaaattagagtatctaatcatatctgcaaaagaaaaattgaattgggggaaggttatatttaaggttatatttaatatctgagggcttttcatcattggaatttattaatgttcaaggaaacctggaaagttttctaacacattaaaggagctttaattataagttccaaattcttcttagaagaagagaaccagcaggcccagacatttttactggtgagttctatcaaatgttttcaagaaatggattatttccattttataaaaacaactccagaataaaaaaaggtccatttgttcgttcattttatgaggccagtacaaccttgataccaatgttatatgagaaatgtgtaagacaggaaaattacatgccaactttcctcatgaacctaacggcaaacattttaaattaaaagttagcaaattaagtttagaaatctgtaaaaaagata

SEQ ID NO: 520256 - DNA, 682 bp, Homo sapiens
taaattgagacagtgtatgtatcttatgttaagcagattgaaactgaacttaagagatcttttagaaataaaaaatataatgaaaattaaaaactaaatggacaggttaaacacaatattggatagaaccaaaaagaaaataagtgagttggaagttagactaaacaaattatgctgaagacagtacagaggaggaaaggaaaatggatakgtgaaatagaggttgaaaaattagagtatctaatcatatctgcaaaagaaaaattgaattgggggaaggttatatttaaggttatatttaatatctgagggcttttcatcattggaatttattaatgttcaaggaaacctggaaagttttctaacacattaaaggagctttaattataagttccaaattcttcttagaagaagagaaccagcaggcccagacatttttactggtgagttctatcaaatgttttcaagaaatggattatttccattttataaaaacaactccagaataaaaaaaggtccatttgttcgttcattttatgaggccagtacaaccttgataccaatgttatatgagaaatgtgtaagacaggaaaattacatgccaactttcctcatgaacctaacggcaaacattttaaattaaaagttagcaaattaagtttagaaatctgtaaaaaagata

SEQ ID NO: 520257 - DNA, 682 bp, Homo sapiens
taaattgagacagtgtatgtatcttatgttaagcagattgaaactgaacttaagagatcttttagaaataaaaaatataatgaaaattaaaaactaaatggacaggttaaacacaatattggatagaaccaaaaagaaaataagtgagttggaagttagactaaacaaattatgctgaagacagtacagaggaggaaaggaaaatggataggtgaaatagaggttgaaaaattagagtatctaatcatatctgcaaaagaaaaattgaattgggggaaggttatatttaaggttatatttaatatctgagggcttttcrtcattggaatttattaatgttcaaggaaacctggaaagttttctaacacattaaaggagctttaattataagttccaaattcttcttagaagaagagaaccagcaggcccagacatttttactggtgagttctatcaaatgttttcaagaaatggattatttccattttataaaaacaactccagaataaaaaaaggtccatttgttcgttcattttatgaggccagtacaaccttgataccaatgttatatgagaaatgtgtaagacaggaaaattacatgccaactttcctcatgaacctaacggcaaacattttaaattaaaagttagcaaattaagtttagaaatctgtaaaaaagata

SEQ ID NO: 520258 - DNA, 625 bp, Homo sapiens
cagctgtatttggagtttactgcctcaatgttcactttcaatgaaagagcgtatttcttaacagaagaccagaaattcatgctgaaccaataaattgtcctctatagttytcatctgcaaggaggatttaaatatttctagctcagtagttcagccctgaagattatttcacccccactgctaatcccgacctaatctgtttttgtgttgttaatgctcctatatactagccaggtcagtaattctgtaacaggcttaatttcttaatattttaggccatgtgttaattttactatttcttagccattttttcctcaatagttttaaattgcatccctgcttactctcccttttactggacgggcttcctctgtttactaatacaattccccaaattgattcatccacttgttgaaatacctaattttaggccctgcactgacagcttgcctaggcttatacttgtgtttggtgttgcagtcttcagattctaaaaacaccatctagaccttacattacctccagccagggctattcccccagggcctgccttaagaagcagatttcttttcaagtttcatcttcttcccatttatttcatttcatgacagttagagaagctgta

SEQ ID NO: 520259 - DNA, 625 bp, Homo sapiens
cagctgtatttggagtttactgcctcaatgttcactttcaatgaaagagcgtatttcttaacagaagaccagaaattcatgctgaaccaataaattgtcctctatagttctcatctgcaaggaggatttaaatatttctagctcagtagttcagccctgaagattatttcacccccactgctaatcccracctaatctgtttttgtgttgttaatgctcctatatactagccaggtcagtaattctgtaacaggcttaatttcttaatattttaggccatgtgttaattttactatttcttagccattttttcctcaatagttttaaattgcatccctgcttactctcccttttactggacgggcttcctctgtttactaatacaattccccaaattgattcatccacttgttgaaatacctaattttaggccctgcactgacagcttgcctaggcttatacttgtgtttggtgttgcagtcttcagattctaaaaacaccatctagaccttacattacctccagccagggctattcccccagggcctgccttaagaagcagatttcttttcaagtttcatcttcttcccatttatttcatttcatgacagttagagaagctgta

SEQ ID NO: 520260 - DNA, 625 bp, Homo sapiens
cagctgtatttggagtttactgcctcaatgttcactttcaatgaaagagcgtatttcttaacagaagaccagaaattcatgctgaaccaataaattgtcctctatagttctcatctgcaaggaggatttaaatatttctagctcagtagttcagccctgaagattatttcacccccactgctaatcccgacctaatctgtttttgtgttgttaatgctcctatatactagccaggtcagtaattctgtaacaggcttaatttcttaatattttaggccatgtgttaattttactatttcttagccattttttcctcaatagttttaaattgcatcyctgcttactctcccttttactggacgggcttcctctgtttactaatacaattccccaaattgattcatccacttgttgaaatacctaattttaggccctgcactgacagcttgcctaggcttatacttgtgtttggtgttgcagtcttcagattctaaaaacaccatctagaccttacattacctccagccagggctattcccccagggcctgccttaagaagcagatttcttttcaagtttcatcttcttcccatttatttcatttcatgacagttagagaagctgta

SEQ ID NO: 520261 - DNA, 625 bp, Homo sapiens
cagctgtatttggagtttactgcctcaatgttcactttcaatgaaagagcgtatttcttaacagaagaccagaaattcatgctgaaccaataaattgtcctctatagttctcatctgcaaggaggatttaaatatttctagctcagtagttcagccctgaagattatttcacccccactgctaatcccgacctaatctgtttttgtgttgttaatgctcctatatactagccaggtcagtaattctgtaacaggcttaatttcttaatattttaggccatgtgttaattttactatttcttagccattttttcctcaatagttttaaattgcatccctgcttactctcccttttactggacgggcttcctctgtttactaatacaattccccaaattgattcatccacttgttgaaatacctaattttaggccctgcactgacagcttgcctwggcttatacttgtgtttggtgttgcagtcttcagattctaaaaacaccatctagaccttacattacctccagccagggctattcccccagggcctgccttaagaagcagatttcttttcaagtttcatcttcttcccatttatttcatttcatgacagttagagaagctgta

SEQ ID NO: 520262 - DNA, 603 bp, Homo sapiens
ggtttctagtagccccattttcaaagtcacttcctcagtgtgattctgagtttctttgtcagtgaaacagaaaactgagagttgctagaaaactaaattaactcattcaaagagcataaaataatgagtgacttgtgacaaatattcaatggcatggcctaaatatctattaaaattaataatcagaattataatgagaataaagatacagcaaaatggacctgaagaatgttgataagtgtctgtatttacagattatggtaaatgcagagaattatcccattttaactacagaaaacacattcttctaagtgatttgaacatttrtaaccaccagatatagctggcctcttactgctttttttttagtgctatacaaaacactaacacatttttactctttaatttcccttttgaagcagtcatcaaactataggatgtattacaaaacaattaaggctacattttctattgcatgatctatattacattcatatcttcgggctgatattctttttcaccttgagtaaatttagaaaatttgtgcccaacacatttgcaaatcatccctgcaggaggccaagctctttcatttgtattttt

SEQ ID NO: 520263 - DNA, 595 bp, Homo sapiens
tttctggaaaatacaaacaagcagccagatcttcagtccgatcatatttgagataaagaaaacatactttaaatgtgaacggatgttttttttaaaagtttatgaacaaagattatcattgatagtagaataatttgtttacactcttcaagtttctttagatgtgtggccaatactggtctacatatcttccagctcgggcagaaaaataagtgtgtcacatgctgcaaagtctaaaatcttattcaaaataaaagttcaaggaatgatggttcttgctaaggcctttctattttggaacgataaattgtaactrttaaagagaaaaaaattatttgaggtttatcaagaattgcaagattttaattaacattcttcatctatttatgtcctagattattgaagtataaattgtctgagaagtaacctcttttcattttgttaaaaaaaagttgaccagaactttaattcatttgctgcattttcctccaaagaatagtccaaatttatagagttttacatttaataacatatttatctactacattaatggatatttaggggcacctattatatattaggaattatgaaagag

SEQ ID NO: 520264 - DNA, 648 bp, Homo sapiens
agctgcccctgctccactgccaccctcggtagggtctccctcagaagggccgggggctatttcccaagcctccctgttgtcatggtcccttggagacttcttctctccctcacttcctcccagtgggttttctggccaggggccttggaagtgacacaacggcggaggcggggtgaacaggttgaagagcttcctccaaaagcccggacagatctcccagctcccttgtttctaagccttctcaccactactgacaaagtggttttacctgttttccatcggctggaattgactggaattgggcatccaagcagcccccacctcctcagccccttcaatcacaaccacaccagagtgaagtggcatgttcctaggtctacrctgcgagccccctccaggacagggcctgggacctcttgttcatctgcatcctgaccagcgggcagtttctggcctagatctagaatagatgtactggatacatttgctgaatgaatttccaagactcaataaaactcgtggaactttctggcaacatgaaaaatggtccctctcctcagtggacataagagggtcattaaaatatgaattctggcgaccaatgaaacataggaactttgcattatagtagtaactcagaacacacac

SEQ ID NO: 520265 - DNA, 648 bp, Homo sapiens
agctgcccctgctccactgccaccctcggtagggtctccctcagaagggccgggggctatttcccaagcctccctgttgtcatggtcccttggagacttcttctctccctcacttcctcccagtgggttttctggccaggggccttggaagtgacacaacggcggaggcggggtgaacaggttgaagagcttcctccaaaagcccggacagatctcccagctcccttgtttctaagccttctcaccactactgacaaagtggttttacctgttttccatcggctggaattgactggaattgggcatccaagcagcccccacctcctcagccccttcaatcacaaccacaccagagtgaagtggcatgttcctaggtctacgctgcgagccccctccaggacaggrcctgggacctcttgttcatctgcatcctgaccagcgggcagtttctggcctagatctagaatagatgtactggatacatttgctgaatgaatttccaagactcaataaaactcgtggaactttctggcaacatgaaaaatggtccctctcctcagtggacataagagggtcattaaaatatgaattctggcgaccaatgaaacataggaactttgcattatagtagtaactcagaacacacac

SEQ ID NO: 520266 - DNA, 641 bp, Homo sapiens
ccctgctccactgccaccctcggtagggtctccctcagaagggccgggggctatttcccaagcctccctgttgtcatggtcccttggagacttcttctctccctcacttcctcccagtgggttttctggccaggggccttggaagtgacacaacggcggaggcggggtgaacaggttgaagagcttcctccaaaagcccggacagatctcccagctcccttgtttctaagccttctcaccactactgacaaagtggttttacctgttttccatcggctggaattgactggaattgggcatccaagcagcccccacctcctcagccccttcaatcacaaccacaccagagtgaagtggcatgttcctaggtctacgctgcgagccccctccaggacagggcctgggacctcttgttcatctgcatcctgaccagcgggcagtttctggcctagatctagaatagatgtactggatacatttgctgaatgaatttccaagactcaataaaactcrtggaactttctggcaacatgaaaaatggtccctctcctcagtggacataagagggtcattaaaatatgaattctggcgaccaatgaaacataggaactttgcattatagtagtaactcagaacacaca

SEQ ID NO: 520267 - DNA, 515 bp, Homo sapiens
cacaatctgtctgtttttatctgtgcccccacctccaagacctcagagaatctctaaatgaggggaggattggtgtaggtcaggattcagttagtgtcctaacaagataccattgtaataacatcatcatttttatttgggtgttattcaaagaaagagagaaaggtggaagtggaaaagagagggtagttcttacaattccttgaaaatktcttgaaaagataaaggaagttaagccaaacgcaccaaggctgaacttcttggtttaaatagtaggaagacagcaatgcctgattttgccccaattgtccataaacatatcaatgaagactggagggagttcacaaacaaaaacatggtaaaatagaatattaataacatagtcaccagattctgagcataattaacattaaatattatcttactctgcttgggctgctaaagcaaaataccatggcctgggtgatttaaacaacagaaatttattctcacagttctgggggctatgaagtttc

SEQ ID NO: 520268 - DNA, 569 bp, Homo sapiens
ccccctgcctggactgtggggaactcttaccaggcgacctgccaggcactgggttctgggcccctggctagttaagctgccccctcccctgggcagcccttgatcagatcaagaatatgccttggctttgggtcttgcctctgtcccctacagaacaggcagggccagcatcttgctcacctctggggttccccatggaacgccgcacagcccgtcacatgagtgaaggatcagaaagaatgagtgaatgaaactgccaagtctctaggcccctggtacagggctytctatcttgctgcctccaggaaggaggacttgtgaggcctggcactggggcatggacaatggtgtgggcctgtggggtcccaggttcaatgctcagtcaccctatctttgtctagcacctgcttggtgccaggctctgtggtggcgacagggtggcacatggtgactctaagagacctcattcccatcctcttgggtttcctgcccagcaggaggaggggcagtggacagttgtgaagatgacggtgccactcttgtctttactatcttataatacaacggct

SEQ ID NO: 520269 - DNA, 533 bp, Homo sapiens
ttaagtcacaagtgtgacctgcgttgttgttctatggaacagcgttgctgtggagatgggtttgagccatatgcgtgccgaagtgccggatgggagccagggctttctagggtgcgtgcagggcagcgggcgtctgtctcagacaaggctgactttcagcgagtctacatcctgaggccagaatgcggggtgcacgcctgagatgctgtgtgctgtgggcatatgggtcccagagtgtgtgtgtaagagagacagtctggaatttgtgtgtgtagattatgtatgtgtagaatgtgcgtgtgtgtgtgtgtgtgtgtgtgtggagcgtagggattgtgtgtggggtataagatttgtgtgagrggtgtgtctgtgaggtttgtatggtgtggggtggggggtgtgtgaagtgtgttgtgtgggcatatggactgtgcatgtgtgtgcagtgtgggtgctgggaatgtgcagtgtaaggtgtgtgtgtctttgaggtacgtatggtgtgaggtgtgtatggagcatgagaggtg

SEQ ID NO: 520270 - DNA, 670 bp, Homo sapiens
agcctggaacactcttcctcataccttcagaaggaaccaagccggccgacacctggatcttggactccagcccccagaactgtgagacacatttctgtcgttcaagcccttcaggtgtggggtcatgtgaaggcagccctagccaacgaatacaatgcccattgcactagtattaggtaaatgctatgcaaagcctgttcctgtgtctagcttcctcccgggctcctgcgmacagcaggcgctcactcattgtccactgaagagactgaagagccaagatatctgtatttttatcaggagccttcaggccatgtgatgccttaagccatggagtggacgctcaggcagagcggaattgggggtaaccttgtctgagctcagagaaagccctagaagcaagaacacaacaacccagctcttatacacaaacccccaagtcacagcacttgttctccgaaattttccagtttggggtctacttgtttctttccctattctccccacccccttttgactgtgagtcccatgaagatttctcaatcttgcaagttgtcggtcccactccctcaacactcttagcctagaacagtgcctggcacacaggaggaataaatatttgttgagtgaacaaatgacagttactgttaactcctttgatgataacacagta

SEQ ID NO: 520271 - DNA, 414 bp, Homo sapiens
ctggcctatgacttggagaatggggacagtaaggagaatggcagctatcacttaytgagcactgtgtgccgggccctgagctaaattatcagctcatttaaatatcttcacactaactggctaagttagatactattaatatcattattctcattctgcagactggggaaaccaagccaggagcgacagagctgggattcaaatcgggcagtccatctgcagaatccaggctctcaccatttcaccaagaactgaaaacttttccacgagacctgctgtgtgccaggggcttcactcccagcatcccagtcagtggagaagccaggagtcaaacccagcccactgcatccacagtgaagaccaggggctccagagctgggcccatggtccagacctgtcacccatgcctcagag

SEQ ID NO: 520272 - DNA, 262 bp, Homo sapiens
ctaattaaaaaccctggcctcctgccaaaccccagcccatttactgcgggattagctgctgagagctacttaactcgcaggcagaagccggcgccacccccagtcacagcacataatggctcagagcatggagccaggtagggttctcaacacctgacctgccttctctcacgcgccctccacaaaccgcaggtgaatctttccatcctytctgttctgtacatgagggagtgaaggctcagagaaggcaggtgacttgccg

SEQ ID NO: 520273 - DNA, 488 bp, Homo sapiens
tattccctttgtgtcggtacctcttgattccaagaatcagacttacacaaagttgaggggcttattwtcaggataatgcagaagtttgggaaagcctaagaatggctcagagcagagctgctgggctggaggcttcctggggtttccactccgtgcctctggcttcattctctctaccccatccatccccgtgcaggagaaacagtttctctccgggtgacaggctctgtgactcagtcgccctggcacttgatttctgtgtctcagcccagacctgaataggtcatctctgtccaagggcaggaggtggcaggacctgggcagtacccaaagaacatcaggtggaaaggggcaggcctggggcaaggatgcagcccctgcactgtgcaacagtaggcatcccctgcctcttctttcctgtacttaacttttctgttcttattctgtgaaccactttattttttatgtatttatttgtttgagacaga

SEQ ID NO: 520274 - DNA, 488 bp, Homo sapiens
tattccctttgtgtcggtacctcttgattccaagaatcagacttacacaaagttgaggggcttattttcaggataatgcagaagtttgggaaagcctaagaatggctcagagcagagctgctgggctggaggcttcctggggtttccactccgtgcctctggcttcattctctctaccccatccatccccgtgcaggagaaacagtttctctccgggtgacaggctctgtgactcagtcgccctggcacttgatttctgtgtctcagcccagacctgaatakgtcatctctgtccaagggcaggaggtggcaggacctgggcagtacccaaagaacatcaggtggaaaggggcaggcctggggcaaggatgcagcccctgcactgtgcaacagtaggcatcccctgcctcttctttcctgtacttaacttttctgttcttattctgtgaaccactttattttttatgtatttatttgtttgagacaga

SEQ ID NO: 520275 - DNA, 525 bp, Homo sapiens
gctgtgggaagcggggggtgttgtgtccagcgctgtgtctgggccagtgactgcgggctggtggggccgcccccgccactgccctgattcctcagcagaaggcaggcagggaacaaagctgaccccagagagccaggccatagcaggggctgaggatgcctggtgaatggatgcctgggagaaaagatggcagaattcacacatgagtctatgagacagggaaagamtcaataaaataaagaaggaaggggccgggcacggcgcggtggctcatgcctgtaatcccagcactttgggaggctgaggcaggcggatcatgaggttgggagttcgagaccagcctggctaacatgatgaaacccagtctctactaaaaatacaaagattagccaggtgtgggggtgcatgcctgtagtcccagctactcaggaggctgaggcaggagaattgcttgaacctgggaggcagaggttgcagtgagccgagattgtgccactgcactccagccttggcgacagagcaaga

SEQ ID NO: 520276 - DNA, 583 bp, Homo sapiens
ctggaattctcagagggactcccatctcttgggcagccctgccttgttggggtaacctggagatggaggtgggctcaccctcctcttcctggccagcccctcttgcctgcacccccatatggtcttcccagagtgagctcatccacctcgtcatgcctgactgcagcttcagcacagcacagtccccaaaatgtcaaggtgattcaytcccaggagtcgctgctgaatccctgctgctgcgaggttgggttctctggcttcctggtggtgggagagggcacgcttggccctccagggcagtgccccatcctgggctggcaggaccttgacctggggccccagaacagaccagcaggtgacctgagacacctgctgttgtctaagctccagtgctttcttggggaggctggggccttggacctatagaagatgccccaggtaaaaggagaggggccagattttattcagcattgccatccatggccttgcatattcactcaccagaacattcaggaaacccacactgcaccaggccctgagccaagtgctaggaacagagcagtgagtaaggcccagcccctgt

SEQ ID NO: 520277 - DNA, 227 bp, Homo sapiens
cccaaggtctaggactctgaggctgtggaatgtgcattgtacccaaaagatgggctgccatggggacctgtggagtgacacycctttgtcaagatgccagggctgcctggctgccccattccctgccctctccgcccaccccagcatggctcctggaacagcgtgggtggcgcaaaagagaggctccccatgtgcagagaagcaaggtatgtgagaacagacctcca

SEQ ID NO: 520278 - DNA, 513 bp, Homo sapiens
ctgtacatttcaatatgtatgtcattaactggcaagccattattttttaagacttttgatttagggtgttaaatttcttccaggaaatatatatcagttttcatgtccatctgctgtggacatatgtgtcttgtttcaccacaaccttgacaacactgggtatgatcattttaaaggtgttttactttctattttgatttaacatttttcctcctgaggaccccagtggatttcccaccccgatgtccagatggtctgttaaaaagctgtgtgccattccagctttctaggtatttctggtgtgacttttctggggccagsggggaggactcagctctttctcaggtctgttcctgtttccactctggacgtcctgggcctgcgtaatgagggagcagaccatgaagaggacttcatggtgtaggagctcactatgggcaatctgtgtggggaaaatggacaaactttggaggcccactttggatgccagaagtcctgggacctaggaggctg

SEQ ID NO: 520279 - DNA, 513 bp, Homo sapiens
ctgtacatttcaatatgtatgtcattaactggcaagccattattttttaagacttttgatttagggtgttaaatttcttccaggaaatatatatcagttttcatgtccatctgctgtggacatatgtgtcttgtttcaccacaaccttgacaacactgggtatgatcattttaaaggtgttttactttctattttgatttaacatttttcctcctgaggaccccagtggatttcccaccccgatgtccagatggtctgttaaaaagctgtgtgccattccagctttctaggtatttctggtgtgacttttctggggccagcggggaggactcagctctttctcaggtctgttcctgtttccactctggacgtcctgggyctgcgtaatgagggagcagaccatgaagaggacttcatggtgtaggagctcactatgggcaatctgtgtggggaaaatggacaaactttggaggcccactttggatgccagaagtcctgggacctaggaggctg

SEQ ID NO: 520280 - DNA, 575 bp, Homo sapiens
ttaggttttctgggcgatatggcctctgtaacaactactcaactctgtcactaaggcagagtcatggataaaggctcttgaaggaagccatagatagtctgggcaacatggcgaaagcccttttctacaaaaaatttaaaaaattagcaggtcatggtggtgcatgcctgtagtcccaactagttaggaggctgaggtgggaagactgcttgagcccaggagattgagactgcagtgagctgagatcatgcctgggacacacagcaagaccttgtcccttaaaaaaaaaaaaaaaaaaaaaggcagcagcagcagcaaccatagataatatgtaaataartggctgtgggtgtgttccaataaaactttatttgcaaaaccaggcagtgggctagtttggcctgtggactctagtttgccaattttggatccagagaaaaacacggggggaaacagcagcttaattaatggtttcagtgagtggtcagccagtccaaaaatagcataaattgtaggaaggaacaagccaatgaaagttgaaaaggcggaggttaagcagaggggtaaagataagt

SEQ ID NO: 520281 - DNA, 575 bp, Homo sapiens
ttaggttttctgggcgatatggcctctgtaacaactactcaactctgtcactaaggcagagtcatggataaaggctcttgaaggaagccatagatagtctgggcaacatggcgaaagcccttttctacaaaaaatttaaaaaattagcaggtcatggtggtgcatgcctgtagtcccaactagttaggaggctgaggtgggaagactgcttgagcccaggagattgagactgcagtgagctgagatcatgcctgggacacacagcaagaccttgtcccttaaaaaaaaaaaaaaaaaaaaaggcagcagcagcagcaaccatagataatatgtaaataaatggctgtgggtgtgttccaataaaactttatttgcaaaaccaggcagtgggctagtttggcctgtggactctagtttgccaattttggatccagagaaaaacacggggggaaacagcagcttaattaatggtttcagtgagtggtcagccagtccaaaaatagcayaaattgtaggaaggaacaagccaatgaaagttgaaaaggcggaggttaagcagaggggtaaagataagt

SEQ ID NO: 520282 - DNA, 625 bp, Homo sapiens
ggtaaggaaatccattttcccacactcacgtctacattgaatattattttcttctcttcaggtgttttttgcacaccgactttatgccccttatggttcagactccagatatagccatgaacaggacccaggacccttcttgctaggagctcacagtctagtggaggaaacagaggtagtcaccaggtattcctcagtgctgggtgaaggggaagcaggaagtgagatattgcagcacagaggagcacctgaacaagccccactcatggagcattagagaaggcctcctggaggaggtggcattgagattagctaggcagtgagctaagggcagtgcagaggcatgaaggcgagaaagcgtacactgtgttttgtggcctgtctggggttcattgtgctgaagtacgtgagtgtctgtgacagacagatggggtggtgtcagtcattataatgaagctggggagacgaagaggatctggatcctgtagggcctcggggaagaagtgtggcctttattcagaaagcatcagggagacacgggggcrttaagcaggggaatgacatcctggcgcttgcacgttggagacacccctggctactgctaggtgaatggattggaggaggc

SEQ ID NO: 520283 - DNA, 448 bp, Homo sapiens
caggccatcctcacccagcacatcctactgtacccgaagagagggcgcagtgactcattttttgccgttggcattaggtttaaaagatggttgaacgtccacagaaggaaaaggaattcctggcagagggcmctgcctgagcataggcagggaggctgagcagccacgtgtgcttgagcgctggtttggcgaggcagcaagcggcggctgtatggtgaagggtgttgaaggctgagccaggaatcaaggctgctggccacagacgcattgatgatggatgacgtgctggtggggctgagcacctgaaaaaaaagggtgtcagttcccaaagcagggcctggcatacagtaggcccacagggagagcatgaggaatgggtggccgcctggggtcctggagagtagtatttcggatgtctgggctgtgggatgtgggaggaatgtcactg

SEQ ID NO: 520284 - DNA, 551 bp, Homo sapiens
ttcagaaggatccacccctggacccgccccactggacgagaagccagagatgccccgggcggggctcataggaccgagtggtggcttctcagttccccaggcagccgtggccattagtggagccgactggctggtcccctggccgtgagccggcttctgaatgatttatgccgccttgaacttgactccagcgtgacaggagtgagaagagccgctcccgctagaggaaagctggaaaccgtactgtgctcaccacataacctctgggtgctggaaatggagtattactactgccccagcctgctgaagctcttgcgctacctctgggtgagtggcggggggcagtgyaggctccaggacggggtcacgtcctttccctctcctcctgcttcctgtcaactttgctttttggctgtgtctggttagcaatgtctctgttttctttaagaaatggtggaggttacaaggaagagagaatgttggggaaaaaggaaacgggcttggtttgggaggtagcacaggtttgtaggaagagctgagactcctgaaca

SEQ ID NO: 520285 - DNA, 509 bp, Homo sapiens
tttttggtaggagcactttataggtggtgctgtgtacgtcatagcaggaggcacatgccatttagggtctctgtagtcaggtctctaaagtgggctcagatgtggtgggtgtcagtttctcattgacaatcattgtctaaatcggttattttattagggatcaacttaactaatgttaagacacataatttctatataaggatgaggataaaagtagccgcacttaacccctttcttctgaatagtggcaattaaaaacaaagaatgaggtttattagggagttacaaaatggtgagttttctaaatatacaattccttctgcattgattacttttattcctcagtgggaggatatttagttgcctttaaatatattttaattagaaaggcacgtgttcatggtgcagccycatgacccttgcctcgtggtgttgcccccatgcgtaacatggctaaaagagattctgcaggtggaattaagatcattgtctgagtgggcttaatccac

SEQ ID NO: 520286 - DNA, 509 bp, Homo sapiens
tttttggtaggagcactttataggtggtgctgtgtacgtcatagcaggaggcacatgccatttagggtctctgtagtcaggtctctaaagtgggctcagatgtggtgggtgtcagtttctcattgacaatcattgtctaaatcggttattttattagggatcaacttaactaatgttaagacacataatttctatataaggatgaggataaaagtagccgcacttaacccctttcttctgaatagtggcaattaaaaacaaagaatgaggtttattagggagttacaaaatggtgagttttctaaatatacaattccttctgcattgattacttttattcctcagtgggaggatatttagttgcctttaaatatattttaattagaaaggcacgtgttcatggtgcagcctcatgacccttgcctcgtggtgttgcccccatgcgtaacatggctaaaagagattctgcargtggaattaagatcattgtctgagtgggcttaatccac

SEQ ID NO: 520287 - DNA, 377 bp, Homo sapiens
ggaccccggcggccacaaggggcattcgggtcgccccggcacctggcatgtgtcagtccgcttggaaacccacagccacggctcacaggggcagcgccaccggccaggcagccccgcacccgggctcagaactttctcgctgcaacctcagccggtcctcggagcacrcgggccggccgcgcggccgctggaaacagagtcgcgaaccggcttcccgggccaggcccgcctccgggccccaagtcccaacttggtgcccggcccgggccacacgggcccagcgcgggctcggctcctggcttcctacgggcgcgggcaggtgaggaccggccggcgccgcccgcgcgccctcctcaccggcccgggacgcggcgtcc

SEQ ID NO: 520288 - DNA, 377 bp, Homo sapiens
ggaccccggcggccacaaggggcattcgggtcgccccggcacctggcatgtgtcagtccgcttggaaacccacagccacggctcacaggggcagcgccaccggccaggcagccccgcacccgggctcagaactttctcgctgcaacctcagccggtcctcggagcacgcgggccggccgcgcggccgctggaaacagagtcgcgaaccggctycccgggccaggcccgcctccgggccccaagtcccaacttggtgcccggcccgggccacacgggcccagcgcgggctcggctcctggcttcctacgggcgcgggcaggtgaggaccggccggcgccgcccgcgcgccctcctcaccggcccgggacgcggcgtcc

SEQ ID NO: 520289 - DNA, 672 bp, Homo sapiens
catcatttgtaaaattattgcttgacatgtttaatatctaaaatataacatagatggttaaaagctgaaaacatgtataagtcagcagctttggattcaaaagttgaggttaaattacagcaaatagagccgtcttgcataaggttgtagagagggaactgttatcctgggaaccaacttcaactttgttttcctctgtgttcctacctttgtttggaagtgtttgtttctgtcacagtgaagggcctcccctgaccgatcccctgattgacagtgacacagtcagttcccaccctgccttatctgtaagagttctctagccagagcaaccacagcctcagagaagaaaaacctggggccctattcaattctgcatccattatccatgcctttgtggagacttttcctgagggaaagagttaaagaggcacgtaaactttcaaacagcagagaccaacagtggactaagcacagcgaattggattttctgttgaagaggcagtgcagtggccgggttcaggyagtaacgggagcctgggggacttagggtcacagcctctgcacagtttcaacttgggtttcctaataaaaatgctgcccagagaggaaagacactagggtagaggaaaagctgtttcttacaaacctactggcaagtccgtcttcttttca

SEQ ID NO: 520290 - DNA, 498 bp, Homo sapiens
ctgccaggtcatgcatgaagggagcactgcagagaagacggtggcccctgcagaatgttcataggttcccagcccccascccacccacaggggcctggagctgcaggatcccaggggaggcgtctctctctgcatcccaagccatccagcccttctccctgtacccagtaaaccctcagtaaatatcctctttgtcaaccagaaatcctgctccctctcttcatttcttatctctcatataatgtgatgcttctcctgggttctcagtgtggcgctgggagaatgctgacaccagtgggaaagtagcctggaggagaggatcaaagccacccacgggtgtcccctggggaaataggccaggataggaggagttcgctcactggacaccagtccctccagtctctccctcctccccttcttccttgcagctcaacccccaactcgctgcctgctttctggagggagctacttctggctgagcctccagatacaccctgt

SEQ ID NO: 520291 - DNA, 606 bp, Homo sapiens
ccaggtcatgcatgaagggagcactgcagagaagacggtggcccctgcagaatgttcataggttcccagcccccaccccacccacaggggcctggagctgcaggatcccaggggaggcgtctctctctgcatcccaagccatccagcccttctccctgtacccagtaaaccctcagyaaatatcctctttgtcaaccagaaatcctgctccctctcttcatttcttatctctcatataatgtgatgcttctcctgggttctcagtgtggcgctgggagaatgctgacaccagtgggaaagtagcctggaggagaggatcaaagccacccacgggtgtcccctggggaaataggccaggataggaggagttcgctcactggacaccagtccctccagtctctccctcctccccttcttccttgcagctcaacccccaactcgctgcctgctttctggagggagctacttctggctgagcctccagatacaccctgtgtccctgtcctggtctggaccctctacccacccacagcctctctttcctcagcctggaaatcctactctgagcctggagcccctcttctggccctgaccctggcccctgga

SEQ ID NO: 520292 - DNA, 606 bp, Homo sapiens
ccaggtcatgcatgaagggagcactgcagagaagacggtggcccctgcagaatgttcataggttcccagcccccaccccacccacaggggcctggagctgcaggatcccaggggaggcgtctctctctgcatcccaagccatccagcccttctccctgtacccagtaaaccctcagtaaatatcctctttgtcaaccagaaatcctgctccctctcttcatttcttatctctcatataatgtgatgcttctcctgggttctcagtgtggcgctgggagaatgctgacaccagtgggaaagtagcctggaggagaggatcaaagccacccacgggtgtcccctggggaaataggccaggataggaggagttcgctcactggacaccagtccctccagtctctccctcctccccttcytccttgcagctcaacccccaactcgctgcctgctttctggagggagctacttctggctgagcctccagatacaccctgtgtccctgtcctggtctggaccctctacccacccacagcctctctttcctcagcctggaaatcctactctgagcctggagcccctcttctggccctgaccctggcccctgga

SEQ ID NO: 520293 - DNA, 606 bp, Homo sapiens
ccaggtcatgcatgaagggagcactgcagagaagacggtggcccctgcagaatgttcataggttcccagcccccaccccacccacaggggcctggagctgcaggatcccaggggaggcgtctctctctgcatcccaagccatccagcccttctccctgtacccagtaaaccctcagtaaatatcctctttgtcaaccagaaatcctgctccctctcttcatttcttatctctcatataatgtgatgcttctcctgggttctcagtgtggcgctgggagaatgctgacaccagtgggaaagtagcctggaggagaggatcaaagccacccacgggtgtcccctggggaaataggccaggataggaggagttcgctcactggacaccagtccctccagtctctccctcctccccttcttccttgcagctcaacccccaactcgctgcctgctttctggagggagctacttctggctgagcctccagatacaccctgtgtccctgtcctggtctggaccctctacccacccacagcmtctctttcctcagcctggaaatcctactctgagcctggagcccctcttctggccctgaccctggcccctgga

SEQ ID NO: 520294 - DNA, 552 bp, Homo sapiens
cattcacagggtgtgtttaaggcggagaagagaatacaaatgcatctmcccgcgtacccgcctagggcatctctgggaaaatatactcaaatactcaagaaacggtgggggaacggggtgggaggaggacttctctctcactgcatatcctttgagtattttgatgatttggacatgtgaacatattcgctcttcagcaagtaaatggttgttttgtttgtttttcattgttccctcaattcattctgagcctgggacaggaaggggcatttccaggtgtctctggggcccagagccaactccctgggagctggagagaattggggaggggaattaagcctggatgggaccccccgtgtgccaaccaccctgcaaatccccacccacccctgtgtgcacaagtacacttggtcctcacaaccaccccagaatgggaaaaagttacaatccctgtctacacatgaggaaactgagtcacacaaccagaagttatggaagcctgtttggagcttgggggtcaggtcctaggcccacccctgctcctccccaggc

SEQ ID NO: 520295 - DNA, 466 bp, Homo sapiens
gatgggaagagaggacgtccacactgtccacgagctcagcgcacagtaggtgctcaggacttcctcccagagactcgacaccccaagtcttcgcgttgtgccccctcgtgtcagagccactctcctctgagaataatagtcaagttcattctaacccccaggcaagggaaagggtccctttctccagggccaggtggggaaggtgagtcagcttcctcacctgggctgattcacacctgtgtggagtgcgggtggggaggagacagagactattcctcccttcgctctggggcagcccattccagcaggcctgagctggaagggggagggattcaagatgaaccaatacccccagaaggggtgatatggtcccgaggcccagagaggggcgaagatgcmtgccctcacacagcacctcagaggcaacaccacgggcagggagccatgaccctgctcctttccccag

SEQ ID NO: 520296 - DNA, 575 bp, Homo sapiens
agggcacgggaagcctaccgcaggacaagggaagaagtcagcgtggagacagggcgggagggccggcctgatggcccaccactcccagcacccagatgggaagactgaggcctcctgacagcaaactctgagctcctgactcctcccaggccaaagacctgaagcggccagtagtgcatggggagagggttggctgtgaccagagaccaaacattcagggatgaagcrggggcgtctgagggccgattaacaggagacccatggaaagagccccagactggctgtggggagtcctgggctaccccagctctcagtcagaccaggaggaggccctgcccctggctgcagggcctggacgccccacttgcccaaggcagccccagcacgttctgccactgggagttcagtggggcaacaggagaggagtctcaggggagggcaggggagggcaggggagggcagagctcccgggaggctctcagccaggcctcttctgagtcctcttcctgtccctgccccctccccttcctgggtcagggccaggtgcgatgggctcaggcagcagtccctcccca

SEQ ID NO: 520297 - DNA, 534 bp, Homo sapiens
tggggacactgcaggacagacctgcctcccacggtggacaaagcggccctggtagcctggggtggggagtccaggccctgagcatcccccggggctgagatgtactcacggttcctgtggctcctgcaggcaaagccctggggacagaacagtgagaggggtgagcggctgagggcaccccctccccagcccatcctgctcctgccctgtccctcactcctgggggtcctgggctgccctgaatcctggcttctcctcagtgtcaggggcctggcccaaggctggcatgcggcggtcacttagtaaacagtgtggtctgaatccctctggaccctcaggccccagctccccgacccacttgtgcgtttaagtggacactagcagagcacccactaygtgccaggctcgcttaggtgctgggattcatgaacagaggaaaactgaaccatccccacctctccaggagctcacattccgagaagggggagacagaacgatccgaaacctgggaaatcagcaacttatattctgtgt

SEQ ID NO: 520298 - DNA, 648 bp, Homo sapiens
tctcattctcagcacgttctccgagtgtttccttggcaggtgtctacacaagcccaggtgttgcgggctcccgatggctcagagcagccgagcggggtggggtgggagccccggatgggcttgcgggctgccctagattctaacacagcctccttggaggtcacaggtgggtccgaggtgggctcaccctgccttgagcttccagcaaacacttcccggagcagctcggcagggtcaggccaggtctcccatccttctttcaccagcgctgccctcggaccccccagggccctgcaacccctcacctgctgatgtgctgagagcgtcaggccagacccacctgaggagaaaccagggccttatctgccacagtgtaggggcctaggaggaggcaggagcttacctgagaacaggagaggccacattctgtaatccgggggatggccaggctctggaaagtgccccaggtcaggcccaagaacgcgagtgcttgcccagccagcatctggctgtgcagtgagarctcccactggtaagcgtggatgtgagtggggcaagtttgcaggatgccctgtggcagcggctccaggctgaccctgcagctccagccccaaagacaaacagagggtggaggctgctcttcacagc

SEQ ID NO: 520299 - DNA, 522 bp, Homo sapiens
cccgggaaaggttaataggggctgatgggggactggaaacgttttgtgtctcaagtgggctgtggctatgcaggtggacacgtaagcaaaatttcwtccacctgtacaaatatgattatacactgtgtgcccttaaccgtatttatgtaatccctcaataaaaggaaaagaaaaatatttgattaattcacaagaagaagaaagagacaaaagaataaacaccaccctgggatgaagcatgaagctgccgcagaccctctgaaagaagtcactttcctgacttgcccatcagccggcacctgctcatgctccgggggtgccaggcccacctctgcccagctcctctctctggtggccgctgtcaagggagtgctgaacccctggccccaggaagaactgggccctcagcagggggcaagaaggccagggtcagcctttggacccctggagtggcaaatggtgatgatgagagtcagcgagccaggagctctgggcccaggcatacatctgccagtcattcac

SEQ ID NO: 520300 - DNA, 531 bp, Homo sapiens
ggtcagctgagaaacgagccaagggcaagagagcgtcctccgggacttagcgggcactggaggctctgcaccaaggttctgaggccggtggtgtgctgaacacaggagggcagggtgtgcagggcaagagcagcggccggtccgcccaggatggcctagaggtggggcaggactcagagccccgctgagtggctgcccaggtgtttgggcatcaaggkgacagtcctagtggtcactgcacctgagggtcagcgggcaggtttgcccaggggagcaccaccaggacccgtagctcggtggggggaagacgctgagcctctgcctttcagatgtgggggcagcaagacagtaggcagggcccgggggaacattgttcaggcagtgacagccagaagttgttgacaccccagctttacggagccccatgtgccaggctgggtgggcattgccttccctgcagaaccgcgtccccaccagagaccagggaaggaaacttcaggacctgtgggagtcctcacaaagccctcttct

SEQ ID NO: 520301 - DNA, 531 bp, Homo sapiens
ggtcagctgagaaacgagccaagggcaagagagcgtcctccgggacttagcgggcactggaggctctgcaccaaggttctgaggccggtggtgtgctgaacacaggagggcagggtgtgcagggcaagagcagcggccggtccgcccaggatggcctagaggtggggcaggactcagagccccgctgagtggctgcccaggtgtttgggcatcaaggtgacagtcctagtggtcactgsacctgagggtcagcgggcaggtttgcccaggggagcaccaccaggacccgtagctcggtggggggaagacgctgagcctctgcctttcagatgtgggggcagcaagacagtaggcagggcccgggggaacattgttcaggcagtgacagccagaagttgttgacaccccagctttacggagccccatgtgccaggctgggtgggcattgccttccctgcagaaccgcgtccccaccagagaccagggaaggaaacttcaggacctgtgggagtcctcacaaagccctcttct

SEQ ID NO: 520302 - DNA, 531 bp, Homo sapiens
ggtcagctgagaaacgagccaagggcaagagagcgtcctccgggacttagcgggcactggaggctctgcaccaaggttctgaggccggtggtgtgctgaacacaggagggcagggtgtgcagggcaagagcagcggccggtccgcccaggatggcctagaggtggggcaggactcagagccccgctgagtggctgcccaggtgtttgggcatcaaggtgacagtcctagtggtcactgcrcctgagggtcagcgggcaggtttgcccaggggagcaccaccaggacccgtagctcggtggggggaagacgctgagcctctgcctttcagatgtgggggcagcaagacagtaggcagggcccgggggaacattgttcaggcagtgacagccagaagttgttgacaccccagctttacggagccccatgtgccaggctgggtgggcattgccttccctgcagaaccgcgtccccaccagagaccagggaaggaaacttcaggacctgtgggagtcctcacaaagccctcttct

SEQ ID NO: 520303 - DNA, 617 bp, Homo sapiens
ctgatctcagccagtcctttgatgtcataagcagggggagactcagcgctggagttgtttcttatcacccatcctgcaggctcaagaatttctgttagtcatcggtttctttaactctttggggcacagtttcaacatcaaggggctgtagggatgtaacccagaaaaggagcaggaaagtccctcggctgccaggcagagcagagtccccgaggatcgagttttaatgacaggagccttggaggatccctggttctcatctagtgacacaccaagcagctttctagttatcatttggcttaacagaaagagtgaaatacacagagcaacagccacaaggattttaaccccctggtcagttacttccccgtgaatattaacatattgtgtgggagcgtatctaaaacaaggacatcagtttcctgccactcaggttagtgacccagagtgcctgacccgggttggctcgagcacacctggagcaccaggtgtctggacctgcccacgcgggcattggcgggtgcctgcttccagagctgtccatccgtggccgcctgtcacaggtcctgcacttcctgctaggacccccagtgccrggcaactttggctcttagcta

SEQ ID NO: 520304 - DNA, 332 bp, Homo sapiens
accacgtgcctcactcagaatggagattattactatcataggttttctttaacgtttttcaaaatagaaaccaagtctttggctttgttcacaaagaataatcaagaatatattggaaacagatgtgcatcaagatttcaacttgaaagaccaaactgtctgaacatggcagcatagacttgaatagctgaagagcattttctgataatttctcattgagccggacatggaatygctatatttataaatggaatttgtagcaatggggcccatgtgctggaaatggttttggcaccactaactttaactccaagtcccctcgcaagcctccc

SEQ ID NO: 520305 - DNA, 336 bp, Homo sapiens
atctgctaaatttttactgcttaattttcccagagctcttctgaktgtgtgattggaatactattagtccataattggatttactattagtttaagacagtgatgctacctgtgtactagacacttcagtgagtattttatgtgctggtaaaatatgatcaagcttgcacaactcccaggtggcagagccagagttggaagtcatgtgctttttctgcctataaccagcaaaatttagtgtggaaattagcatgcatatgaagttctttaaaaaaatgacatatcaactgtataatttttatttcctatataataatactaaaatccaggatttgg

SEQ ID NO: 520306 - DNA, 585 bp, Homo sapiens
tcacctgcccaagatcccaaagccaagtaaatgacgaggctgggatttgagccagttctgacaattccaagatcctctactccagccagccctgaggccccgtccctctgtcrcctgcttccccagggtccaaactccagacagtggtattttcttcccttcctgttgcccagatggtgccggtctctttgtcttgagggtttcttcccctttcctttttcttttttctcacttgcattctttcttttccttttctttttttttttttttttttttttccatctttgaaggatgaaggagcaactccctggatggcatgggaaaacaaaagggactgctgtcccacagcccagtggcagcctcgccacccagagctggaaggtatggaaatgagctgttgtggatgcaaatgaggcttctgggtgatttgcacagagccggcctgggcggggccaaggtggagcaactagggaaggctgtcgggagttttcccaaccttcccccaggtacctggcttctccaggccagccttcccttgagaaggcctccctaaaagctctggcctctgcagcatgaaatatctgg

SEQ ID NO: 520307 - DNA, 585 bp, Homo sapiens
tcacctgcccaagatcccaaagccaagtaaatgacgaggctgggatttgagccagttctgacaattccaagatcctctactccagccagccctgaggccccgtccctctgtcacctgcttccccagggtccaaactccagacagtggtattttcttcccttcctgttgcccagatggtgccggtctctttgtcttgagggtttcttcccctttcctttttcttttttctcacttgcattctttcttttccttttctttttttttttttttttttttttccatctttgaaggatgaaggagcaactccctggatggcatgggaaaacaaaagggactgctgtcccacagcccagtggcagcctcgccacccagagctggaaggtatggaaatgagctgttgtggatgcaaatgaggcttctgggtgatttgcacagagccggcctgggcggggccaaggtggagcaastagggaaggctgtcgggagttttcccaaccttcccccaggtacctggcttctccaggccagccttcccttgagaaggcctccctaaaagctctggcctctgcagcatgaaatatctgg

SEQ ID NO: 520308 - DNA, 572 bp, Homo sapiens
ctggttcttctgatctcaatcagcctacttgtgcatcactggctgattttgctgattattaccgggctctctcaaatgtccagagcttggctctactccacatggtctctcctcctcccccaagctagcccaggcttgttccatggcagcagcagaatttcaggttagcaaatcgaagctgcaagtcccttatggccgaggttcagaacaggtacagaatcacatcatcacatccaccacattctattggccaaaacatgtcacatgactgaggcttgattcaaggagtgggaaacagactctatctctccctctgggaggaactgcaaagccacattgcaaaggatacagatacagagaagggaggcaaattaagaacatttttgcaaacaatcacgtaattttttaatttttaatttttwaattctatttttaaagtttttaccaattttctaacttcagaaaatgttttaatgcatattattggattataccctgctttccttccctctgtttattggccactcatcaattgactctttgcacccgaacactaatctttatatacaccc

SEQ ID NO: 520309 - DNA, 616 bp, Homo sapiens
ggctctgtggcgcgattcttctggtcttggcggggctcacccacgtgtctggtgggcggctagctgctggcaatgagcctgagtgctcctcaccctcccaggctgagctgggtgtgtcctcgtggcaatggcagaggtgcagragagcaagcagagggtacacagccccccgagactcagctcaaggtgggccacagccacttccgctttgtcctgttgaccaacatggatcacagggccaagcccagagtgagaggtgggcaggccaacccagccccggtgaaacgggcagctccaaagaaggtgggagagtggggccatcagtgtgacctagcgccaatgcctgtccccagggctataatctggaggattaagtgaatgaagggtcatgaaaacaccttatgaacaagtgcagaggtctcccacatccagtcaccagtggaggctgccttggtgagtccaggtgccatctctgcaccgcgtcccagccttcagcctctggccctctgggccggccttctcagaagagtcagcttgctcatgctgaagcacaattctgatcatgccacttccctgctttaagctcacccacagctccccactgccctctgggcct

SEQ ID NO: 520310 - DNA, 541 bp, Homo sapiens
tgctgaacactgacaccaaaagggaatcagtcaatcactgctcctttgaacggagtttgtggcttgacacttcttcactgcagaatctcttaatggacggaaccaagtcttcacttctctctttcatatcctgtagcgggtagtgcagtgctgggcccactaagagatggcagaagcacagcataagttagttgcaagagcatagaatcaccatctcttttgacaggtgaggaaattraggcctagattgctgggggcttgcctacagtcacacagtgagtggtggacagagctggaacaaggactcagaccccttcctagcccagagctctacccactctttgctggccttgggtcttgctcctcccagcagatttgggtgttccctccacagtgctccccaagggccttgcacagaccgctgtgaaagcatgtaccagaatctgttgtcacaaaatacgcagggttttggagaccagggacctcgtgtcatgtctccggacctacggcttcttctgtaagcctggcccacagaaggcac

SEQ ID NO: 520311 - DNA, 541 bp, Homo sapiens
tgctgaacactgacaccaaaagggaatcagtcaatcactgctcctttgaacggagtttgtggcttgacacttcttcactgcagaatctcttaatggacggaaccaagtcttcacttctctctttcatatcctgtagcgggtagtgcagtgctgggcccactaagagatggcagaagcacagcataagttagttgcaagagcatagaatcaccatctcttttgacaggtgaggaaattgaggcctagattgctgggggcttgcctacagtcacacagtgagtggtggacagagctggaacaaggactcagaccccttcctagcccagagctctacccactctttgctggccttgggtcttgctcctcccagcagatttgggtgttccctccacagtgctccccaagggccttgcacagaccrctgtgaaagcatgtaccagaatctgttgtcacaaaatacgcagggttttggagaccagggacctcgtgtcatgtctccggacctacggcttcttctgtaagcctggcccacagaaggcac

SEQ ID NO: 520312 - DNA, 575 bp, Homo sapiens
actcaagcagcattgtggagagatccacatggtgagggactgaggcctctggcccacagccagcatgacctggccagccttgtgagggagccaccttrgaagtggatcctctctcctgtccagccttagatgactgcagccctgaccaacatcctgcccacaacttcatgagggatcctgagccagaaccacccagccaagccagtcccaaattcctgatcctcacaccttgtgtgcaagaagaaatgctgattgttttaagccactacgttttggagtaccttgttatggagcaaaattgaatccaacactttctaagtagttgttgtataaagaggtggagagatggatgctgaatgagaataacaatgattctcactccctgagccctctctgtgtgctaggcatagtgctaagtactttacatgtgaaaccgtcacacagccttatgagaaggctgctaccctctacccattttatagatggagaaataggaacagtgaggttaaattactcacccaacatcccaccagcagtcctggggctttgcaccctggcagattgggaccagaggc

SEQ ID NO: 520313 - DNA, 575 bp, Homo sapiens
actcaagcagcattgtggagagatccacatggtgagggactgaggcctctggcccacagccagcatgacctggccagccttgtgagggagccaccttggaagtggatcctctctcctgtccagccttagatgactgcagccctgaccaacatcctgcccacaacttcatgagggatcctgagccagaaccacccagccaagccagtcccaaattcctgatcctcacaccttgtgtgcaagaagaaatgctgattgttttaagccactacgttttggagtaccttgttatggagcaaaattgaatccaacactttctaagtagttgttgtataaagaggtggagagatggatgctgaatgagaataacaatgattstcactccctgagccctctctgtgtgctaggcatagtgctaagtactttacatgtgaaaccgtcacacagccttatgagaaggctgctaccctctacccattttatagatggagaaataggaacagtgaggttaaattactcacccaacatcccaccagcagtcctggggctttgcaccctggcagattgggaccagaggc

SEQ ID NO: 520314 - DNA, 575 bp, Homo sapiens
actcaagcagcattgtggagagatccacatggtgagggactgaggcctctggcccacagccagcatgacctggccagccttgtgagggagccaccttggaagtggatcctctctcctgtccagccttagatgactgcagccctgaccaacatcctgcccacaacttcatgagggatcctgagccagaaccacccagccaagccagtcccaaattcctgatcctcacaccttgtgtgcaagaagaaatgctgattgttttaagccactacgttttggagtaccttgttatggagcaaaattgaatccaacactttctaagtagttgttgtataaagaggtggagagatggatgctgaatgagaataacaatgattctcactccctgagccctctctgtgtgctaggcatagtgctaagtactttacatgtgaaaccgtcacacagccttatgagaaggctgctaccctctacccattttatagayggagaaataggaacagtgaggttaaattactcacccaacatcccaccagcagtcctggggctttgcaccctggcagattgggaccagaggc

SEQ ID NO: 520315 - DNA, 629 bp, Homo sapiens
acaggtgcaacagcaggtccaaagtcatctgaccttggcccaaatcaacagaaccatcaaattgacttatagattcatgagaaataataaattcttgttgttttaagcccctaagctttgagggatagtttgttatgcagcaatagatagctaatagagttggggtttttttaatttgttttttcaccacttttgaaaggtttgtttggaatggcctggcttaaaatataggtggtataaatgaaagcttttctgggagcatcatgagttactgcaatcaggaaggacattgtatgttctaagatgatgcagtggaggaaatggacaatggcctcaaataggaaccccaaattaaaggccataaactgagttgcagatgctaatttgtgatccggttgcatctcacacaggtaactcttagaggcacctctagggtgagttacagtaaggatttatttatttaacagtagctaatggttcttccaagacatgccagggagccaagctggaatattaagtaaattaatggcatacagsaggtactccgtgtctttatacaattttcagagaatggagaagaacagattctagaagcactagacgcatttaaaagccttcatgacagagtt

SEQ ID NO: 520316 - DNA, 272 bp, Homo sapiens
tgctttagagggagggaatgtaagccttcgttctataaacatttgttatgcccctttgaggtgccacccytttagtggacgctgggacaggccaagatgagtgcaccacaatccctcccctcaagggcattgcgatctggttgtcgggggagggaatagatatgaaaattaagtataataaaggatgtcaaatgctgtgattgaagtgtattcattgggggcatttctaactggtgccctctgagtcaaattcagccctttagcatattttg

SEQ ID NO: 520317 - DNA, 513 bp, Homo sapiens
cagctctggcttgtgcagtggggagcttggatcctggtcctgtgggtcactgcaactcgggtctctccctgagccttaatttccccaactgtaaaagatagctattaggctaaagcagtatttctttcaatttgccctgtgggccatctgcttcaaaatcactcacacacgatttaaaatgcagatccccagagcacactctagacctattgaatcacaatctggggtggggcccaggaaccttcatgcttaacaagtctcacaggtggttcttatggattattacaggctgagcatcacagttttgtggttaaatattctgtgtggttgaactccaaactcctttctattctttgtcaggcagaaagcgattgrcctgggctggttagcctggttctcatctccatgctcaaaagctatgtcaggctcctgggaagggatgctattgatacctggctacttgcctagctgctgtggcctcccacaggtcatggacaggagccacagcaacca

SEQ ID NO: 520318 - DNA, 599 bp, Homo sapiens
attctgcacccttaaccccagctgggctttcctctgggtatagacacccataaatacacataataaaccctatgagagaagagatttttctagcatttgggttctatttttcatatacaatttatataatgcatgatcattgctcctgtttattgagcacctactacaggctggacaatcagttcagcagtgaacatkcatcccctcttttacttccataataaccctaggaagtagttattaatagtcttcaccttatacagacaagtaaatccacatttaaaagttagtcacataggacagagttctgatatgtctgattccaaataaacctgctgattccagagggtacatgaactcatggggtccccaaacacaaaagtcttagaataactcatagatgtgtgctgctgtgctgatgtgtgctgctgtgctgatgcaggctgttctttatggactgaaaaatgtatgtgttacagtttataatgccaaaagagtgtataaatatacacagtatctttaattgatttttcttctcacctttgaggcccaagaacataacccttagtcaggaaaatctcccagcttggtttgcagga

SEQ ID NO: 520319 - DNA, 599 bp, Homo sapiens
attctgcacccttaaccccagctgggctttcctctgggtatagacacccataaatacacataataaaccctatgagagaagagatttttctagcatttgggttctatttttcatatacaatttatataatgcatgatcattgctcctgtttattgagcacctactacaggctggacaatcagttcagcagtgaacatgcatcccctcttttacttccataataaccctaggaagtagttwttaatagtcttcaccttatacagacaagtaaatccacatttaaaagttagtcacataggacagagttctgatatgtctgattccaaataaacctgctgattccagagggtacatgaactcatggggtccccaaacacaaaagtcttagaataactcatagatgtgtgctgctgtgctgatgtgtgctgctgtgctgatgcaggctgttctttatggactgaaaaatgtatgtgttacagtttataatgccaaaagagtgtataaatatacacagtatctttaattgatttttcttctcacctttgaggcccaagaacataacccttagtcaggaaaatctcccagcttggtttgcagga

SEQ ID NO: 520320 - DNA, 599 bp, Homo sapiens
attctgcacccttaaccccagctgggctttcctctgggtatagacacccataaatacacataataaaccctatgagagaagagatttttctagcatttgggttctatttttcatatacaatttatataatgcatgatcattgctcctgtttattgagcacctactacaggctggacaatcagttcagcagtgaacatgcatcccctcttttacttccataataaccctaggaagtagttattaatagtcttcaccttatacagacaagtaaatccacatttaaaagttagtcacwtaggacagagttctgatatgtctgattccaaataaacctgctgattccagagggtacatgaactcatggggtccccaaacacaaaagtcttagaataactcatagatgtgtgctgctgtgctgatgtgtgctgctgtgctgatgcaggctgttctttatggactgaaaaatgtatgtgttacagtttataatgccaaaagagtgtataaatatacacagtatctttaattgatttttcttctcacctttgaggcccaagaacataacccttagtcaggaaaatctcccagcttggtttgcagga

SEQ ID NO: 520321 - DNA, 599 bp, Homo sapiens
attctgcacccttaaccccagctgggctttcctctgggtatagacacccataaatacacataataaaccctatgagagaagagatttttctagcatttgggttctatttttcatatacaatttatataatgcatgatcattgctcctgtttattgagcacctactacaggctggacaatcagttcagcagtgaacatgcatcccctcttttacttccataataaccctaggaagtagttattaatagtcttcaccttatacagacaagtaaatccacatttaaaagttagtcacatargacagagttctgatatgtctgattccaaataaacctgctgattccagagggtacatgaactcatggggtccccaaacacaaaagtcttagaataactcatagatgtgtgctgctgtgctgatgtgtgctgctgtgctgatgcaggctgttctttatggactgaaaaatgtatgtgttacagtttataatgccaaaagagtgtataaatatacacagtatctttaattgatttttcttctcacctttgaggcccaagaacataacccttagtcaggaaaatctcccagcttggtttgcagga

SEQ ID NO: 520322 - DNA, 432 bp, Homo sapiens
taatggttgggaagaagacataagaagcaagtcttctggaaaaagatatttgccctttcattcattcatttgaatttaccgagcacttcctatgtgtcttagttcaacctgctataacaaaaatgccttagatagggtggcttaaacaacagaaatttatttctcacatttctggaggctggkaagtccaagctcagggcgccaacagactcagtatctggtgagtgtctgtcatctctctttctgctttgcagacagccactttctagctgaattctcatatggccaagagggacagagagcccgggtctcctcatcttagaaatgaactaatctttatcatgggggccctatctttatgatttcattttaacctaattaattcccaaaggctccacctccaaatgtcattacattggtgataaggccatc

SEQ ID NO: 520323 - DNA, 529 bp, Homo sapiens
cttttggagagttcacataaaatatccatttttacagagattggcttgagctctggggaagacttttggacataccaaagtacatacttcgaagccactctggtctttgacttttaccttttgagctgttaygaccaaaggcctcaggattgaggtatttaggcatgcaaacccttcagggaactgaaaatcagatttactgacgggtttacagctgcctgtcacaggctggtgtttcctatttgtgatgcactgggttcctgtggttggggataaaaaaacctgctattgttgcagctagagggtgtttccccctcaaagccctcactgcccctgccgcccacctgcacccctgcccagtgtcctcattctgtcttcttccgtccttgtagtatctaccaaaacctacacaaagggggttggagccagtcatctaaattacaatgtggtcaaatggtgaagtgttgcttgaaatgttgacttttccgggattaatcatcatcttaaagagaaaataatctcagtattc

SEQ ID NO: 520324 - DNA, 533 bp, Homo sapiens
cctagagaattacatgtccctgcacgcacggagaataaagccaggaacgataagtggtaaattatagggaatttgggcggtggtgacatagttaacgccattctcgccctgctgggacgcgcactttgcgtttctgaaattctcagtctatatggtgtgatatcccaggaaagctgcccgagtcctcccatttgttgagtacccttcgattcattctgtgggtaaatcaactgttagtagaggaaattgaaattgtttamatattcaaagccgtgagtgcgggggcgggacgttagggtagatggtgaccaggaggaatttccaacattttcccgtcttaagatctggagcccagcagggccataattttccactcagttgtaattggtgccaagtagcttttggacattccaagaccacagatgtttctctcaaattgtcctcccaccctgttaaaatctgttggggagcgtagcttacttgctctctcaccagaaacgcggagaaggtggatgcaagaaggactttgcgga

SEQ ID NO: 520325 - DNA, 593 bp, Homo sapiens
cctgtctgcgataggacatcaccggcgattaatgctgagatccttcccacgttgacttcccaggtctcaactccaacttccatccccgtctcatttcgctggcggccaaggagccgaaacgttcccaacagggtttaatatacccaataaatccccgggagtacacaaagaaatagcctacccggggcctcagtctctgcaccccacccccacccccaagcgcggccaatcaccgggcgggccaggctgggctcgcaccgcggctctgagcaacacctccccacgagctaccgccgcctcccctccaggcgccaggggcccggttggcgcgaacgccgggttccgagcaccctgggcttccttgtctgcctcccagcgcggcacctcttcggggctcccgaaacctgagctctcgctggttttaggtccagackggggcctctccaccggttcctcccccgccccgggctctggggcccattctttgggctgaccctgtcagggcagagtccgcgcgtctgcctgccattctccgcccgcataaaagcacgttgaaggtgtctcgggcagacacctccaggttttgaatcagt

SEQ ID NO: 520326 - DNA, 436 bp, Homo sapiens
atcagtgaatgtcagagctgcagccattcttcaggagtgtcaccagcctgctgcgggttttttgtctttttgtttttgtttttggagggaggagtggtttagcttgtcttgttgttcaattgtagccagactttcaaattgcttacctttgggaaatgaaccgagaggtcatagggaatataggtatctttagggcatccaaaaccatayacaaagtgattacttacatggagactagtaatgattaccttgactccaagccaatcaatggtggagcctctggggactcattaaatggcatttgtggactctgtaacctagcttttgagctgcatttcaggaaaagcagtgacagcctttaatgtctaattgacctcttctctttgtttcactttcattcactttccatatttgcctctgatgtggtccctaatgg

SEQ ID NO: 520327 - DNA, 627 bp, Homo sapiens
cctgctgtggtttgctgcatgagtccagggggtaggctgggtacacaggacaaatcccaacctgggaacaagggtgacatagccttaggacatggtgattacagatggagtttgacagagcagactccagggcccaaattggagactgggcagggatggtggaatcattggawcatggtgcctgctggaagagttgcctgcaagaggtgccaagccctgatttcccaacaacaccactaagctgagttccacttccctacactgctgtagggaagtacttcatctactgctgtagaagccaagcaagcaagtgctaaatggctcttgcattccttctgttgtttccaagggggtccctaatacactgcacaatcgttaagtaattaatagaagcagagagttcagaacgacggagaaggaatttaatgaaatttgtttttaagggtaacgaattattgataatccaaaggtgttggctctagttagcataaacctcttcctgggaaattaggtgttctttttagagtaaatttgaattgggctatctctcaaagggaaaatcattctaagagtgcatcttcccaaaaattctggttttgcttttaaacctttgaaaaattattattg

SEQ ID NO: 520328 - DNA, 627 bp, Homo sapiens
cctgctgtggtttgctgcatgagtccagggggtaggctgggtacacaggacaaatcccaacctgggaacaagggtgacatagccttaggacatggtgattacagatggagtttgacagagcagactccagggcccaaattggagactgggcagggatggtggaatcattggaacatggtgcctgctggaagagttgcctgcaagaggtgccaagccctgatttcccaacaacaccactaagctgagttccacttccctacactgctgtagggaagtacttcatctactgctgtagaagccaagcaagcaagtgctaaatggctcttrcattccttctgttgtttccaagggggtccctaatacactgcacaatcgttaagtaattaatagaagcagagagttcagaacgacggagaaggaatttaatgaaatttgtttttaagggtaacgaattattgataatccaaaggtgttggctctagttagcataaacctcttcctgggaaattaggtgttctttttagagtaaatttgaattgggctatctctcaaagggaaaatcattctaagagtgcatcttcccaaaaattctggttttgcttttaaacctttgaaaaattattattg

SEQ ID NO: 520329 - DNA, 579 bp, Homo sapiens
aacttccaacttcatatcctatgtgagtatctcaaagtcctaacatgtccagaaaatccttatgcctaccctactctttctcatactatgtttgttgctcaaacaaaaacccagaaatctatcctggatttctcaatttctgtcagcccccatactgcatccaarcttgttaattctggttccaaaatatatttcaaattcttacttctatccccagtgttaccacggtagtagagacaactatatgccatttggattaccataacaacattttccaattaacccaacttgcacttatttttttttacacacatattttacttttttttttcagtaaaacaaagattccaaaactttttagaatgttagaactagagagttggagtagaaatatatctatctggtaggttttcattagaagactaagattttctcttagaaattggaacagatactaggctgtttccatggttacctactgaagcctttctcctttaatggaaaggtatcatttctgtacacaccacatgtagcttcatgctttgtattggatcaaatcctttgaaagcagaataaaag

SEQ ID NO: 520330 - DNA, 579 bp, Homo sapiens
aacttccaacttcatatcctatgtgagtatctcaaagtcctaacatgtccagaaaatccttatgcctaccctactctttctcatactatgtttgttgctcaaacaaaaacccagaaatctatcctggatttctcaatttctgtcagcccccatactgcatccaagcttgttaattctggttccaaaatatatttcaaattcttacttctatccccagtgttaccacggtagtagagacaactatatgccatttggattaccataacaacattttccaattaacccaacttgcacttatttttttttacacacatattttacttttttttttcagtaaaacaaagattccaaaactttttagaatgttagaactagagagytggagtagaaatatatctatctggtaggttttcattagaagactaagattttctcttagaaattggaacagatactaggctgtttccatggttacctactgaagcctttctcctttaatggaaaggtatcatttctgtacacaccacatgtagcttcatgctttgtattggatcaaatcctttgaaagcagaataaaag

SEQ ID NO: 520331 - DNA, 541 bp, Homo sapiens
caggctagacagcagtgtctcaccaatctgagtgtcccaagagtctggaagaagtgaaaaattcattgaaggaattataaaacatagctgaaagctttaaaaacagactagaccaagcagaagaaagaatctcagagcttgaagatatgtcttttgaattaatccagtcagacaaaaataaataaaagaatttaaaacatgaacaaagcctttgagragtatcaagttatgtaaaacaccagaacctaggagtcataggtattcctgagggaaaagaaaaagcaaaaagtttggaaaatctatttgaggataaaattgaggaaaacttcactagtcttgctagagattcagacatccagatacaagagactcggaaaactctagaaaatacattgcaaggacttcacaagacaaatagtcatcagactaaagtcaatatgaaggaaaaaatcctagtgttgggaggaaaatagcatctaaacacctataaaggaaatcccaacagactaaaagcagacttcccagcagaaactgtataagc

SEQ ID NO: 520332 - DNA, 565 bp, Homo sapiens
atgtggaggtgtgcgtgtgcagctggaggtgtgtgtgcaggtggaagtgtgcatgtgcatgtgraggtatgcatgtgcaggtggaggtgtgtgcatgtggaggtgtgtgtgcatgtgaaggtgtgcgtgtgcatatggaggtgtgcgtgtgcatgtgaaggtgtgtgtgaaggtgtgtgtgtgcaggtggaggtacgtgtatgcaggtggaggtgtatgtgtgcagtggaagtgtacgtgtgcatgtggaggtgtgtgtgcgcatgtggtgtgcgtgtgcatatggaggtgtgcgtgtgcatgtgaaggtgtgcatgtgaaggtgtgtgttcaggtggaggtacgtgtgtgcaggtggaggtgtatgtgtgcaggtggaagtgtacgtgtgcatgtggaggtgtgtgcgcgcatgtgaaggtgtgtgtgtatatggaggtgtgcgtgtgcatatgcaggtgtgcgtgtgcatgtgaaggtgtgtgtgtgcaggtggaggtacgtgtgtgcaggtggaagtgtacgtgtgcatgtggaggtgtgtgcgcgcatgtgaaggtgtgtg

SEQ ID NO: 520333 - DNA, 565 bp, Homo sapiens
atgtggaggtgtgcgtgtgcagctggaggtgtgtgtgcaggtggaagtgtgcatgtgcatgtgaaggtatgcatgtgcaggtggaggtgtgtgcatgtggaggtgtgtgtgcatgtgaaggtgtgcgtgtgcatatggaggtgtgcgtgtgcatgtgaaggtgtgtgtgaaggtgtgtgtgtgcaggtggaggtacgtgtatgcaggtggaggtgtatgtgtgcagtggaagtgtacgtgtgcatgtggaggtgtgtgtgcgcatgtggtgtgcgtgtgcatatggaggtgtgcgtgtgcatgtgaaggtgtgcatgtgaaggtgtgtgtkcaggtggaggtacgtgtgtgcaggtggaggtgtatgtgtgcaggtggaagtgtacgtgtgcatgtggaggtgtgtgcgcgcatgtgaaggtgtgtgtgtatatggaggtgtgcgtgtgcatatgcaggtgtgcgtgtgcatgtgaaggtgtgtgtgtgcaggtggaggtacgtgtgtgcaggtggaagtgtacgtgtgcatgtggaggtgtgtgcgcgcatgtgaaggtgtgtg

SEQ ID NO: 520334 - DNA, 485 bp, Homo sapiens
attatcttttaaagaatctatctccaaataaggtcattatttaaggtactgagggttaggacttcaacatatatattctgggggacaaaattcaacacacagcagatgggaacatatttaataaccaaggttctaagcaaagttctgaaaagaaaactttttgtagtaaatatgctagcatagacaagttccttgtgttttccaacaggtttgcttcaaaatcaatccttacagcttcaagaacaggagaaactcttaacaaagaaaggtcagcaaatttattaccacaaattctaagatattgctcttctcttacctgcctagaggcagcgggatggactacatgacctcctggagtcccagccagttctgggagtctgttaagtccgggatgtgtgggagctttttaaggastgatcattggctctgaggacacttcaactagttagccttctatcttgaggtatataaactgtgaaaaaggg

SEQ ID NO: 520335 - DNA, 572 bp, Homo sapiens
gagaagaagagtcaccatcttgtcagtcatgattgaccttggttatcaagtggagataaggctgctgttatacaataagggcagaaagtaatatcaatggaatgcaaaggattctctttgagtgcctcctggtactctcttsaccagttgtgatgaggcatgaaaaagtgcagcaactctgacttgattaaggggtcaggagctcagacttcgcagaaatcagggtttgacaccaccagataagcccttgagacagaaagaagtgatagcttagtgtgaataaaattagcatggttagttgaagaggaagatgatgagtaccattgcaaccctatgaacaactgtagagattggtactgcggttaatcccactaatctccttcttctaagtttccaggaaaagaggctactataagccagggagatgttgaatgatattctgaaatgttcaaggcaagaaatgctctctccttgcagagactgagtaaaagactgaacataatagggggaactggggtttggccatttatatacaaggagaaattcttgtaacaggcaatctttgccctgga

SEQ ID NO: 520336 - DNA, 572 bp, Homo sapiens
gagaagaagagtcaccatcttgtcagtcatgattgaccttggttatcaagtggagataaggctgctgttatacaataagggcagaaagtaatatcaatggaatgcaaaggattctctttgagtgcctcctggtactctcttcaccagttgtgatgaggcatgaaaaagtgcagcaactctgacttgattaaggggtcaggagctcagacttcgcagaaatcagggtttgacaccaccagataagccctygagacagaaagaagtgatagcttagtgtgaataaaattagcatggttagttgaagaggaagatgatgagtaccattgcaaccctatgaacaactgtagagattggtactgcggttaatcccactaatctccttcttctaagtttccaggaaaagaggctactataagccagggagatgttgaatgatattctgaaatgttcaaggcaagaaatgctctctccttgcagagactgagtaaaagactgaacataatagggggaactggggtttggccatttatatacaaggagaaattcttgtaacaggcaatctttgccctgga

SEQ ID NO: 520337 - DNA, 681 bp, Homo sapiens
ttttattctgggatttgatgttacaggatgttagttatctgtgatatgattatatatttgtgaatatataatgtgaaatatatatatgatgtatgtaataatccagaatttcatgtaggtactggtttatatactttttctgcttttgtgaccctagttttaaaatgctatataccttttataaaaatgagttagatattgatttaaaacaattatcagtgcctttttcatttgctttttgaaaatgtgacatttcaaattattattgttagtattatcacaaaacaaagatttgattttattatatgtaaactaatttttcttcctgatcttaargtgatgttctggagttcttaaattctactgagaaagtataagccgactatagactttttcatagttgaattaaaaaattaaattgtgtgtcatatatcatcaaactcagttccttacttgctaccatagagaaagtgtgtctctgaggttctctgttttattgatacagtcatatcctcatttgtgctatattacataaagtacatgtggcctttatagttatatgaaagatatgttaccagccacattgatctctatgtaaattaattacatatttctagttaggttacacaacaaagcctacttgctgactagcctataaataaagattctttaaatgcattt

SEQ ID NO: 520338 - DNA, 587 bp, Homo sapiens
ccagcatctatgtctgcagctcaattttataggccgctctttgttagaaaggagaatgatttggggctgcttttcattaagaggaaaaccttatgaggacattcgtaccctcagtatctgcctaagtaatttcttcttaactcctgtatcattgccccctgtggagtgctaacccttactgctgtgagaggtattgtatgacaactctttctgcctacttcctgctgaaaagagacattatgcrgggaacagcagctatggctcctcctgtggtcaatctaagggtcctaaggagaaaggcatggtcatttgtggttctgtctgcagcaccatttggagtttgattgctgtcagccattccaatgagttgtaacactagtgtgcctccaccagatgttgctgaaacattaatataaaagtagcatttctttcaggacaagtggcattggatttgtgtggctaaagtaactttagcattaaccttggctaaatctttcctacaattattaatcccttcatgacttccatagaccattgcaaacatgcttaaactttccgacttgtcctaaacaaccttctttttaaac

SEQ ID NO: 520339 - DNA, 550 bp, Homo sapiens
gctggctgcaactctatcaatagtcacatcacacatgacataacaggaagacaggtggattctccacacacactccacattgagtgatgcctgctgtgtgcagtactatcagcttccatgtctgagtattcaaaacagctttcagaaatacatcagaagtattcttttaaaaaataaaaataaaaaacatctttattatgattattttcatcagaaataagccacctaacatctgtgaggctctaaaaytcagtggtcttcttttttttttgagacagagtctcactctgtcgcccaggctggagtgcagtggcacaatctcggctcactgcaacctccgcctcctgggttcaagccattcgcctgcctcagcctccccagtagctgggattacaggcacgcaccaccatgaccagctagtttttatatttttagtagagatggggtttcaccatattggccaggctggtctcaaactcctgaccttgtgatctgcccacctcagcttcccaaagtgctggaattacaggcgttagccaccacgcccggc

SEQ ID NO: 520340 - DNA, 383 bp, Homo sapiens
cactgcgttggtggcagagccaaaagtccaccctcatcctgctgaatgactgcaaagctgggctcttcactcccagatgacagtgtttctcctcactcacattcacccacccacacagagcagaaagcaggaaggtttccatgcccgcactgacggtaagttgtgggaggcagtcgggcaacatttctggagttcctatgaatgatgtgctatgctttttggcctgcagacgttcaggtggactcagatctgagacatattcaaaagtatgtttgcatcctggcccttggtttatgtatttcctcttccctagggcattctacaaagcatttccaaaaagsctggtccctgccccttaactggttcctcctcctggcaacagc

SEQ ID NO: 520341 - DNA, 629 bp, Homo sapiens
tggataaaaccacccacattattaaaggtaccttcttttcttaaagtgaacagattgtagatgttaactacatctacaaaataccttcatagaaacccctagatttttgtttgattcaataactgaatactatagcctagctaagttattaataacacacacagacacagacacacacacgcacacacacaaactaaaaatcaaccatccaacaacttgatttttttttcatggcctgtgtgtatagcttttaaggagtggaggaaagaaacacttaatttttttcatggtcttcatttacagcttttgtagcagcagagggaaagcttcacctctgctttctgcaggtttctctgaaataaactgagaattggcagattaataagagaaaaggaatacaaatttattaatrtgcataaacatgggaaccgtatatactacaagactcaaagaagagccagatggttgaggtttaattaccttcctcatagggaaaagggaagtgggatgatgtaggcaattttagaatggtagtaaataatttttagtaaaaatgaatagaacctgcagacagatgctaaatctttctttcagaaaactgaaaaaggctggcaaattatgagaaggtg

SEQ ID NO: 520342 - DNA, 553 bp, Homo sapiens
tgcctcccgggttcaggtgattctcctgccttagcctcccgaatagctgggactactggcgtgtacccccacgcccagctaattttcaaatttcttttttttwagtagagacagggtttcaccatgttggccaagatggtctcgatctcttgaccttgtcgtttgcccgcctcagactcccaaagtgctgggattacaggcgtgagtcactgcgcctggccaaaagagacttttgataaccaaaatgtatctgatttatgaatgcttaacagataaggtgaattccaattttttggaagaggcagtctgccatgggctctgagcattcctatgcacccttgctgagactgacattctgcaatgccttattgtcctctcacgctaagcagtttctgtagctactcatgtaggcaactgagtgggtcgaggcaatgtcagagtgactactacggaactactcactctgtaggtttgggggactggtttgtttatttcttgctaccagggcgcatagcctttaactcttggtccctcagcctagggcacaactggc

SEQ ID NO: 520343 - DNA, 655 bp, Homo sapiens
ggtgcccacttattgggaagaaaaggtcatcccgaaacaatcccggctggccaagctcagattctaacttttctctcccaacgggcgcctccctcaacaatcccgaagatccttgtggcccatgccccgtggcctccctagcccgcggcgctgtagcccaccccttcctcgacgccccgggcccttgcggccgccgtttgtgatgaacaggaggggagggctcggacttgcgacccaagaaagtgtacttgtcacatggagcgggagagagttgcttccagttcacctactccaggacccagaggtgagggaaggggcccagacatccatgagacctctcttgggtcccagaaacgctaaccctggggtcaaggacatctagctgggttcccccgtgctagggcgagatggcctagcccytcctcgttctgggtcccgaaaaacataggaaaagcccgcatcaaagcaaaaggggaagttcttcgggccgaacaacgaatacggcgggccatgagcagcggcaagggtgggccagcgccggacacgttctgatagagcgtggtgtcggagctccctggaagaagcaggctgggcacttagtgtccagtttccacccagaacaaggtggcattctggcggcccggcccaggcaggc

SEQ ID NO: 520344 - DNA, 524 bp, Homo sapiens
cacagctgttaattcataaaacagaacacttcataaaattaaaatagtgttaatattttattttattttattttattttattttattttattttattttattttattttatttttgrgacagagtctccctctgtcgcccaggctggagtgcagtggcgcgatctcagctcactgcaaccttcacctcccaggatcaagcgattctcctgcctcagcctcccgagtagctgggattataggcgcttgccaccgcacccagctaatttttgcatttttagtagagacggggttttgccatgttggcaaggctggtctcatactcctgacctcaactgatccttctgcctcggcctcccaaagtgctgggattacaggcatgagccactgcacccggccagtattttataattttttaatgttagtgattattatacctttggtcatctctctccattcactaggaagtcaatttcaacatacagaaattacctggtatgcttactctcccaatatgacagattta

SEQ ID NO: 520345 - DNA, 576 bp, Homo sapiens
aatttattctgtatttggatctatttctggaccttttactctatttcactggcttgtgtactcatgtgacattaccacatagttttaattatagaggctttatagtatgttttaatacctggtggggttaatcaccatcattacattttttggggggtggcttatagttattccttcatgtttattttcccttataaatcttaggcaatttggtttctgagttgatgcatttaactactrtgctatgctaactttctaggatatttattagaaaaaagtcagggaaaggggtgagtgaccattcattgagttctgggagattgaatgattggtcccaatttttccctcctccctgtgtccataccctttcccccttggctttgtgcttgcccatgtgatttgctttgcttaatggcatatgggtagaagtaatatgtcatttctgaggctaggccttacaaggctttgcctgtactggcttgccttcttgcccctttgcaccactataagaggatacataggtaattgctgcctcccagtctcagctccagaatggaagacatgtagagcatagtt

SEQ ID NO: 520346 - DNA, 576 bp, Homo sapiens
aatttattctgtatttggatctatttctggaccttttactctatttcactggcttgtgtactcatgtgacattaccacatagttttaattatagaggctttatagtatgttttaatacctggtggggttaatcaccatcattacattttttggggggtggcttatagttattccttcatgtttattttcccttataaatcttaggcaatttggtttctgagttgatgcatttaactactatgctatgctaactttctaggatatttattagaaaaaagtcagggaaaggggtgagtgaccattcattgagttctgggagattgaatgattggtcccaatttttccctcctccctgtgtccataccctttcccccttggctttgtgcttgcccatgtgatttgctttgcttaatggcatatgggtagaagtaatatgtcatttctgaggctaggccttacaaggctttgcctgtactggcttgccttcttgcccctttgcaccactataagaggatacataggkaattgctgcctcccagtctcagctccagaatggaagacatgtagagcatagtt

SEQ ID NO: 520347 - DNA, 581 bp, Homo sapiens
tggcactcacaggtgaccccatgtctcatctgatagcgaaattgggtgrtcaggcagaagcctacctggagcacagagcatgtccctgtatgggccaccaaaaattgcaaccaaaaagtgggttagttgcttgctgaatgtagagtccaattaacaagagtgagtcctggtactttccagaaaagtgattttatttccaaagctagtttgggggagtgcacaaagtgtccagctttaaatgtactgcttcacctttggaagaaaaagtgggcatttatataatgtaggggaggaaatgagcaagggcagggctcttctgctagccttatctgtaccttatctactgggccgttgtgttgccaccttcctgggcagaagtaagttgtaaaagtggctaagtgggcatgctctgggcatgtcctcctgaggcaacaccctggaggtgggagttccctcttggagcacacagatgaacttgccctgtaggaaatgcctggagagggggaggtgagaagttattttgcacttgaaaaagggctaaatggaaagtaggaggaaaggggaaaggcgaaaagagaaaa

SEQ ID NO: 520348 - DNA, 663 bp, Homo sapiens
cctattttacagtctatgaactgtgctgtcttaatggctgtaaaattgagacttcgtgccatttttcagtttgaggtctttctggttcataaacttttcttttgcatgcatagtaaactctcaaaattctaacttgatctgattttgacacacataatatacctagtgtcttaaaatacaaacaaggctrcatattttataaaataatctagtgacctgccatatcagttcttctggcttttctaagtctaataataccacttatatatctttaaaagtatatttagaaaaataagcatacttggagatcacttaatgattctctatttacttttttttttttattaaatataccaattactacacattttgttaaagtccttctaaagagagaattgtacatttgagggttgggcttgtagtatcttataaggctgaacctgtcccattcccttagaaaaaaaacgcataaaataagtagtgcacataaagtaatgaaaaaatatctccattgttctttaaaaatatacattttttctctattaaaagcaatgcatgtttctttaaattttgaaaaattgagaaaaatagaataaaaaactaatcattgctgaaaacaaccattattaaaagaaggattcattactcttgctatcatcttga

SEQ ID NO: 520349 - DNA, 592 bp, Homo sapiens
ctatgtatgtagttacctaatgtagtaaaatcaaatagaattattagtaacatcaattatgtatcagggcatatcacagacacagtttcaaaaaaaagggactactaaataccaagcaaacttgttcgaaaatgaaagcacaagaaaagcacagtctagatgtgaaattaggcaatttggaacataaactgaatctgagtaattgcagcattgatatctacaaggcaaggatatctatcacctggagacggcagagattaactggtcagtcagtgggttcgtagttagccggatggccaaaagatctggctctaatttggtatttttcctcccaatcagctccaattacaaacaaatggaacttctgaggtagatacagggacataagataaatatctatatyaaagcattgctaaaaacagtcttcttgttttggagtcatggtccaaatatcttatttgtttctttcctttttttttttttttttttttttgagatagggtctgcctctgtcacccaggctggagtgcagtgttgagatctcagttgactgcaacctctgcctcctgggctcaagtgattctttcacctc

SEQ ID NO: 520350 - DNA, 619 bp, Homo sapiens
ctgtcacctttttggggcagtctcctctgaccccagaacccatgatgggtccttccatgttttcttatggcataaggcaagtacttccatcttagcacttgtcacagtgtaatatacttgcctggtaaagcaagtgtatctcctcaactctttagggaactccttgaggatgagtttttatgtaaatatgttcctccagtctctatcatacacctgtcacacatgctgctcttgttagttttataatcttccactatcttggctttgtagggcagaagagctaatttgttttcagtgccaaaaatacactagggatcattttgcctatgtcaataggggtcattttgatgcttacaaataaaataaaactctctcattccccaataaaagttatttatatttggagaaatagaagaaaatgaataaaactgtttcaggattcttgaatatgaacaaagtattatatactttaaaacattatcacaatgcacacataaatacacatgcracaatagaagtagaagaaaatacaatatttatcttattatcttccaattccaaatgagaaaaataaggtgtaagaattgtacccaagatcatatgactagtgagtggtgaa

SEQ ID NO: 520351 - DNA, 619 bp, Homo sapiens
ctgtcacctttttggggcagtctcctctgaccccagaacccatgatgggtccttccatgttttcttatggcataaggcaagtacttccatcttagcacttgtcacagtgtaatatacttgcctggtaaagcaagtgtatctcctcaactctttagggaactccttgaggatgagtttttatgtaaatatgttcctccagtctctatcatacacctgtcacacatgctgctcttgttagttttataatcttccactatcttggctttgtagggcagaagagctaatttgttttcastgccaaaaatacactagggatcattttgcctatgtcaataggggtcattttgatgcttacaaataaaataaaactctctcattccccaataaaagttatttatatttggagaaatagaagaaaatgaataaaactgtttcaggattcttgaatatgaacaaagtattatatactttaaaacattatcacaatgcacacataaatacacatgcaacaatagaagtagaagaaaatacaatatttatcttattatcttccaattccaaatgagaaaaataaggtgtaagaattgtacccaagatcatatgactagtgagtggtgaa

SEQ ID NO: 520352 - DNA, 565 bp, Homo sapiens
ctgggaaggagatggggatkgttaatgggtatttaaaaaaatagaataaataagacctagtatttgatagcacaatagggtgactacagccaataattacttcactaagcattttaaaataacttaaagagtatatttggattgtttgtaacacaaaggataaatgcttaaggggatagatacccattgtccatgatgtgcttatttcacattgtatccctgtatcaaaacatttcacataccccataaatatatgtacctattatgtacccacccacaaaattagaaataaatatataaataaatttttaaaaagaaaaaaaggatttgggaactattctgataaaaacataatcagttttttccagaaggaaatgtttctaacaatcattgaaaataaatcaatactcatattatgattagacataagtgacttttaattattattctacttagcaatgatgatcagtccttaatactgaagacctaaactctggtttccataaatgtgtctgcattggagtattggctccttgcagatacaattcagttaaaatgaactcat

SEQ ID NO: 520353 - DNA, 651 bp, Homo sapiens
ggtaagttgattagtacaaataataaatgattaaaatcatagtgctctggatatttttatagtactttataatttacataagacttttagtgtacattattttaaaatttcaccgtaacatgaaaataatggtaaagaaattattagtatctccaatttatagacgtgggtattaagacagagagatcagaagaaaacgacttcttcatgtgagacagattgatgtggaaaaagctccaagacaccccaagtttatggtactcattgatacttctatgctattaggaagcttcattggaaaagtttaagtaattctgccacacaattcggtcactttgctatagaggaacattagtcttacgtgaagaagtggtttttgtatgcaaccgattatatatctaagagaaactgcttatgaaaataccttgtacttcaaggagttgcttcattcacagctaattaatccatcagagaaagcctcaagtaatcactttcactcctattccatcaatctggaccagatataaaaccctgacccttagagaagtcactaayctcaaacctctgtgtatgtcttttataatatcttctggcatgttcagaataataataaccaattaatgaatgatattcttttacttttaatctagc

SEQ ID NO: 520354 - DNA, 566 bp, Homo sapiens
ggagaaaggggcacccagatccctgcatcacctctccactgggagcactaacgtgctgaccacctctgaccgcagccactgaagactgcgaaaaatctgtggttttcacaaagagaagctcagcaatgtcaaagcacatacacatgcataaaaacaaaactgaaaagacatggccacaaatgttaagggtacttttctctgaggggtggagctgtaggtgatttcgattttcttaattatattttcctatgttatccaatttcttcacagtgagcgtgggatacctttataatctggggttggtcgggggaagggggagacatttttaaaaccaaataaaatgctgagagatgccaacgargtaaaggaaaggcctgctcaggtcccagaagagacccagatctctcctactgaagcctgaatgggcctgagacccctcacactacatggagagggcttccagggtagggtggttctgccggccagcagagagactcaccagagaccgagccagagcccttctcagctaagaccacaggggctatggttgtggacactgtccctgc

SEQ ID NO: 520355 - DNA, 566 bp, Homo sapiens
ggagaaaggggcacccagatccctgcatcacctctccactgggagcactaacgtgctgaccacctctgaccgcagccactgaagactgcgaaaaatctgtggttttcacaaagagaagctcagcaatgtcaaagcacatacacatgcataaaaacaaaactgaaaagacatggccacaaatgttaagggtacttttctctgaggggtggagctgtaggtgatttcgattttcttaattatattttcctatgttatccaatttcttcacagtgagcgtgggatacctttataatctggggttggtcgggggaagggggagacatttttaaaaccaaataaaatgctgagagatgccaacgaggtaaaggaaaggcctgctcaggtcccaraagagacccagatctctcctactgaagcctgaatgggcctgagacccctcacactacatggagagggcttccagggtagggtggttctgccggccagcagagagactcaccagagaccgagccagagcccttctcagctaagaccacaggggctatggttgtggacactgtccctgc

SEQ ID NO: 520356 - DNA, 600 bp, Homo sapiens
ataaccctcaagtatcagaggagcaactggcataattgcaaaaagacgtctgttcaccacgcaccttgaagcagtcctgtagagatcaytgctccacgggcttcagttttccaggggtatctgaccctgctttccagaccactccagaccattccagacccttcaaaggaggagcttatcaagatgagcataaattggtagaaatgtggtggagagcgaatctagaagcctgaggggcctagcagcgtctggctagttcttttgctaatctgccaagtgacgttggggttggtggttctgtggtggtggtggttgcgggagggggggcttcatttttcccatggggaggcagcactggtgcttcttcctcccttaaactatacaatcctcttgctgagcagatcccaaggctactattactcagtggagggaggcctccctgactcagagtcctaggtcagacccagggtgggggtggggaggtgctgacaaatcctcaggtgcctttaaaacgtttatattttcagggcgaaagataagaccagtcagtacctgcacctactcacaggacaggctgtgcacgagggaagagtgaagggc

SEQ ID NO: 520357 - DNA, 458 bp, Homo sapiens
cagctcaatgataaactcttctcttcttcaaataaaagcacatcctggcttacatggccatcacttctttgtacaattttatatttttatcatctaaarttatagtttagttttacctttaagagtatatttttatcctcatttattccatagattcctgcttgaaatttatattgtctggtagtttcctgtcctttgcattttgcagattgcaccccaaggtgtggtttaatgtatctctatgacctgtattttctgtaaattggtagtttgttatagaggtttgcgtctattcagggtttttttttttttttttttttttgccatgaggattgatggtactatatcatgtttttcatcaagaggaagaattcaatactagttatttcttttttgtgatgttaattgccattgctgttcagtggctaaatctgttaattcattacaaattgcaaaag

SEQ ID NO: 520358 - DNA, 458 bp, Homo sapiens
cagctcaatgataaactcttctcttcttcaaataaaagcacatcctggcttacatggccatcacttctttgtacaattttatatttttatcatctaaagttatagtttagttttacctttaagagtatatttttatcctcatttattccatagattcctgcttgaaatttatattgtctggtagtttcctgtcctttgcattttgcagattgcaccccaaggtgtggtttaatgtatctctatgacctgtattttctgtaaattggtagtttgttatagaggtttgcgtctattcagggtttttttttttttttttttttttgccatgaggattgatggtactatatcatgtttttcatcaagaggaagaattcaatactagttatttcttttttgygatgttaattgccattgctgttcagtggctaaatctgttaattcattacaaattgcaaaag

SEQ ID NO: 520359 - DNA, 623 bp, Homo sapiens
tgcccacttctggaaggttccatcccctgcaggcctggtctccacgagctccacgtcctgggtctggtcctccccatcccgctgccaggtcagtatgatctccgcagggtagaagcccagggcccagcacctcagggtggcctcatagtcaaagacagggtggtgggtcacgtgtgtcttgggggggtctgaaaggaagagtcagaaaaytcaagcactttgcatctctcatgggacactccagcagcacctggatgtgaccatcctaagaatgaaccagatacctggggtggggaagggagcacagaacccagacaccagcctggacacgggcacctgggataatctcctattccttggaaagttctagtctctgagcgggggagcagggacctccggttctgacctgagtggaggccaagggactcagaggagctggagtcagacccccacacacattgagtgtgaggcagagaacaaggcctgaggggaaaagtcctggtgccaaggctgctgtggggtcaaagggaacccctgatcagtcttccagggattgtcttcccctccactccctcagagacttcatcccttaattgtcccagagagcaggacggaccctcaga

SEQ ID NO: 520360 - DNA, 623 bp, Homo sapiens
tgcccacttctggaaggttccatcccctgcaggcctggtctccacgagctccacgtcctgggtctggtcctccccatcccgctgccaggtcagtatgatctccgcagggtagaagcccagggcccagcacctcagggtggcctcatagtcaaagacagggtggtgggtcacgtgtgtcttgggggggtctgaaaggaagagtcagaaaattcaagcactttgcatctctcatgggacactccagcagcacctggatgtgaccatcctaagaatgaaccagatacctggggtggggaagggagcacagaacccagacaccagcctggacacgggcacctgggataatctcctattccttggaaagttctagtctctgagcgggggagcagggacctcyggttctgacctgagtggaggccaagggactcagaggagctggagtcagacccccacacacattgagtgtgaggcagagaacaaggcctgaggggaaaagtcctggtgccaaggctgctgtggggtcaaagggaacccctgatcagtcttccagggattgtcttcccctccactccctcagagacttcatcccttaattgtcccagagagcaggacggaccctcaga

SEQ ID NO: 520361 - DNA, 623 bp, Homo sapiens
tgcccacttctggaaggttccatcccctgcaggcctggtctccacgagctccacgtcctgggtctggtcctccccatcccgctgccaggtcagtatgatctccgcagggtagaagcccagggcccagcacctcagggtggcctcatagtcaaagacagggtggtgggtcacgtgtgtcttgggggggtctgaaaggaagagtcagaaaattcaagcactttgcatctctcatgggacactccagcagcacctggatgtgaccatcctaagaatgaaccagatacctggggtggggaagggagcacagaacccagacaccagcctggacacgggcacctgggataatctcctattccttggaaagttctagtctctgagcgggggagcagggacctccggttctgacctgagtggaggccaagggactcagaggagctggagtcagacycccacacacattgagtgtgaggcagagaacaaggcctgaggggaaaagtcctggtgccaaggctgctgtggggtcaaagggaacccctgatcagtcttccagggattgtcttcccctccactccctcagagacttcatcccttaattgtcccagagagcaggacggaccctcaga

SEQ ID NO: 520362 - DNA, 655 bp, Homo sapiens
gctgcaaatgcatgagcagacggtggtggaatctgtgaagttgtcttctaaatgtgttcagttttctcagtgaagtaggaagcaagatcatcagcggaagtaagaatggggaaggaagattggatrtgtgaggacagagagaaggtatgtaagagtcacccaggccaggaggaggctgagagtgagccatgcagggagagggtgattgctggctatggtgggggctccccatgaggtttgggtcgtgaatgtagagagaacagtcagcatgctgtgtgctgctctccagcctcctgcagcttatgggggcaggtgcagtgtaggctgaggtggaatccactagctgtgtagttttgccaggcaagtgtgacaacgaaagggagaggcaagggagggatggaaattatttactacagaatccaaaatggatgaggagggaggagaggacaacaaacactaagggagaaggaatagatagcagcatcactggattgggaatttcaagggggtggaaaaattattggaatagatgtactacagaatggactccatgcctggaaagcaggcacacatgcaatgagtggttcactgatgttacattatagcatatgatcaaattatagcatcagtgtcttcagagcctgtggctaccctg

SEQ ID NO: 520363 - DNA, 603 bp, Homo sapiens
gcctcacctgccatggtgtttcctcttccaggatctctcggagctgttgcctacacttttcctgccttggaaagtggagatgataacgaaaagctgttgccaaattaaaggaggctattgcctcctctcccctcctggtccctagcactccaggactcacaaagatgctgctctgaaaaccccaaggcaagcgtggaagagtagaacagctccaggggcagtgggaagatgagggcacccccgcatgttgacrgacaccaagggtgggggtggaggagatgaaggggatcagcacaggagtctgggggaaatcctctaaatcccaccctgcaccaacctcacccctgcagctccttgggtagttacagctctcagctctcagctccttcccaaccacaccccagcccagacctcagggctcctccctctccccaccccctccagagcagcacagtccacagagcccttgaaaaggaattccccctcatctaacagttaattatttcttagtggggagggacagccggtcctctctttccagtgaccccatatctttgttcaaggcatccagttatactccctgagccagggatctctaggcca

SEQ ID NO: 520364 - DNA, 603 bp, Homo sapiens
gcctcacctgccatggtgtttcctcttccaggatctctcggagctgttgcctacacttttcctgccttggaaagtggagatgataacgaaaagctgttgccaaattaaaggaggctattgcctcctctcccctcctggtccctagcactccaggactcacaaagatgctgctctgaaaaccccaaggcaagcgtggaagagtagaacagctccaggggcagtgggaagatgagggcacccccgcatgttgacggacaccaagggtgggggtggaggagatgaaggggatcagcacaggagtctgggggaaatcctctaaatcccaccctgcaccaacctcacccctgcagctccttgkgtagttacagctctcagctctcagctccttcccaaccacaccccagcccagacctcagggctcctccctctccccaccccctccagagcagcacagtccacagagcccttgaaaaggaattccccctcatctaacagttaattatttcttagtggggagggacagccggtcctctctttccagtgaccccatatctttgttcaaggcatccagttatactccctgagccagggatctctaggcca

SEQ ID NO: 520365 - DNA, 603 bp, Homo sapiens
gcctcacctgccatggtgtttcctcttccaggatctctcggagctgttgcctacacttttcctgccttggaaagtggagatgataacgaaaagctgttgccaaattaaaggaggctattgcctcctctcccctcctggtccctagcactccaggactcacaaagatgctgctctgaaaaccccaaggcaagcgtggaagagtagaacagctccaggggcagtgggaagatgagggcacccccgcatgttgacggacaccaagggtgggggtggaggagatgaaggggatcagcacaggagtctgggggaaatcctctaaatcccaccctgcaccaacctcacccctgcagctccttgggtagttacagctctcagctctcagctccttcccaaccacaccccagcccagacctcagggctcctccctctcccyaccccctccagagcagcacagtccacagagcccttgaaaaggaattccccctcatctaacagttaattatttcttagtggggagggacagccggtcctctctttccagtgaccccatatctttgttcaaggcatccagttatactccctgagccagggatctctaggcca

SEQ ID NO: 520366 - DNA, 195 bp, Homo sapiens
tctcagctccacactcagacccgtccctcattcacaggtgcacccctcggtaggtaattcacaagaaggctgtttccttcctcagagatacaggagtatctcyctggtttcatgtcttttgtcaaataaagtccagttcctttctaagtgttcccttcattaggtcaggcccacctgggattttctccctcttgc

SEQ ID NO: 520367 - DNA, 605 bp, Homo sapiens
gcagaaagccttttttttcttccattcctagttttctatagcttaaacacatataggacattttatttcattttgctctcaaacattacccaactcaccgtggcgatttattaacaaactcctaaggtagacagtgattcctggacccttaggcmctgacaatgacaaaaggggctcacaacctgcagaaagaaactgccgaacaggcaggtgccagcaagttgtgttttccaaatcattggcaggtgcttctcatctcttaacccctgccagtggcttgcctgtgaaccactccttctctaatgtagcctaaactttcccaagtttccaaccactgaagtcactggtagattcaccacccaatatggggctcctgctactgcaggccactggtaagatacagatagcattgcagactcagaggctgagggatctccctctgaagacctagataatgcaaatccaatgagacgcagatgagagcaagccgggctttgtcctgccctgtgctgccttggtgcacacacccacgcctggctacgcccgactcacctatccagatgagcagcggcagccccaggcagaggtcatttgcaatcttccac

SEQ ID NO: 520368 - DNA, 605 bp, Homo sapiens
gcagaaagccttttttttcttccattcctagttttctatagcttaaacacatataggacattttatttcattttgctctcaaacattacccaactcaccgtggcgatttattaacaaactcctaaggtagacagtgattcctggacccttaggccctgacaatgacaaaaggggctcacaacctgcagaaagaaactgccgaacaggcaggtgccagcaagttgtgttttccaaatcattggcaggtgcttctcatctcttaacccctgccagtggcttgcctgtgaaccactccttctctaatgtagcctaaactttcccaagtttccaaccactgaagtcactggtagattcaccacccaatatggggctcctgctactgcaggccactggtaagatacagatagcattgcagactcagaggctgagggatctccctctgaagacctagataatgcaaatccaatgagacgcagatgagagcaagccgggctttgtcctgccctgtgctkccttggtgcacacacccacgcctggctacgcccgactcacctatccagatgagcagcggcagccccaggcagaggtcatttgcaatcttccac

SEQ ID NO: 520369 - DNA, 613 bp, Homo sapiens
tgagaaacaatcccctctcctctgtggcaagtaggaggatgacagccaactttcatcttccctgacaagataactcagacattttcctcagggaaagrcgattgatcattgggttcggctggagaataatgtggagtgaatgaaagcactcacagaactccgttctttatagctgcctcctttgaaaacatgcgagaactcacagaatagtcttcattagatgaggagcccacttgggatttttacttctaaaggctcttgagtactaagggctgtgacaagaggccatttctgctccacaatgtagaccaaaaaagctctcctcagccccccaaataccgcccctaccctaactactctggtcaacatggatctctctcctctgtgaactcctcaaagctctttttgcctgaaacttactgcagaacattcattatagatatcatatgagatcatgtgctgtcttcttatatttcatgtcatttctggtagatttaaaacttctcaagcacaggggacctatcacatacttttttagtcatctctatggggcccagcgcaaagcagagtatgtaaatggtgctcaataagtaatctgattgatacagtcaca

SEQ ID NO: 520370 - DNA, 462 bp, Homo sapiens
caaagcccacaaaactccgttatctgtttatctgccacccacagacgtcggtatttctctactgataagacgcagaagttatgaatttcttgacagccattataatrctctaagatttaggataaggagaccctaaaagattaatttttggctgccatttggtgcccacccagtccaactcacagaggttcacgtagcagatggctcaagaaagatgtgaaattgctctttgaactgaggggcaacgtcattggcctcttcaaagtattagtaaagtgagattaaccaaaacttgaaaggccactgggtacatttccaaatttccagagcctgtggtggtcttggtgagtcaggcgactgagagccgtccatagcagtgtcctacagagccacccaacacagccattcatttcaaaattcaaagaacctgctgcattttgggcacttggcaaataaatgtgc

SEQ ID NO: 520371 - DNA, 415 bp, Homo sapiens
tacattacttatctttttaatctttgctgttatgcaaagaatgtttagaaaaatgactcaagtattattaacaaagtaaacaagataagcttcaaatatcctataaatacaatgaccttctgcccttgtctctatcaccttcactaagaagggccaaactggccagcaggtgtcccaccaggcttcacagagaagcctccaggcaaccaaacgcaactgcgtcttctatacaattaaggcccacgaccctcaatccttagcatgtcctaaaaaccaaataaagactcagacgcaagccatygggcagctataaatagccacacaactaaaaatacactgtgctaatactccctaggaagaattcctctcctgaccaaaatatttgccttttcattgaatttaactttcggatcag

SEQ ID NO: 520372 - DNA, 526 bp, Homo sapiens
ccaaaatccaaaaaaatttgaaaaacctctagtcccaagtatttcagataagggatattcaacctgaacttgtgtaactggtgtaactgtacatacatatgyatgtgcatgtctgtgtgtgttccaacccaaacaccatgccattcttcccctgccttgccccatgtcccacatccactcctacccccatttatttgctaccagaactaggtcactttcttgtcccttagactcagtgggagactcccaactcattgtgtttggattaagtagaaagttattctataaccatgtattcaaaaaaaataactttacaatcatttgaaacaaaaccaactattacttttaaaaagctacctgctttcaattaagcaggaaattatctaagaagccacttaatttgctttggtctgtagtcccacaactgctttatgctgagtggagcatgaaattaaatatgtaacaactatcctaatggttatgtttcagaatgccagcattttagattcctaggtataccgagtgg

SEQ ID NO: 520373 - DNA, 526 bp, Homo sapiens
ccaaaatccaaaaaaatttgaaaaacctctagtcccaagtatttcagataagggatattcaacctgaacttgtgtaactggtgtaactgtacatacatatgcatgtgcakgtctgtgtgtgttccaacccaaacaccatgccattcttcccctgccttgccccatgtcccacatccactcctacccccatttatttgctaccagaactaggtcactttcttgtcccttagactcagtgggagactcccaactcattgtgtttggattaagtagaaagttattctataaccatgtattcaaaaaaaataactttacaatcatttgaaacaaaaccaactattacttttaaaaagctacctgctttcaattaagcaggaaattatctaagaagccacttaatttgctttggtctgtagtcccacaactgctttatgctgagtggagcatgaaattaaatatgtaacaactatcctaatggttatgtttcagaatgccagcattttagattcctaggtataccgagtgg

SEQ ID NO: 520374 - DNA, 526 bp, Homo sapiens
ccaaaatccaaaaaaatttgaaaaacctctagtcccaagtatttcagataagggatattcaacctgaacttgtgtaactggtgtaactgtacatacatatgcatgtgcatgtctgtgtgtgttccaacccaaacaccatgccattcttcccctgccttgccccatgtcccacatccactcctacccccatttatttgctaccagaactaggtcactttcttgtcccttagactcagtgggagactcccaactcattgtgtttggattaagtagaaagttattctataaccatgtattcaaaaaaaataactttacaatcatttgaaacaaaascaactattacttttaaaaagctacctgctttcaattaagcaggaaattatctaagaagccacttaatttgctttggtctgtagtcccacaactgctttatgctgagtggagcatgaaattaaatatgtaacaactatcctaatggttatgtttcagaatgccagcattttagattcctaggtataccgagtgg

SEQ ID NO: 520375 - DNA, 526 bp, Homo sapiens
ccaaaatccaaaaaaatttgaaaaacctctagtcccaagtatttcagataagggatattcaacctgaacttgtgtaactggtgtaactgtacatacatatgcatgtgcatgtctgtgtgtgttccaacccaaacaccatgccattcttcccctgccttgccccatgtcccacatccactcctacccccatttatttgctaccagaactaggtcactttcttgtcccttagactcagtgggagactcccaactcattgtgtttggattaagtagaaagttattctataaccatgtattcaaaaaaaataactttacaatcatttgaaacaaaaccaactattacttttaaaaagctacctgctttcaattaagcrggaaattatctaagaagccacttaatttgctttggtctgtagtcccacaactgctttatgctgagtggagcatgaaattaaatatgtaacaactatcctaatggttatgtttcagaatgccagcattttagattcctaggtataccgagtgg

SEQ ID NO: 520376 - DNA, 629 bp, Homo sapiens
tctaaaccatctgcttgacttttaatacatgttctacgttttgtttcctttgcccatygctgcatttgaaaatggctaattaccttacaagcctgttccattttcctttgcttctattttttttttctttccctcttacaaatgaagatgcttggccttcattacttctcagtcctcagatctctcaccttatcctcaaagcaggccaacaggggatttgggtcaaagtaaaccctgaaatagtttttgtggaaaaaaaaatgagagaaaaataaataagtccagcttcatctcccaggaactgaggttgatgtctgtttgccctctgccccacataattaaatctggtgcacaggacaggtaaaccaaaggaatggcagagttttcgtctcatttcaagtttaaatactactggacttctgcagcctggattccaaagttgtgttataattttacttataaattctgagtcctgattatgttttttataaacatgtatgtccccaagccctttttgaagtcatccaagagaagaatctctatgtgtcccattagaggttcatttgaccttggattgctataaagagaagtgccatgcccttgctataatttaatagtgctctctaatg

SEQ ID NO: 520377 - DNA, 638 bp, Homo sapiens
tacgataatttgttatgatgaatacactcacagtgaggaatgaggatcatgattcagagcgagactctgagacctgacttcattttgggcaaagcctggcccaccatgatctgtggtgggtacaggggagtggtatctctgaggttttcagcttctgtgactgctccattcccactatcacatctttctgggtcctcctaattaaccacctccttacagggagcttagctaaagttggcatctttctgtgcagtggggtggggataggcccccttctctgggctggaggggaaggcagttaatatctacctggaagcccagcagagcctggggcccacattgaaagctgtcagtacccatcagtgacctaacagaattctcactatcttcttttaatgggtagaatttgggacatcttaaaaacaaatgacatttaatctatacacaattttttaaaagcctttattttcactttttatatctgagttctcaactatcttgagggatattctctttaagggaatgcagtggcctttctgggcacacayaatttcaaaagaacagcagtttcctttacttttataaatttgtttttctttaatttttataagtccgaacagttttttgcactttcagtc

SEQ ID NO: 520378 - DNA, 643 bp, Homo sapiens
ctggggcaacaaagcaagaccctgtctcaagaaaaaaaatttttagaagtgttagtatataacaaatacatatttcgaattgcttttaaaaggaatagaattgtttggacttgaattataatagaaaagtaattttagacaacttataaaagcataaatctcacaaacatcattgaagagatatacatatgtgtgtgtgtatatatatatatatatgcctcctcttttgattttccttatatcttttcaattttaatgttgaatcctaaattatcctcagggttgtaaagttgcttttattttccctattcccctttaaatcctaaggtatacaatagtggtacttcctgtcatatcttcatttgcattagcagtcagacccctgaaataaatcagacagatattgggatgacagtagcaaattaccacagattgaaataagtagtagccccaattgaatctgctggaagagatatgttatccttgatagagtatattagcatgttactgagtacccygtatgcatacattgatctggtaaatgttttctttttcatccttatcaggaaacatgatcagggagtttgcactcacttggagctgacaatactataccatgtcccagagctatgctaggtttttc

SEQ ID NO: 520379 - DNA, 635 bp, Homo sapiens
tgggtttcatttataaagtactttagcacaagtatggtcatcccctccccagttcacccccaccccgaagttcttagccttgtatccaaatgaacatgtgggcactaaagcctgctctttcctccttctatctttgtattaacactaaacaaactkgcctttgtttctgaccttgaagagacagtaaaatcaacatcattctccaaaatatccctcaaagatgggcctataagaattcagagagtttagagaatcgctgcttagaagctttctcccctcaaactcatcccaggaatcttctcccttttactcccactcccaccctcaacacaccccccacccacacacacacacacaaacttcccaattcactgctagactgcttgatggttctctctggtgagagaagccagggtaacaaggaggagggaatgagtctgcaaatcaggtatatttttgaatttcaattctgtatccccagcatctgtctgctgttttatcaagaggaccagagatcatttaggaatgatggacagtcctctgaggaagcaatgccagaagcatgatgagcagaaatgctgaacaagatgctggctggaagggaaatcaatctcccaggccgattagtttgggtg

SEQ ID NO: 520380 - DNA, 635 bp, Homo sapiens
tgggtttcatttataaagtactttagcacaagtatggtcatcccctccccagttcacccccaccccgaagttcttagccttgtatccaaatgaacatgtgggcactaaagcctgctctttcctccttctatctttgtattaacactaaacaaactggcctttgtttctgaccttgaagagacagtaaaatcaacatcattctccaaaatatccctcaaagatgggcctataagaattcagagagtttagagaatcgctgcttagaagctttctcccctcaaactcatcccaggaatcttctcccttttactcccactcccaccctcaacacaccccccacccacacacacacacacaaacttcccaattcactgctagactgcttgatggttctctctggtgagagaagccagggtaacaaggaggagggaatgagtctgcaaatcaggtatatttttgaatttcaattctgtatccccagcatctgtctgctgttttatcaagaggaccagagatcrtttaggaatgatggacagtcctctgaggaagcaatgccagaagcatgatgagcagaaatgctgaacaagatgctggctggaagggaaatcaatctcccaggccgattagtttgggtg

SEQ ID NO: 520381 - DNA, 639 bp, Homo sapiens
aaccatttttttgttgctttggataacatgttttcttctctccttcagtgataaatcaaacctcaacagaatttatttagaggctagaataacaggtcaggtgatgctctcactgaggaatttgacaatatacatgactaatcctagacctcaaagtgttcacaatgtaatgaaagagacatacacataaaggcataattataaagcattacagtaattgctataatcatgctattatccattatcaagacttaagttctactacatccaaatttgagatgctagagcagaccaagttcaaggacattgcaatataatacatgtaggatatrcagaaaattggtgggccatctgaaatgcattcttgtgaaaattgagggtgtgagttttcagggaagtcttgactcagaataggactggtccacagagcaaggctgtgtcagattacacttgagacctaaagagtggccatctgtgataaaagtcagacctttgttcaactacaaagaagtaaggcgtagttatgatacagaacatgtgaagagaactttttgttctggaaggtgcacatgacattccatttgaatgagaaacatcagagagaggcgtgctttcactctcacaaggcacgatccccag

SEQ ID NO: 520382 - DNA, 506 bp, Homo sapiens
gctgtaagttcagcaactaaatgtcccgatcaatagtcacaatttggatattcaccagacaatataactctagtgaatgtaccaacagaagagatcaaaacatatgttgtctttcttcatatttgacaatatatctgctgattgggctactttcctttgtacacaaatgtggttgaaaagatggatctgaatgtgagatgtgatgcatattttttttggcatgatggttgtagtgcctgtcttcagattcacatttaacatcttgtttctgtgkttgtgatattcctggtatttcatttcacatagtattcccactgcagactaaagaatatccacatggctgcctgctcctgattttcctcaaatacataaaaaggttaattgggagttattaagtgctatctgaaaatcagcagacagaaaccactcagtagcagaagaatgatgaatccaacgcattctctataatgctcatagaaaaatcaaataatattacattcaaacat

SEQ ID NO: 520383 - DNA, 619 bp, Homo sapiens
taacctcctgcttggacaattgcttttctctcaattgacacatttaaataatctgatttacatagcctgcctggctttttcatgcatttgagtttgtgaccacatggtttaggccaaagcctctattttagagatacttaagtccagggaggtcaagygatttgtccatggtcttaccacttataaacattaaaatctagactaaaatctgaatcctagctcattgtacttgtttgtatggtattccattgtgcagttaggcatatgcagcacattgtgattttttgactagaagatattacgtactccctcatcagtgatttctccctttttcctcttcctcctctagacagagaagaaaacctcttctcagttgttgattattatagtctggaagagtcttatttccttatgcatgttctattatccatgaatataccatagattctgtcaaaaaaatgctagttctttatggtaaaatgagctatataacaagacttttgggagacactgagttgttggagtctctattatcttctatattggatttatgcttctgagcccttccataatctgagacccagatcccaccagctatgattatgacgggcatcctcat

SEQ ID NO: 520384 - DNA, 619 bp, Homo sapiens
taacctcctgcttggacaattgcttttctctcaattgacacatttaaataatctgatttacatagcctgcctggctttttcatgcatttgagtttgtgaccacatggtttaggccaaagcctctattttagagatacttaagtccagggaggtcaagcgatttgtccatggtcttaccacttataaacattaaaatctagactaaaatctgaatcctagctcattgtacttgtttgtayggtattccattgtgcagttaggcatatgcagcacattgtgattttttgactagaagatattacgtactccctcatcagtgatttctccctttttcctcttcctcctctagacagagaagaaaacctcttctcagttgttgattattatagtctggaagagtcttatttccttatgcatgttctattatccatgaatataccatagattctgtcaaaaaaatgctagttctttatggtaaaatgagctatataacaagacttttgggagacactgagttgttggagtctctattatcttctatattggatttatgcttctgagcccttccataatctgagacccagatcccaccagctatgattatgacgggcatcctcat

SEQ ID NO: 520385 - DNA, 521 bp, Homo sapiens
cagtctttcattgggaagtctgggtagctggggctctggaggagttttcttccaccagagcagagacaaacttctctctgaattgatgggcagagttctctctagccacattttaactgagggtgtagcttttccaagggtctgctttatgcaaggaatcctgttcaaactccctggctctttggagcccaagatcttaaatttcatgaccacctcaatgttaaagccattggctgtcagggccaatttctgggtctaacacttctattctccagcttatctcaacttcacctgaggttgcattcttttctttttcatttgtgtcccacggagatttttctttcttcttacagrcctatttatatttactttctttttcagttatgttttatgtcaagtttctgttgtttatagtaggaggagtgacttgctatctcaattcttaatgtaagaactgacagtgaaagaacatctgctttgtattgaactaacgtgggcctctcagtataatttctccttgc

SEQ ID NO: 520386 - DNA, 421 bp, Homo sapiens
gatgttacagagcctgatttcagtttcataaaaataaataaaaataaaatatrtgcgctaatatgaaatgtcagctaaaatcaatagtaatctatttctcttgcagcgtgagcgggacccaaacaatcaattagcagtaagcttgtcaaaatgcatggggcagaggttgctagatgcttcatcacaattttatttgcccagagcatttgaataaatgaagtgaaatgtttccgcaagtctctgaatctttgatagataatttttggacctcctgctgaaatactgttggctaatttcctgcagtaaattttttcagtgattgtcacaacctgtagtaataaatgacattttctccaatatgttactatgcctcagtgcagagagatgacacacaggctatgtgcatgtctgtaagaatgca

SEQ ID NO: 520387 - DNA, 487 bp, Homo sapiens
gcttcacagtcctcttggaaactgctttagaaacttctcactgccccagcttcctgtagcacctcctggaggctggccagtgtcaactaacttctggaaaagcagttaaccatccctatatttgcagccaacaaggtaactctaattgtgtcaaaggatgtcaaaaaagcctccaaatatgtgaaaataaaaataaaattctttttggaaagaaaacattttgggagagatggaaagggaagtgattgtgaaatggtaatatggtagcaactcaatgattamaaattctaaacttgcaatactgccctgaagaaaacagttcatatccatttagcttgcttggtatactactacctagaatgggcatcttaaaaaaaaaaagaaagactaatgacatttaaggccactattagagtgaagatcccacttacaggggcagatacctgccactctttggactttcagagaccctgtcttccacaagtat

SEQ ID NO: 520388 - DNA, 511 bp, Homo sapiens
ctatttagtccagaagttttcaaacttttaaaagtgagaaaccctgctttcaaatgaaattccatgtggaatcccaatacataacagataaaagtagagtgctctctttgaagtaggaatagaaattctagagctctcactccaccctcttgatgggctcacaggcactgagagttccaggaatgccaatttgaaaaccactgatcttgcctgggcacgtggcttacacctataatcccagcactttgggaagccaaagcaggtggattgcttgagcccagtagttcaagaccagcctgggtaacatggcgaaaccccatctctactaaaaatacaaaaattagttgggcatggtggcgcacacctgtggtaccagctactctggaggctgaggtaggagaattgcttgaatcgggaggtggaggttgcagggatccatgatcatgccactgcctgggggacasagtgagactccatttcaaagaaaaaaaaagaagaaaaccacagatgt

SEQ ID NO: 520389 - DNA, 614 bp, Homo sapiens
atgaacctaccttgactcatcaccatcacccagggtccatagttgacattaggggtccctcctggtgttgcacattctattggtttgggcaagtgtgcaatgacakgcatctaccattacagaatcatacagaatagtttcacagcgctaaaaattctctgtgctccacctattcatcctacctttccacttttacttataagagtttgcttcaatgaaaacaacaacaacaacaactgggaagtagcttttcctgttcttgattcattctgaacaactccttggggaatgggctatggagagttggccccaggaaattggatgctgttaatgccgacgtgaagtaaacagattggagagtcgggtttcacctcatttgaaggttttaactggtgagaaccctacttaagtaggtaccttcctgttgtgggttgaatcatgtcccctagaaagacaagtcctacccccgatataatcaagctaagaggaggtcattctagatgagagtggttcctgatccaatgactagtgaccttataagaaaagggaaatttggacacagagacacacaggcagagtgccatgtgatgacggagggagagcctggagtgata

SEQ ID NO: 520390 - DNA, 614 bp, Homo sapiens
atgaacctaccttgactcatcaccatcacccagggtccatagttgacattaggggtccctcctggtgttgcacattctattggtttgggcaagtgtgcaatgacatgcatctaccattacagaatcatacagaatagtttcacagcgctaaaaattctctgtgctccacctattcatcctacctttccacttttacttataagagtttgcttcaatgaaaacaacaacaacaacaactgggaagtagcttttcctgttcttgattcattctgaacaactccttggggaatgggctatggagagttggccccaggaaattggatgctgttaatgccgwcgtgaagtaaacagattggagagtcgggtttcacctcatttgaaggttttaactggtgagaaccctacttaagtaggtaccttcctgttgtgggttgaatcatgtcccctagaaagacaagtcctacccccgatataatcaagctaagaggaggtcattctagatgagagtggttcctgatccaatgactagtgaccttataagaaaagggaaatttggacacagagacacacaggcagagtgccatgtgatgacggagggagagcctggagtgata

SEQ ID NO: 520391 - DNA, 614 bp, Homo sapiens
atgaacctaccttgactcatcaccatcacccagggtccatagttgacattaggggtccctcctggtgttgcacattctattggtttgggcaagtgtgcaatgacatgcatctaccattacagaatcatacagaatagtttcacagcgctaaaaattctctgtgctccacctattcatcctacctttccacttttacttataagagtttgcttcaatgaaaacaacaacaacaacaactgggaagtagcttttcctgttcttgattcattctgaacaactccttggggaatgggctatggagagttggccccaggaaattggatgctgttaatgccgacgtgaagtaaacagattggagagtcgggtttcacctcatttgaaggttttaactggtgagaaccctacttaagtaggtaccttcctgttgtgggttgaatcatgtccccyagaaagacaagtcctacccccgatataatcaagctaagaggaggtcattctagatgagagtggttcctgatccaatgactagtgaccttataagaaaagggaaatttggacacagagacacacaggcagagtgccatgtgatgacggagggagagcctggagtgata

SEQ ID NO: 520392 - DNA, 519 bp, Homo sapiens
ttatagttcttgcaattgccacagtgggaggttgagagagcagccgggaaatgtgcaggagtagcctctgggaatcaaaacgggccttcatatttggggtgtcattggggtgtgcaggacagagagctgtcagtccccaatgctcagagcccactcgtggactggagagtagaactcaaaaggtctaggasgggcccgtcagtctgcatgcaacaagctcaccagtccacaggtgagcaccaggtctgagaatcccttagaaaccttgcggctgaccaccagcaccgttcaactcaacgacatacacaaacccagattcgcccaccactcctgcatctggggtccagacccattcctgtttctcttctccactccatggaatgtccagcaaatctgctttcccagttactgaatttgggattttctccaagtcttcctgtgaattggactttaatcagattttaactgtagctcccaaaaaatgggaatggtacgatcaggtttcaaacagtgtaattc

SEQ ID NO: 520393 - DNA, 550 bp, Homo sapiens
ggatggggccagggcacttggtcttgtgtgagtaatgtctacacccygcttcctgtcacccttgcacagctacgttcagaattatagaacttctggaaacgtcatcagctcctcagcatttgctaaacgcccccaaacatccctcctccccctggagaggtagaatacaagtgtcttttcttggggactccctgcaggagagaagctgatttccctgctccccacggaaatgtgagagcagttagaaaacctgagaaggctggggtttgttctctgccctcctctgaaattgaggtgacaaagggagttaattatttcgtttttaattattgctataaaaatagcatgcatgtggcaaaacaacccaactgtatacaatgatatacaataaaaaaaataaaaagtgattctctctttgagcccaaacctcatttctactctgctgaggtaaagcccattacctggttcaaatgttacacatgtgagggctgggatgcacacccgcctaccttgattgttcttgcttcacactgagttgtgttgacataca

SEQ ID NO: 520394 - DNA, 550 bp, Homo sapiens
ggatggggccagggcacttggtcttgtgtgagtaatgtctacaccccgcttcctgtcacccwtgcacagctacgttcagaattatagaacttctggaaacgtcatcagctcctcagcatttgctaaacgcccccaaacatccctcctccccctggagaggtagaatacaagtgtcttttcttggggactccctgcaggagagaagctgatttccctgctccccacggaaatgtgagagcagttagaaaacctgagaaggctggggtttgttctctgccctcctctgaaattgaggtgacaaagggagttaattatttcgtttttaattattgctataaaaatagcatgcatgtggcaaaacaacccaactgtatacaatgatatacaataaaaaaaataaaaagtgattctctctttgagcccaaacctcatttctactctgctgaggtaaagcccattacctggttcaaatgttacacatgtgagggctgggatgcacacccgcctaccttgattgttcttgcttcacactgagttgtgttgacataca

SEQ ID NO: 520395 - DNA, 550 bp, Homo sapiens
ggatggggccagggcacttggtcttgtgtgagtaatgtctacaccccgcttcctgtcacccttgcacagctacgttcagaattatagaacttctggaaacgtcatcagctcctcagcatttgctaaacgcccccaaacatccctcctccccctggagaggtagaatacaagtgtcttttcttggggactccctgcaggagagaagctgatttccctgytccccacggaaatgtgagagcagttagaaaacctgagaaggctggggtttgttctctgccctcctctgaaattgaggtgacaaagggagttaattatttcgtttttaattattgctataaaaatagcatgcatgtggcaaaacaacccaactgtatacaatgatatacaataaaaaaaataaaaagtgattctctctttgagcccaaacctcatttctactctgctgaggtaaagcccattacctggttcaaatgttacacatgtgagggctgggatgcacacccgcctaccttgattgttcttgcttcacactgagttgtgttgacataca

SEQ ID NO: 520396 - DNA, 563 bp, Homo sapiens
tcttcaaatagaataaaccaggtcattctctcttcttcttcttaagggcttgggtttgtggtcggtggcaagaggcagacatgcctttgatgtcctaggagcagatagggaggtgaggatcattcccaacctctgctgctcccaggccttcttcctattcagtaaatattttgggtgcatcttccatggtccaagaactcactgtggctccctggaggagctcccagtctgatggggggatgttcctgaaaacaagtcattataatgcaacatacaaggctctccacctgaycactgcctcgctgccatcatggacatgagctgtgtgcatcctgtcaagctagtcaaggccaccaaggttctgggtaggaccagctcacaaggacagtgcacacgggtgtgtgtggaatttatggtgagtcagagcaagaggctgcggaggctgtgctgcactcgattgctgagtcctcaatggcagagttgactgcttggcccacagagatgatctgtgactattaaatgaagcatttatgttgtgtgttaaaaaaatcaaaataaaaagc

SEQ ID NO: 520397 - DNA, 594 bp, Homo sapiens
ttctctacattgaatggagactctgctcagggaccggtgaaaatcccccagatacaaagaaaatagctctctgtttcgttgaaccaacacttgatcatctctaacaggaaaacattctctaaaagaagaaaatttttataagtagagggaaaaaaagaaaactaagctgttacaaaatttctccataaagcttctgcttatgtaaaatatatatatatatatactttcaaagtgacagtgctgattgtcaactccaggttttgggaccgaagttgtctgcgggttccctgcggcagcgcagctataattgatgaagaggcgccaccgtgtggcatggacgaaaaatgactcgaagtggtgacaaaccagtaaatagttgtcacctttgttttcttgcctttggaactattgaactcattacgacttcccygtttcatctccatccaaatgcaatagatgcttggtgtaaacattcctttttcagcccctggaatcttctgggataagacaggacacagagctgtttctcaaagtgagaatgtttgcttctttcggagtgaattaggagcacagtgccctcttctggtagatctg

SEQ ID NO: 520398 - DNA, 643 bp, Homo sapiens
gggcagtattgttgggaatgaatgtacaacattttcctcccaacatagcacatacactaccgtttactgctaatataatgttcagtgcaattttgttttcccaagacatttggctagtggcatttagttggctggctacacccttaagggcatcttgagtgtaactgatgaatcttttctgattataatagatgtaattgatccagtttacctttttcttaatagttgaccaccagaagrttgctgacttaaatccagcagctatttggtttggagccttaaatgtattagacattcccctagggatgcctatggaactaatatatacactggggtcaaaagaacttgttagatttctttggtctcaatgaccatgtgtgtttttaagcattctatggaatgtcagggtgaagggaatagccagttgcactaaagcacaagttccggttcaactggacggtaacaagttaatggaggttctgtttcccacaatacccccagacctctgcctcgggttatatgaagagcagagtagttgccacagtctggcttaccggtgacatttaggatgtgggtgcaggttgaaagctcccccatgggtttattgaacctcccctgccccctgtttagagagacaagagga

SEQ ID NO: 520399 - DNA, 620 bp, Homo sapiens
gctggtgtgttgaacattcagcattttgcccctttacaagctagacaaatgatctttcctgatgggcggtttccttgtgtgcaccactcttttttccaagtctattctcaaccatttcctagtttcctttgggcatcttcctccagagcctggttggccctgatgtctcactgctctggaacttggttctcaggctcaccttacttaaactcagtgtctccctttttggctcagcccaatgacagytctacttttgctcagtcttaagatagatggaaaaactataaaatactcagattctcctgagtctcttgagcatttagtttttgttgacctgtgtcacacagagacgctatagtagcacaaattaggtcaatggctttctttcagaagtgcttgtgttaatttccacatataaaaatgcgcattgtgtggtcatatagcccacattttattacaacaatcttatagcagtttgcaaatattaggtgcaccaaagttttatttgacttacaacctgtacaaagttatgtactgattgaatactctcccctacataaatatcctcaacaacttctctatttttcataaatacatagatagaatgctctgttcccaca

SEQ ID NO: 520400 - DNA, 636 bp, Homo sapiens
aactcggtggctaaggctgcggagcagtgggcgtcgggcaccgagcggcgcgcactgggtgtcaggtaagagacgatccctggtgatctgggaggcacaggggggtgttgagcacagcacagcttcccgagtgcgcggtccccgcggagcgccctgggcgcgcgggtacagcaggacggctcttctgccccggtccacgcgccgacccgctgttttcatatgttgtaggaaggctgagaaactccaggctcttctcagagccaagacaggcttggagggaagtagcctgcctgccttgggacgcacctgttgccggagaacgatccccgcctccgcggcgcagcccgccccagccgcgagggcgcggggtgtggcccgagagagcgcagcccgagccaccgcagcagggtcgctcgctccggctcctcgccggtctgagccctccgaaaggggtctcggccagggccaaggtcatggtgcgtctccggctgagcctctgtaggctgctgcagccttggccaggcggcgactcctttactctctccttccgtacaagtctggggtgggcgwtggtagtcagccctcagaaagaaatccgtgtgcctgccctcctgagctccgggcctgctccttctc

SEQ ID NO: 520401 - DNA, 549 bp, Homo sapiens
catcagttctatgatgctacaaactttttcttcttcacctctaaatttacaatgactagaatagcacctgtggcaagataagtgtataatacatacatgcgaggaaatgtatgacaaaacaaggaaatatagaaaactagtaaaatgtgaaagaagttcttaatgaaaaaaattagccttactatccagagatagcaactcttcatacattttctttctctctctctctctctctctctctcttcctctctctttgtctctatctcattgtggctatgcatgtgcataataaattggcatcctgcttttatcacttgacgatgactattatgcgtatactcacatcaaccgtaattattataaagtttaaatatgtcagtttaaaaaaattaaaaygagtaaacagtaaacaatgaaagtcatatcctgttcaatccagttcccagaagtaactactgtcaagattggtatgtattagtcaatggtttttcctttgtctctctatatatacacacatacacaaacacatcacacacatatgtaaaatgt

SEQ ID NO: 520402 - DNA, 642 bp, Homo sapiens
gtcagcaaagctccaagaggtcaaagcaccagaatagaaaataaaagacatacttaacacattctacaatatcaatttctaaaaatataatataagcttcccaatgtatagaatatgttcatcttaaataactccagaccgaatgaccatttatacctaatactcccacatggtcacagattgatgtcctcattgtctctatttcacatggcagtaagatgagaaataaaggagcctcaattcttacataattgtaattgttttatgagaaaaggagggttaggaggtagaagttatagaatagtaactgttataataaaaagttatttttcctataggcatttcaatgtaagggtgctgcttttattataaatgcagagctaaacaaccaaaataccactgggcaaatccaatatttaattatatctacttttttttaaggtttttcttttcctattattaccactactctattgttggggaacactctttatatatatttctcatgttttttcacatttatcactcaatgttatgataaaacacaaattkttttaattttaattttttattttactttaagttctgggatacatgtgcagaacgtgcaggtttgttgcataggtttacatgtgccatggt

SEQ ID NO: 520403 - DNA, 553 bp, Homo sapiens
ggccgaggcaggaggactgcttaagcccaggaggttgaggatgcagtgggccttgattgccccattgcactccagccggaactacaggagaactgtctcaaaaaagaaagaagaaaaaaaaaaaagatggagattcagggcaatgttgagagtgaatgagaatgagttatattaaaaaaaaaaaaaaaaggaaaaagattgccctttttggtctccctccctccctccctccctccctccctccctccctcyctccctctctctctctctctctctctctctctctctctcgttctttctttcgacacggtctcactctgtcgctggagtacagtggcgcgatcatggctccgcctcctgcgttcaagggatcctctccctactgcctcagcctcctgagtagctgcaaccacaggcgtgcgccaccatggctcgcaatcgtcccgccttggcctccagggtttgggttaccggcgcgagtccccgcgcctggcctcggtggcttatgacggccgtggggcgatgcgaatttgctcacggagggccccgtctt

SEQ ID NO: 520404 - DNA, 611 bp, Homo sapiens
cttgctttagatatttccttcccaagatttttcagggtggagctcactaatcattaagctgtaaggggatgtactgggtgtttcctgcagacacacaggctctctgtgcttgaagaagtaggtctaggaggattatgccctccagagaagaagcaaaggtaagaggtgcagaggggagttctcacaatggcatttttttggtccttcctgaaccttggttacataagccaaaaaaggatattcttttttctgctcaagctagcctgatttggatttccatgaatccttatagctatttttattttattttgagacagggtctggctctgtcacccaggctggagtgcagtggcacaaccacagctcactgcagcctctacctcctgggctcaagccatcctcccatctcagcctcctgagtagctaggactacaggtgtgtgccaccacatccggctaatttttctattttctgtagagacagggtttcaccatgttagccaggctggtctcgaactccaggactcaagtgacccacccgccttggcctctcacagtactgggattacagacaagaccaaccgygcccggccagatattttttaaaattgt

SEQ ID NO: 520405 - DNA, 643 bp, Homo sapiens
ccatgtgatgttcttatgctcagctttttgcatatacattatctcatttagtcatcaaaacaaccctaggagataaacagtattactactattttatagatgaggcttctagtggttaagtaactgtccaggatccacggtccctctggctgtaaggagctggcattggaactaggtacatctcattgcaatacccagctcctactctgtgacaggtactgcatggattaktctgaggaggaaaacatgtatttcttgttagagtaatcaaggatgactcaacaggggataagtgatgttacatatagatcttgaaggactgagttagaaggattttaaaaggcaaagagtagaggggatggcaacccagggaggtggaacaatggaccaatagcctggagctggaaagactaagcattgagcaaggaggagtcaacttggccagtacttcatagttctgagtagaggacctaggaactgtaagactggaagacaggtaagctgaagtcacctttccctttgtgtttaatttaagcaaataggaaactcagtttgcatgccctgagtacactccatagtgaatttgcattgacgccaaccagttcatccaggtcaagatgtctgggaggtagagggcttcata

SEQ ID NO: 520406 - DNA, 496 bp, Homo sapiens
accaaacagaagacttgtatgcatctgaagagctataaaaatataaaaggaagtcctgtataataggaaacattttgaaggccacaatatactgaaacttaaaggtctactctgaatgatctgtgatagcagaagttatagtacacccggagataacagatagcaaatctaatttgcaaccttatcaaatcgttataagaccagctaaaaggtatccaaatagaatgaattaaaagggttttcttccttttcattttcctaattggtataagtaataataagaaaaaacatataaaggcatatcaaagagaaaggagagataaacagatgaagaaaargtttggggaaatcacaaaatatagcaatttccacagaacacagaattatgtattttggacttcctaatttaaagtaagacttcagtgatgtctgactccagaaattactaacagtaataattgtataattatcagcaaattaattactgctctttaac

SEQ ID NO: 520407 - DNA, 589 bp, Homo sapiens
atcatagcagccaaataaaattagaccattttgagtaattcccacccattcttgttcttttatttcattatttatttttttatttttggagacaaaaatattgctttgtcattcaggctggagtgtagtggtgcaatctgggatcactggaatcctttcctgtggggctcaagtgattctcgtgcctcaaccactcaagtagctgggagtacaggcacgtgccaccaagcctgctaatttttgtatttttcgtagagacagggttttaccctgttcaccaggctggtcttgagttcctggctttgagtgatccgccaaccttggcctcccaaagtgctgggattacaggtgtgcgaatggtctgcacccatcctttacttctctktagtcatctgttttttcatactttttcgactgtggggagcagctcggtcgggcacaaaggcacaggcagaaagaggccatgaggagaagatgggcttggggtggtgccgtgcttgcacatgaagtgtggttgtcaggttccaaaggcagagctggggccatgctccagggccccgagttgggaagcagaaatggcaccaagttc

SEQ ID NO: 520408 - DNA, 477 bp, Homo sapiens
catgtcctcagtgctccctgttctctttgtcttttcttgatcccttttccctttggattctgagtggtccccacttctattccctttaccttccactgagaaaaggcaggtttctgttcccacagtggaccctgtatggtgagcagtcctttctctgaggatctggacaatggccaaagcctccctgatcttcctcgccaacaccatcagaagactctgggctacacttgggctacttctctgcctgaccctgctgttctttccctggrcacctgagccctatctaccagccctcctgggtcacctcacctggggcgatccttctgtgtaagcagcatatgaagcccttccagcaatgcttttaaggtctccaaatgaagcgtcttcatcagtgatcccagagggaggcaggtgaagggccaggcctgcaccatcaccgtcagagtctggaagtgtctcctgcggaaggcctccatg

SEQ ID NO: 520409 - DNA, 566 bp, Homo sapiens
ctgctcatgtcctcagtgctccctgttctctttgtcttttcttgatcccttttccctttggattctgagtggtccccacttctattccctttaccttccactgagaaaaggcaggtttctgttcccacagtggaccctgtatggtgagcagtcctttctctgaggatctggacaatggccaaagcctccctgatcttcctcgccaacaccatcagaagactctgggctacacttgggctacttctctgcctgaccctgctgttctttccctgggcacctgagccctatctaccagccctcctgggtcacctcacctggggcgatccttctgtgtaagcagcatatgaagcccttccagcaatgcttttaaggtctccaaatgaagcgtcttcatcagtgatcccagagggaggcaggtgaagggccaggcctgcaccatcaccgtcasagtctggaagtgtctcctgcggaaggcctccatgaagagtgggagatagagcaccctgggcagctcctccatggcagagatggacaaggcctggtctctcagcaggctctgccccgcc

SEQ ID NO: 520410 - DNA, 554 bp, Homo sapiens
atggtgagctttctctgggggccatagcacagcctttttttgttacaataaacaccaatcagcatctactgtgtgccagccactggagatgtctagggaaggggacastagaatgcactgtcctgtttggtgctctatatcctgaagtgggtatcacaggatcgctccagtaagggcagagggatgacctggggtagaagctacagagagggacatcgtgtagggagctggttagtggagggttcagctctagtgagggtgaattccttttaggaattccttgttaggaagtgtgtttaaagttaatatgataaatatgaatagcttttgtgaattccttgttaggaagtgtgtttaaagttaatatgataaaaaagaggcaacagaggggagggtgtaaaagaagagaaagtgcaccaaacctgtgcgtttcacagaggaagctctgtcctcacagcttagtgaacatgaatgatcctctctctgattccctgtctgtaaaaggttgttttgaactccaggaaaggtaagtgacatgggaaatgcgtgcttct

SEQ ID NO: 520411 - DNA, 596 bp, Homo sapiens
gctcaggtgagggagggtggtgagctttctctgcagaccacagcagagcctgtttcactaaacgctagtgggcatctactgtgagccagcctatgaggatgwaacagtgaaggggacactagaatgtccatacattgtcctgttggcggccctgtcctgaaatgggtatcatgcaaccatcccaatagaggcagagggatcagctaggggagatgctatagagaggttgccatactaggaagctagctactgggggattcagatctagtgagggtgcctttctgaattcttcctgaggacgtgtgtctaagttaagatgatgaaaaataggccaggggcggtggctcatgcctgtaatcctagcactttgggagtctgaggcaagaggatagcttgagcctaggagtttaagaccagtctgggtaacatcccaagacccctgtcagaagtgaagaaataaaagtaaaaacaaacaagataactttttttttttctgagatgaattttcactttgatcatccagggtaaagtgcacttgtgacatctcagctcgcagcaacttctgcctcccaggttcaagcgattctcctgcctca

SEQ ID NO: 520412 - DNA, 596 bp, Homo sapiens
gctcaggtgagggagggtggtgagctttctctgcagaccacagcagagcctgtttcactaaacgctagtgggcatctactgtgagccagcctatgaggatgaaacagtgaaggggacactagaatgtccatacattgtcctgttggcggccctgtcctgaaatgggtatcatgcaaccatcccaatagaggcagagggatcagctaggggagatgctatagagaggttgycatactaggaagctagctactgggggattcagatctagtgagggtgcctttctgaattcttcctgaggacgtgtgtctaagttaagatgatgaaaaataggccaggggcggtggctcatgcctgtaatcctagcactttgggagtctgaggcaagaggatagcttgagcctaggagtttaagaccagtctgggtaacatcccaagacccctgtcagaagtgaagaaataaaagtaaaaacaaacaagataactttttttttttctgagatgaattttcactttgatcatccagggtaaagtgcacttgtgacatctcagctcgcagcaacttctgcctcccaggttcaagcgattctcctgcctca

SEQ ID NO: 520413 - DNA, 596 bp, Homo sapiens
gctcaggtgagggagggtggtgagctttctctgcagaccacagcagagcctgtttcactaaacgctagtgggcatctactgtgagccagcctatgaggatgaaacagtgaaggggacactagaatgtccatacattgtcctgttggcggccctgtcctgaaatgggtatcatgcaaccatcccaatagaggcagagggatcagctaggggagatgctatagagaggttgccatactaggaagctagctactgggggrttcagatctagtgagggtgcctttctgaattcttcctgaggacgtgtgtctaagttaagatgatgaaaaataggccaggggcggtggctcatgcctgtaatcctagcactttgggagtctgaggcaagaggatagcttgagcctaggagtttaagaccagtctgggtaacatcccaagacccctgtcagaagtgaagaaataaaagtaaaaacaaacaagataactttttttttttctgagatgaattttcactttgatcatccagggtaaagtgcacttgtgacatctcagctcgcagcaacttctgcctcccaggttcaagcgattctcctgcctca

SEQ ID NO: 520414 - DNA, 596 bp, Homo sapiens
gctcaggtgagggagggtggtgagctttctctgcagaccacagcagagcctgtttcactaaacgctagtgggcatctactgtgagccagcctatgaggatgaaacagtgaaggggacactagaatgtccatacattgtcctgttggcggccctgtcctgaaatgggtatcatgcaaccatcccaatagaggcagagggatcagctaggggagatgctatagagaggttgccatactaggaagctagctactgggggattcagatctagtgagggtgcctttctgaattcttcctgaggacgtgtgtctaagttaagatgatgaaaaataggccaggggcggtggctcatgcctgtaatcctakcactttgggagtctgaggcaagaggatagcttgagcctaggagtttaagaccagtctgggtaacatcccaagacccctgtcagaagtgaagaaataaaagtaaaaacaaacaagataactttttttttttctgagatgaattttcactttgatcatccagggtaaagtgcacttgtgacatctcagctcgcagcaacttctgcctcccaggttcaagcgattctcctgcctca

SEQ ID NO: 520415 - DNA, 534 bp, Homo sapiens
tgacctttccttggtgctcactgggagctgggtattatttgaagtacatagcaggaaaagactcacaactcgaggtttgcaattagaarcctccaagggctcccccgagcagagaccgtggcataacatgcccacagtcctcaggccagtgttgagaaaggccaaaccctgtaaaatattgttaaatagaactaaatatggcctgagaaagcctccatacttccatacttgagtccttgaggatgaaccgtaacctaacttagtaagcagacgagactagacacctgatttaggaggatgcttcagtggctgagtctcggccaatctcagcagccagactttcaccactcataggctgctgttcaaactgtgttcaaataaaagcaaatgccaagttgtaaccaatccggctgcttctgaatctcacttctgttttctgtccatcactttcctttttttaatctataaatttgctctgaccaagaggcatccctggagtctctctaaatctgctgtgattctggaggttacccg

SEQ ID NO: 520416 - DNA, 534 bp, Homo sapiens
tgacctttccttggtgctcactgggagctgggtattatttgaagtacatagcaggaaaagactcacaactcgaggtttgcaattagaagcctccaagggctcccccgagcagagaccgtggcataacatgcccacagtcctcaggccagtgttgagaaaggccaaaccctgtaaaatattgttaaatagaactaaatatggcctgagaaagcctccatacttccatacttgagtccttgaggatgaaccgtaacctaacttagtaagcagacgagactagacacctgatttaggaggatgcttcagtggctgagtctcggccaatctcagcagccagactttcaccactcataggctgctgttcaaactgtgttcaaataaaagcaaatgccaagttgtaaccaatccggctgcttctgaatctcacttctgttttctgtccatcactttcctttttwtaatctataaatttgctctgaccaagaggcatccctggagtctctctaaatctgctgtgattctggaggttacccg

SEQ ID NO: 520417 - DNA, 604 bp, Homo sapiens
ctgacctttccttggtgctcactgggagctgggtattatttgaagtacatagcaggaaaagactcacaactcgaggtttgcaattagaagcctccaagggctcccccgagcagagaccgtggcataacatgcccacagtcctcaggccagtgttgagaaaggccaaaccctgtaaaatattgttaaatagaactaaatatggcctgagaaagcctccatacttccatacttgagtccttgaggatgaaccgtaacctaacttagtaagcagacgagactagacacctgatttaggaggatgcttcagtggctgagtctcggccaatctcagcagccagactttcaccactcataggctgctgttcaaactgtgttcaaataaaagcaaatgccaagttgtaaccaatccggctgcttctgaatctcacttctgttttctgtccatcactttcctttttttaatctataaatttgctctgaccaagaggcatccctggagtctctctaaatctgctgtgattctggaggytacccgattcaagaatcattcttttttttctttgctcaattaaactctgttaaatttaatttgtctaatgttttt

SEQ ID NO: 520418 - DNA, 609 bp, Homo sapiens
gaaaatggtttagggttagtacttttacttttccccaaaagccctgatactgattcagaggttgctgcactatgaatggtcttcatgctgttttctttgggtgacccctcctggtggggtaaatgtggggatgatggtgatgttgacgactgaccgacccactgggtcagatttcaacgtcaagttgcctgatgaggtagacacaagtgtgctagcatgttctggagaatacccctcaggtcccctgtccccgtcagaacctgtacggattccacggctccctggggaatgacttggggatcctggaacttgtcctgcacccacagattaccccttggtggctgcagtgacatccacctgccaactgctaccctcaaaggctcttgttgaaatggacatgtgttctctgctggggccccacagagtsattttggctctttcctgtcacattataggaatttcatcaggtcccaaggaggaaatagaacaagagacagaggtcacaaaagcaaagacctcagcacaagagcgcacatcttagctggggatcagcctgtggtagtgagggcagggccagggaaggagggcagaaaaggggctcgagacagt

SEQ ID NO: 520419 - DNA, 524 bp, Homo sapiens
cacagaggtgtgacccttgccagccttgtgagagaagtgagcagataagtaagcagaagggtgatgctgtgtcgatgggaaagtacaggtgccaatgagaaggcacaggtgtcaaggagaagacacaggatgctggaggctcatgcaggatggatctccaaggcccaggggaagaagggcctctcggaggacgtgaatccacattaagactttggggataagtaggagcgccttaggcatggggacccatggatgcgaggcctgtaggacacagasaggatggcatgaaggcctgtgcaactggaggggtggggatggggacactaagagatggctggaagtgtgggggtggggacactaagagatgactggagaagagggggtcaggagtggtgaaaaatgggagaggagggcaggctgggccttttggatacagggggattgcatcctgcagtggtagggagccactgagggctgctgcagtaggagtgaggggatcagaggagagctttggaagccccctg

SEQ ID NO: 520420 - DNA, 529 bp, Homo sapiens
gaggggatcagaggagagctttggaagccccctggatgcgggacaggaagcgagataccagtgtctaggaggccagtgaggcagccasaggctccaccaggatcagggctgcgagggtcatgaggaggaaaccaatttgaaggagtccaggggaataggacttggaaatgaccgatgggacatttgggaagaggaagacagaagagcgcagtcccggcttctggctttagcagttgggcaaggggagatggggagatgtgcccatgggttgagggttgaggacattaggagggagccggtatggcaggaagagctggtgtgccagagatgctggaagcagcatctgcctgagaacagatacctggcaatattcctaagggaaagtgacatctcggagggtgaggagggcatctgatagggcctggaaagagccggggcaagcatgaatgtgaggttatcttggggggcaaggctcaggcgttgaggagcagcccctggtctcttcagcctgaagttggaagccagagtt

SEQ ID NO: 520421 - DNA, 529 bp, Homo sapiens
gaggggatcagaggagagctttggaagccccctggatgcgggacaggaagcgagataccagtgtctaggaggccagtgaggcagccacaggctccaccaggatcagggctgcgagggtcatgaggaggaaaccaatttgaaggagtccaggggaataggacttggaaatgaccgatgggacatttgggaagaggaagacagaagagcgcagtcccrgcttctggctttagcagttgggcaaggggagatggggagatgtgcccatgggttgagggttgaggacattaggagggagccggtatggcaggaagagctggtgtgccagagatgctggaagcagcatctgcctgagaacagatacctggcaatattcctaagggaaagtgacatctcggagggtgaggagggcatctgatagggcctggaaagagccggggcaagcatgaatgtgaggttatcttggggggcaaggctcaggcgttgaggagcagcccctggtctcttcagcctgaagttggaagccagagtt

SEQ ID NO: 520422 - DNA, 593 bp, Homo sapiens
ttttggatgcctttctctgtgggtatctgatggctggctctgatggctggctgtgatggctgtggctggaaatcattgttgacatgagtttcacagatgcaggctctgtccaaaytgtagcaaaagctgcctgccccagccgagctatgggcaataaggtggtttaaggatatagatgaaggaaaactcacccttagaataatttatccaaaatgctgctgtgttgtgggttagaggacattttctgaggtcccaggttcattgtttcatttaagtctcaaaagtccctccaggtgttggttctaattgtcaaagcatggggggagatgggctcatgggttaaaggtcttatcccagatttctgtatcctccttgcaagcagcaaaggggtctggatttgaatccatgaccatgtttctcctttgggtttccatcacactctgtccccgtgcactgagcaccctttagttcatatgacccccttaggcatgttacatgggcactcctataggtgcccatctggccctaggacttggccaacacaacatggactccagtttccatctgcctctttgccaggcacttttgtgcag

SEQ ID NO: 520423 - DNA, 527 bp, Homo sapiens
atctatctaacccatcactgagttttgtttggtaacaatgataggacataaagagcatacttaaattgcatttcaagtcatggcaaataattcttggtgttttagagagcagatccccttcccaaagacttctgagcatgtggctgaaatttcttaaacattcctcaaatgaggtwcaaattatggccatcctatttctcacctagtgactgtgttgtcctggcaagtctttagtctacattcgctatttcacttcatcaaataaaataaataatattgttagactctaatgaatgaagaatatacaatgtggcagctacttagtacacattcaatagcagtaaacttcacctttcctgtcacctcaaaataatatccaataacaaaaacgttttcttgggtggggtcaagatggccaactacaaacagtggtgatcagaggctccaactgaaaagaaccacagttagcatgtgaatccttcaccagcaaccagggtatccagattctctcatcagaactgactagg

SEQ ID NO: 520424 - DNA, 527 bp, Homo sapiens
atctatctaacccatcactgagttttgtttggtaacaatgataggacataaagagcatacttaaattgcatttcaagtcatggcaaataattcttggtgttttagagagcagatccccttcccaaagacttctgagcatgtggctgaaatttcttaaacattcctcaaatgaggtacaaattatggccatcctatttctcacctagtgactgtgttgtcctggcaagtctttagtctacattcgctatttcacttcatcaaataaaataaataatattgttagactctaatgaatgaagaatatacaatgtggcagctacttagtacacattcaatagcagtaaacttcacctttcctgtcacctcaaaataatatccaataacaaaaacgttttcttgggtggggtcaagatggccractacaaacagtggtgatcagaggctccaactgaaaagaaccacagttagcatgtgaatccttcaccagcaaccagggtatccagattctctcatcagaactgactagg

SEQ ID NO: 520425 - DNA, 510 bp, Homo sapiens
ctgggatatggggagcagtatcctgaggctgtgtagagcagtggggccctgggcctgccctctgaaatcattcagtcctgctaggcctctgggactgtactgatcatggctgcctcttcgatctctgaaatgccttccaggtcttttccccattgtcttggatattaacagttggctcccttttagttatttaaatctctcttacaagtgattgctccatgacctgcttgagttcccttggcaataatgctttttcttttccacatggctaggctgcaagttttccaaattgtaggctctgcttcccccttaaatataacttcccactttagatcatttatttgatcccatatctgaacataggctgttagaagcagccagaccacatcttgaatgctttgrattcaaggattgattgaagattaagtcagatggccctgagcttgtatgggacttagcaggatgaagctgtgcttctgctcagacccaatttcattcctctgctgtctt

SEQ ID NO: 520426 - DNA, 619 bp, Homo sapiens
tgaaacacatcccctttctacatacacatggaagaatattattcaggtaaacgattattcatatttccgtgcaagcttttagcaagcacctgataaaatcttctgactagggattgaggattgagtcacttattggcactttgttgcattaatcaccaccatcaaataataaactatcagtcactcagttgtacaggctgctatgcgggcctttatctgataacaatgcacttcaccgtagttacaaaggtactttttcgaagaaaataggataatttggcctttgaacaggatttctccctcttcctatctaccttacccttgtttgattgctttggtgcctgaatttggtcagaaggaggggagcaaacggactcactccctgctctaggtttttgctgttggcatcagggaacaggmtttcctttgtaatgattaataccaacatggtggaattttcctattgttcagttgtcatttctaagctctgtgttgctgtcagcctggcagccaagaaaaacccctctaacaaccctagaaaccactgccctggcttggaatcaatgggcagcagtgtttctgagctgacagtttcaggtggaagagacagcagattttc

SEQ ID NO: 520427 - DNA, 612 bp, Homo sapiens
ggcaggcacaaagaggtgaggggaaaagcttgaaaaggaagcaaatgacagaaccatatgatagctagtaggtcttccttgtgagtacaaatgagacttctccttaggcctcctaggaattataattgtgtctgartgagggtcatggaataatgactgaaagaaagaatcaaagacacatggatttgtgcatacctttactgcattaaaatcatataaattctatagtaaatataatgatggactactttgcatattttgaaatgaatctggataatacatttattgattaactttcatatttgtacttatgaatgtcaacataatggacataaactttactctctggaatgtatgtgatgcggactattttatcatatgctgtcacttgaaaatgcattatttcatctaatccagcagtcttgtggggcacacacttctaatatagaatatcctcttttaaagaagaggaactaattccagcaggaccaacaacttgtttaacatcacaagtaaacaacagaagggttaacactcagccccttgggctcaggatcctactctcctttcatagccctatatgacctgccagttgtctaactgctccttgat

SEQ ID NO: 520428 - DNA, 537 bp, Homo sapiens
gggtatggaaggtggatgctagggctttgagagccccaggaggaaagaccatccaargccagagcttagggcaataaggacttgaagttcaaggtggtttctttcctgtgcctggtgctggtgctactttggggaatgaaagaagagaggtgtgccgggcgcagtggctcatgcctgtaatcccagcactttgggaggccgaggcaggcagatcacaaggtcaggagtttgagaccagcccgaccaacatggtgaaaccctgtctctactaaaaatacaaaaattagccagacatggtggtgcatccctctgatcccagctagtcaggaggctgaggcaggagaatcgcttgaacctggaaggcagaggttgcagtgagccaagattgtgccattgtactccagcctgggtgacagagcgagactccatctcaaaaaaaaaaaaaaaagaagagaggtagtggccttgagataggtgatgacctcgttggggtaaagcagcaagcaggggcagcaggcggaagagtgcatagagaga

SEQ ID NO: 520429 - DNA, 527 bp, Homo sapiens
atgtctacaaaatatgagtgtccatagcatctttaaatgtgacccatgttaaacatacattttgttgtgaactgagaaaagtttatatcgtcatttcaaatagcttggattttagagaagaacagcacctaggaagcaaaagaccatcctttgtttcatcagggttcaatattaattcaaaaragtgaatggattcctttcttgttctcttccccaaccacctaccaatttagctatatatctcaagcaagcagagttttacataagcctgttcattgcttccatcatgctttccaacaaacattcaatcactctcctctcctattttgggataagcagttgtgaaattttgctgaaaatttcttactgtgcctttgagattaattccctctgttaactgaatacggatggaaataattaaccttccactcggttttaatagaaaaaaaagtagaatttcagtagcactaacttactttataggctattacttctattgtctccatcccatctcttcccacatgtga

SEQ ID NO: 520430 - DNA, 527 bp, Homo sapiens
atgtctacaaaatatgagtgtccatagcatctttaaatgtgacccatgttaaacatacattttgttgtgaactgagaaaagtttatatcgtcatttcaaatagcttggattttagagaagaacagcacctaggaagcaaaagaccatcctttgtttcatcagggttcaatattaattcaaaaaagtgaatggattcctttcttgttctcttccccaaccacctaccartttagctatatatctcaagcaagcagagttttacataagcctgttcattgcttccatcatgctttccaacaaacattcaatcactctcctctcctattttgggataagcagttgtgaaattttgctgaaaatttcttactgtgcctttgagattaattccctctgttaactgaatacggatggaaataattaaccttccactcggttttaatagaaaaaaaagtagaatttcagtagcactaacttactttataggctattacttctattgtctccatcccatctcttcccacatgtga

SEQ ID NO: 520431 - DNA, 475 bp, Homo sapiens
gctgactggcaatgagcatgcaatatgaacaagaaataagtatttggttrtaagccactgggttttggggttgtacttatcacaacataacttagtgaaagctggtgaacacagcacccaataaaagtttgttgaataaatgaatatactgaaaaaacaatgaatgagtgagtgaattatgttttctccagtacctagctaggactatggttcttatgtacatcaccaaatcaactaatttaagcatgtgctcttttaatagtgactatattatctgacacttactttggatataaatacttttaactaaaaagtcaggcatgaccttgtagtcatccagacaccactcggaatatccatccccagaacccatgtggaagtaaagtggcagtgaagagaccaacacttcttgggcaactactgtttcaaacactttacatatgccagctcagcagagccccttcaagtatatttt

SEQ ID NO: 520432 - DNA, 475 bp, Homo sapiens
gctgactggcaatgagcatgcaatatgaacaagaaataagtatttggttataagccactgggttttggggttgtacttatcacaacataacttagtgaaagctggtgaacacagcacccaataaaagtttgttgaataaatgaatatactgaaaaaacaatgaatgagtgagtgaattatgttttctccagtacctagctaggactatggttcttatgtacatcaccaaatcaactaatttaagcatgtgctcttttaatagtgactatattatctgacacttactttggatataaatacttttaactaaaaagtcaggcatgaccttgtagtcatccagacaccactcrgaatatccatccccagaacccatgtggaagtaaagtggcagtgaagagaccaacacttcttgggcaactactgtttcaaacactttacatatgccagctcagcagagccccttcaagtatatttt

SEQ ID NO: 520433 - DNA, 623 bp, Homo sapiens
tggctgttagttttagcctcagggtacactgccccctgcacttccaatctcactcaggtgtcctacaagcaccccagattcaataagtacaacaattgatgctttacatttctcgtaagctttcttctcctcttaacattctgttaattgcaccatcaatcctagttgtctaaggcaaaattcttggaaatcattcttgaacctctctttccctctctcccacacccaattaaccagcaaatcctgaaggcttagcctcctaacatttcctgcatctctgcattctgcccyatttccattatcactgccttcatcatcttttcccctggacaatagccacccataaccccttacctccagccttgctcacctcaactccaagcttcctacctatcactcctctgccagcatgttcaggataaggttcaaactcccagacatgcatataaggacttctgagccctggccttgcctgccccttctgcttgatctctgtctactcacttctgcattgcactttccactttgataaatctgaatggcctggagttccatgacactatatgctatctctcatctctgtgtctttgctcctgctctcccctctcctgaaccctcctctc

SEQ ID NO: 520434 - DNA, 274 bp, Homo sapiens
cttacctccagccttgctcacctcaactccaagcttcctacctatcactcctctgccagcatgttcaggataaggttcaaactcccaracatgcatataaggacttctgagccctggccttgcctgccccttctgcttgatctctgtctactcacttctgcattgcactttccactttgataaatctgaatggcctggagttccatgacactatatgctatctctcatctctgtgtctttgctcctgctctcccctctcctgaaccctcctctc

SEQ ID NO: 520435 - DNA, 543 bp, Homo sapiens
gatgaaaaatcaacagtaaaatttctttaaggattttttttcagcaatgcagatagatgctgttgtttcagcaatactgtcttgctttaacctctttatgactaatttactatttcaacaaaatttawtggaaacaggcttctgtgctagcatataagattctgtactagatatcgaactagtggagggaagtaagaggaataccaagttgaaacagaaaccataatgacccccaagaaacatacaaagcagcagaagagataagaaaatgaattcaaaagcaaagcagaaagggtgtacaacaagagaggcatggttaaactaaaaaggaggggattatttctgaaggaatcaaagaaaatttgcatgggaaatgacatttgaagcaggccttaagagatgcattggatataaagagggagggaaaggagaaaggacattccacgctgatggaagaatgaacaaaggcacacgggcagacagcatatatggaagtgagtgatatcacagcagggcagaaagataaactggatccaggctgta

SEQ ID NO: 520436 - DNA, 610 bp, Homo sapiens
aatttgttttgcaaaatatcaaagctattgttcttaaacttaaaaatatcaataaacgtttggccaatataatttcataaacttgaattctaaagctaatacatcttctattaaaaggaacagcatttcaaaataccaaaaagaaaacaaagataaagctccatgtccaccatacagaggagaaacacaacttgttgcacactgtgtatttaccaggttgaccctcgccctcccctacttagaaccttgactgccctcttcaaacagagttgagaatcaggagaagctgctgaccaacgctgtgcaatgattatgacaacagtactgtccatgggtccaatcctggcccagactctctcttcctcatctctcaaaaactcatcatgtcagcctgaggacaagaggtcagtccctttgactttggctaaaaattctagaactttcgtcttgctggtttcagcctgggctcttggaccacacagaaattcatagcatggaggatcactgctaggcacctatcagtattttaggtaatttgcttgcacccaatctatggtgatgagctttctgagctccccatrgatgaaatgctcctttccagcatacatgc

SEQ ID NO: 520437 - DNA, 511 bp, Homo sapiens
aaccacccacatgaaacagaaatgcagagaacgctgttttctctccagctccacctgggcccttcactatgtaggacctcaactgccttcttcaaacacaaagggaagaaactaccccagacttcattcaggacaggagaagttgctggacatgaaactgaagcttgcactgggcatggcagtggcatcatctgtggtggaaattatggcctgggctctctcttccacatctttcaaagcatccttgtaccaggatggaaaggaaatagggatactattgtatakcttggccaaaaactctagtactttctgcttggtgctttctgaatgggctcttggaccccacaggaattcataacgtggaggagaactgttgggcacctcccaatactccaggtaatgttcctgcacccaaactttagtgaggagctccctgggctccccatagacgaagtgctccctcccagcatacacccctattgccttcagcacttcccagatgacctcctca

SEQ ID NO: 520438 - DNA, 607 bp, Homo sapiens
tctgtgtagacgcagacctgcacacacaggcacacacatgtgcacacacacacacacacgaatgcaacattgacctggataaatgagttttaatcagctctgcattcaagggaaagaacatacgccatgtgtgctctggaagccacgaaatgggtgaaaagttgttttggtagaacccatttcctgaaatagcaaccactggagaaaggacgattgcacttcaactatttctgtctgattgggaaggaaatattctttatctcaatgtcttggagtaaggaagggatggacagggccccgtcttttagcaatgcactaccctaaatcaaggtcatttctgtccatttcagtcttaaatttcctctttgcctttgcttccttcttttcaagtcctgtgtttttatatctgtttatttccacacctgcatccttagccgtggcctctattgtctgtcacctcgaaggcgattgtcagttggtaggtctcttctgttgcatctgtaggttttcagaggagaaagctatttatgtattaacaagaagctataccagtaaacaaaggaaaytccgccagtgtcctgggtctgactctgaacctgccgcctgt

SEQ ID NO: 520439 - DNA, 271 bp, Homo sapiens
ctctacggttgctgctaatttccatttttcagaagtaatctcttcgcatggttctaaagttacagagtctatacaaaagtgacaggataagtctcgttcaccctggycaccaccccctgtccagcatttgccctcgggacaaatgagacatttccaggctcctgcagatctacagggaccgttggcacattcactggcatgggcaactcagggcagaatgtcaagcacacacccctctgcacagtgcctgtgtctgctctgtgtccgtaca

SEQ ID NO: 520440 - DNA, 556 bp, Homo sapiens
tctgtgacacagcttcctcatctttcagcgagggcccttgcagctcaaatgtcctgagacaccaggtttcaaatgctcagcccactgtggctgtagaattccagaccaagaccaaatttgttgatattattattattattacggttatttgaggtggagcctctctctgtcaccaggctagagtgcagtggcaygatctcagctcactacaacctccgcctcccaggttcaagcagttctcctgactcagcctcccgaggagctgggactataggcgtgccgcaatgaccggctcatttttgtattttcagtagagacagggtttcaccacgttggccagtttggtctcaaactcctgacctcaggtgatctgcccgtcttggcctcccaaagtgctgggattacaggcatgagccactgtgcctggccatgaccaagttctaaagaccaactttgtcttttattatatagcccagagggatctttttttttctcccctttctcttttttggagctaggaaatagaattccagatgactggcagtttgttaactgc

SEQ ID NO: 520441 - DNA, 556 bp, Homo sapiens
tctgtgacacagcttcctcatctttcagcgagggcccttgcagctcaaatgtcctgagacaccaggtttcaaatgctcagcccactgtggctgtagaattccagaccaagaccaaatttgttgatattattattattattacggttatttgaggtggagcctctctctgtcaccaggctagagtgcagtggcatgatctcagctcactacaacctccgcctcccaggttcaagcagttctcctgactcagcctcccgaggagctgggactataggcgtgccgcaatgaccggctcatttttgtattttcagtagagacagggtttcaccacgttggccagtttggtctcaaactcctgacctcaggtgatctgcccgtcttggcctcccaaagtgctgggattacaggcatgagccactgtgcctrgccatgaccaagttctaaagaccaactttgtcttttattatatagcccagagggatctttttttttctcccctttctcttttttggagctaggaaatagaattccagatgactggcagtttgttaactgc

SEQ ID NO: 520442 - DNA, 556 bp, Homo sapiens
tctgtgacacagcttcctcatctttcagcgagggcccttgcagctcaaatgtcctgagacaccaggtttcaaatgctcagcccactgtggctgtagaattccagaccaagaccaaatttgttgatattattattattattacggttatttgaggtggagcctctctctgtcaccaggctagagtgcagtggcatgatctcagctcactacaacctccgcctcccaggttcaagcagttctcctgactcagcctcccgaggagctgggactataggcgtgccgcaatgaccggctcatttttgtattttcagtagagacagggtttcaccacgttggccagtttggtctcaaactcctgacctcaggtgatctgcccgtcttggcctcccaaagtgctgggattacaggcatgagccactgtgcctggccatgaccaagttctaaagaccaactttgtcttttattatrtagcccagagggatctttttttttctcccctttctcttttttggagctaggaaatagaattccagatgactggcagtttgttaactgc

SEQ ID NO: 520443 - DNA, 638 bp, Homo sapiens
ctgaggcatgaataggttaaatgagtccagctaagtcctggggctgagtgtaaacagcctatgcagtgcaggcttatccagtccctgcccttaaccctgcaacactgtcctcaagggaaagyggagacactaagaactctggatgaacatttccttcccgcaagacttattaggtccccaaagggactctaaggcgagaaaagagattttaaaagctattaagagctggagaaactatgtttttgaaggatgtttccatttcagacagtatgggctggctttctgctatgaaactcgaagtgacgggtacttgtttcttcctacgcctacctcccacctcaccatttttgctctttatagtttgtccttagctgagtttataatatttatactctgttcagttgccataattccccctgttgttttgactttgttttatatttgcatgaatttaatgtgcatcacgatagtgcagcactgatcacagtttatccctctcagagttctttattttgatttattttttggttggctggatttcattgtcaagtaatttccttaggaaaggctcatgggtgccttattccctttgtttttttcatatttgaaactatgtgccttttgcttttatatttgaa

SEQ ID NO: 520444 - DNA, 638 bp, Homo sapiens
ctgaggcatgaataggttaaatgagtccagctaagtcctggggctgagtgtaaacagcctatgcagtgcaggcttatccagtccctgcccttaaccctgcaacactgtcctcaagggaaagtggagacactaagaactctggatgaacatttccttcccgcaagacttattaggtccccaaagggactctaaggcgagaaaagagatttwaaaagctattaagagctggagaaactatgtttttgaaggatgtttccatttcagacagtatgggctggctttctgctatgaaactcgaagtgacgggtacttgtttcttcctacgcctacctcccacctcaccatttttgctctttatagtttgtccttagctgagtttataatatttatactctgttcagttgccataattccccctgttgttttgactttgttttatatttgcatgaatttaatgtgcatcacgatagtgcagcactgatcacagtttatccctctcagagttctttattttgatttattttttggttggctggatttcattgtcaagtaatttccttaggaaaggctcatgggtgccttattccctttgtttttttcatatttgaaactatgtgccttttgcttttatatttgaa

SEQ ID NO: 520445 - DNA, 493 bp, Homo sapiens
taagatcctgcttcagaaaaaaaaaaarcaaaagaaaagaaaaagaaaaaaaaaggacactaaaaataaaggaggtagcccgggcgtggtggctcacacctgtaatcctagcactttgggaggccaaggcaggcagatcacaaggtcaggagatcgagactatcctggctaacacagtgaaaccccatctctaataaaaatacaaaaaaattagccaggtgtggtggtgggtgcctgtagtcccagctactcaggaggctgaggcaggagaatggcatgaacccgggaggcagagcttgcagtgagctgagattgtgccactgcactccagcctgggtgacagagtgagactccatctcaaaaataaataaataaataaataaaaataaaggagatagattgtaaacaaatgaaaaagaagcagaaagaatttgcagacataaaaacattgagtgtaagaactaaatagacaggctaaatagtcaattagaca

SEQ ID NO: 520446 - DNA, 626 bp, Homo sapiens
tttgacattactcccagagaaaagtcataatgactgtactttcatttgttttatgtggcagggagggtctaagaggctaaagatatctgatactactcagttgatactcgttattatggtcatctgttactatgcaataaaccatccccaaatttaggggcttataacaacaccttatcattttctgtcataattctgtgggtcatgtgggcttaggttggtggttctcccttgggtttctcctgcttttgtcagcagatgacatctggggctgactggttcccttgggtgggttatcccggacggcttactcacatgctggcagtggatgctggctgaacgctgggagctcmgctgggcctcactgaccatagtatccctgtggcctctctctgtgacttgggcttctcatagcacgatggctaagtcccccagatggaacatctaagagccagtgtctcaagaggcaggaagcagaagctgctaaattagttaagagctaggcctggaactggtgcagtatcacttcctctatgttttattcatcgaagcagtctcagggcccatccaagttcaagagggtgagtgagtgacaaggtcacgttgcataagagcacagaggaggg

SEQ ID NO: 520447 - DNA, 398 bp, Homo sapiens
atttattgtgttattgcagctggggagggagaaaatgacagcatcccaggggtaagatttaatcttgaattcatcaggaaaatgacccctgaacatcccgagtctagccctcatttgagaactagtcctgctaattatataccttccccstaaagtacagtaagcataaaaatgtttccagatattcagccaaggaaaatagttattcatatacttaccttttgtcaggcatagtctaggccataatgacctaaaagtgtaaaacacacttgccttctgcccttaggcagctcatggccccctgtagtttagggaaagggatcggaaacagcaaacaagcaagtagtcaaataactatataattacaacttacggtgagtgcaattatgaacataaac

SEQ ID NO: 520448 - DNA, 647 bp, Homo sapiens
taaaaatacttggtaaatggtgaaacagtaagtggatgctgggtgcctttattgtgagagctttgagaagtgtgtcaggtcaggggtaaatagcccctgcttttagagcagagtggtgactttcatttctcattactgcagaaggtccagcatctcttgcctaatgagaatgtcatcctcctggtctccaggtcaggccgttgagttctctctgatgtgtctttgaaacttgcyggcagtcttgtagcattttagaatatgctggatcaaactttatcctttcagaaaaaaaaaaccaaaaaaaaaaaactaattgattgcagacacaaggaccaaagcaatttttgtaactgttcattagtaccgacacttgggaaaaccaaggatttgtctaacaaggggcagggaacttagttaaagaagctccattttctctctctttttccccagcctgcggatatggtttgaattagaagttaaagaaatttgctaaaatgaaacaccatgtgaactctttggaatcgcttcacatccaactctctgacctttgatatcctttctattgcctctgggccttgttagagtgagggatgtttttcagtttctatataagcaatggaagcaaacatgttttaaaataatgcaat

SEQ ID NO: 520449 - DNA, 551 bp, Homo sapiens
agaatatgctggatcaaactttatcctttcagaaaaaaaaaaccaaaaaaaaaaaactaattgattgcagacacaaggaccaaagcaatttttgtaactgttcattagtaccgacacttgggaaaaccaaggatttgtctaacaaggggcagggaacttagttaaagaagctccattttctctctctttttccccagcctgcrgatatggtttgaattagaagttaaagaaatttgctaaaatgaaacaccatgtgaactctttggaatcgcttcacatccaactctctgacctttgatatcctttctattgcctctgggccttgttagagtgagggatgtttttcagtttctatataagcaatggaagcaaacatgttttaaaataatgcaataaaagcacccatcttatgaaagggacaattatttgaagactgttgaccttacaagaattggacaaggatttggcatcttgaaagtgtgctttgatactgaagagttgttctagaaatgccactatgtcattactctgtcagttactcttcaagacac

SEQ ID NO: 520450 - DNA, 589 bp, Homo sapiens
ctatgaactagaaagctgccactgaatctgttggcgccttgatcttggattctccagcccccagaactgtgagaaataaatttctgttgcttataagctacccatatattgtattttgttgtgtgtcaaacaaagacaaaaaccaaactcacatcttatatgggcagtggaaggagaactccaagttgaggggggctgctcttttagacctatgattctcaaattctaatgtgcacaccagtcatctggggatcatgctaaaatgcagattctgattccatggttctgggatgagacctgggactctgcattcctaacaagctcccagatgatgttgatgctgttggtcttggggccctttgagtagtaagggtttgcaacagtgcttcttaaaygtgtgtgtgcaaaagaatcacagggaaggctgattaaaacgtggattcctatttcccatcctgaagattgattcagccggaggcctgataatttgcattttaacaagttcccaggtgatcctgatgctgctggtccccagactacattttaataacaagcctctagttaacttttgaacaacttaattaagata

SEQ ID NO: 520451 - DNA, 589 bp, Homo sapiens
gtagcttctctggtcctatattctgaatacattacagcatgttcattcctttgtctttttatccctttctaaatactcctattaggcaatttcaacatcttrcctcattcactatatgctgtgttttttccccaaatcccaaggatccattccaatagtgcattaggactggctccataagtccttgctgagatgctatatcttgagttacaggagagtgcccttcacaatgagttcacccttatccagtttatattctactccctcaatttcaggtatatcctctcagttgctgcttatgcatattagccaggccatgcagaatgtttggtacatagttcgtttcctctcatggaagagcagttcatcgccagtaaggctgtgttgaggcataaccctagtaactgctgtacaagccgtgagtggaagtaaggacagattttaaaagtcatggatgtgctcctttcttctgtgtagaatgactggggtaaatggccatatatcccttaagtgggaaggaatggggaaatcactatttaagtacttggctgtagcattacaaaattcttccttaaggggaaggggatct

SEQ ID NO: 520452 - DNA, 589 bp, Homo sapiens
gtagcttctctggtcctatattctgaatacattacagcatgttcattcctttgtctttttatccctttctaaatactcctattaggcaatttcaacatcttgcctcattcactatatgctgtgttttttccccaaatcccaaggatccattccaatagtgcattaggactggctccataagtccttgctgagatgctatatcttgagttacaggagagtgcccttcacaatgagttcacccttatccagtttatattctactccctcaatttcaggtatatcctctcagttgctgcttatgcatattagccaggccatgcagaatgtttggtacatagttcgtttcctctcatggaagagcagttcatcgccagtaaggctgtgttgaggcataaccctagtaactgctgtacaagcygtgagtggaagtaaggacagattttaaaagtcatggatgtgctcctttcttctgtgtagaatgactggggtaaatggccatatatcccttaagtgggaaggaatggggaaatcactatttaagtacttggctgtagcattacaaaattcttccttaaggggaaggggatct

SEQ ID NO: 520453 - DNA, 470 bp, Homo sapiens
gcagaataaggggaactctagaacctgtcccactcacagttttgctgatatagttttttatattgggtttttttkttccctgtacccttctcagtgttaaaaaaaaaaaaagaaagtatttttcttataatagacaatatggattagcataccctggccccagtaatgatactgttccttcatctcatcatgtccatgcacacacaaacacacaccccaccctttctgtcctccacccccttaaatgtgagagtcaccaccatcatatttggtcggtaatattttttaaatgggacctctgtgggagctagaaaaatagcgataattggttcctttcagaaatctttctaagaacaagtatcttttctttttaatgttttgttttaagagatggggtcttgctctgtcgttcaggctggagtgcagtggcacgatcgtggctcactctagcctcaacctcctaggctcaa

SEQ ID NO: 520454 - DNA, 470 bp, Homo sapiens
gcagaataaggggaactctagaacctgtcccactcacagttttgctgatatagttttttatattgggttttttttttccctgtacccttctcagtgttaaaaaaaaaaaaagaaagtatttttcttataatagacaatatggattagcataccctggccccagtaatgatactgttccttcatctcatcatgtccatgcacacacaaacacacaccccaccctttctgtcctccacccccttaaatgtgagagtcaccaccatcatatttggtcggtaatattttttaaatgggacctctgtgggagctagaaaaatagcgataattggttcctttcagaaatctttctaagaacaagtatcttttctttttaatgttttgttttaagagatggggtcttgctctgtcgttcaggctggagtgcagtggcacgatcrtggctcactctagcctcaacctcctaggctcaa

SEQ ID NO: 520455 - DNA, 605 bp, Homo sapiens
tattaaatgaagtaaaatgaaaaatgtatgttcaaaatggagttcatgaaagccaatataaaacatttaatactgtataattttcagcttttaataaaataacattttccgttttaatataatgagctgcattttctgctttggcagaaggatgcaggacacattactttcactatcaactgtttttgtaaacaacatagtttagttcaattagtgtgactcattccaacaggtcattaaatcagtattacaggctaactgaactgattagtcaaaaaaattttcacagcggaaagtcacaacatctcaattctattagagtaaaaccttgattgacctgactctaactaacctgaactctcaattaacaggattttttttctgcacttgaattttaaaagaacaaggcaaataaaaggacaactttatagtaagtatgttatagatagtacagttataaatggtaggctgtcccaatgarcaggcctatttgttgtgttttgaagaacactgtgaaggactctagcctcccagatagcattcagtttgagatgcctgaaattttacctttgctcattagcctttgatttaaagaatggcaaaat

SEQ ID NO: 520456 - DNA, 626 bp, Homo sapiens
actaaaaatcctagtctctttgactccaaatttggcttctaataaatatgtcaaaaaaggccactatgtcagatggctacagtgttgttgggaaagatcctactacaccccgaatcctcacctaaccatttatctcgctgttttccaaagttgtttttaccaagactcccagaaagatatgtattagcccgttttcacactgctataaagaactacctgagactgggtaatttacaaagaaaagaggtttaattgactcacagttctgcaggctgtacagaaagcatggctgagaggcctcaggaaacttataatcatggcggaaggtgaaggggaagcaagcactgtcttcacatggtggcaggagataaagttgggggaagtgctatacacttttaaacaaccagatattatgagaactccgtcatgggaacagcaagggggacgtccacccccataattctgtcacctcccactaggccccttctccaacacatgaggattacaatttgacrtgagatttgggtgaggacacagagccaaacaatatcaagatagtttgcatcatgtctggtgtacatgctcatgcacacacacgcacacacacacaattgaaataaacacga

SEQ ID NO: 520457 - DNA, 642 bp, Homo sapiens
aaagggaactgagactcagggaagggagaaggtgactacccaagggcacactgtggtggctatgtacagagcctgaactagaaccctgtttctttttttttttttttaattcagagctgtgtttaccacataagactgcctcatgactcttgaagaattacctgaaggctggtctgagtgcaatggtatttacaactaattgatcacaaccagttacagatttatttgtttcttctccattccccctgctttacttgaccagccttaataataacgggccgggtgcggtggctcacacctgtaattccagcactttgggaggctgaggcaggtggatcacttgagatcaggagtttaagaccagcctggccaacatggcgaaaccccrtctctactaaaaatacaaaaattagccgggcgtgatggcgcatgactgtaatcccagctacctgggaggatgaggcaggagtatcgcttgaacccgagaggcagaggtttcaatgagccgagatcgcaccactgatcgccagcctgggtgacagagcaagactccgtctcaaagaataaaaaaaaccccacccccacccccccaaaaaaaacaaatatgaaggcagtttataaactatattattattattacta

SEQ ID NO: 520458 - DNA, 642 bp, Homo sapiens
aaagggaactgagactcagggaagggagaaggtgactacccaagggcacactgtggtggctatgtacagagcctgaactagaaccctgtttctttttttttttttttaattcagagctgtgtttaccacataagactgcctcatgactcttgaagaattacctgaaggctggtctgagtgcaatggtatttacaactaattgatcacaaccagttacagatttatttgtttcttctccattccccctgctttacttgaccagccttaataataacgggccgggtgcggtggctcacacctgtaattccagcactttgggaggctgaggcaggtggatcacttgagatcaggagtttaagaccagcctggccaacatggcgaaaccccgtctctactaaaaatacaaaaattagccgggcgtgrtggcgcatgactgtaatcccagctacctgggaggatgaggcaggagtatcgcttgaacccgagaggcagaggtttcaatgagccgagatcgcaccactgatcgccagcctgggtgacagagcaagactccgtctcaaagaataaaaaaaaccccacccccacccccccaaaaaaaacaaatatgaaggcagtttataaactatattattattattacta

SEQ ID NO: 520459 - DNA, 642 bp, Homo sapiens
aaagggaactgagactcagggaagggagaaggtgactacccaagggcacactgtggtggctatgtacagagcctgaactagaaccctgtttctttttttttttttttaattcagagctgtgtttaccacataagactgcctcatgactcttgaagaattacctgaaggctggtctgagtgcaatggtatttacaactaattgatcacaaccagttacagatttatttgtttcttctccattccccctgctttacttgaccagccttaataataacgggccgggtgcggtggctcacacctgtaattccagcactttgggaggctgaggcaggtggatcacttgagatcaggagtttaagaccagcctggccaacatggcgaaaccccgtctctactaaaaatacaaaaattagccgggcgtgatggcgcatgactgtaatcccagctacctgggaggatgaggcaggagtatcgcttgaacccgagaggcagaggtttcaatgagccgagatcgcaccactgatcgccagcctgggtgacagagcaagactccgtctcaaagaataaaaaaaaccccacccccaccccccmaaaaaaaacaaatatgaaggcagtttataaactatattattattattacta

SEQ ID NO: 520460 - DNA, 500 bp, Homo sapiens
ggcgcggtgcgaagatgggcgaggacagagcagggcccgagcgccagccccagcagcccgggcgccccgcgcgcgcccgcccgcgccgccgaggggatgcccgcgcccgccgccgcgccctgagcgcctttgtctgccgcccgcgcccttccgcaccactagcctctcgggagcatggcgtcggccccgccggcctcgcccccgggctcggagccgccggggcccgacccggagccgggcgggccggacgggccgggggcggcrcaactggctccgggccctgcggagctacgcctcggagcgcccgtcggcggccccgacccgcagtccccgggcctggatgagcctgcgcccggggccgctgcagatggcggggcgcgttggagcgccgggccggccccggggctggagggaggcccgcgagaccccgggccgtccgccccgccgccgcgctccggcccgcgggggcagcttgcgagccccgacgccccgggcccagg

SEQ ID NO: 520461 - DNA, 600 bp, Homo sapiens
tgctcaagaggctgaggcaggagaatcgtttgaaccccggaggcagaggttgcagtgagctgagattatgccactgcactccagcctgggccacagagtgagacctgtctcaaaaataaataaataaataataataacattttcatgggacaaagttatacatttgctcatttaccaataaaatgattgattacatcaggacctaggawattctgatatatttattgccacatacaaaatctactttagatgagactcaaagtgtcatataagaatataatgcatatttatatttatgcacagcacatatatatctacacagaaatacatggggacctacctatctatgctacctgaactatcatgccgctttccttgccacaataagctcttagtatgtcaagggctgtaatcacaactcattctttcttttgagggccattaattttgtttttatcacctcattataaataacaatgttcttagatactatggccattcccaattgactaagagtagagaaaccctggtaggtgctaatattttatcattatttaattactactcttctaataaattggaagaaccatgatcagacct

SEQ ID NO: 520462 - DNA, 622 bp, Homo sapiens
aactgctccctcataatttctcacagtagttatgagagtaaaatgagcctcagagggtccagcctctcaaggttcacctctatgggaagctgacgcctccgtgagttcaggaaataagacattgagtagaatctcaatccatttagaatgagctgctttgtttccttagatcctttctttttgtggaattctcaaagaaaaatartgattgtaagagatgctggtggaagagaagtgtgatgcgtaagaacttacactctgaaatcaggtagacctgggttttaacttcatctctgccgtttatacctgtgtgtctcaagcaagctacttaaccactgtgtacctcaagttcctctacagtaaaacagagatcaaagtagtagtagaaggaagctaacaaagattaaattaggtaatgtacatttgatgatgatgacaatgatagctctaagcagagtatctggcacatttcacctcggtacatgttagaacttgcgtttggctccactcttttgctgacagcttctatcaaaaataactaggttgcttttgtggggacctagaagcttaaggagatgggcagggatagagacatgatttcagggaggcagaatattacttt

SEQ ID NO: 520463 - DNA, 563 bp, Homo sapiens
ggtttttaaaaatctgaaggaccattctcagctcttccaccccagaatggctgccctggcatagaaactgttccaagatacacgtcctgtgtcctgagtatggggatatgctgtaggcacgtgatgcttggagctatcagaacagaggggctaaggcaggaagcctgccggggaacaaaggtcaaccgtgaggaactggggcttggtggggtggtcagtgggtaatgtgtccaaggttcaagtcccaggctctgtctgtacaggctgcattgcagaggkggaagggaggtgagtgtggccgggcatctgggtatttttcagggctgcaggtgctcagtgctgggggaggaagcctcctggctctgcaagatctgtgtgatttggagcaagacaataatcaatgcttgtgagatggagcaacagagtctggtcccgggcggggagttggacaaagcccataggcagggggagtctttgctggaggtctggggggtgacaggaccctctgtaggtagcagaatggcttgtctgatgctcgtggccagacactgcttattacaaga

SEQ ID NO: 520464 - DNA, 690 bp, Homo sapiens
agggctgaaactatagctcaggtctgtttaaaaaatttttaaattcccatccaaggcctgcacaaggccagctctcatatgggaattcaatgttactttaagttttatttaaggcagtgaaaggataggtttttaaaaatctgaaggaccattctcagctcttccaccccagaatggctgccctggcatagaaactgttccaagatacacgtcctgtgtcctgagtatggggatatgctgtaggcacgtgatgcttggagctatcagaacagaggggctaaggcaggaagcctgccggggaacaaaggtcaaccgtgaggaactggggcttggtggggtggtcagtgggtaatgtgtccaaggttcaagtcccaggctctgtctgtacaggctgcattgcagagggggaagggaggtgagtgtggccgggcatctgggtatttttcagggctgcaggtgctcagtgctgggggaggaagcctcctggctctgcaagatctgtgtgatttggagcaagacaataatcaatgcttgtgagatggagcaacagagtctggtcccgggyggggagttggacaaagcccataggcagggggagtctttgctggaggtctggggggtgacaggaccctctgtaggtagcagaatggcttgtctgatgctcgtggccagacactgcttattacaaga

SEQ ID NO: 520465 - DNA, 522 bp, Homo sapiens
ggtaaacaccagcccatcacctgggtgctagctttttaaaaaagaagtcatattttgagatcattacagattcacatgcaatcgtaagaaataacataaaygggtcttaaatacccttcacccagttttccccaatgttaacacttgtgtaactatagtacaatattataaccagaaaattgacatatatgttactgatcttattcagatttcattagttttacatgcgcttgtgtgtatgtttaatttatgcaattttatcccatgtgtagacctgtgtgaccaccatcacagtcaagatgcagaaatggttacatcacaaggacctctcatgcaatggaacactagcgctgagtttcttctttctacactaagacctggttactagattctgggagactgcagcaataatgaaaagaattgtctctcagtgaaatgccaaactccgctagggatcgacaaactgggatcccatctttcctgatgctcctttaatccaggcttccacaggaccacaatatg

SEQ ID NO: 520466 - DNA, 522 bp, Homo sapiens
ggtaaacaccagcccatcacctgggtgctagctttttaaaaaagaagtcatattttgagatcattacagattcacatgcaatcgtaagaaataacataaacgggtcttaaatacccttcacccagttttccccaatgttaacacttgtgtaactatagtacaatattataaccagaaaattgacatatatgttactgatcttattcagatttcattagttttacatgcgcttgtgtgtatgtttaatttatgcaattttatcccatgtgtagacctgtgtgaccaccatcacagtcaagatgcagaaatggttacatcacaaggacctctcatgcaatggaacactagcgytgagtttcttctttctacactaagacctggttactagattctgggagactgcagcaataatgaaaagaattgtctctcagtgaaatgccaaactccgctagggatcgacaaactgggatcccatctttcctgatgctcctttaatccaggcttccacaggaccacaatatg

SEQ ID NO: 520467 - DNA, 602 bp, Homo sapiens
gggttgtatgtgcactgaaaacaactggcccagaattttgtattatgtatatatcaccaaactccataacctgcacacttatgggaagatgtgtgatagaaggaaaagactaagtaatgcctcacactgaaaatacagrctgctcctattttctatctctcattcataaaaattataataagactaaggaatgcaaaatagttgcagagtaatacttagctaaactagaaaaactcaattttgacaggtttttacaatcttcagcctgacaggtgactttgtcttttgttgatgtgcaagaaagagaaaatgaaataactaaacttgtctgaaagatgaaatttaaatgtgcaacagatgtttgaaagagtttgccattgttgtgggtggataaaagcttcctttctccatttcaaactatgccctggatatttaggctgagtttgtggatattatgaactacaaagacaacgggacattaagacaatggaaagaacacagtttgggagttacaagacctgagttttcatcctggtgttaccactaaattatcttgcacaattaccttcacctttgtggaccttaattttaaaaccaggcag

SEQ ID NO: 520468 - DNA, 551 bp, Homo sapiens
gcagccaacctcagggtacttctgagcctgatgtttttgcatttagagaatcagttctcaaactctgtaccaacatctgggcctgaaagattcttcattcacccaggacccaccctgaaagggggagctatagccaatgaccttgacctttgtttcaaaggttttatatgtcccgaagtgaagttctttgaaagtcatcctctgtgcctgagctctggttttgcagaaagggatgttgaaaaagagaagrgcaaacagggttttgcaggccagacttcatgcccaggctcatgagctgagttcattcttttatttcttcagccaaaagcgtagggtggtgatgccttcagactccaaaactctgcagggaatgttccagaactctctgttttatgagaattcatttattttttatagttatctcagtttctaaccttctattgctcaggccccaatcattgacattatccttcattcctctttctttttttgacagggtcttactctgtcgccctaggctagagtactgtggtgtgatcacagttctccac

SEQ ID NO: 520469 - DNA, 551 bp, Homo sapiens
gcagccaacctcagggtacttctgagcctgatgtttttgcatttagagaatcagttctcaaactctgtaccaacatctgggcctgaaagattcttcattcacccaggacccaccctgaaagggggagctatagccaatgaccttgacctttgtttcaaaggttttatatgtcccgaagtgaagttctttgaaagtcatcctctgtgcctgagctctggttttgcagaaagggatgttgaaaaagagaagagcaaacagggttttgcaggccagacttcaygcccaggctcatgagctgagttcattcttttatttcttcagccaaaagcgtagggtggtgatgccttcagactccaaaactctgcagggaatgttccagaactctctgttttatgagaattcatttattttttatagttatctcagtttctaaccttctattgctcaggccccaatcattgacattatccttcattcctctttctttttttgacagggtcttactctgtcgccctaggctagagtactgtggtgtgatcacagttctccac

SEQ ID NO: 520470 - DNA, 634 bp, Homo sapiens
gcccttttgaagcagggtttatttgatctttccctgtaagaagccactrcaggattttaggtgagttaatgactagctcagaactgtttttcagaaagataacttggctggcagcaggaaagatagatttggaaggtagcagagttagggggaggcagggaacaggtaagagttgtgaaaaaattgaggttaaggagtataaggacttggaccagagtggtacaagaggagactgagcaggggaaaggatgtgaaaagtggttagcagttagtaacagggtgtgcaaagcctcaatgtaaacttcgcctttgtgggatttgttagttagtaacagtatgtttaaagcctctaggtaaatttcacctttgtgggactttttagtaacagtatctataaagccgcaatgtaaacttcaccttggtgggatttgctttatgttttcaatgaggtatgtagtttttcaaatcgtactgtaattcagattttcaacactttcggttattagctttttctctagaattttcttgatcaatttcttaaccgtttacagttacttctacttcttactgaagttgactactgctgtttttctcacagtacctcttggtcagtttatatggggaacttcaaatt

SEQ ID NO: 520471 - DNA, 634 bp, Homo sapiens
gcccttttgaagcagggtttatttgatctttccctgtaagaagccactacaggattttaggtgagttaatgactagctcagaactgtttttcagaaagataacttggctggcagcaggaaagatagatttggaaggtagcagagttagggggaggcagggaacaggtaagagttgtgaaaaaattgaggttaaggagtataaggacttggaccagagtggtacaagaggagactgagcaggggaaaggatgtgaaaagtggttagcagttagtaacagggtgtgcaaagcctcaatgtaaacttcgcctttgtgggatttgttagttagtaacagtatgyttaaagcctctaggtaaatttcacctttgtgggactttttagtaacagtatctataaagccgcaatgtaaacttcaccttggtgggatttgctttatgttttcaatgaggtatgtagtttttcaaatcgtactgtaattcagattttcaacactttcggttattagctttttctctagaattttcttgatcaatttcttaaccgtttacagttacttctacttcttactgaagttgactactgctgtttttctcacagtacctcttggtcagtttatatggggaacttcaaatt

SEQ ID NO: 520472 - DNA, 514 bp, Homo sapiens
cttattttataagaataatacagtactaactttaggattactcaacaaggtaggtttattctcatcaaatagtagtattaaagtgaccttcttcagtgatcattttgctcaaatacaatcaatttacagatcaaaaattgagcatctaaaaggaaaacaaaacaaaatagaacaaaaaccaattacatagctagagttagagatggagctaaacacaaaagctctggactctgaatctagtactcatcctagtgtgctgtgttctagcccttattctgtatcaatcacaaagcttccactcaattctagtaggtcttttgtccacaaagcaaactatttcccttctagttctgttgcaaatagacatagaacatacaaatgcaaagaacattttaagctgattsatctgaaaggttttttaatttgccctcacaatttaaagagccattatttgagtcagacaacagcagagaacatttcctgtcacatgatgataatacacatattgttgttg

SEQ ID NO: 520473 - DNA, 514 bp, Homo sapiens
cttattttataagaataatacagtactaactttaggattactcaacaaggtaggtttattctcatcaaatagtagtattaaagtgaccttcttcagtgatcattttgctcaaatacaatcaatttacagatcaaaaattgagcatctaaaaggaaaacaaaacaaaatagaacaaaaaccaattacatagctagagttagagatggagctaaacacaaaagctctggactctgaatctagtactcatcctagtgtgctgtgttctagcccttattctgtatcaatcacaaagcttccactcaattctagtaggtcttttgtccacaaagcaaactatttcccttctagttctgttgcaaatagacatagaacatacaaatgcaaagaacattttaagctgattcatctgaaaggttttttaatttgccctcacaatttaaagagccrttatttgagtcagacaacagcagagaacatttcctgtcacatgatgataatacacatattgttgttg

SEQ ID NO: 520474 - DNA, 533 bp, Homo sapiens
tgtgtgcttgggccttgtctggagtcttcatcttgctgttccccttctacttcactgttccatgctggratgatggttccttatttcaggacccttagaactctttgtacatcattttagtctccatatatggaaacctcaagtttctttatcagtagtgtgttgctaaagaggtttcctccccactccttgtaaggaggcagttgttaataatttgttggccagaaatgtctattcctcctgtttgcaaagccctgtggctttgtagatctctaatctgggcattctgcacttttgccaccttggtcggccttctgtaggtatttaagtaaagagaacaattaaattcctccttagttcttggcaagaaggataactaaacatggatttccccattgaacaggaacaagttctaggacacttcctgtgtcacatcttgaaacatcccctgactgcacagcttgtgttgtctgattattcccctgcatcaacacagtatagattggagaggaagtggagagggtctgaagcat

SEQ ID NO: 520475 - DNA, 533 bp, Homo sapiens
tgtgtgcttgggccttgtctggagtcttcatcttgctgttccccttctacttcactgttccatgctgggatgatggttccttatttcaggacccttagaactctttgtacatcattttagtctccatatatggaamcctcaagtttctttatcagtagtgtgttgctaaagaggtttcctccccactccttgtaaggaggcagttgttaataatttgttggccagaaatgtctattcctcctgtttgcaaagccctgtggctttgtagatctctaatctgggcattctgcacttttgccaccttggtcggccttctgtaggtatttaagtaaagagaacaattaaattcctccttagttcttggcaagaaggataactaaacatggatttccccattgaacaggaacaagttctaggacacttcctgtgtcacatcttgaaacatcccctgactgcacagcttgtgttgtctgattattcccctgcatcaacacagtatagattggagaggaagtggagagggtctgaagcat

SEQ ID NO: 520476 - DNA, 533 bp, Homo sapiens
tgtgtgcttgggccttgtctggagtcttcatcttgctgttccccttctacttcactgttccatgctgggatgatggttccttatttcaggacccttagaactctttgtacatcattttagtctccatatatggaaacctcaagtttctttatcagtagtgtgttgctaaagaggtttcctccccactccttgtaaggaggcagttgttaataatttgttggcmagaaatgtctattcctcctgtttgcaaagccctgtggctttgtagatctctaatctgggcattctgcacttttgccaccttggtcggccttctgtaggtatttaagtaaagagaacaattaaattcctccttagttcttggcaagaaggataactaaacatggatttccccattgaacaggaacaagttctaggacacttcctgtgtcacatcttgaaacatcccctgactgcacagcttgtgttgtctgattattcccctgcatcaacacagtatagattggagaggaagtggagagggtctgaagcat

SEQ ID NO: 520477 - DNA, 619 bp, Homo sapiens
aaatccacaatagtgagcgaaagtactttgaaaggataaaaatggattaacaacaaaaatgagggctagtagaagggagtgaaagcaaaagcaaacttgaaatcccatttctacaactgaggcaaccgggcctggtggcttcccagagagaaatctcactrgccctgtccctttcaccaagtaaacgcgttctgcaggcaagcctgcggtgagtgcttttgagccattcatcctccatcccagagacggaggattacaaatgtcagggtggattttgccttagtgacctgatcattcaatgcctctctctccctccattctactgatggggagactgaggcccagataatgaatccagaatgtggcacaagttgcatagtggaaccaggaacacagcttggattttctgatgtccagctcactggattttctactatccaatgacagcaggatcgatcataagcaccaagaaagaaaacaagttagttgatttcttcaagtgttaaaccctcagaagtgaaatctatttttcactgagtgtctactccaattcttagtatgtgatggctttacctctcttatttggggtaaaaagaaagtgggctgagtgggagtcaga

SEQ ID NO: 520478 - DNA, 477 bp, Homo sapiens
tatttatgctgtccgttagccacaggtagcaataaagcacttgaatatggctagtgtaactgaggaactgaacttttcattgtatttcattttaattcatttaaatttgtgttcaaatagttacaagtggttagtagctacctgattggatagtgcagctagtggaaaggcaagataaataggaatataagcaaggcatcaaatctaaagggaggacgggttaacaattatgaaaccactgtctattcatactggaattgaacaatttaataaatgggtggtaaatggtggaagccaagattttttattgttggagmgaaaggttacagacaagcaaggggagaaggctagaatgattcatctggtaccagatcagtgtcctacacatgagtattttagcttaatataaggtgacataaagacacagttaatgatatgcatatatacactggttagtacatacgtatatatttcctt

SEQ ID NO: 520479 - DNA, 220 bp, Homo sapiens
ttccccaaccccccggcgctgagcacggctgctggggtcccagggctcaccccmctccgcctgctcccttccgcgggcactgctcaattctcaagccccgactgggggctccctgctgccgggctgcacggggagtgaggctgcggggctgcgggagtcctgcccactctccccctaccccgagcttggcagcccactacctgccacgtgcatcaactcc

SEQ ID NO: 520480 - DNA, 643 bp, Homo sapiens
gatgaatagcgtaaatgaatgcaacttgctgcaaataaagtgaactttaacctatgcaatatctcttcagagaaattataaaaatacaggaaaattccaagcaccatgaaaaagagttaaatatttaactattttaagaaaagcaactattagtattcaatgaaaacataaatatcaaaattctaaatttttgagatgaaggaatggrtgaataacagctaaaatttttgagtgttttccacatgccaggcacagtgcttagatatatacaattttcttcccagttcccatatagtaacactgagaagcagaaacaacctgaaagcaagttatgtagcaaatttcaactccagatctatgaaggcattttaaccagaacctatgaagaacctaaaattcataaacatatgaattaaaaatgttcaaaatgaagatcaaaacgtcttaatatttaaaatttgacttcaattacataacaataataattactgccatttattaagcaaatattcttttccactcactctgctagactatgtatatatataatctcatttaatgcatgtagacaggtatgattaataaaatcctcctcttatgaactagaaaactaatgtgcaaagaggttcaacaacttgcctaa

SEQ ID NO: 520481 - DNA, 584 bp, Homo sapiens
ctgcaaaacccatcaccagcctcatagcagcagggctcagatagcaaggttcctcattcaccatcgtcagaaatgtccaggaatagttctgcttggaaaagacagtgttgacaattgaacagggtcaaaaagtgataacccattaggaagatgcttgggaaattcacataatttaatttataaatggaagtagaattttccaaaagtttttttaaattaaaacacaaaagttagttgggacaatttatgggtaaaaggtcattcctacattactgtggtccacacattttatttttacaagttgtggggaaagaacacgagaccaaagaatacagagattaagaacctgccaaagagatacggatttcactgatcttgccacttatgagctatgtatggtagtaccaatcaatcacacagggtgatgggaaaagctaatgagagaatgcatttcacaggacactcagccaagggccaggcgcacagtaaccagtaaaaaaatgatactcagtattgcccactaattatgggtgcggggagaggaagmaagacaggtagatatgcaggtaggtatggtaatttca

SEQ ID NO: 520482 - DNA, 501 bp, Homo sapiens
aaaagtttttggtaacctctgaaatggtaggagacccagaatatatatagagagaattggccatttacagaatgaggcacaatagacaggcttttaatttatccgtgaagtgggagtcaggaccttcaaatgtggaactatgaaggcaagatgaaacatagtaagtttaaggagagtggagaagtttttaaataaatactattagaaataaaagagagttgtctgtgaaacagaataatttccaggcaggattaatggcctagctgagaataaagaacaaattggtagagttttctagcacatttcatagttatccccagtattttatgatttccttcttcctttgcaataaataggatttaagttgtgctcctgggcccccaaccataattctgtactttagaatatctcttatatgtaagtgtacacatgactgcatccyatctaatggaagggagtgtaagagaggtgtgcaggcttgttctccctgtccttaccaca

SEQ ID NO: 520483 - DNA, 573 bp, Homo sapiens
ctgagcgtcctttgggatgcaccagcgagggctggagtcggacctaattcctgtttttctccctccttttagattttgcaacagttctgaactcagttccgctgcctccctgagacccaatcctgcctctctgtcctaaaaacagtttccaccgccagcccaagcagcaggggagcagaggtgggagatcccggaggagagtttaggggcgggggtctcaggctaagggacgcccggccgtcatcctcccacgccaggccggcccccgcggtccaggaggcgggaaagtggtcaagaggtctgggagacaccgaccgccttccctcgggctgaccactcccgcccgctccgcccctccggggaccctcctccctccagtccttcccctaccggcgtcagggaccggtctccsggcggagattggccctggtagcacagggcgccgaggggacatgcccggccagcctcgcaggtcgggctccggctgggtcggacagagggtggtggccctgcagcccgctggggattacctgtccgcgcctgctgcttacctcgttcgctcccttgtgaagc

SEQ ID NO: 520484 - DNA, 664 bp, Homo sapiens
ttttaaatagtctaattttgttcaaaaatatctctcatgattacatatataattcaccagatttggatctgagtggctcttgctattttaaaaatcaaatttcttcagaaagggaaaaatgattttgcttcagttaagatgattaagaggtaacttagaaaagaatcttgcaaaatattttaagcaacatgccaaataaaatctcaacaccatttctaaaaatacaatctaagaatgagcctccagacatccatatacacatgtgcctgcatgtgcagtcatatctcctgcaataatcattcagcatcatctaaatcccaagtagtatggccaaatctgagcatcataaaactagaattactttcaggagtactttccatggactgccattactaggaaagggaatcattttcacaattattttagaaagaccaagaaacatgctgaaatccatacttacgtatgtatgtatgtatgtatgtatgtatgtatgtatgtatgtatgtatstatctatctatctatctatctatctatctatctaattatagctcattatgtaaaccaatatgtgacactgctggaacatgtttccacttagaaggatgctgagccattttattgatttctatatagatacctttaatctcacatgaggtagagat

SEQ ID NO: 520485 - DNA, 457 bp, Homo sapiens
taatgtcatttaattcatctaagacaataagcaaccatcatagagtgaactcattattttgtattatactgacaaaaattcatatgtaagcatttggggaaaacaagcaacaaagcaatgaatttttttaaaaaggaaaataaaatcccctaaggaaaagaaaataagaagatgggtgattctgtctgccattccgtttagtagtacatgccctgaagtgagaaatgaattcactattccttctagcagcttcagttccccagttcttctcattgttatcattgggagcctctgaatggcattcttgtcttcataaaaacattttttatrataacatgacccattggaagaaacagacttgcacccaagtattataagactccactaactgtttctttcaattttgatatgactgttataaacttttactggaaatttcccaataaccatgttaata

SEQ ID NO: 520486 - DNA, 616 bp, Homo sapiens
tgggcattaaatgacactgttgttgaaagtactctcaataaatagacgagcttctttygaacagtacaatgcgctttatgatgttgatgtatggactttgatcagtgggagaaatcgtcaaatccgggtttctttgccaagttttgaatggaaatacattgcattgtctcacaggcgtctatgacacacaggaaggtcaggagtccttcgcaaatttggtttatgctattattcagaatgggtgagttttaaaactttaattaaccaagttaacctatttgtttgccaatgcgtggaaggttgtattgttctaaccacattgcaacattttggataaaagcgtaaatgtgggtgtgggaggaaaaaaaagagaaacagatttggatcaaagctactgcggaacaactgccacagcactcatttttttcccccaaggaatagctgtggtagagagcagtgccagcttggagtttgcaacgtctattttctagccaacgctatgatttttattcctgtttattgaccaaaaattgcttcatttactgaaccaaccacgtagcgcagcagagaggcggctgtggtttcgctgcctgggccctgagcaatacccacctct

SEQ ID NO: 520487 - DNA, 566 bp, Homo sapiens
tgttttcactttcacgcacgattgagtctttgctgtcacacagttgccgaatgttttcttactgctctttcctttccatttgtctaacattccaaatgctttatctaatgcaagatttctcagccttggccctattgacattttgggccagaaaagtctttattatgtaagcctgttttgcaaattgtaggatgtttagcagcatctctgacctccatcttacaattcaccagtaactttccccacccagaggtaactaccgaaaatttctccagaccttgccaaatatcgtctggggggcaaaattgccctgggtgagaatcaccggtctactttctacttattatgtaatctgaaaaagtttatgctaaaattacatgtaawtccccagaaataatttgcacgtggttgcaaattggaagaaaatctaatctgcccattaattagcgattggtgaattgtcctgaaatagcaactggtgtcacatatcaaaacttgtaatgttttctttgtttcagtttttgaaggatgcttttgtatctttttggaaatcaaagtcttttttt

SEQ ID NO: 520488 - DNA, 650 bp, Homo sapiens
catttcattttttttttaatcagattttcactctttcctttaggagttataccattgaattctctggttcattatctagatagaattgagattttgctctcagatgtaaaacctgtctttaaagctattgtatagcaagtgggcagcgttgttgtcaccttaaagatatgttaatttttataaaagcatatggtttttacagatgagcatgtaacttataataactgtgcatagccaactcatggtcacttgtttacagtttagtgaaagcattctctagatcaagatttatgatctggagtccctgaaattgtatacaaaatttatgtgtctttgtaatgtgcatttttcccagggcaaaggggtcatagatttccttagattcataagagaatctataatcgtcctctgttaccccmaaaaaattaagggatataatcatgtttaggaaactacactcactgaattttcaaaaattctgttagcatcattgatcttgtttaagcttgttaaatgtgaattatactaaaattacgcagcttttaagtactttaactcttagaagtggtattatactgaaatgctaagtaacaaaaattcatttgcttcttaaactgactttaagttgctgacttattttattagattga

SEQ ID NO: 520489 - DNA, 650 bp, Homo sapiens
catttcattttttttttaatcagattttcactctttcctttaggagttataccattgaattctctggttcattatctagatagaattgagattttgctctcagatgtaaaacctgtctttaaagctattgtatagcaagtgggcagcgttgttgtcaccttaaagatatgttaatttttataaaagcatatggtttttacagatgagcatgtaacttataataactgtgcatagccaactcatggtcacttgtttacagtttagtgaaagcattctctagatcaagatttatgatctggagtccctgaaattgtatacaaaatttatgtgtctttgtaatgtgcatttttcccagggcaaaggggtcatagatttccttagattcataagagaatctataatcgtcctctgttacccccaaaaaattaagggatataatcatgtttaggaaactacactcactgaattttcaaaaattctgttagcatcattgatcttgtttaagcttgttaaatgtgaattatactaaaattacgcagcttttaagtactttaactcttagaagtggtattatactgaaatrctaagtaacaaaaattcatttgcttcttaaactgactttaagttgctgacttattttattagattga

SEQ ID NO: 520490 - DNA, 374 bp, Homo sapiens
atttcatgttgccaacatttagtgtgcctgctaaaatactaagttacaagacttaacgtgaccaactttatctaaacatagaacaaattaaaatataaataacatgcattctgggtgctgcttagtatctattcattttaaacacaagatactgcccttcctagaaactatagcacygggactggtgatttcttgccactctggtagaggtcacagggcctggccatgattgacatccaggaaggatctgtcccagctgatttggacacatcaaagcacgggacattcttcttgctagattatggacatgctgtgttgttttcctgttgaacttcctaaggtggtggttcacatacgtgaggtctgaaagtcta

SEQ ID NO: 520491 - DNA, 640 bp, Homo sapiens
tacataatacaacctagcaattcacttcaaagggtatttattttagaatatgggaatatgtttagagttactataatttatataagtcagaattcagaaataacttatattctcaataccaggttactgagttaaataaattattgtatagtggaaygatattccatcattaaaaaataatttggtataggcccaaataagagtaatcccagctgactggacagtcatgtttgaatgactatatttgtagacccagattctagatacagaaatacactttaagagattgggcccaatgcaaggatcaaaaaaataattgtcattcttttccaaaatcttattagagggaaaaaacatccctagaagttatgactgtaacctggcaactaaaaaattacatgatttgtgcaggcccctgcctgagaaattattccatgaactgaagtttaactgaagtggttatgattcatcacagaggacccataataaaaacatagtgagtatttttctgaggcttttcataaccatgaatcaatgacacaagttctggaatttaactttgaatgtggcttcaaattctagaggacaagaagtgtaagtgaactttgtagcgcccttggtgttgtgttggtttgttttc

SEQ ID NO: 520492 - DNA, 579 bp, Homo sapiens
tcttgcttgtctctatggcttagctagccttttataatgtatttttttctgattgtttcttgtgcatcaatcttgattttccaaattttattgttagtacttctaagatgagggcactttgtacgtttctcttagattcttcaacatacttagcatggtagtgagtaagctcattaagaaaaatttatgaactagacatttaagaaacagacatagagaatttgctactgacagtgtctattggctgaccctgtaccattcactacccttttcattttagcttctggagggattagtctaagagtgcttctcckttagaagaagttttgccctgcaggggacatttggcagtgtctagagacagatattttggattttcacaactaggaatggggtgctactggcatctatggggtagaggccagggattctgataatgcacagataaaaatagataatccacagataagaatattgtctggttccaaatgttgatagtgccaaggctgagaaactctggactagaggtagcaatatgatatgttctggtcaattaaatataagtggaagggtctgctg

SEQ ID NO: 520493 - DNA, 528 bp, Homo sapiens
atgacctgaagagaagcagctgtgctttgttttttgctaagtcttgggcagttcagtttggcacttagagtattccagctccttttcttataagaatatctatctttatctatctatctatctatctatctatctatctatctatctttaactaactaactaactaactaactaactaaagcattttaaaacgtggcatctcgctttgttgctcaggctggtctccaactgttggactcaagcactcctcctatcttggcctcctgagtgtctgagactacaggcacaggccaccatgcccagcctcagctccttttcttttaaatctcttggtccaatttatattctttgccagcatccttgggacagcacaaatgttgaagtttggggaaacattttgtacaactttgttcactgaatcacagtcactgcttgtgctgttgataatcaaaactaggctgcacagagtgacgtagtcacakatttggcttgggtgtacagatgtttcccttcaagcatcttggatgt

SEQ ID NO: 520494 - DNA, 483 bp, Homo sapiens
gcatcttactccaccatgagtttctcttttcttctgtagatagggtgagagattgattacctcaatccaaccaggggtttagctggattgrgaccacattgtaatttcagtaagctaggtcttctctggttcacccctattccttagacatgttcctccaaggctgtcgattgagaccctagaagtctttgtctctttagtcctgaaagagtacagcacattctattctgctctttgaagattccaagcttcaaatgtggcagattgtcttgaggtagaatccagttatgtgcttgaagcaggccccttctctctagtaggattttgtctcctaaagaatgcagaattattgatttcgttctacttcttcaaacacagcctcttagcttctttctaataaccccagaattcaactaatgtttcacagggacactaaccacatttgctgctctccaaatttccaatctgtcataccagccttgc

SEQ ID NO: 520495 - DNA, 483 bp, Homo sapiens
gcatcttactccaccatgagtttctcttttcttctgtagatagggtgagagattgattacctcaatccaaccaggggtttagctggattgggaccacattgtaatttcagtaagctaggtcttctctggttcacccctattccttagacatgttcctccaaggctgtcgattgagaccctagaagtctttgtctctttagtcctgaaagagtacagcacattctattctgctctttgaagattccaagcttcaaatgtggcagattgtcttgaggtagaatccagttatgtgcttgaagcaggccccttctctctagyaggattttgtctcctaaagaatgcagaattattgatttcgttctacttcttcaaacacagcctcttagcttctttctaataaccccagaattcaactaatgtttcacagggacactaaccacatttgctgctctccaaatttccaatctgtcataccagccttgc

SEQ ID NO: 520496 - DNA, 483 bp, Homo sapiens
gcatcttactccaccatgagtttctcttttcttctgtagatagggtgagagattgattacctcaatccaaccaggggtttagctggattgggaccacattgtaatttcagtaagctaggtcttctctggttcacccctattccttagacatgttcctccaaggctgtcgattgagaccctagaagtctttgtctctttagtcctgaaagagtacagcacattctattctgctctttgaagattccaagcttcaaatgtggcagattgtcttgaggtagaatccagttatgtgcttgaagcaggccccttctctctagtaggattttgtctcctaaagaatgcagaattattgatttcrttctacttcttcaaacacagcctcttagcttctttctaataaccccagaattcaactaatgtttcacagggacactaaccacatttgctgctctccaaatttccaatctgtcataccagccttgc

SEQ ID NO: 520497 - DNA, 535 bp, Homo sapiens
catatgaattttggggagaaacaaacattcagaycatagcatttcaccccttgccccctcaaaattcatattttatcacatgcaaaacacattcatcccatcccaatagtgcccaaaatcttaactcatttcagcctcaactttaacatctaagcctaaagtctcatctaaatatcacctgtaaggatggttaatgggtacaaaaaaaaatagaaagaatgaataagacctagtatttgatagcagaacagggcaatggttgtcaataataatttacttatacattttaaagtaactaaaatagtataattagattgttagtaacacaaaggataaatgcctgaggagttggataccccatcttttatgatgtgattattgcacattgcatgcctgtatcaaaacatctcatgtaccccataaatatatataactactatgtactcacaaaaattaaaagtaaataaataaacatcatctaaattagatatgggtgagactcaaggtgcatttcatcctgaagcaaactgctctc

SEQ ID NO: 520498 - DNA, 566 bp, Homo sapiens
ggtctctttcaaccctgagattatttgatatgcatgaagcagtttgagagcaacatttggaaatcacaggattkgggtagtaaaagggatattagtgattcatttaatccagatttcccattttccatggtaagaaacagaggccagaacaggggatgtacttgctcaaatttcccacagctagtaagtggcagaggctggaccagaatttctcacttcacagtccactgcgcttttcattacctcaagataaattctaaatttaatggctcggcagtaaacactctagctggttctagtggtgggaggatatcactaaggtagaaaatgtatgcagaaaggggcatctacaagttctcctaggattgactggttcatggtaaatgctaatgctacttttatgactatacataatctgtgttgttgccatttatggaaacaattataaagtcattatccacattttccctcacccaaattattatgaagcctgaagcttttccaagcaccccaggcacaaattgtattgtcttttttctctaatgtcagatactaaagactactgt

SEQ ID NO: 520499 - DNA, 566 bp, Homo sapiens
ggtctctttcaaccctgagattatttgatatgcatgaagcagtttgagagcaacatttggaaatcacaggattggggtagtaaaagggatattagtgattcatttaatccagatttcccattttccatggtaagaaacagaggccagaacaggggatgtacttgctcaaatttcccacagctagtaagtggcagaggctgraccagaatttctcacttcacagtccactgcgcttttcattacctcaagataaattctaaatttaatggctcggcagtaaacactctagctggttctagtggtgggaggatatcactaaggtagaaaatgtatgcagaaaggggcatctacaagttctcctaggattgactggttcatggtaaatgctaatgctacttttatgactatacataatctgtgttgttgccatttatggaaacaattataaagtcattatccacattttccctcacccaaattattatgaagcctgaagcttttccaagcaccccaggcacaaattgtattgtcttttttctctaatgtcagatactaaagactactgt

SEQ ID NO: 520500 - DNA, 404 bp, Homo sapiens
cacagaaccgtgttagaaaatgcttctatgatggctggcctaatcactggttgaaggaagtgatcatgttcatgatattatttaagggactaaaaaaatcccatgcttcctctccaaaatgacaacttagtttgatataattgggcacaatagtgaggacttcattccagtcctctctgccacaaacctatgtgttacctggagtaggctatttcccttctttggacttcagtcctctcacatggaaaataagagccttgtgttagctggcctttgaggtccctttcagctctcatatttcaaggttctgtgactcaggcttttggattagaacccacagayatccagaaggcatgcataagtgtctgatcacaacttacagactctgtgtttgcatgagagac

SEQ ID NO: 520501 - DNA, 404 bp, Homo sapiens
cacagaaccgtgttagaaaatgcttctatgatggctggcctaatcactggttgaaggaagtgatcatgttcatgatattatttaagggactaaaaaaatcccatgcttcctctccaaaatgacaacttagtttgatataattgggcacaatagtgaggacttcattccagtcctctctgccacaaacctatgtgttacctggagtaggctatttcccttctttggacttcagtcctctcacatggaaaataagagccttgtgttagctggcctttgaggtccctttcagctctcatatttcaaggttctgtgactcaggcttttggattagaacccacagacatccagaaggcatgcataagtgtctgawcacaacttacagactctgtgtttgcatgagagac

SEQ ID NO: 520502 - DNA, 627 bp, Homo sapiens
ctagttataatttaataaatacataaaaattaattatgcaaaaataaaaacaaaaggaaaacaaataataaagtaactgaaaatcctaaagtttaaaattgcagcagtgcattataattgttgtattttgtctaatgagcagtatttttctttaaatgataaagttatgttttctactatataaaattatatatattgtcaataattttgtcaaaaatttctcaaaaataaaaaaactcataaattctcaataaatttctcataaattttctcaaattcgaaaatagtctaatttgtttatataacacaattatgtacaaacttaaattttatcagatgctgacctccattgcaatagatattttccattcagaaaaccatttatacagttagcaagctgtcattcagcaaaatgcaatttttaaattaaacagatggtgatatcaaagaaattaatgaacacacacgtttgctttctgtactaatttgcatttctaaattattcaggttatgctgcaattaagcattaattgyttttaactaaacgcatatctgaaaattaatgacacattaaaattaaattgtcaaagaaatgtcatgattcctattgttgctgagtcattgcaa

SEQ ID NO: 520503 - DNA, 596 bp, Homo sapiens
ataaaattcccaggaaagttctctaatgtatttcataagtgagtataaaacatctaatgcagttagggacccacagaacaggacttgattgaacattacatattaaaatgttgacaaacatagtcaaaattacagtggtccaggatttataaaacacttcacatcatgacacatgtagagaatgattataatgatgattataatgcttatatgacacactgaggcaagcaaaaaggatttctcaaatcaggggtaaatggttctaggactcttgtcactttatcccgaaggactctggccacttcaggtcctggcctactcctctgagtactgcaataacacaaatctcagtatacctgtaacccattcacaacacacccattagttgaggaattctgctgcttttgcaacacgaagcactttaatctgtaactttcaatgcaaaacaaggaaggtgtgacaagaacgtgtaaacccagatatggcattcattttgttgcattactgtgtgcaatagtctttgagtcttgctcaattgaacagttgtayagcctactatcaagaagcattcctagcagagactggtttcagtgcaa

SEQ ID NO: 520504 - DNA, 441 bp, Homo sapiens
ctaagattttaccctcctcgcaagatagcaaggtagcctgacttagtagtgtggatgctgacagaagacacaagactactgggtcagagcaagatatgttattattcacagcagcaggcagcatgcttttcctgttcacactgcttctccttkttcccctcccatggtcaatattcagagataaagtcagtataacttgctcatggatttggatgtgcagaataaaagaatcacagaaatttaagatgatgatatggtttggctatgtcttcacccaaatctcatcttgcattgtagttcccataatccccacatgtcatgggagagaactgatgggggataattgaataatgggggcagtttcccccatgttattctcatgagaatgagtgagttctcatgagatctgatggctttataaggggtttccccattcactca

SEQ ID NO: 520505 - DNA, 441 bp, Homo sapiens
ctaagattttaccctcctcgcaagatagcaaggtagcctgacttagtagtgtggatgctgacagaagacacaagactactgggtcagagcaagatatgttattattcacagcagcaggcagcatgcttttcctgttcacactgcttctccttgttcccctcccatggtcaatattcagagataaagtcagtataacttgctcatggatttggatgtgcagaataaaagaatcacagaaatttaagatgatgatatggtttggctatgtcttcacccaaatctcatcttgmattgtagttcccataatccccacatgtcatgggagagaactgatgggggataattgaataatgggggcagtttcccccatgttattctcatgagaatgagtgagttctcatgagatctgatggctttataaggggtttccccattcactca

SEQ ID NO: 520506 - DNA, 603 bp, Homo sapiens; identical to SEQ ID NO: 500811

SEQ ID NO: 520507 - DNA, 613 bp, Homo sapiens
tcgcaccacagacagtaggcctattatctgaggcatgagtgaacatggcactttccagttcccttggcagatactgctattagcaaagccaaggcttaataagcctgtagccaagtccacagaggaatggggctgtatttcctgtaccaaagttggttatcctgccgcctgagcatgtgcctgccttctcaaaatggtcctccttagtcttaagctctattggggtttttgcaacrttatacctatatcccccaaatcccataaaggcacttttgactgtggatggctgccaaattattgttaccatggtgggacatcaatgggagacttctattctaccatcttactaacatcattcccagataatttttaatctaagcaagctgattctaaggtttataaggtttatattctagtttgtatggagaaccaggaaagttcttaaaatcaaatagtgatttggagtctagctctaacaaatgctaaaatattttataaagtcatttctatcttgtcagctttcagtaatctttaatttaccataatacctcataaattactaccataccattgaagctgctcttgttaaagtcagcgataatatccaagtctt

SEQ ID NO: 520508 - DNA, 623 bp, Homo sapiens
gtgtgtgtgtatgtgtgtgtgtaaggagcatcaggcctgtgggacggggatctgacagggactgcctacattgaaagtgtgtgcacgtaggtagacacatgtgtgtgaacatgtgagtgaaaaaatgagcacgtgcgaatgtgcacgtgtgtgtttgcgactgtgcgtgtgtgtgtgcatgtgtgcgtgagtacatgtcagagagaacgtaagtattagagtttatgtgtcaggcaaaggtttggaggtccatgtgcagtgtgaggaaatgcctggatgcctggatatggaggtgtgtgtttattggatgtgagcgtgtgggtgtgcaggtgtgtgtttattggctgtgagcgtgtgggtgtgcaggtgtgtgtttattggatgtgagtgtgtgggtgtgcaggtgtgtgtttattggatgtgggcgtctgggtgtgcaggtgtgtgtttattggatgtgggtgtgtgggtgtgcacgtgtgtgtttattggatgtgtgtgggtgggtgtgcaggtgtgtttattggctgtgagcgtgtgggtgtgcaggtgtgtgtttattggctgtgagcgtgtgggtgtgcaggtgtgtgtttattggmtgtgagtgtgtgggtgtgtgg

SEQ ID NO: 520509 - DNA, 623 bp, Homo sapiens
gtgtgtgtgtatgtgtgtgtgtaaggagcatcaggcctgtgggacggggatctgacagggactgcctacattgaaagtgtgtgcacgtaggtagacacatgtgtgtgaacatgtgagtgaaaaaatgagcacgtgcgaatgtgcacgtgtgtgtttgcgactgtgcgtgtgtgtgtgcatgtgtgcgtgagtacatgtcagagagaacgtaagtattagagtttatgtgtcaggcaaaggtttggaggtccatgtgcagtgtgaggaaatgcctggatgcctggatatggaggtgtgtgtttattggatgtgagcgtgtgggtgtgcaggtgtgtgtttattggctgtgagcgtgtgggtgtgcaggtgtgtgtttattggatgtgagtgtgtgggtgtgcaggtgtgtgtttattggatgtgggcgtctgggtgtgcaggtgtgtgtttattggatgtgggtgtgtgggtgtgcacgtgtgtgtttattggatgtgtgtgggtgggtgtgcaggtgtgtttattggctgtgagcgtgtgggtgtgcaggtgtgtgtttattggctgtgagcgtgtgggtgtgcaggtgtgtgtttattggatgtgagygtgtgggtgtgtgg

SEQ ID NO: 520510 - DNA, 443 bp, Homo sapiens
ttgggagagttaatgcaaaaaattctaaaattttggctttgctggaaaacaaagcaaaacaaacaaacaaaaaatggtgggggctccctggccacacggggcttgccttcttctctcaggatcacttttaaccacttgggaagagctttgcagccttcgaggccttttcaggtaccccctcccatcgactcctcttcctcattgacgttacctgcccagccctggtaaacatggagtttatgacagcctctcaagccttccagatgtggcctcaccagcctttatggggctgcttgtgagagaaaccagaactaggagtgggttctcgggckggggcacagctcagagggcagtcagtaccgaggaaatggagatgcggagatggccatgagcttggcggctgcactgagctggggcagcaaggtcgccgttatatagatcag

SEQ ID NO: 520511 - DNA, 443 bp, Homo sapiens
ttgggagagttaatgcaaaaaattctaaaattttggctttgctggaaaacaaagcaaaacaaacaaacaaaaaatggtgggggctccctggccacacggggcttgccttcttctctcaggatcacttttaaccacttgggaagagctttgcagccttcgaggccttttcaggtaccccctcccatcgactcctcttcctcattgacgttacctgcccagccctggtaaacatggagtttatgacagcctctcaagccttccagatgtggcctcaccagcctttatggggctgcttgtgagagaaaccagaactaggagtgggttctcgggcgggggcacagctcagagggcagtcagtaccgaggaaatggagatgcrgagatggccatgagcttggcggctgcactgagctggggcagcaaggtcgccgttatatagatcag

SEQ ID NO: 520512 - DNA, 475 bp, Homo sapiens
ttgtgaggattagatgtgtaygcacacacacatttatgcaaacatatataaatgcatctctaaaaattaatatatatacatgtataactacatttatatattatacataaaaatgtatatttaatgtgatatatatttattatctttatatgtaactatgtataacatatgttatatattaaatttttatatatacatgcatacatacatgcaacattgtattctcatacaaaacctcagagagttccatgtttataggatgtggtactatattcataagttctatattaatataatgtgtatatatatatttaaacaggatctgggatattttgagtttttccttttattcattattattgtctcacacagcttcaactacactgtttctattttgagattcataagtaggacagggagaaagaaaacgtctcattgaataggagggaaagagtattaaggaaggggaaggaac

SEQ ID NO: 520513 - DNA, 475 bp, Homo sapiens
ttgtgaggattagatgtgtacgcacacacacatttatgcaaacatatataaatgcatctctaaaaattaatatatatacatgtataactacatttatatattatacataaaaatgtatatttaatgtgatatatatttattatctttatatgtaactatgtataacatatgttatatattaaatttttatatatacatgcatacatacatgcaacattgtattctcatacaaaacctcagagagttccatgtttataggatgtggtactatattcataagttctatattaatataatgtrtatatatatatttaaacaggatctgggatattttgagtttttccttttattcattattattgtctcacacagcttcaactacactgtttctattttgagattcataagtaggacagggagaaagaaaacgtctcattgaataggagggaaagagtattaaggaaggggaaggaac

SEQ ID NO: 520514 - DNA, 634 bp, Homo sapiens
tttacaatcaagaaaaaaagataaggctgtggtaaatgccattttgtttaaattattgtagtaattgctcaaactacctaattttcttggttgtgaaaatacaagatggatatawctctgctaatatttgtagagtagtttcgtaatgttaaaaaaaagaaaaatgaagccaatatatttgtcatcttagaaaattgtcatttttctaagtagagtggtaaagagctctactttatggcacaatttggaattttaaatgtcaatatttaaacgttagtatacggtattagttagcaattaaaattagtggttggccaaagccttttcactatagccttgaaagaaactgttatctgttatgtaccatgaaacatgaaatagataattgccctgttttatcttatgttgacaatgatattgtggcttctgttattacccagtgaagtatatcaaaaagaaaatataaaaaagtaatgatcctttaaaatttcatatttagtttatactcaaactaaagtcttatgtaggtatttcaattattttcaatcttcaagttcattatttatttgcaggtaggtaatggagggttatgaattaattgacagtgtatcatttaatgaattagctaataaga

SEQ ID NO: 520515 - DNA, 634 bp, Homo sapiens
tttacaatcaagaaaaaaagataaggctgtggtaaatgccattttgtttaaattattgtagtaattgctcaaactacctaattttcttggttgtgaaaatacaagatggatataactctgctaatatttgtagagtagtttcgtaatgttaaaaaaaagaaaaatgaagccaatatatttgtcatcttagaaaattgtcatttttctaagtagagtggtaaagagctctactttatggcacaatttggaattttaaaygtcaatatttaaacgttagtatacggtattagttagcaattaaaattagtggttggccaaagccttttcactatagccttgaaagaaactgttatctgttatgtaccatgaaacatgaaatagataattgccctgttttatcttatgttgacaatgatattgtggcttctgttattacccagtgaagtatatcaaaaagaaaatataaaaaagtaatgatcctttaaaatttcatatttagtttatactcaaactaaagtcttatgtaggtatttcaattattttcaatcttcaagttcattatttatttgcaggtaggtaatggagggttatgaattaattgacagtgtatcatttaatgaattagctaataaga

SEQ ID NO: 520516 - DNA, 484 bp, Homo sapiens
ctttctagtgataaacatacaaaatgggttgcatgtcaaggtatacagatatatatatagagagagagattatatatatatatatttaaattttattgttatgtgyacagaataaaaggtcaagtgctgtctactactgaactatactcttctttaaagtagggcttatcctacttataacttacaaaataaatgatgaggaagccaaagaaaaggagaaattaacctaaacgtttagggaacaccttatatttagtagtagaagacaaagaggagagtgtcttagtttcatttgtttgttttcaataaggtgaatcaagtgtagagtactttctctgctactaatttacttacttagagatatcatctgtatataacttgtttaaattagtaagtacatcataacattttcgaatgacacaatggttaagttacagatattagaatcagacctatgtcggtttaaatcacagctctgtcattt

SEQ ID NO: 520517 - DNA, 641 bp, Homo sapiens
ttgacaggatccagtcaaggttgcagtcattttatggatgagctgggggaggaaataattctgtgcttgttgggaagtgggtttttccattgttcagcatacatcaaggcagctggtttcatcagtacgtgcaggtgagagggcaaaatagagtgtcagtaagartaccagtaacataacaggcaaagtcttttgtcatgtcatttgcaactgatacgccgtcactcatgccttattctacttattagaaggaaatccatgggttcagctcacacagaaagagacttgtaattagtcagggttctccagagaaacagaaccagtaggatggatggacagacagagattgagagagagaaagagaaagagagagagagagagagagagagggagggagagggagggagagggagagagagagggagacggagaatgggaacttactcatgcatttgtgaagcctaagtttcaccatctgatgtccgaaagttggagaaccaggaaagccagtggtgtaatttagtctgagtctaaaggcccaagaacaaggagctccaacttctaagggtaggagaagatggatgtttcagctcaagcagaaagaattctccattcctctgccttttgattctgttttatct

SEQ ID NO: 520518 - DNA, 641 bp, Homo sapiens
ttgacaggatccagtcaaggttgcagtcattttatggatgagctgggggaggaaataattctgtgcttgttgggaagtgggtttttccattgttcagcatacatcaaggcagctggtttcatcagtacgtgcaggtgagagggcaaaatagagtgtcagtaagagtaccagtaacataacaggcaaagtcttttgtcatgtcatttgcaactgatacgccgtcactcatgccttattctacttattagaaggaaatccatgggttcagctcacacagaaagagacttgtaattagtcagggttctccagagaaacagaaccagtaggatggatggacagacagagattgagagagagaaagagaaagagagagagagagagagagagagggagggagagggagggagagggagagagagagggagacggagaatgggaacttactcatgcatttgtgaagcctaagtttcaccatctgatgtccgaaagttggagaaccaggaaagccagtggtgtaatttagtytgagtctaaaggcccaagaacaaggagctccaacttctaagggtaggagaagatggatgtttcagctcaagcagaaagaattctccattcctctgccttttgattctgttttatct

SEQ ID NO: 520519 - DNA, 641 bp, Homo sapiens
ttgacaggatccagtcaaggttgcagtcattttatggatgagctgggggaggaaataattctgtgcttgttgggaagtgggtttttccattgttcagcatacatcaaggcagctggtttcatcagtacgtgcaggtgagagggcaaaatagagtgtcagtaagagtaccagtaacataacaggcaaagtcttttgtcatgtcatttgcaactgatacgccgtcactcatgccttattctacttattagaaggaaatccatgggttcagctcacacagaaagagacttgtaattagtcagggttctccagagaaacagaaccagtaggatggatggacagacagagattgagagagagaaagagaaagagagagagagagagagagagagggagggagagggagggagagggagagagagagggagacggagaatgggaacttactcatgcatttgtgaagcctaagtttcaccatctgatgtccgaaagttggagaaccaggaaagccagtggtgtaatttagtctgagtctaaaggcccaagaacaaggagctccaayttctaagggtaggagaagatggatgtttcagctcaagcagaaagaattctccattcctctgccttttgattctgttttatct

SEQ ID NO: 520520 - DNA, 641 bp, Homo sapiens
ttgacaggatccagtcaaggttgcagtcattttatggatgagctgggggaggaaataattctgtgcttgttgggaagtgggtttttccattgttcagcatacatcaaggcagctggtttcatcagtacgtgcaggtgagagggcaaaatagagtgtcagtaagagtaccagtaacataacaggcaaagtcttttgtcatgtcatttgcaactgatacgccgtcactcatgccttattctacttattagaaggaaatccatgggttcagctcacacagaaagagacttgtaattagtcagggttctccagagaaacagaaccagtaggatggatggacagacagagattgagagagagaaagagaaagagagagagagagagagagagagggagggagagggagggagagggagagagagagggagacggagaatgggaacttactcatgcatttgtgaagcctaagtttcaccatctgatgtccgaaagttggagaaccaggaaagccagtggtgtaatttagtctgagtctaaaggcccaagaacaaggagctccaacttctaagggtaggagaagwtggatgtttcagctcaagcagaaagaattctccattcctctgccttttgattctgttttatct

SEQ ID NO: 520521 - DNA, 652 bp, Homo sapiens
gaagtcatggaaagtttgagaatggatgaataacataaataattgttttgatagcttagccaggagtagtgggaagaatgagctggacgagcaaaacattggagtcagggagagaaattagagggcaataattcttaacatttttgttagcccaattcacaaatacactttgacatcatttgttctgaaaaataccgtaaaatataacttaacaatttaatgaccaatttagaatcttaattcttctataaatataggcytaagtcatttgtgaaacttcattttttctggctgagggccaccaacttatttctgattacttttttgtgaaataaatgtgtatcttcagttgaaaaatattaaaactattacccatgtacccactattaagtttaagacatagattgttaccagaaccttagaaacccctgtacatccctgtgccaattgtgaccctctcctggaggtagccactaccctgattaataaaagttctcttgattataattattgtttattacctatgtatttgcaaagacatgttacttttcttatttcagtactttatagaaatataatcatactcttctgtgatttgctttgttttctcaactttataatttgtaaattcatcaatgttaatatgcacagc

SEQ ID NO: 520522 - DNA, 652 bp, Homo sapiens
gaagtcatggaaagtttgagaatggatgaataacataaataattgttttgatagcttagccaggagtagtgggaagaatgagctggacgagcaaaacattggagtcagggagagaaattagagggcaataattcttaacatttttgttagcccaattcacaaatacactttgacatcatttgttctgaaaaataccgtaaaatataacttaacaatttaatgaccaatttagaatcttaattcttctataaatataggcctaagtcatttgtgaaacttcattttttctggctgagggccaccarcttatttctgattacttttttgtgaaataaatgtgtatcttcagttgaaaaatattaaaactattacccatgtacccactattaagtttaagacatagattgttaccagaaccttagaaacccctgtacatccctgtgccaattgtgaccctctcctggaggtagccactaccctgattaataaaagttctcttgattataattattgtttattacctatgtatttgcaaagacatgttacttttcttatttcagtactttatagaaatataatcatactcttctgtgatttgctttgttttctcaactttataatttgtaaattcatcaatgttaatatgcacagc

SEQ ID NO: 520523 - DNA, 504 bp, Homo sapiens
aagacagatagtttacacaatattccagttcaatctttcctttcaactctgggaaattacaagtgcaaacaatgagatctacagagcacagaaagaaaaaaacctccactgctccattatcagattttcagggaacagcaggcttcacagtcacagagaagcctgactttcaaaacagagcaaagatggtgacaaactgatcgaatggagagatacgctcttatgcatgtgggcaatgtcyccactcctggtattacccacagcaattcttagagggaaaattattcagtagagggaaaattattcagtagagggaagagggagtaaacagattcccttgcctacttcaccctaaacttcataaacctcttttatctgcacatgaataagattaaactactccaattattgtcttataaaaggaaggactgagaggataaaaatggtacaaattcaccaacatatgccaaaacacagagtatctttccttaacataagaaacag

SEQ ID NO: 520524 - DNA, 568 bp, Homo sapiens
agttattcatattctataaaacagactttaattataattagacytctattatttagtgttcaagtataatatgcatcaatatactaaaataaagttagtctgtagttatttgctcaattgtctatttgaaataaaaactatttatttatttagatcagtatattaaatcaacccatacattttattaaaacgtttgaatagtatgatgctaaaaactaatattaattttataaaactttcttttttgaaacagtaaaacttgagtaaccaggcatttataatttattgcatctagtacccagctaggaaataagaacgagttattatgcactaaagtgatgattagggttatctacggatttgataaaggattatttactcttcttgttcttgctgtattctaattatctgggttcaggaagaggaaaggaaacatcagcctaaacatggttcagatatgaaaatcttcaacttttctaagactcattatagcccacgctagtgaataggtaggtagttagagaaaatttgtcatgttgttgctacatgtcttgtgaagagacactga

SEQ ID NO: 520525 - DNA, 568 bp, Homo sapiens
agttattcatattctataaaacagactttaattataattagacctctattatttagtgttcaagtataatatgcatcaatatactaaaataaagttagtctgtagttatttgctcaattgtctatttgaaataaaaactatttatttatttagatcagtatattaaatcaacccatacattttattaaaacrtttgaatagtatgatgctaaaaactaatattaattttataaaactttcttttttgaaacagtaaaacttgagtaaccaggcatttataatttattgcatctagtacccagctaggaaataagaacgagttattatgcactaaagtgatgattagggttatctacggatttgataaaggattatttactcttcttgttcttgctgtattctaattatctgggttcaggaagaggaaaggaaacatcagcctaaacatggttcagatatgaaaatcttcaacttttctaagactcattatagcccacgctagtgaataggtaggtagttagagaaaatttgtcatgttgttgctacatgtcttgtgaagagacactga

SEQ ID NO: 520526 - DNA, 562 bp, Homo sapiens
tgatttatcactataggaggctgagacaggagaatcgcttgaacccgggaggcggargttgcagtgagctgagacagcgccattgcactccagcctgggcaacaagagggaaactccgtctcaaaaaataaataaataaatacagaagtttttaaaaagtggtctatttacagcagttcttttactcagcacagcatttccatatatcaagaaaatacaagaaaatacgaaaaaggcacaaaatgaaacaaaacaaatacaaatacacacagacagtttgaagaggaagaacaagcatcggaaccagactcacatatggtggggatgttagaattctcataccagaaatttgaaacaatgatgattaagatgattaagatgctgaagtctctgatgggtaaagtagacaccatacaagaatagataggtaatgttagcacagagatataaattataagaaccagaaagaaatgctagagatcaaaagcactgcaacagaaatgaaaatgattttgatggccttattggtagactagacatggcggaaaaaaagaatctctga

SEQ ID NO: 520527 - DNA, 562 bp, Homo sapiens
tgatttatcactataggaggctgagacaggagaatcgcttgaacccgggaggcggaggttgcagtgagctgagacagcgccattgcactccagcctgggcaacaagagggaaactccgtctcaaaaaataaataaataaatacagaagtttttaaaaagtggtctatttacagcagttcttttactcagcacagcatttccatatatcaagaaaatacaagaaaatacgaaaaaggcacaaaatgaaacaaaacaaatacaaatacacacagacagtttgaagaggaagaacaagcatcggaaccagactcacatatrgtggggatgttagaattctcataccagaaatttgaaacaatgatgattaagatgattaagatgctgaagtctctgatgggtaaagtagacaccatacaagaatagataggtaatgttagcacagagatataaattataagaaccagaaagaaatgctagagatcaaaagcactgcaacagaaatgaaaatgattttgatggccttattggtagactagacatggcggaaaaaaagaatctctga

SEQ ID NO: 520528 - DNA, 562 bp, Homo sapiens
tgatttatcactataggaggctgagacaggagaatcgcttgaacccgggaggcggaggttgcagtgagctgagacagcgccattgcactccagcctgggcaacaagagggaaactccgtctcaaaaaataaataaataaatacagaagtttttaaaaagtggtctatttacagcagttcttttactcagcacagcatttccatatatcaagaaaatacaagaaaatacgaaaaaggcacaaaatgaaacaaaacaaatacaaatacacacagacagtttgaagaggaagaacaagcatcggaaccagactcacatatggtggggatgttagaattctcataccagaaatttgaaacaatgatgattaagwtgattaagatgctgaagtctctgatgggtaaagtagacaccatacaagaatagataggtaatgttagcacagagatataaattataagaaccagaaagaaatgctagagatcaaaagcactgcaacagaaatgaaaatgattttgatggccttattggtagactagacatggcggaaaaaaagaatctctga

SEQ ID NO: 520529 - DNA, 562 bp, Homo sapiens
tgatttatcactataggaggctgagacaggagaatcgcttgaacccgggaggcggaggttgcagtgagctgagacagcgccattgcactccagcctgggcaacaagagggaaactccgtctcaaaaaataaataaataaatacagaagtttttaaaaagtggtctatttacagcagttcttttactcagcacagcatttccatatatcaagaaaatacaagaaaatacgaaaaaggcacaaaatgaaacaaaacaaatacaaatacacacagacagtttgaagaggaagaacaagcatcggaaccagactcacatatggtggggatgttagaattctcataccagaaatttgaaacaatgatgattaagatgattaagatgctgaagtctctgatgggtaaagtagacaccawacaagaatagataggtaatgttagcacagagatataaattataagaaccagaaagaaatgctagagatcaaaagcactgcaacagaaatgaaaatgattttgatggccttattggtagactagacatggcggaaaaaaagaatctctga

SEQ ID NO: 520530 - DNA, 575 bp, Homo sapiens
gaggtgacaattgtcattgttattgttctcattttacagatgtgaaggcttagactggaagactttaaatacttgtccaaagtcttagtgctggagtaaaaggaagagtctcgaattgaaccctaaacagctaacctctaaactcttgcccttaaacaaaagagtgaaaaggagcttttattatctaattggrcattgggagaaacactcttaagcaaagaaacaaaggcatgagcacaggtaaaggtaagagtttgaaattggtataaagcacatagctaaacctttggaagtcaattaaaggaaaggcaactgtgaaggagattatttagaaaaaagaaatgggaattctctgacatctgggcatcttcttgctgtcttgtcctgggtttccagctaaactgagcccagccaagctttttgactccctcccatggcttccatctgccacacagctctggccaaggccaaactcagcctgccttatttccagaattccttgcttctgcaaagtcatctcgaagtgagccatagagcagtgtcctctgaatgactgcacagcccccaaatatatg

SEQ ID NO: 520531 - DNA, 575 bp, Homo sapiens
gaggtgacaattgtcattgttattgttctcattttacagatgtgaaggcttagactggaagactttaaatacttgtccaaagtcttagtgctggagtaaaaggaagagtctcgaattgaaccctaaacagctaacctctaaactcttgcccttaaacaaaagagtgaaaaggagcttttattatctaattggacattgggagaaacactcttaagcaaagaaacaaaggcatgagcacaggtaaaggtaagagtttgaaattggtataaagcacatagctaaacctttggaagtcaattaaaggaaaggcaactgtgaaggagattatttagaaaaaagaaatgggaattctctgacatctgggcatcttcttgctgtcttgtcctgggtttccagctaaactgagcccagccaagcttyttgactccctcccatggcttccatctgccacacagctctggccaaggccaaactcagcctgccttatttccagaattccttgcttctgcaaagtcatctcgaagtgagccatagagcagtgtcctctgaatgactgcacagcccccaaatatatg

SEQ ID NO: 520532 - DNA, 607 bp, Homo sapiens
acagaatatgatcacaaatgttgctgatgctgttctgttaggaggtagaaatagaatgcctaggactatgcaagcttgtcagagttagattgtcagggtgatgtgcttccatattaaaaagaatactttgttcccccctcacacatgcacccttgcagtggaaagaaacatttatttcagaataagcgcaagttattctgacttgcactcacaggctcagactttgatgccagtgtagttaaaatttagtgaataccagtcatgtttaatggtctttcccttctgtttaaaacagtactgcarcccatgcaagaaacatttccctttaattttatgcattttgtggtatcttttgatggtttttctctactgtcaaaactgtgagaataatttcaatggcatgttttttctgccatcttcagttggcagtcatatccccccagattgtcctcatagattccagatcacctttatgtttaatcttcattaattgacaagtacctttgaaagggttttgcaaaaattgaactgcaaagctgtgatttaatacaaggaaggctacatcagtgtgaaagaaagcactttatgaactgtagagtactattta

SEQ ID NO: 520533 - DNA, 290 bp, Homo sapiens
aatcctttcctttgttggagttttaaatttagaataatcagacaatagtgaagcattctgttcaaagcattccttttaggctacccatttattatacgctgctcttaagaggagatgaatttgattagcrttgaacattcagtcagtgtttttgcatagctaatatcacggagaaattttcaaaaaaagttatgcctgctatttaacattattatacagtcaacttttaattatctgtattaatggaatgtaatcagtgatgtgttgctccaaaatcatttcctttggct

SEQ ID NO: 520534 - DNA, 530 bp, Homo sapiens
catattatctcccaacaaaatgcacattaattataaagggaagaagagtaactttactttggaaactgataatcttttttttttttttgagacggagtctcgctcatcgcccaggctggattgcagtggcacgatctcggctcactgcaagctatgcctcccaggttcatgccattctcctgcctcagcctcccgagtagctggaactacaggcacccaccaccacgcccagctaattttttgtatttttaktagacatggggtttcaccttgttagccaggatggtcttgatctcctgacctcgtgatccacccgccttggcctcccaaagtgctgggattacaggcatgagccaccatgcccaaccagaaactgacaatcttaattgaaggatcaaggttaacatggctatgaaatggacaaattaaaagcacgtggcagctgatggagcacagtgggatatatctgccagaaatgcaaaacctgactctaatcattaggaagtgtcagacaaaccccaattgaggga

SEQ ID NO: 520535 - DNA, 629 bp, Homo sapiens
cgtggtggtcaggagaagcgacttgcacaggcagcctcctttgggatgggtttgtaagcttcacctccctatttctaatttcccctcttgtggtgttcttaacaagagtctctccatatttttcaagagtttattactttgggaacattacttatgggtattttccrtaatcagaaatcttaatagcttttcaaactctttcacttttctttacatgtggaaattagtttagaaatatcagccattgataattcaagaagctataaagtggagaacaatgtttagttgggaaaaaagtaactggctttgggagcatagattcagggcaacttaaatcagtgctcccaggttgcagcccttaagcttgaccccaataaactctccatgtttatgtatttaaaaaatgtaactagcctggactgatgctaatattagttattcaacattagatggcaaaaaaaattttaaaagttgtcatgttagcctccctcatggtccatctgcagaagttctgggatgaatgcatatggttgattccggggtcaggaaccatgcactgactgtccttctaacctctctcaatcctgcctgatagaggagttccttagccctttttttttttgagacag

SEQ ID NO: 520536 - DNA, 338 bp, Homo sapiens
ccaaatatgctggacatccccaagtaacatttagaaataaagttgagcaagttctaattgtggagcaacagaaataatcctccaacaaacggccatttgacttgccaaagagtcccaaagttttcaaatccactttattagagttaacttgatttattataggttattcyacttatgcactattggacacttgtgcgctattcagggacagtaactctccatccaactgaatgaagaaaacaaagacagagttcaccgtgcccccctcctgcttcctccagtccctcttttctaaaactcacaggcttcctcgcataccctcttcctccccttggagc

SEQ ID NO: 520537 - DNA, 338 bp, Homo sapiens
ccaaatatgctggacatccccaagtaacatttagaaataaagttgagcaagttctaattgtggagcaacagaaataatcctccaacaaacggccatttgacttgccaaagagtcccaaagttttcaaatccactttattagagttaacttgatttattataggttattctacttatgcactattggacacttgtgcgctattcagggacagtaactctccatccaactgaatgaagaaaacaaagacagagttcacygtgcccccctcctgcttcctccagtccctcttttctaaaactcacaggcttcctcgcataccctcttcctccccttggagc

SEQ ID NO: 520538 - DNA, 639 bp, Homo sapiens
gttaaaacagggagtgaggatctggaaggaggcaggagacagggctctacagtttgaggttttaaaacgtagggagttatataattgcttttaatgatgtacatgtaaacctatgcctcacattcaataaatataaacttatatacaatacaaatgtttctacaaattattgtatataaaattcaagaaactttttacttcataaatgagaaaaactctcactccctaaaatcttcyacttctcataaaacattgattatatacccaaatttatagtaatgaaaagaacatgtcattactgtcagggtaaagcaaagcttgacagcactgagcggtatgatttatttatggaaggaagagttgactgagcaagaagctaactgcgatcatctttagccattttctttaccataaatttaagtccacttattctttgggtgagcagttgtggttaccaacactgttttgaaaggatacatggatggtgtcatttcaatctgtcagccatgccacgattggtagttaggtgacgctgaaatctgtgttaactctttgaagctaaatggtatctcaacagagaacttactgctcaccaaatgcctcacctcctgcagttgagtagggccatgtgacttatcc

SEQ ID NO: 520539 - DNA, 611 bp, Homo sapiens
caatcagggcctttgcccaaagttcatgagactgtgaaggacagcacccaagctggtgcaaattgcaaatatttgagggtgcattccagccaagaggggccatarctgattggggaaagtggaaagggtacagcagtagccatccaaagcttctgatcaataaaatgtaacccgtatgttatgtaccagtttcttgctgtaataaaaagaaatctgcaagaggatggtaaacaattaactgtaccacacagaaactgttgtagagacatccgccccctgcccaaacctgccttgccctttcctgcctgtgcctgctcgctgcccaatctctgcatcctctgtagcagcagagcctctattttgttctggtggtaatgcgcgcatctagtcctttcagcttgtgtgggtggggaagaccacgcagcacatctctgcgagaagtctccaggtgatgcttctctctacagaggctttctaaaagggggcagactccactggtctgtgccttggcccgttgtgccctgcttcttctagcatggaatggaggctcccctgctaggctggggttactggcccttttgtgaacatgaggctatacacttttaggacga

SEQ ID NO: 520540 - DNA, 611 bp, Homo sapiens
caatcagggcctttgcccaaagttcatgagactgtgaaggacagcacccaagctggtgcaaattgcaaatatttgagggtgcattccagccaagaggggccatagctgattggggaaagtggaaagggtacagcagtagccatccaaagcttctgatcaataaaatgtaacccgtatgttatgtaccagtttcttgctgtaataaaaagaaatctgcaagaggatggtaaacaattaactgtaccacacagaaactgttgtagagacatccrccccctgcccaaacctgccttgccctttcctgcctgtgcctgctcgctgcccaatctctgcatcctctgtagcagcagagcctctattttgttctggtggtaatgcgcgcatctagtcctttcagcttgtgtgggtggggaagaccacgcagcacatctctgcgagaagtctccaggtgatgcttctctctacagaggctttctaaaagggggcagactccactggtctgtgccttggcccgttgtgccctgcttcttctagcatggaatggaggctcccctgctaggctggggttactggcccttttgtgaacatgaggctatacacttttaggacga

SEQ ID NO: 520541 - DNA, 611 bp, Homo sapiens
caatcagggcctttgcccaaagttcatgagactgtgaaggacagcacccaagctggtgcaaattgcaaatatttgagggtgcattccagccaagaggggccatagctgattggggaaagtggaaagggtacagcagtagccatccaaagcttctgatcaataaaatgtaacccgtatgttatgtaccagtttcttgctgtaataaaaagaaatctgcaagaggatggtaaacaattaactgtaccacacagaaactgttgtagagacatccgccccctgcccaaacctgccttgccctttcctgcctgtgcctgctcgctgcccaatctctgcatcctctgtagcagcagagcctctattttgttctggtggtaatgcgcgcatctagtcctttcagcttgtgtgggtggggaagaccacrcagcacatctctgcgagaagtctccaggtgatgcttctctctacagaggctttctaaaagggggcagactccactggtctgtgccttggcccgttgtgccctgcttcttctagcatggaatggaggctcccctgctaggctggggttactggcccttttgtgaacatgaggctatacacttttaggacga

SEQ ID NO: 520542 - DNA, 503 bp, Homo sapiens
tatattaacctgatcttacaaaacaaaaaaatgacaaattgcattttaaaagttagctgtctgctctttaaagaaatacacctaaaatatagatctacagtgaacaatacatttaatggtgaaacattggaaacgttccctttaaaatcaagagtgagacaaatttgcccgtcactgccacttgtattcagcattgtactgaaggacctcaccagtgtagtaagacaagaaaaagaaaatgttaaaggatttgaaaggagcaaacaaaaatactattatgtgcatataatatgactttgtctacgcagaaaaacctaatctacaaattactggaactaatgaaagttgaattagcaatttatttggggactaatttattacattatttcaagagatagctagcatgcatcgygttacttaattcattttcatggaggtagagtacatcattatacgtatcgactacaattgtgtccctcctccttttgataaaaatttaggtt

SEQ ID NO: 520543 - DNA, 626 bp, Homo sapiens
ttggctgagtgtggcggagcttagctggacttgttcatacatctgtggttcattatgggtcaggcaggtagctctgtagctctgctgatcttgactgacttacatctctgggtatcagttggatgttgatgaatctaggataatttggggtatgggactgggatgactgaggtgactcaactcttttcctygtgttaaatcttctactagagtagtctaagcatgttcccgtgacatgccataggaataggagtgaaagctaagtaagggcttttttaagcctctgcataggccatgcctgctaacatcctattaaccaatgtcatcgcatgaccacatcatcttcaaggaatggagaaatagactcctcatctctcataagagaagctgagaatcataaagcaaaggctctgggtacagggaggagccattaatccagtcaatctaccacagaggagagaattgacgaggtcctggtcctggttttgctactagccagccatatccttgagaaagaccctaacttctctgggccacagattttcactaaataaaagaaaggatttgagtataattgctaaagtcattttctgagacgtcaaagtcatgaagggtttgactatgta

SEQ ID NO: 520544 - DNA, 600 bp, Homo sapiens
tgagtaacagaacatgtcaaggacgtcagtaaactgaaaggcacacacgaagtctagagrgaacagatattcagctcccatatgtattatcagaaagcaatgcaggcacaattatctcctaatactctgattttttttttcaaaagaagttaaaaatatacatttttccatttaaatttaaaacgttctagacaatttttaaggtagtctttatgggttggaggatttcagtggactctccaggctaatagtccaaaataaatcaattaatgtaaataccccacaaccactcttaggtatctgctaatcctggctctccagcaggctcactttggggatagctgttatttttgttagaggggaaaccacttctataaaaagccactcttttgtctcagaattctagattgaaggtaattaaagctcccccccgcctttttttttatcttgtgtgaagaagttttaaactatcatgtttagttatataaatgtccacccaggtgcaggaaaaaaaataccaatcatgaactctgtgtattagtcagctattattgtaaaaatgttatgtagcaaatacccaaataacttacaacaagcatt

SEQ ID NO: 520545 - DNA, 600 bp, Homo sapiens
tgagtaacagaacatgtcaaggacgtcagtaaactgaaaggcacacacgaagtctagagggaacagatattcagctcccatatgtattatcagaaagcaatgcaggcacaattatctcctaatactctgattttttttttcaaaagaagttaaaaatatacatttttccatttaaatttaaaacgttctagacaatttttaaggtagtctttatgggttggaggatttcagtggactctccaggctaatagtccaaaataaatcaattaatgtaaataccccacaaccactcttaggtatctgctaatcctggctctccagcaggctcactttggggatagctgtyatttttgttagaggggaaaccacttctataaaaagccactcttttgtctcagaattctagattgaaggtaattaaagctcccccccgcctttttttttatcttgtgtgaagaagttttaaactatcatgtttagttatataaatgtccacccaggtgcaggaaaaaaaataccaatcatgaactctgtgtattagtcagctattattgtaaaaatgttatgtagcaaatacccaaataacttacaacaagcatt

SEQ ID NO: 520546 - DNA, 637 bp, Homo sapiens
tgacaacctcggcagcctgtctaggaatttggtgtatttcttgtagccaatgaggagatttcgaagcaggtggcgaacatgatccgacttgttttagaaatacaatgttggctacaagccagatggaggctgttacagtcatcaggtatggggtgaagatggcaggactgaggggtgggtggggcagaggacagtaggagatagatgtgagagggccagattaagggagtaaagacactggatgttctgtactggggccctgggagaaggagggcatgtctataggtcacctacatggtgtcarctatgtggaaatacctgttggaacagctctagatttaagaattaactttttagtttcagagcccctttatactcttaaaaattattaaggttcttaaagaggctttgtttatgtggattctatctatcgctggatatgtactttattagaaatgaaaactaagaacttaaaaaattcatttatttctacataataataaaccaattatactgacataaatgacatatcttcatgaaaaataactttattttccaaaacaaaaaaaaaattagtaagaagcctggcactaattaacatttctgcaaatctctttaacgtctgggttaatagaag

SEQ ID NO: 520547 - DNA, 512 bp, Homo sapiens
ttgtgtcaaaaaaatacttcraagtccatctttcgattggaggttcttacacttgtaattctgttttagggcaatgaagttcccaaaagtggtctccagatgcccaacatgtccagtcctcatattcactggcattgagtatttcctttctactaagtttaaaagaccactcaaggcagacctttctacaactgcatcatggggagatcagcaaatactactttgttcttttcaggctgagaaaaacacctgagtttttgtaattttttgaaaactgtaaatataaaagttctcttcaagagaagcaccaccatcctcatgacctgcattacacatcaagggacagaacaaatattaactaaatgtttacttcaggttaaatggtccaataaatcacatttgtctttaacaatgcggtaaattttgaaaaatccaaaggaaataaaagggaaaactatcataaactatgaaaaaagaagtctagggaaattgataaaaacagtccaagaaat

SEQ ID NO: 520548 - DNA, 587 bp, Homo sapiens
tcttggggcagatttaatttcactaactgacatttctttggagccagtgcttcaggaacatgtcacccctaaagtgagctggacccatgcgtctggcacaggcactatgcctcatgatggagaataggcagtgagtgctggccttcatcagatactccccgcaaagtccttccttcctggctaaacagtatctagaattgaagatggctgagtcttcagatggttcaagtagaggatgcatgtattttctaggcccctgttttcacctggaaaccagcagaccactgtctcagggtttggggtcaaagattgccaattagaaatgttgtgactctgaagtatttaaaactgttttgtcatctccccaggaaattctaaaggagaatttaaggatgtttgaattagttcagaaacatccatcacactggcctccctttgtacctccagccaagccagaagtgacaaccactggggcaggtaagctgttgttcaatggctctcagctagcagacccacatatagcarttgttttatgagaaagaagaattgtggcccatgctttctgtggacagtaaaatttctactca

SEQ ID NO: 520549 - DNA, 622 bp, Homo sapiens
tgggccaccccatgcccggatctcccagcatggtgagtccccctgggatcccagcaggtggaggtgggggtggagtagccatcagcacagtgcccgctaccatctgccacgtgccttctgtgtgccagccctgctcacgataggccacatgtgacccagtcctccagcaggcgccgttgtcctcctgtggttacaggtgaggaacactgaggaccagagagggaaggtggcttgccagggtcccacagcctgggcgtaggggaacggcttcaaacccaggctgcctccagaacctgtgcttagagccaccgggcatcaggccctcccaagccttggaactggctggaatccagttctcggaacactgggacgcaaaagaccyggcggcaggaagtgagtcctgaactcccaaggccacaggcccggcccctcctccaggccctgacgtgcgtccttggcttcttccctttggcagcccagcctgacctgcccatgggctgccaggggtcagagtgtggagcgccaggtttcagcctcttctccactgtgtttttggtgcacaacccagcacaccattcattcattctgccatcccagcattcattccatctcactatccata

SEQ ID NO: 520550 - DNA, 490 bp, Homo sapiens
ccaaacagaatatactaagtttagaatgaaagctataagcyacggggtgctgaaggaaagagagcttaatggagcatatgccatttaatttagagcttgaagaataagtaaggtttagatggaagataaagcatgccaaacactgttaatggcatgagcaaaagcatggaagtaggataatgcaagatttctgtttttaggaaaagtgaacagaccagtttgattggacaagataatcaacataggagtagtaagaatagatgaggcttgaaagaaaggttgaggcagaatgtggatggtcctaaagatgaagcatgtgaactttgtcctgcaggaagtacagagccatttcagttgttttagttggtggaagagaagagttgacatggtgactatcatattccctagtgaagatgatcattcacttcaagcatagagacaggaagctatttgaaaaattgaaacagtgaagtaaataaatgttcaggtc

SEQ ID NO: 520551 - DNA, 490 bp, Homo sapiens
ccaaacagaatatactaagtttagaatgaaagctataagccacggggtgctgaaggaaagagagcttaatggagcatatgccatttaatttagagcttgaagaataagtaaggtttagatggaagataaagcatgccaarcactgttaatggcatgagcaaaagcatggaagtaggataatgcaagatttctgtttttaggaaaagtgaacagaccagtttgattggacaagataatcaacataggagtagtaagaatagatgaggcttgaaagaaaggttgaggcagaatgtggatggtcctaaagatgaagcatgtgaactttgtcctgcaggaagtacagagccatttcagttgttttagttggtggaagagaagagttgacatggtgactatcatattccctagtgaagatgatcattcacttcaagcatagagacaggaagctatttgaaaaattgaaacagtgaagtaaataaatgttcaggtc

SEQ ID NO: 520552 - DNA, 490 bp, Homo sapiens
ccaaacagaatatactaagtttagaatgaaagctataagccacggggtgctgaaggaaagagagcttaatggagcatatgccatttaatttagagcttgaagaataagtaaggtttagatggaagataaagcatgccaaacactgttaatggcatgrgcaaaagcatggaagtaggataatgcaagatttctgtttttaggaaaagtgaacagaccagtttgattggacaagataatcaacataggagtagtaagaatagatgaggcttgaaagaaaggttgaggcagaatgtggatggtcctaaagatgaagcatgtgaactttgtcctgcaggaagtacagagccatttcagttgttttagttggtggaagagaagagttgacatggtgactatcatattccctagtgaagatgatcattcacttcaagcatagagacaggaagctatttgaaaaattgaaacagtgaagtaaataaatgttcaggtc

SEQ ID NO: 520553 - DNA, 490 bp, Homo sapiens
ccaaacagaatatactaagtttagaatgaaagctataagccacggggtgctgaaggaaagagagcttaatggagcatatgccatttaatttagagcttgaagaataagtaaggtttagatggaagataaagcatgccaaacactgttaatggcatgagcaaaagcatggaagtaggataatgcaaratttctgtttttaggaaaagtgaacagaccagtttgattggacaagataatcaacataggagtagtaagaatagatgaggcttgaaagaaaggttgaggcagaatgtggatggtcctaaagatgaagcatgtgaactttgtcctgcaggaagtacagagccatttcagttgttttagttggtggaagagaagagttgacatggtgactatcatattccctagtgaagatgatcattcacttcaagcatagagacaggaagctatttgaaaaattgaaacagtgaagtaaataaatgttcaggtc

SEQ ID NO: 520554 - DNA, 546 bp, Homo sapiens
tgccatatcttgttagatcttattcggtttgaagaagcatggggtggctttaccttggctgccttggcataacaggggacatctggccagtgtctgcagacagtgtggggcagtggaaagagtaccgggctacaagtaagaatttgaccaactatcgactcacgcaactttgggcgaatgactctgggtctagtctgtccatctaaacaatgaagatgctcacacttgctctacttatctccccaccttgtaaggaggtgcaatgggaaatggatgcacgcacgctcggcaacctgattataggccacccaaccccgccactttttttwaaaaaaacaactaccccgttgcagggtgtgaactgcggggtaggacaagacaggtccccccgccgacacacacacacacacaccccgccaccgtctgtgctgcaactggatgggaaagacaagcgccggagcctgggtgagctttttctcttctcatcccaggctactggggcagaggaaacagcggcggctgtctccaaggagccgcgggtccctg

SEQ ID NO: 520555 - DNA, 571 bp, Homo sapiens
gcattccctttgcaaaagatgaggaaacgsaagtgtttggcggcagctcatcccaagccccactccccctcagcaggtctgtgagatggggaaagtgagactcaaggaggtgtgagtgatccctgggtcacaggggctctggccccaaatccggaagttttactttgtccccctccatcttctggtctttactgttgcgtctaaacttttccaggattttaatttcctctttttacccctccccctcgcccccacccaccatctccatccctctccaaacgcctaaaagaaaacacccagacggaggcctggtctaggcttcttttgcagtacaagtcatcgtcacaccttccaggggaagtcgcctggactaccgcggcctcaaattcagcctcccggatcttaccgctagctttccaggggaccgacaagggtgcagtgctcccagggttgccctctcccctggctggtccgcctctggttctcttcagagtcggtggctccacctggccagtcgtggatctcggacgctgtggcactcagcagggaaatcaggccgaagggaccacca

SEQ ID NO: 520556 - DNA, 599 bp, Homo sapiens
caagggggaaacatgttttctcaaaggaaatgatgcttttatattaacgtttctggtaatgtacagcgacatctagtggagacaaaccagtattacaatccattggtgtaacaggtatcaaactctactgycatagttacagtctataggtggtaatcttaatactcatatggtaaccctatattttaaaccttcttgtaaaatttatctctttttgcctagaagcaatcaaacttcaaatggtgctgcaaacaaagccacacatggacatgccattcttccaagaagccttagatcaacctcaggaggagccccaactgcagccccccgacacgacgccccttttcagcaggaagtagccagaaagaatcgtcgtccaacaccccctaacagcagttatggttacgtctcctgagggaggaaataatacaggagttattaagaaattatttttaggcagctagaaagggtaaaaattctcagtggaattttcctttaataaaaagcagccccaaaccatttcttctctaacaggaagcagcctgaaaactcaggcatagatatgcaaactagaagcttttatatgtaaatgctggcag

SEQ ID NO: 520557 - DNA, 335 bp, Homo sapiens
tcttaaacgccactttttacagcttccaagaaactaactgggtgaaatccagcctgcctcctgtccttgtttttatcatttcatagtgaaaacataaactcccaagcccacctactctattgcactgtgtctccatgacactctgtaccttctggctctgactcagccctccactttccccctccctaacctgcctgtgccctctaataaactgyagcccccctcatacccttagcttctccttggagcattccctccacttcctggcgttaagtgaaatttaactctcccttgagggcactacctcctttgcaggcttctgaaatgagagctgt

SEQ ID NO: 520558 - DNA, 608 bp, Homo sapiens
ctgcggaccgcggtcgaggcatgctgcgggggtggctaccttgtcgccgcggcctcgccgccagcaagctccgctccatggctggccgactgcggcactcacggcccctcccccgcctcgccccggcggccggtctgccgcccgcttccgcgttgcgcgctcccatccccgccggaagcggcgtcggagcagcgcggcagggcgcggaaacccgggcgggtggagtggcaccaaacggagtgagaccggtctgtccagccgctccccatcccaacccaccgacgtactccaccagggagaccacacccttcataaccaacgtccgcgtttttgcctttgttgcttcggtcacagcccgaaggattttcccttatgactagatgaccccttaaaaraaaacaaaaacaaaaacaaaaaaacccagagtgaccaagacctgcaaactcaccttaactgcaactggctaggctcagctaacccactccacaatgatgctgcacaccaaccccagggtgttggtctctaaactggtctgggtcagcccctcaaggctgaactgttttaccctcacatttctctttacagagagggacatcactagctacata

SEQ ID NO: 520559 - DNA, 631 bp, Homo sapiens
gctgcagagggcttcaaagaggcctgggtgagatggaccagcagagggcagcagttctcaaatgtgtgtatggaaccatgcatttttaccacctagctctggtgcattggttgccggtggtctggatgccacactttgagaaacacagctccatgacatgagggtgatgcaagtctgtgttgtaccattagctgtgtggtcccaggagatgaagtcaacataatcatctggtaggagactagatctctagtcgctaagtcggtttatatatcctcctaggccagaaagagggcatgtttcttgtgagtgcttgtatcatagaacaatatgtgatagggcaaattgtgacctggaatggaattattggcaactctagagatgtgccggactgagaaccagagataagtagaatgtccttaacactgcaaggagagcaagagttacaacaggtttttaacctctctgcaatgcttgtgggacaaccaggctcttttccccaaactgagatatactaagtaacccaaataaagaaacgccatccaaagcctcttaaccatctgcctgcctacttgcatgsctgaaactttattcattcatatcctacttttgatcttaccatgagaaagatgtt

SEQ ID NO: 520560 - DNA, 608 bp, Homo sapiens
catgtcctgctcctccagtccccaccatccatgcaatgtgtgcaggtttccacaccccttctggccaccagaggcctttgagtttgcctccctgtcactctgggccttctacagmctgtgcgtgagggagtcacaattattaattgggactttggatattgtctctcagaacatccaagagcagtcaatcaatggttacaggggaaaaaaatactgctagaaaagatatctaaccatatataatacaacaaacccatccaaaaagcaccaaagaaatgggttcagaacaggtgtggtggctcacgcctataatcccagcactttaggaggccaaggcgggcagatggcttgaggccaggagttcaaaaccagcctgtgcaacatggcaaaatcccgtctctaccaagaaaaaaacaaaaacaaaaattagccgggcatggtggcatgcacttatggtccaagctactcaggaggctgaggcgggaacatcgcctgtacctgggaagtgaaggttgcagtgagctgagatcacaccactgcactccagcctgggcaagaccccacctcaaaaaaaaaaaaggaatgggttcagttaccaaacaatacta

SEQ ID NO: 520561 - DNA, 466 bp, Homo sapiens
tacttttaatgtctcccaaccataatcacttttgtcatgctataaactcatactcagggagtagtgctgtggaatcctaccattcattcataatagaaataggaatttttagatccataaactgctatgcccctgatcagtgggtcttacaatgcaaacttatccgcagaaagattcaaatgttactacgaagtagttagaaagaaagagggaagcctgggagaaagcgttgtamatccttctcattcaagccagagaaatttccaggatactgggcgaagggcagcaactcagttttctcagcaaactatcctcatctaacagggctccaggaaaatatcagccatgaccctgccaagtccagctttgctcctcttgacccaggacagtgatgcacctctagtgactgaacaggaaatgtgacaagtatagctgaagggataactgatgcataactaagcaagca

SEQ ID NO: 520562 - DNA, 329 bp, Homo sapiens
gaagagtgggccaaattctcttctttacctgattctagaagatccataccaggggccacttcaccagaaaatcacactgagcctaagccaaggcaggtgtaacctggaaatgcagcccgtggcccaagcaattctttcttagaaatgccagcaatagtgagccaattctgctctgccaaagggaattttctcattaggaagttttatgtaaaagcctaaacacatcccacaaagtagattgtaagaagggtcttaacttactaccaagtgagctggttcacttggcttcargtgagaaaagcactgaatgtttataactgcagagctag

SEQ ID NO: 520563 - DNA, 477 bp, Homo sapiens
aggacttgttgagcagaacttacagcttaaagttaagggctaaagtgatagcccaggtggaaagaagaactaggtcagggcaggcaaggacagatgccctaatgtcttgggtgaggccacctcctggaaactagaaacccgagtgttgggtgcccaaatgttaaaacacaagagctcccgttaaataactctgactagacagatgtgagtcaataggtcaaaaaggatcaagagccatagagttgaatatactcagagccacttggcaagcaagaaaaaaaaaaagaaggctgtccaaggagaccttgtgtgtgtgcgcgcgtgcgcmcatgtgtataaatatctatactctatagccagtgagggataagacagagcaacaacgcagcatgagtatgtttgattcctctacaatgcaagatttctaacatttataaaacagttgactctcattttccttttttaatgacacaattt

SEQ ID NO: 520564 - DNA, 382 bp, Homo sapiens
aaaatttttttcctccccattacaagttgggcagttttttctaaagctaaacaagtctcaccttacaatccaaaaatcacattcctaagtattttgacaactactttgatgttatttccaaacaaaagctaccatgcaattatttacagaagccctattcakaatgaccaaaggaaaaaaaaggaatcagaaagtcttacaatagatgactgtgtgggactccactcagacatcaaaagttgttataaagattatttaaatgaaaacatttgagatactgaagataaaggaagaaatcttaccagaacttactttatccaattaaagccaaggtcacagaaaaatacagctgccattaaccccatccaaggagtttcttgcg

SEQ ID NO: 520565 - DNA, 382 bp, Homo sapiens
aaaatttttttcctccccattacaagttgggcagttttttctaaagctaaacaagtctcaccttacaatccaaaaatcacattcctaagtattttgacaactactttgatgttatttccaaacaaaagctaccatgcaattatttacagaagccctattcataatgaccaaaggaaaaaaaaggaatcagaaagtcttacaatagatgactgtgtgggactccactcagacatcaaaagttgttataaagattatttaartgaaaacatttgagatactgaagataaaggaagaaatcttaccagaacttactttatccaattaaagccaaggtcacagaaaaatacagctgccattaaccccatccaaggagtttcttgcg

SEQ ID NO: 520566 - DNA, 382 bp, Homo sapiens
aaaatttttttcctccccattacaagttgggcagttttttctaaagctaaacaagtctcaccttacaatccaaaaatcacattcctaagtattttgacaactactttgatgttatttccaaacaaaagctaccatgcaattatttacagaagccctattcataatgaccaaaggaaaaaaaaggaatcagaaagtcttacaatagatgactgtgtgggactccactcagacatcaaaagttgttataaagattatttaaatgaaaacayttgagatactgaagataaaggaagaaatcttaccagaacttactttatccaattaaagccaaggtcacagaaaaatacagctgccattaaccccatccaaggagtttcttgcg

SEQ ID NO: 520567 - DNA, 382 bp, Homo sapiens
aaaatttttttcctccccattacaagttgggcagttttttctaaagctaaacaagtctcaccttacaatccaaaaatcacattcctaagtattttgacaactactttgatgttatttccaaacaaaagctaccatgcaattatttacagaagccctattcataatgaccaaaggaaaaaaaaggaatcagaaagtcttacaatagatgactgtgtgggactccactcagacatcaaaagttgttataaagattatttaaatgaaaacatttgagatactgaagataaaggaagaaatcttaccagaacttactttatccaattaaagccaaggtcacagaaaaatacarctgccattaaccccatccaaggagtttcttgcg

SEQ ID NO: 520568 - DNA, 550 bp, Homo sapiens
tgggctcaagcgatcctcccaccttagcctctggtaggatccgggacccctcttaaggaggcctgaccctagccaccatccctccttggcagagccttcacaggatgtgagatcactcaggccagcacacttgcatgagaccagcttcagttgggaactgagtttggtcagaaagtcgaagcgtttggttcctttgttgcttttagctcaagtaatccctgggctatttgctcactgtcattacctctgcctgccacacattaaggaccccagtgccacattgatgaataagctgagagtgtgttttgtggtggatgatggggtatttgctttcttggaaactcttcccasttttgtactgtccattatgggcactctgggataaatcctggagatccctaagggccccagcaatggaaaatgctctgctgaaccatgggacctggacagtttattaacatcttccacctaagagccctcagctctaaatgaatgcactaataccccatatacttcatgggatttacaatgtttgtcccctgccacagct

SEQ ID NO: 520569 - DNA, 654 bp, Homo sapiens
gttatttcctgctctctatttgtgtagctcccagcaatttggtgaacttttctaaatcttggtttttatcttatgaaaaaggggtgcatcctgtctcatggggttgtaaggattccatcaaataccctgtgcacagtaagaaacttaaacaaatttacaagaaaaaaacaactataaaaaagtgggcaaaggacatgaacagatatttttcagaacaacacatacatgtgtccaaacaagcatatgaaaaaaaactcaacatcactgatcatcagagaaatgcaaatcacaaccacactatgataccatctaacaccagtcaaaatggtgattattaaaaagtcaaaaaataacagacgctggcaaggttgtggagaaaaaggaacacttatatactgttggtgggagtgtaaattagttcagccattgtggaagacagtgtggtgattcrtcaaagacctaaagacagaaataccatttgacccagcaatcccattactgagtatatacccaaaggaatataaatagttctgttataaagacacatgcacatgtatgttcattgcagcactattcacaatagcaaagacgtggaatcaacctaaatgcccatcagtgatagactggataaagaaactgtggtacatatacacc

SEQ ID NO: 520570 - DNA, 644 bp, Homo sapiens
tagggtcttcaaagactctataatacttatacttccctcagcctcccagatcccataaacaagaggctaccaggatcacgacatttactgccacaaaaaattatcagcagagatgttacatatagttcaatacttgctgaaaacttctgcaggaagataccatcttttggctcaagagcaaatgtgaagatgccaattgcttcaagtggtttaatcaaggtcaaatgcrgcaaaagcaagtctctcagctatatgacagtttgttgctttgcttttggggaggggcatattgttttaagaaaagacatctaatggcaacatggctccaatgtgtttgtaccttctagatgtctcccctcatgggtttacatttcccatctaagtaactgtagaaatgaaaacaaaagaggccagccattcctatgatgtttctgctcaaggacatacaaattaagaagggctaacagagaataaaatgattcagtaattctattgaaaatactactcttttcttacacacttagtaccttcattcggttaactgctaacagaggaaaatctatttcaccagaacaattcaataattgacttttaagcttcccagggcttcttcatggaggcctcggagctacatgtctgcacag

SEQ ID NO: 520571 - DNA, 597 bp, Homo sapiens
tgtcttcacttagggcagcagttccaggcttaagggtggggcttagccaggagcctggccattctgtatcactgctastgctctcccatggccaaaccctgctgggagcctcagggaaaggggtccaggaatgtgtgtgcaggaggcagtctcccagggcacaaagcagggcagagaggggaaccggaggggtggatggagactaaccagcacattgccggtctctccgcttctaatccatctctctccagccatcccccgagtatagccaaggcaagggagcttcagaaggagccccctgcctcctggtaagcagtccccacaactgcactttccaacctcctctctccccagcacctggtgacatcattccaaaagacaaatctggccatatccccccaccggtgaaacctcttcagcgagtcctttgtcccgttgtctgccttagcaggacagtggccatcctttggacctggccactcctcagcctcatttcctgccactgtcccaggccaagggcaggcttggctgatccctggctccctcaggcctctgctcccaggttacctctcccggtcccctccctgatccaaaagg

SEQ ID NO: 520572 - DNA, 519 bp, Homo sapiens
gataaagaaaaatgcttgggactggctcagactccctttcccagctttaattagagccattccacttgtatctgttttatattttgaaaatccagagagaattttttttggggggggtagtggggaaaggggtcctgccactaggaactatttgaaagcctcatagtccactctgcatcacttttttttttaacagaaggggaaaactgaggctcagagagagaaagttatttactgaggtcctgcagcaagtctgagggaagaackgttctgaatctgggactcctaatgcctagtccagtgctggcttgattccaacctccagggtcttcctgtggctgccacccccagcctaggatgggtacgctgccctcagccccctccttggttggtgacattggccctggcatcacttgagctcagccccctggagtggaatctgcacaggctgctctccctaggctgaagtgttaacttcagcccctcaccttggactcagcttatctgggctctcaggag

SEQ ID NO: 520573 - DNA, 594 bp, Homo sapiens
ggctacaccagcctttcccgagctgggctctgaagaaatcagttctagttttttaatatctaaggactctgggaataagtcctgtgatcccttttggaagatgaacttggagaaactatggcagaaggactgaggactgaccagggaattaaacccatttgtctccaagactaaaacctacctgagagtcgtgattatggaacagaatgaaacatggaataaataaaactatgtagaaatgatgactgacgtatagtgggagggaaagggggaaataagatatgaagtaatggaaatacacagatttccttatcttttatagccggggcaaaagatagagtttaaatatgaaattaatagagatataattacttttaatattaaagatatgaaggtaaacattaaaaatacaaaataataagtttgagtcacagatgggaagcggatgggagagraaataaaaaagaattccaccaatcctcctaggaatggttacattctcaatgcaatacaagaagaaattaacaatgaaacataacaaattttaccactctctcttgaatcaagaaggaaatcaaatcaaatttcagaaat

SEQ ID NO: 520574 - DNA, 514 bp, Homo sapiens
actcaggaggaacaaacaggacaggacgtgaagccatgcacagaagcctccttgccaaagcactggcagggtgggggaagaggaatccattctggtgccccggaagcctctgaggatggggcagaggagacaagctggggttggggggctgtgaggcctgtcatctgtgacrcagtccatatgccaggcacccaggcaggggctcagtatattttccccattggtttcagttggaaaccctggagggtcgatcttatccgctggggaaatcaaggcacggagtagataagcgacctggcttagattacacagccaggaaaagtccaggaacgggttcccttgtcgtggatgtctccttggccaggcaggaacggccagcatttctaggggaaccaggaacgtgctgaagaatgtgttccttgcaagtttaaaaacacaaaacgagttacattatttcttggcttaaaacgtgtctgcaacctcccctgccctcaggctagagcccaagcacctg

SEQ ID NO: 520575 - DNA, 447 bp, Homo sapiens
cccttcctaggggccttgagaagctgaaggctgggaccatgggaagcgcacagcacrgtgctagcctagggaagctcccggtagaggctggctgctcttattatcatgattccaattgtcacttgctatgggccagacaccttggatactgcccgcggggtatgatacaccatgactctgagaggtggagttacaggaggggaaactgaggctcaggctggaggtgccatgccaaggggtcacacatccaggaaatgattgggcagggtgtgaacccagttctggctgccacaccccaatggcttccctgtgccagcaccctgcctcagcagagccctgggagggcggctctgccctcgctgggcagccgtggccccagtaggtaccccctccctttggttcccagcccccatgatggatgagtctggggttgctttctttgcgggc

SEQ ID NO: 520576 - DNA, 596 bp, Homo sapiens
atagcagaacttcctgaacctctgccgggaggctttctagcatggtcttaaagtcttcaacagagtcttcactgagggtctctggtgggagcccagaaggctctcgtggaatctggacctggaaagcaggtagtaggacaayttctggctcctcggcccatcatttcattgggtagtgatctcatttgatcattctggacttctgtatttctttgtgtctctgggtacacttcagtctcaattctggaactctaagaaaaaacgttccagacttctaggcacaaacagaaaagtaagaatcagcaaaaacagaccataaaagctgttaaaccactctgatctcacggatctggtccagacccaggttccatcagccttccaatcttaacagggtttcttaataaaggtactagaaactcatttttgtcttcttcctggtagatcaattaacacaattgaggaaacatgacagtagtttaccaaaataagaaatgtaggttctcaaagctgattgaagaatactggccttgctagagaatcgtgcattcattttgtctctcactatgaagtgttttacattatgttgaaacaagaat

SEQ ID NO: 520577 - DNA, 596 bp, Homo sapiens
atagcagaacttcctgaacctctgccgggaggctttctagcatggtcttaaagtcttcaacagagtcttcactgagggtctctggtgggagcccagaaggctctcgtggaatctggacctggaaagcaggtagtaggacaacttctggctcctcggccyatcatttcattgggtagtgatctcatttgatcattctggacttctgtatttctttgtgtctctgggtacacttcagtctcaattctggaactctaagaaaaaacgttccagacttctaggcacaaacagaaaagtaagaatcagcaaaaacagaccataaaagctgttaaaccactctgatctcacggatctggtccagacccaggttccatcagccttccaatcttaacagggtttcttaataaaggtactagaaactcatttttgtcttcttcctggtagatcaattaacacaattgaggaaacatgacagtagtttaccaaaataagaaatgtaggttctcaaagctgattgaagaatactggccttgctagagaatcgtgcattcattttgtctctcactatgaagtgttttacattatgttgaaacaagaat

SEQ ID NO: 520578 - DNA, 596 bp, Homo sapiens
atagcagaacttcctgaacctctgccgggaggctttctagcatggtcttaaagtcttcaacagagtcttcactgagggtctctggtgggagcccagaaggctctcgtggaatctggacctggaaagcaggtagtaggacaacttctggctcctcggcccatcatttcattgggtagtgatctcatttgatcattctggacttctgtatttctttgtgtctctgggtacacttcagtcwcaattctggaactctaagaaaaaacgttccagacttctaggcacaaacagaaaagtaagaatcagcaaaaacagaccataaaagctgttaaaccactctgatctcacggatctggtccagacccaggttccatcagccttccaatcttaacagggtttcttaataaaggtactagaaactcatttttgtcttcttcctggtagatcaattaacacaattgaggaaacatgacagtagtttaccaaaataagaaatgtaggttctcaaagctgattgaagaatactggccttgctagagaatcgtgcattcattttgtctctcactatgaagtgttttacattatgttgaaacaagaat

SEQ ID NO: 520579 - DNA, 596 bp, Homo sapiens
atagcagaacttcctgaacctctgccgggaggctttctagcatggtcttaaagtcttcaacagagtcttcactgagggtctctggtgggagcccagaaggctctcgtggaatctggacctggaaagcaggtagtaggacaacttctggctcctcggcccatcatttcattgggtagtgatctcatttgatcattctggacttctgtatttctttgtgtctctgggtacacttcagtctcaattctggaactctaagaaaaaacgttccagacttctaggcacaaacagaaaagtaagaatcagcaaaaacagaccataaaagctgttaaaccactctgatctcacggatctggtccagacccaggttccatcagccttccaatcttaacagggtttcttaataaagstactagaaactcatttttgtcttcttcctggtagatcaattaacacaattgaggaaacatgacagtagtttaccaaaataagaaatgtaggttctcaaagctgattgaagaatactggccttgctagagaatcgtgcattcattttgtctctcactatgaagtgttttacattatgttgaaacaagaat

SEQ ID NO: 520580 - DNA, 591 bp, Homo sapiens
cttacttcctatctaacattgtgccgaacgttatacacagatcctcctccgtatgatccttagttcaggatcataaactcttgataaattactgccccaggaacctccagtgacatcaaccgctgctaccatttgtggaattctgccggccagacaccccacactgcattccctcacaactgatcctcccgatagcccatggggtaggcactgttatttccattcacagataagcaaagtgaggctcggagggcggggacttgcccaaagccacaaggatgaaaggtagtgcgatgactcaaccgataaaaataatcccggttgtggtgggggggagctgagcccgactcctcccactatgctgccgcggctccgaaggcctagcccgagtgcggaaatgggcttctagggtcccaggacgaggtccacctccagagctgcagtgaggtccaagtcagcccgaggagcccgcaggtcccacatttcagtcatttccctaccccaaaggcagggactccccgctcctggggcaggcagccactgtggccgcgagcaagcgtackcgggttaggaaggagaaggaaggggaca

SEQ ID NO: 520581 - DNA, 663 bp, Homo sapiens
tgctccccaaacgggtcaaaaggaagagaaacaggctagaattagggcagcccatggcttgcaagtgagaactgagccaggcagggcctggtctgaaaggtggtccctggatacagccaggcctgcactgctggccctgtgcccaaagccttagatgggttcaacattgcccatgactgctgccctatgccaaggtgttgagaccccaagagccatggggcctgtgtcacactgctgtaggtcccactgttttacaagctggcggggagaatgagcttgctggggtggagatgcctggatgctgggctgttgtgcgtgattctgtttgctataaaacagccagacattcctaggacctggaatcgcgccgaggccatggagttagccttcccagccatatatctccaggcgggggacaggcctgagacatctgagataataaagacatgattgtctcagccctggggcttgtctcccctttgtcccagggcccagcagccagcaaaaagtttaaagacatcctcccccttctcctgggaaaatacaaatgcaccagattctatagcccctggggtgaacttcccaaaaaccaggcctcggycgggattcctgctctcagcaccccaaagcagaaggtaacttggaagcacacagtagagacat

SEQ ID NO: 520582 - DNA, 316 bp, Homo sapiens
cgttcactgtgctgtttccatgtctaccacttctgcaacaaatgtgacttctattgccaaattcttcttcattgctgtgacaggacacactaccacggccctttcataaagtcctcaactgacccagcccactcacctttctctcctggaatgctcccttgccatttcccttctcttctgtctttcccattcccggcgagctttatcctgttcttctcgatgtcgtttccgacgttcgtgctctctttctttcactctagcatgcttccctaatgagaartaaagtgtcatgcaaagaaacctcacttcaaaaatt

SEQ ID NO: 520583 - DNA, 492 bp, Homo sapiens
acactccgcttccaaaacccggaagctggagaccacacaagtgcccaacgccaaaggcaccccgtggagggacgccctgtgccctcccccgaccaggtgacccgctgcgccctacacatcttcaccaggaaacatctgttatcgatgtggacgaagcgcagcctgcactcccagatccgctcattttcgttctgccctccgttttacgattcgcctacactgaaaatgcgtgagtggagtggaaagccttcctactcctgcctcagcgaccccttctaaaatactgcctcgtttggcctgaaaatgtgatttgcaggcttcctgagcaaagtagatttcactccattaaagaaaaaaaaaaagaaaaggcaccgaacggggctcggctgtcgggagttttgctttagtkttttgcgtgttttgttttgtgtttttttgttgttgttgttctttttgcggccacgcacaccgcgttcccaggcttcagggcgt

SEQ ID NO: 520584 - DNA, 492 bp, Homo sapiens
acactccgcttccaaaacccggaagctggagaccacacaagtgcccaacgccaaaggcaccccgtggagggacgccctgtgccctcccccgaccaggtgacccgctgcgccctacacatcttcaccaggaaacatctgttatcgatgtggacgaagcgcagcctgcactcccagatccgctcattttcgttctgccctccgttttacgattcgcctacactgaaaatgcgtgagtggagtggaaagccttcctactcctgcctcagcgaccccttctaaaatactgcctcgtttggcctgaaaatgtgatttgcaggcttcctgagcaaagtagatttcactccattaaagaaaaaaaaaaagaaaaggcaccgaacggggctcggctgtcgggagttttgctttagttttttgcgtgttttgttttgtgtttttytgttgttgttgttctttttgcggccacgcacaccgcgttcccaggcttcagggcgt

SEQ ID NO: 520585 - DNA, 339 bp, Homo sapiens
gctccaggccttctagagggcaactgtcagctaaatacaggccacgattcttcgcagactgttgctttgggagaacagtggagacttaygagcacctatgcccctatcctaaaagacagcctgactcactgtccccgtgggtctggggaatgccaaatggggttgccagatttaaaggaaaaaaataaaacaagatacccagttacatttgaatttcagataaataacaaatagtgatttagtgttaagtatgttccaaatattgcatgggacatagttatacttaaaacaaagtatttgttttcattctgaaattcaaatgtaactgggtatcctgta

SEQ ID NO: 520586 - DNA, 592 bp, Homo sapiens
cttgggaggctgaggcaggagaatcacttgaatccgtgaggtcgaggttgcagtgagcagagatcatgccactgcactccagcctgggccacagaacaagactctgtctcaaaaaataataataataagtaaataaataagtacaatacaataaaatacatgggaagtgtctagttctcctcatgttaaaaataattaaataaggctgggtgcggtggctcaagcctgtaatctcagcactttgggaggccaagacgggcggatcacgaggtcaggagatcaagaccatcctggctaacacggtgaaaccccgtctctactaaaaaaaaaaaaaaaaaaaaattagctgggygtggtggcgggcgcctgtagtcccagctactcgggaggctgaggcaggagaatggcatgaacccaggaggcggagcttgcagtgagccgagatcacaccactgcactccagcctgggcgatagagcgagactccgtctcaaaaaaaaaaaattaaataaaataaaaaataacaaaaccacttgagtggaacaattggagtcttgctgcaatggagtttgtgtgttttttctcttgcttgt

SEQ ID NO: 520587 - DNA, 653 bp, Homo sapiens
ttaaacctgggggaagtaggacaaactctttgtgtgatattccattggaggcacatcttacacatggttaggacctaaagccagtgagaggccaggcatggtggctcacatctgtaatcctaacactttgagaggctgaggcaggaggattgcttgagcctaggagttccagatcagcctggacaacacagtgagaccctgtctctacaagaaacttaaaaattagctggcatggtggtgtgtgccagtagtcaccactatttgggaggctgtgctgggaggatcgcttgagcccaggaggttgaggctgcagtgagctatgactgtaccactgcattccagcctgggcaacagagcaacaccttgtctcaaaaaaaaaataaagtcagtaagaaaggagagtgtaacttgactttacaaatacwctagaaaatctcagaaatgttcaaaaacctaataaagaacctggtattagactgtaccatatccccaaatatagagctgagaatcttgatgcagttccagggctaaagcagacatttccccacttgtgttcagggaaacaaagccagtcttcagaaaaaaggaggctggaataaatatgcaacaaggagagataaaaaacccacagaggcagtgcagcagatactgca

SEQ ID NO: 520588 - DNA, 587 bp, Homo sapiens
aataagcgacattagtggttccatgtggattttgtattatttttttctggtaactcaaaggtcccttaaaagagttttgtttttgttttttaattaaataacctggccaggcatggtggctcacacctgtaattctggcactttgggaagtcaaggtgggtggatcacttggggccaggagtttgacaccagtctgaccaacatggcaaaaccccgtctctactaaaaatacaaaaaattagccaggtgtggtggtgcatgcctgtaatcctagctcctcgggaggctgagtcataaaaatcgcttgaacccaggagacggaggttgcagtgagctaaaatcgcgctactgcactccagcctgggtgacagagtgagacactgtctcaaaaaaaaaaaaaaaaaaaaaaarggagaggggaggaagggggcattgattaagactcagctccacctcctggttggggattacttatgtgtgttacattcttctgtaaggaagtgtctcttctctgccattgaattatttactcattcatgtatctatatcagtacggactcctctgtctttatttgattctctgtgct

SEQ ID NO: 520589 - DNA, 541 bp, Homo sapiens
ctggcctagatccaaagcctgtgctctgaagtctggactcagcttccccagtgtttgctgcagactatgcccgcttaagcctcaaggactttaggggaaggtcakaaaagggcaagggcatggggaaggagtcttacagggaccaggaatttagaataaggggttattcaatgttccatcgtgcctggacaggttattccttttaagtgggtgttcatttcattgacaaaggcttaactcaggagcgtgtgtgccggcggcggtatttcattcctcaagggccagtttgtgctgaggaggtgctaagacagtgatgtgcagtggttaggagcgtgctctcaggtctaggctgcctgggctggaatcttgactcagacactttctggctgtgtgatcctgggcaacttatttaatcactctgtgccttggtgcctccatttataaggtggacccaatgcctctggagccacggtaagggcaaagtgagttgatatacgtcaagcacaataaaggagttggttattgctattatcttctaggg

SEQ ID NO: 520590 - DNA, 541 bp, Homo sapiens
ctggcctagatccaaagcctgtgctctgaagtctggactcagcttccccagtgtttgctgcagactatgcccgcttaagcctcaaggactttaggggaaggtcataaaagggcaagggcatggggaaggagtcttacagggaccaggaatttagaataaggggttaytcaatgttccatcgtgcctggacaggttattccttttaagtgggtgttcatttcattgacaaaggcttaactcaggagcgtgtgtgccggcggcggtatttcattcctcaagggccagtttgtgctgaggaggtgctaagacagtgatgtgcagtggttaggagcgtgctctcaggtctaggctgcctgggctggaatcttgactcagacactttctggctgtgtgatcctgggcaacttatttaatcactctgtgccttggtgcctccatttataaggtggacccaatgcctctggagccacggtaagggcaaagtgagttgatatacgtcaagcacaataaaggagttggttattgctattatcttctaggg

SEQ ID NO: 520591 - DNA, 541 bp, Homo sapiens
ctggcctagatccaaagcctgtgctctgaagtctggactcagcttccccagtgtttgctgcagactatgcccgcttaagcctcaaggactttaggggaaggtcataaaagggcaagggcatggggaaggagtcttacagggaccaggaatttagaataaggggttattcaatgttccatcgtgcctggacaggttattccttttaagtgggtgttcatttcattgacaaaggcttaactcaggagcgtgtgtgccggcggcggtatttcattcctcaagggccagtttgtgctgaggaggtgctaagacagtgatgtgcagtggttaggagcgtgctctcaggtctaggctgcctgggctggaatcttgactcagacactttctggctgtgtgatcctgggcaayttatttaatcactctgtgccttggtgcctccatttataaggtggacccaatgcctctggagccacggtaagggcaaagtgagttgatatacgtcaagcacaataaaggagttggttattgctattatcttctaggg

SEQ ID NO: 520592 - DNA, 651 bp, Homo sapiens
taaaaaatgtcgatctaatcagatctgacaagtcaatcaagacaatttcaaattatcaagaagactctgaggagtgaattttcatccactatcgtcaactgtagcaatggaccctgcctggagattgacaccattatgattagtaatttgaaaatattatatatttcattytgatctctttcaattttcctaatttgtatgtatttattataacatacaaaatatattaatgtagtaatacttaaagtgtaacatataaccatggtacatgctcaaaaaatggtgtgtacaccatcagaaggttgaagccctcgggtcaatactacactacagcctccacgctggtcttgtgtctcaagccatgccccttcccctgtgcccaacaccagccctggcatggcatccgccatgacccaaacccaaacttgtcgcgctcctgtttactattcggacctcagactgaagccaaactccgtatgcagcccagtgagtctaccacccactgcttccctgtttatttttatttattactattatttttttcagacagagtcccactctgtcacccaggctggagtgcagtggcgtattctcagctcagctacctctacctcctgggttcaagcaattctcctccctcagcttcccaag

SEQ ID NO: 520593 - DNA, 581 bp, Homo sapiens
ggagtgaattttcatccactatcgtcaactgtagcaatggaccctgcctggagattgacaccattatgattagtaatttgaaaatattatatatttcattctgatctctttcaattttcctaatttgtatgtatttattataacatacaaaatatattaatgtagtaatacttaaagtgtaacatataaccatggtacatgctcaaaaaatggtgtgtacaccatcagaaggttgaagccctcgggtcaatactacactacagcctccacgctggtcttgtgtctcaagccatgccccttcccctgtgcccaacaccagccctggcatggcatccgccatgacccaaacccaaacttgtcgcgctcctgtttactattcggacctcagactgaagccaaactcygtatgcagcccagtgagtctaccacccactgcttccctgtttatttttatttattactattatttttttcagacagagtcccactctgtcacccaggctggagtgcagtggcgtattctcagctcagctacctctacctcctgggttcaagcaattctcctccctcagcttcccaag

SEQ ID NO: 520594 - DNA, 469 bp, Homo sapiens
ttgtcattcattcaacaagttgctgtgttcctgttacaggttcctgctgtgctcagtttgaaagagggcattctattcctttgacacccaaacataatccttctttactctgtacttcagtcatcttcagcatatccttgtaagaaaagcaaggaacggatcaatactcctattttatraataaggaaactgaagctcagaagaggctttctttttaaaaccttactacatgacagagagggcacccagtgagctcttaacaacaatgtattgaatgagaatgaatgaaagcaaagaatggagctgagccctggggaggatacagataggacccacgtagaattgactcctcatagttacacagttgaaattacttacatttgaacttgtatttaaatctatgtgtttctaagcattttaagggggggtggcagaagagaaaggagatgtgggtttggctctagtaaaa

SEQ ID NO: 520595 - DNA, 469 bp, Homo sapiens
ttgtcattcattcaacaagttgctgtgttcctgttacaggttcctgctgtgctcagtttgaaagagggcattctattcctttgacacccaaacataatccttctttactctgtacttcagtcatcttcagcatatccttgtaagaaaagcaaggaacggatcaatactcctattttataaataaggaaactgaagctcagaagaggctttctttttaaaaccttactacatgacagagagggcacccagtgagctcttaacaacaatgtattgaatgagaatgaatgaaagcaaagaatggagctgagccctggggaggatacagataggacccacgtagaaytgactcctcatagttacacagttgaaattacttacatttgaacttgtatttaaatctatgtgtttctaagcattttaagggggggtggcagaagagaaaggagatgtgggtttggctctagtaaaa

SEQ ID NO: 520596 - DNA, 568 bp, Homo sapiens
cctaaggagcacgcaacctagatccctctcatgcgcggttcccaatagggtttgtgcccctgtgagaatctaatgccgctgctgatctgacaggaggcggagctcaggcggtagtgctygctggcctacccctcatgctgtgcggtcaggttcctaacgggccacagcctgggggttggggacccccagcctagattacttctaagtcttcttccaattctaaaagtctaggaacatgggcttctaagccctctgctaccccaacagcaattaagggggagggtaccccaatccccagaggtcagaagtctccattcctctcacaattgcctcctggttctgatctctgctctatttctggcagtcagtacttcttataaactgggtttcctgagaaggaactcccctgcacagtgggataaagggatgtgacccctgctaacctgggcccagtacaagctctgtaaaccaggcagccaactgcacctacctacccgagggcaccagatgtcagcaagatgaacactaaagatttccaggcaatgccaacccctagacctgacaggca

SEQ ID NO: 520597 - DNA, 216 bp, Homo sapiens
tttccctaggaagcatctaaaaaattctggaagatataagtggttgaagtaaaattagacttggttttaaggttttaccagagaacaaagaaagctgaaaaacatcagggcagrgttctatatgtgttacccactgatgactctatgctgtgttccctctgattagaaaatgaaggaatcaaacttatggagatgcttcacaagctcctaaaaaac

SEQ ID NO: 520598 - DNA, 216 bp, Homo sapiens
tttccctaggaagcatctaaaaaattctggaagatataagtggttgaagtaaaattagacttggttttaaggttttaccagagaacaaagaaagctgaaaaacatcagggcagggttctatatgtgttacccactgatractctatgctgtgttccctctgattagaaaatgaaggaatcaaacttatggagatgcttcacaagctcctaaaaaac

SEQ ID NO: 520599 - DNA, 636 bp, Homo sapiens
aaaaggcctggaattgtgacttaaaggagagtcttttcctgggcagcagtgctcaggacaggctctgaagaacctgtcaaatgtcattcagaggcctgaggagagagagggagaagaaagcctgaattttctcaccttgctttggagtgaggagagagggaagaggaagccaggaacaggcagaagagtttttccccacgaaaatcttcatcctccaagatgtaactcttttcatcagtgaaaaaccaaaccatgtctacctcaccttccccctgtcactcattcttgacctgtattgattctgttctttgtgcttccctggtaataaacattttttttaagcacttactctgtgccagacattgtgttcacacatttcatttaatcttcacttctataagatgggtactattattattcccattttattttatttttttaaaacatataaaktttattttattttagagacaaggtctcactttgttgcccaggctggagtgcagtgacttgaacacagctcactgcagtctcaacttcctaggctcaaatgatcctcccaagaagttgggactacaggtgcacaccaccatgcctggctaattttttttttttttttttttttttgagacattg

SEQ ID NO: 520600 - DNA, 278 bp, Homo sapiens
tagtgtgagcctctgtattgggaactgggkcaacaaagctattttaaggagttgttaagagggatgcatgtgatagcatacataacgcattgagtgtcatgcctggcccgtaagagattcttactggtgtcatttatttaagctattagccacttcgtgaatgtttactgaatgagtaaagcagaatgcaggggcattgctgctggtgtagccccaatgtaattagttgtaaactgaggatgtgaaaaaggaaaggaaaggaaaagaaaagggaaatc

SEQ ID NO: 520601 - DNA, 599 bp, Homo sapiens
aggtccagcaatcagttttaccaggcctttcagaggactctgatgtacttgcaggtgcaggattcgctggtctagagtgtggggaaaatagtagcagaagaatgacagttttgagggacttgaagaatacatcaacactaaggttgcttctctgatcccgaatctctttcctttctgttcccctcagcttcataatgaaacctgttcaactcttccttcctcagtcttttctatctgtaagacttctattattacactttagtaatatattttttatcactggatagtcacggattattcttaataaatgtcaaggcttgaaagtataatcacagcccaaaatggacttagaagtgtgaccagatggaattgctactgctctttcaaaaagcatctcacttgagtatgtctctatgaattcttattataaagagaaaaatgaatcttatttgtgatatctgcataaaaaaaccaatgttctatttcaactttatcacttgtgcattgtgtgatagttgtttaacttcttttgtttcctctttatttatatgttgtcatataaatwatagccaacaattaaacttctctttgccacactt

SEQ ID NO: 520602 - DNA, 484 bp, Homo sapiens
agaatggaagtgatcagggagactyggtccttgttccaagtctccaaagaagaccaaagtgggtcccttgagcaatgaagaatctgagataaattctcttcaagtatcatgtacaaaatctgtgagccagagattttgacttgagcaagccatggaaatgcatggagcaagggtgacactctgtggggagacagaagaatttcaactatttaatgtccattttgttgtttttaccctttcttatccaatagatggaatgcacatgaaatgaccatattaagcctctctctatttacatcccaggctcactgggatgtgatctactgcagttacattttcttgtaacggtttctggattagaccctagggaaagtgagtaaggagccagtttctgtttaacattctagttttactcattttaggaaggctgtgagtgaggcttgtctcctttaaagtttcttctccaatggaaaccaagaacaga

SEQ ID NO: 520603 - DNA, 451 bp, Homo sapiens
tgtgtggcctgggacaagttacttaacctctctgggtgttagtttccatgtctgttcaatgatggttaataatacataccctccaagattcttgtgagaataaaagctatattaaatgtcaaaccttttttttttttttaaaaaaaagcacaatgtttggacatagtaagcttgtwtttattgatttatcaactaaaattgttttcgagtgcttactatgtgcctgacagttttctatgtacgtgcactacgttggacaaaaatcctcacccttatggcacttacagtctggtggtaggagacagtcaggtcaggtaagcaataaacatagtaaataagtaaaatatagtgtgttcaaaagtggggaaaaataaaacaagatgaagttcctcctttcacagcctctatatttctgtgaaatctattctccaataatgaaaaggagaaccga

SEQ ID NO: 520604 - DNA, 361 bp, Homo sapiens
cactggttgagtatgcaggcgccactttgctccatgccaggtaccatccatgcctgcactttctttttctttttgttttttgagatggagtcccgctgtgttgcccaggctggagtgcagtggcgagatcttgactcactgcaacctccacctcctgggttcaagtgatgctcctgcctcagtctcctgagtagctcggattacaggcatgcaccaccatgcccggctaatttttgtatttttaatagagatgggtttcaccgtgttggtcaggatggtctcgawctcctgacctcatgatccgcccaccttggccttccaaagtgctgggattacaggcgtgagccaccgcacttggccc

SEQ ID NO: 520605 - DNA, 516 bp, Homo sapiens
acttgcagctcagggcacaggatcggtccctgggagaaaggacaacttcagggcgaactaatgaggccaaaccgcacaccacttcctccctgcatcccagccctcctcctgcctcactgatagcccctcatcctgcttctctcactcccctcggctctccctccggaaggaaagccggaccccctctctgcttccagaccaaggctggaattatttaattgcaaatcagtaaaagcgtcagcagcttgccgcttaactgctaagaggaatgattcataaccccatgccaggcaccgagcacttccttcccatcgcctcggcccaccccgcgcgagagaggagataaattactgtcattgctttttatggcacatataatcgggtggcaacatggagactcgactcatctcaaagtcatttacaatgaattattcatttggctgaaaaaagtcttcaattggagggggaaatagcctctcgactccctggcttcrggctgccctgttggtaggtggg

SEQ ID NO: 520606 - DNA, 551 bp, Homo sapiens
gtgcccaagacaccctctgtacattcccgggggatgcctttggctgctcatagatcccacattgatggcaaaygcgagaacagcagtgcacacagccctccaggtgtttcataacagggctctaggccacacccagtccccagagcaagctcaccacctgacagtggaaagaaagagaaagggatacaaagactcagctacagaagcgtctcatcctgtgaaataatccataaatggaaccacgggagcaacagaatggccctaagaccgaatctcagctccaccttttctcagctttgcgggtaacttctcttgcctcatctgtaccatgggtacaacattgcgcttgtctcagtgttgtcatgaagatgaaatgagacaccatatgcaggggcaatgacactagtcatcgatagctaataaggcccatgaattgtgccagtgataaataactggtgaaattggttctgtgtcctggtttgcaaagctgagcacatcccgaatatatatgaagaacttagtgtcaatgtattatgagcacatagcacggg

SEQ ID NO: 520607 - DNA, 551 bp, Homo sapiens
gtgcccaagacaccctctgtacattcccgggggatgcctttggctgctcatagatcccacattgatggcaaacgcgagaacagcagtgcacacrgccctccaggtgtttcataacagggctctaggccacacccagtccccagagcaagctcaccacctgacagtggaaagaaagagaaagggatacaaagactcagctacagaagcgtctcatcctgtgaaataatccataaatggaaccacgggagcaacagaatggccctaagaccgaatctcagctccaccttttctcagctttgcgggtaacttctcttgcctcatctgtaccatgggtacaacattgcgcttgtctcagtgttgtcatgaagatgaaatgagacaccatatgcaggggcaatgacactagtcatcgatagctaataaggcccatgaattgtgccagtgataaataactggtgaaattggttctgtgtcctggtttgcaaagctgagcacatcccgaatatatatgaagaacttagtgtcaatgtattatgagcacatagcacggg

SEQ ID NO: 520608 - DNA, 551 bp, Homo sapiens
gtgcccaagacaccctctgtacattcccgggggatgcctttggctgctcatagatcccacattgatggcaaacgcgagaacagcagtgcacacagccctccaggtgtttcataacagggctctaggccacacccagtccccagagcaagctcaccacctgacagtggaaagaaagagaaagggatacaaagactcagctacagaagcgtctcatcctgtgaaataatccataaatggaaccacgggagcaacagaatggccctaagaccgaatctcagctccaccttttctcagctttgcgggtaacttctcttgcctcatctgtaccatgggtacaacattgcgcttgtctcagtgttgtcatgaagatgaaatgagacaccatatgcaggggcaatgacactagtcatcgatagctaataaggcccatgaattgtgccagtgataaataactggtgaaattggtyctgtgtcctggtttgcaaagctgagcacatcccgaatatatatgaagaacttagtgtcaatgtattatgagcacatagcacggg

SEQ ID NO: 520609 - DNA, 581 bp, Homo sapiens
caagtaccatgctaccatccatatcgacaagtacctactatgtgcctgacacagaagagattacatctaggcrtatgctcatttccagacctccctaagaccccgtgttgtgctctctgtggagtccatctgcacaccccttacagggttaacacaagctttcacggactgcttctcatttcacccattgtattagtcagggtcctaaagggacagaagtaataggatagatgaatacatgaaggggaacttattaggagaacggacttacgtgatcacaagacaaagtccccacaaaaggccatcagcaagctgaagagggaggagcaagaaagccagtccaagtcccaaaacctcaaaaggaggaggctgacagtgcagccttcagtctccagccaaaggcccgagagcctctggcaaaccactagtgtaagttcaagagtccaaaagctgaagaacttggagtctgatgtttgaggacaggaagcatccagcacgggagaaagatggaggctggaagactcagccagtctagtccttccatgttcctctgcctgcttttatcctagccgtgctggcag

SEQ ID NO: 520610 - DNA, 583 bp, Homo sapiens
atattccacaaagaaagaaaagaatcctttgacaaatggtggttaggagatgtcatctactccgtgcctggagcaatttgtagccagagcataagctttaattcagcaaacatattaactgtgtgccagatactgtctaggctctagggatttttttttttttttttttttttttttttttttttttggtaatgaggagcttagagtccttgccttcagagtaagaatggggactmagataagaggacagatgacttgaggacaggacagaacacaccataggcaggagggaggtgctaaagttttgttttaaggaggcccaaagggggaccaggtcccatctgatcacaggaaacaggaaaggagacatggagaatgtagaatcagagatgaacctggaagggtcccgactggtgggtgtcccgatagatggaaatgcttcccaaggctggttcaggtgagaggcaccagaggagcaaaggttcagccactggaacatacacaggtgtttccatttgcctggacagtggggcatgtggggaagcagagggaagcaggtctggaaaagtgaggagggtcttgc

SEQ ID NO: 520611 - DNA, 583 bp, Homo sapiens
atattccacaaagaaagaaaagaatcctttgacaaatggtggttaggagatgtcatctactccgtgcctggagcaatttgtagccagagcataagctttaattcagcaaacatattaactgtgtgccagatactgtctaggctctagggatttttttttttttttttttttttttttttttttttttggtaatgaggagcttagagtccttgccttcagagtaagaatggggactcagataagaggacagatgacttgaggacaggacagaacacaccataggcaggagggaggtgctaaagttttgttttaaggaggcccaaagggggaccaggtcccatctgatcacaggaaacaggaaaggagacatggagaatgtagaatcagagatgaacctggaagggtcccgaytggtgggtgtcccgatagatggaaatgcttcccaaggctggttcaggtgagaggcaccagaggagcaaaggttcagccactggaacatacacaggtgtttccatttgcctggacagtggggcatgtggggaagcagagggaagcaggtctggaaaagtgaggagggtcttgc

SEQ ID NO: 520612 - DNA, 565 bp, Homo sapiens
aaccaatttgattgattagatttaagtttagacatctttgctgctgaaccagggggaagcctaaagtaggtataaacataaratgtgaagatccaagtggtatctctgcttactgggcctcccaataggctgtccagcttgtatgccggagcatctggggtcaacagtctcatatacagtagggtgtgagctgagcagtgcacagcctttggaattctctggcagccctgtaggaaaccgaccactcctctcacactaatccctgcctggctgaaagaatgaccaagtaacttacagcaggagaaatgagaagattgctgtatggaaattccactttccacaatctctttaatagtttttatttcatcaaaggagacttgagagtcagcaatattttgtaatggtaatgtcatttctcccaggatacttcatttaacatcctattacaaccaacagtttggaggatttttctgactaaaccataaagcatgttagcatatgtgtgtttaaacttgtatcctcgtcacagatctctttgctattaaaatattagatttcagaggcg

SEQ ID NO: 520613 - DNA, 591 bp, Homo sapiens
agggcactttgactattagtaaggggataatttggtggaaacatttcctggtgtgaattggaggtgtgctgactagctggctttgctcacactttctgtatttttttttttttttttgagacagaatctcaccctgtcacccaggctggagtgcagtgacatgatctcagctcactgcaacctctgcctcccagcttcaagcgattgaacctcagcctcccatgcctcagccccgagtagctgggattacaggcgtctgccaccacgcccggctaatttttgtacttttagtagagatggggtttcaccatgttggccaagctggtctcaaactcctgacctcaagtgatctgcccgccgcggccgcccaaagtgctgggattacaggtgtgagccactgcacccrgccacgcatttttcttaagtacttggggaccaatctgttcaccttctctatctccatttcaaatgcatcactttgatagaagtgagagagaggatgtgtgtaggctaaactgtacaagtaagctgatacagtgtcatgaccagtttcctgggctttccctttttgtcctcagatttctgctggac

SEQ ID NO: 520614 - DNA, 612 bp, Homo sapiens
tcagttttcaaaggattctcacaaattaagatcaactggacatgagcttacaggaaaaaaaattacaaaacccacgaggaaacaagccccagtgagagcagaaacaacacagcaaaatgaggcacgctccttcatcagacactggaattttcatgtagagaatataaaacaaatatgtttaaaatatttaaagaaataaagagggtataaaaacataagaagtaaaggacaaatgggtaaggtcagagataaaattaaaaattctagatataaaatagataaataatttcaatggaagagttaaacagatgggatacagatgaagaggagataaagctagattttaaaaagttagccagaatgcagcacagacataattagaaatgtaaggaattaaaagacatggagagccgggggggtgaggtcgctggcgctgggctccgtcccctgcacatccgggcctcacaggcaccgggcgagaagcatgggagccgcgggggtcccggaccagcacggaggagaaagctgaaggaacagacctgygggcatggcccctgggggatgcggggactcggcctccttctgcatcttaggattggaaaccacactcac

SEQ ID NO: 520615 - DNA, 685 bp, Homo sapiens
cctaacaaagataaaatgtcctcagcagctggaaggcagcaargctatgcagtttcacatggtcagccatgagtcagaagttcccagagcgtctcctgccaaagctgcctctaggaacacctggtgagcaactgctggctctgaggagaagggtctggagggcatggtgaatgagaaaacatatataatcttccgccacatttctggtagcttcttatagtctaaaaagcagtttgccttagatttcatgtaatccttataagaagcccaagaggtgaccattaggttcacccccatttaacagatgaggaaatgaagaatcagaaaaataagaatgggttgtccaaggctagagccagagacctagaaggaccctgccacttgaccactgcacacatgaatgcctgcttgagtgtgcatgtgcacacctgcatacatgaacaaatgcctccaacacatacacatgtttcaacatttcacactgcccccaaggcaaatactacttctgaaaccatccacagaggacccttccctgaatttccttctcaattcccccagctgagatggctgaactggattggaggtgattccctgaccaggaattccacaaaccattttcaatggtggcatgagattagtccaggggctccaccaaaataccaggtcttggtttcttgctggggtc

SEQ ID NO: 520616 - DNA, 685 bp, Homo sapiens
cctaacaaagataaaatgtcctcagcagctggaaggcagcaaagctatgcagtttcacatggtcagccatgagtcagaagttcccagagcgtctcctgccaaagctgcctctaggaacacctggtgagcaactgctggctctgaggagaagggtctggagggcatggtgaatgagaaaacatatataatcttccgccacatttctggtagcttcttatagtctaaaaagcagtttgccttagatttcatgtaatccttataagaagcccaagaggtgaccattaggttcacccccatttaacagatgaggaaatgaagaatcagaaaaataagaatgggttgtccaaggctagagccagagacctagaaggaccctgccacttgaccactgcacacatgaatgcctgcttgagtgygcatgtgcacacctgcatacatgaacaaatgcctccaacacatacacatgtttcaacatttcacactgcccccaaggcaaatactacttctgaaaccatccacagaggacccttccctgaatttccttctcaattcccccagctgagatggctgaactggattggaggtgattccctgaccaggaattccacaaaccattttcaatggtggcatgagattagtccaggggctccaccaaaataccaggtcttggtttcttgctggggtc

SEQ ID NO: 520617 - DNA, 494 bp, Homo sapiens
ggctttgtatgggggagatattaaaactatgagaaagaaggataaaggagtttaaagtttttctttgcctttttatgtaaattccctgcatcattttttttttttttctgagacagagtctcactctgttgcycaggctggagtgcaatggcacaatcttagctcactacaacctccgcctaccgggttcaagcaattctcctgcctcagcctcccgagtagctgggattacaggtatgcgccaccatacctggctaatttttgtatttttagtagagacggggttttgccatgttggtcaggctggtctagaactcctgacctcatgatccacccacctcggcctcccaaagtgctggaattataggtgtgagccagcgcgcccggcctcctgcaccattcttaaaaggactatactaaaaacttaaattgccttttcagttgctttcgaattctagactgaggtttttttgcagcatgagatttgtgttgag

SEQ ID NO: 520618 - DNA, 625 bp, Homo sapiens
tgctatagatgttcatttttttttctaccaaactatgaggtattcctaaacaggtgttattccctgtctcatttattctcaatacctagcagtgtctgctagaatagatagtcaataaacatatatagaacttgaatttataaatgttaactgcattagtattcaaaaaaatgcccttctggttctttccatcattcaatatgctaaaactctagcaagtcaaactttcttaggaggttttaaaaatcaaccactgagctgttgccacctaatttattccacgaattgctcgttagatatttaaaataaatacctaggtaaatgtcagtttgaatatcaaaaatttcaaaccagtggaggagtgtggcaataaatatttcccataggtagtgagccatctattgtagatctccacctgataatacttgacttgggctgatatttacatacagtgttcccacttaatcatgcttgttagggggagttgyaactcactgcagtttaggcatgtgttctgtgatagaagagactcaacctggtaagtaaacttctattgatgatacatcatgtgggcaacttttgatgaatagcttctatttaaaagttttaagtttgagaagagaga

SEQ ID NO: 520619 - DNA, 640 bp, Homo sapiens
gggtgcagtggctcacgcctgtaaacacgacactttaggaggccgaggagggtggatcatgaggtcgagatcgagactatcctggctaacatgctgaaaccccatctctactaaaatacaataaattagccgggagtggtgacacatgcttgtaatcccagttacttgggaggctgaggcaggagaatcgcttgaacccaggagatggaggttgcagtgagcggagatggcaacgctgcactccagcctggcgacagagagactccgtatcaaaaataaataaataaataaataaatacataaattaaaaaaaccctgcctattgtctactatcygcactacccgggcgacaaaataatctgtacagaaaacccctgcaatattaatttacccacataataaacctatgcatgtaccctgtaaacttaaaataaaagttggaaataaaaaagaaagcatcatttcaccattttgtatttgactaaatgttttcaggtggcataaactctcttcttctctacctttaggactcacctgtgtttgtacataattctgttttcattttcaaggatgtcataaataaacacaggtattaagagacattatataattttgatttggagcctcagtgaagtggggt

SEQ ID NO: 520620 - DNA, 552 bp, Homo sapiens
cgtcactcaggccagagtgcagtggtacgatcttggctcactgcaacctccgcctcctaggttccagcgattctcatgtctcagcctcctgagtagctggaattacaggcgcacaccaccatgccctgctaatttttgtatttttagtagaaatgggttttcaccatgttggccaggctggtcttgaactcctgacctcaagtgatccacccgcctcggcctcccaacgtgctgagattgcaggtgtgagccactgtgcccagctaatcatatttttagyagagacagggttttgccatgttggccaggctggtcatcttcttaatgattttaaaacataaaatgggccttgtcagtcctctgctaaaaatcctccaatactattctggaacgaaatctgaacttctgaccatgagtgaagaggccccaggctccctgggccctgcctcctctcaggccacctcttctcttcaagccctaaaccaagctcattccctcctcagagcctttgtccagtctttcttggaatgctcctcccgctggtgggttccc

SEQ ID NO: 520621 - DNA, 391 bp, Homo sapiens
agacatacagctgtctgaaggggcacmtagccacgtggcatggtgggtctgacaggtcgggagcttctggggaagaagaagggaaagcaatggctgagagcgagctggggcttttgtgtcctgaaatctgctcttgaagctctcacagggctgccccacaggactttcaaattctaaatatgatccctgaaagggctactagacagacaaactaagtgtcctaacacgtagtttaaattggcattagtttaaattggcatttgatggctgagtatggagaaataagcaccttgtggtttgatggggaagagagaatgggtgcgtctggcttcttgtctggaatcaacaccacctaagggcttttaatcagcacctgcccacagcgcctgtg

SEQ ID NO: 520622 - DNA, 638 bp, Homo sapiens
atagattggtcgctatgtatcaaacacctcaaaggaactatgcactgccctagttctgagaacactgcactgagcaagacagagagcgctcctgagtagaactgcagccctgaaatggggacagacaacagagttatgaaaaggaaagtgaggtggccatgggagcatgcagcaargggaactggccttatctaggtgacaagaaaggtcttccctgaggaaatgagagaacagtgacacttggaggatgagtaagagttcaccagaccacaggggatgaagaaagtgctctctccacatggaaagaactacatggggaagaacctgcgtctgcaaaggaacagaacagtgtgactggcacccagagagtgagggttgagggatatgggatgaagctggaaaagcagacaaggacaggatggtgggtggcttatatgccatgcaaagaatctggggcattccaaagggcaaagtggggatccactgaatgattttattttttttttattccacgaactttttgctaaccactgaaggatttgaaagagaagagtgacatggccaagtctgcactttttaaaaagactacactggcttgaagtggagtagagtggccaaaacctgaggcagagagacca

SEQ ID NO: 520623 - DNA, 518 bp, Homo sapiens
tgtaaacaattaatcataataatacaaacactattgatttaattaaaattgtgttattataatattaggaatctagaaaaaagggaatgggtgtttgtgtgttgtaaaaacgcaaaatcccagtattccttagcaggaaatgaataagtaatttccaaaattgcaaaatcaaatagcagtaaaagcacatcgtttacaaatgtggagttggttttcaggggaaaataaattaagatttaaaagcgatttgcctgtcagtgggaccagggctgagaaaggaaagagcaaggattgttgtcactagttgtaaaccttttgtacyaggtgactttttaagccctcctcatgtattatattaataaatgtaaaaactagtttatttaaaaaaaaaaaaaaaggaaatggctcagttataacacagcagtctcccagggaatacattctaccaaccagtcagcatgttgatgtctggagccattaagtctctaacaagctaaagttaaaagtatttacctaat

SEQ ID NO: 520624 - DNA, 506 bp, Homo sapiens
ctctgagtatacgatcagatggtctagggcagtggttcccaaccattttggcaccagggacttgctttggtggaagacaacwtccacagatgggaggttggtggggggcagtggagggacggtttggggataaaactgttctacctcaaatcatcaggcattagttagattctcataaggatataaggagtgctgcaacctagatccctcacatgtgcagttctcaatagagtttgggctcctatgagaatctaatgctgctgctgatttgacaggaggcggagctcaggcggtaatgctcgcagccactcacctcctgctgtgtggcccagttcctaacaggccacagaacggtaccagtccacggcctgggagttggggacccctggtctagggtacaatctggacatcaagtatcatcatcctattaccctacacaagatgtagtctttaggacacacggtcaaatataaaattctgaccaggatctgacccttgttcatcca

SEQ ID NO: 520625 - DNA, 554 bp, Homo sapiens
tctttcacttcttgatttttagtttaattctgctgtggcttgagaacgtactctgtatgatttctatgttctaaaaaagtatgaatatgcattttgtggaccagaatgttgtctatcttgatgaatgctccatgtgagcttaagaagaatggataatctgccactgttgagtggcgtattccataattgtcaattagatcaagttgattgatgtgctattcaggtcatctataatcttactgattttctgcctacttgatctttcagtaactgacaaaagagtgttgaagcctccaaatataaatctgtgccattcrgctataattcattcttattatttaagaggcctgttggtgttgaggtagggtgtggaatggggaaggaggactttatactcttcttattaggactcaatcttttaataggcccgtgtctcagaagtaaagccttcagaagtatttctgttcctcttccaagagcatagcttttatcccccgttctctcactcgcttccctggccgtggcattcccaatctatttacttgaagtcctgt

SEQ ID NO: 520626 - DNA, 504 bp, Homo sapiens
gtgaggtagcgaagtagggctttaaacctgatctacctctaatcctgttgctccattattcaacacattcacgttttttccacaattaattttattaagttattttaaggattttaaagagaacctctaaataaaatgaggtttttttkgggggggggggtcacttacaagacaatcagtgcctatgagcaataacagtctcttcctctatttgtttctgtcaatgtattgaacttctactatataagttacgccacagaactctaaagttaaacttgaaattgcagttaaatctctggtctaacaagcatgaaaaagttatgatcatggctctccaaaccaccaaacctcacctctaattttatttccctcccatataatcttccttgcattcgatttgaccaaaacgaatatgaaactgtctagttatgagatttatataacaaagttaatctttgaatctttgaaatagagcctattactcatggaaagggtaaataatat

SEQ ID NO: 520627 - DNA, 504 bp, Homo sapiens
gtgaggtagcgaagtagggctttaaacctgatctacctctaatcctgttgctccattattcaacacattcacgttttttccacaattaattttattaagttattttaaggattttaaagagaacctctaaataaaatgaggttttttttgggggggggggtcacttacaagayaatcagtgcctatgagcaataacagtctcttcctctatttgtttctgtcaatgtattgaacttctactatataagttacgccacagaactctaaagttaaacttgaaattgcagttaaatctctggtctaacaagcatgaaaaagttatgatcatggctctccaaaccaccaaacctcacctctaattttatttccctcccatataatcttccttgcattcgatttgaccaaaacgaatatgaaactgtctagttatgagatttatataacaaagttaatctttgaatctttgaaatagagcctattactcatggaaagggtaaataatat

SEQ ID NO: 520628 - DNA, 553 bp, Homo sapiens
agaatcattaagatgatctgatctttttcagtttaccacagtccctaagctgtagagatattcatacaattagtaatatttgtgttggtggcatatttagcactgatctaactattcccatttgtttaaaatactttttggttaatcactgaatgttgaaaaggctgattgaaggaatgttaaaaaaaaaaaaaaaaaaaagaaaagctgcaaggtcattttctgatagtcaacttctaattaaggtattttgacaacacagaaggaaagtttttaggtaaaaacaccttttggaagtagaaaatgccaatccttgtgatgtttttgtaacacattgaatcttccctcttagctgctgtactactccagcaatatcccctcagttagaattgttttgtgtggtagagagaggtgggggtgggaaagggtatgtttttgttcartcaccatgtatacatatctgttgatgagtgcaggagaccacacacagtaatataaaggaatttgatgtgacacaggatatttatttctgagctcagcaattaatcactca

SEQ ID NO: 520629 - DNA, 643 bp, Homo sapiens
cccattttaaaacctagagatgcaatagcgttgacttacccatgatccatgcacacctttcaaaatatgctctgtttttttttggttgtgtgttttgttttgttttgccgttttcccgattgatgtttaactggcctacaggacttcccttggattacataaatgggataaacatgaagtagtcagatggcagggtatcacatagaaacaacttttcttagaaataatttaataactgctgytataataaagaaatgtttgaaaaggagttaaagtaaatggccctagaataagggtttctgatgaatggaggtgagccatccaggtgacaatttatccagaatacaggaagggaggcaattccagcagtaggaaaagcaagtgcaaatattcagaggcaggagtgagccaggcacactccagacacaggaggcgagaggggctggagtggtgtgagaagacagagagtgatcagagatgacctgagagaggtgaaggggcaggggaagagggcttgaccatcaggccttatgagccagtgtaaaagctttcacccaggacctatcattttctttgcttgaagccatggacgctaaggaagcatctcccgctgtagcctcacagagcagagcaaagttccagg

SEQ ID NO: 520630 - DNA, 643 bp, Homo sapiens
cccattttaaaacctagagatgcaatagcgttgacttacccatgatccatgcacacctttcaaaatatgctctgtttttttttggttgtgtgttttgttttgttttgccgttttcccgattgatgtttaactggcctacaggacttcccttggattacataaatgggataaacatgaagtagtcagatggcagggtatcacatagaaacaacttttcttagaaataatttaataactgctgttataataaagaaatgtttgaaaaggagttaaagtaaatggccctagaataagggtttctgatgaatggaggtgagccatccaggtgacaatttatccagaatacaggaagggaggcaattccagcagtaggaaaagcaagtgcaaatattcagaggcaggagtgagccaggcacactccagacacaggaggcgagaggggctggagtggtgtgagaagacagagagtgatcagagatgacctgagagaggtgaaggggcaggggaagagggcttgaccatcaggccttatgagccagtgtaaaagctttcrcccaggacctatcattttctttgcttgaagccatggacgctaaggaagcatctcccgctgtagcctcacagagcagagcaaagttccagg

SEQ ID NO: 520631 - DNA, 622 bp, Homo sapiens
tggccctgtcataggcaagccaggggaacaactgtgaagcagggtggttctgtgcagtaagccatttcccaaaacacaaaaggatgtggggatttattaaacttcactgttttccaagatcattggtcttgggtaaagttcaacattgtcttgggtatgggaggaaaactcagttaggacttcttaaagaaagagatattcatgggaaggtttcgtttagctgggatgttgacattatgaaggaacgcactaataaatgrtgatggttaccctttttgaactgccagttccttttctaaagttaaaaactatcagttcatttaatcttcacagtcatctgatgatacagttacaattatcctccccattttacagacaaagaatctgaatccctcagagtttaagtcacttgatgatactcctagtaagaagtacaacagggactccaacttatgaagccactgtaagcctgacagagccattttagcctcttttcatgacttcagactttccctttataccaaagggaatggaataaaactgcttggacaagagcaagaagacatgcatccatttttcacattccaaaataatggactccaacacatacacataagagaag

SEQ ID NO: 520632 - DNA, 247 bp, Homo sapiens
agtgctgggctgaggctgcagaacaacgaccaacttttgatgaaatatttaaccaggtaaggactctgaatcttatcattgcccaggagccttcctgaagtcagcctacacaaggctarctccttgggtccttgtcatattgtggaaggaacctcttgcaaggggtaagggcactcctcttggaggaacagcctgggagtggctactttgaggctcttggtgctggagtgtcatcagcacatccttc

SEQ ID NO: 520633 - DNA, 458 bp, Homo sapiens
accacttacaaattggttagaacacatttatttttcctctctgtagtttttggtactgtgctttactaacagtttgcttccataacctccttgctttgttggtttcagtaatcatcatgtgtatgcattcagctttgattgggggagagactcagatgcatctcttggaatgtgctcatgatctgaaaatgactgatggaacctacgtctttgttccttatgatgccctgctctacagtttaccttataagcacaccccctaccrggtcctaaggaacaacccaaagctccgggaagcctatgatgcagtgttgaccattacagtggagtcccaagaaaagaccttctatcaagccttcacagaggcagcagcaagaggtgaaattcctgagaagctggagttcgatcaagtaagtacacattcataggttgtcatgagctgagaacctaaaacatca

SEQ ID NO: 520634 - DNA, 503 bp, Homo sapiens
cacatgttgtggggtgggagtgtgcatgggtgcaaggtttattttctgtcttaacaaaatattgttgcttttacagtaatacaataacaaactatttcacaatttagttagaaaatttaatgcacttttgtagttttattcatgtttctgacagatataaaatctttctctctgaagaggcaacggaaaggatgtgtctcattctccttctccttattcctatgatccttttattcttctctgtcctttcctgcttccactctccttttgctccccctaaaaatttgatttgtcccttttattacccaagagggagaacaaaagtagaggggggaaaatctcttcaygatactggcattttataagaactacatattgaaaggctgtgacttaagaggcactaccaacgacccaaaagaatttcactaattcttttatgaattcattcattcatgcaacgaatgtcctattatgtgcctggcactgtagcaggcactctccct

SEQ ID NO: 520635 - DNA, 495 bp, Homo sapiens
aatttttcaaagagttaaatagcaaaataatattggcatacatattacattgtcaactgttctctaccagaacccctggycagatatcttcactcatatgtctgaagtatgatttctgatgatattttggagaaaagagattagaaagtataatggctatttttgacagcttctatcttgatcatttaattactttttcccttctgatatattttctattgaatttatttgggacagtataattaaacttaaagaattgttttattcttttgttccaagtttggattttgagactttaaattctgttaattgatagttgctgaagaagctgacaagaaatcttggatctggtgggattgtttgggaaactttttaaggcaaatcataatggctggactgggagtaaattgattttaagaggaaggaagagctgcatagtgagataattaaataaaaaaaagaaagaaacaagaaaagaaaggaaggaaggaggga

SEQ ID NO: 520636 - DNA, 557 bp, Homo sapiens
ttgataaaacttcacagaggaggtgatatttgatccagatctttacagataagtaggaaatgacttgttgaaaaattactaaagcagaggaaaaaattatgaatgttgggaatgtagggttgaaggaggaaggcccattaaagatgtaatttaatattagccagaactggtccataagagggagctttgaatgtgcaattcatttgcacttttattctgggtgaatycagaagctaaacatatttcagcagtgggtttagaaccaggaaatggaaagcgactagtaatctaggctctctctcataatattcatcctcagtctctgtccctgtttctgtctctctctttctttcttcctccttctccttaacttgctcaggctctctcatctttaggtctgaataatttttctctgaagaatgacaccattttgtactaagatatgacaattttcatcatctctggtaatagtctaaacttactggggttgctatatctatatgccaaaattcctagagggagaatcttatttgcccagctgatccaatgcactgtgg

SEQ ID NO: 520637 - DNA, 570 bp, Homo sapiens
ggatcagaagaggaagctaatatacagcctactgtagttaaggaagtgttcacatcagggaggagaagtgagctaagctttgaagggcaagtaggattctaagaggtggaggagatgrgagaaatcacaggaaaagagaaagaggaggcatctctagagttgcccagtgacataagcacaattaaaacttggttgtgcacatcattcttccacaagtgaggtcctaacccagttgactaatcaataaaattatacttatctgctcctggcatattatactttcatgtacatctttggaacagttctcctgatctctccctatatgagatatataaataagtgctcattattgatagtaattcctatactctatctgacatagagtcagattattattaccaataaatcagagagtttcatctggcattctcctccattctgtctgtctatcagtaatttaagcttgcagtctcattgaatatatattcctctgtaatttcttcccatggcttaaaactaattttaacagccctttgcatgtgtagatacatttattttaaagggctctca

SEQ ID NO: 520638 - DNA, 551 bp, Homo sapiens
catggagtctaccactctcaaggtcattgccctgtgtgtggaactgccacatctcacctctacctgcagctgagtttgcttctctgtgagtcttcactgttcctggcctctcctagtttctcctgtagactgtgtttaatgcttttctgycaaaatgttttaagagattcaccacgatgagaagaatgcaaaaggcaagggatactgcttaagggtgtgagcccctgagctgactgctgaagttgaactccagctgtgtgatctttggcctcagttacttaacctgtgaaatggggataatcatagtattgatttccttacattgttggcagggttaaatgagaagatatctgtaaagcatttagcatggtgcctgacacctttgaaactgtaaatgttagctatcatcatcactcttattattactagtgctcttatcatcattaattgttatattatttttactaggaagtaggagaaggatatagaagatagggcaggagaagatcctttatcttttaaaaaatttgccatggaggctgagtgcagtg

SEQ ID NO: 520639 - DNA, 402 bp, Homo sapiens
agctgcagtttcaaaaagaacatcaggatacatgacctgaccattcagtgggaagaatttaatttccaaacacttctagaaaattccagtgatatgatcaggcatttgatttctgcttagaggaccaagaatgtaagctaagactatttagtatagatacattggatgtatggaagttttatgggatggtctataaatccagcctccatacatgttgtgaaaycctaatagccaactcacatctggattttagcaatataacccattgctatgacaactattaattatatcatgttgtgccccaactcagtgcactggagtactctccaaagggaaacacatttacatgaatcaatttatctttcatctcatatcaaagaagccaatcagattatttttgcc

SEQ ID NO: 520640 - DNA, 622 bp, Homo sapiens
gtgaatgctgtttgctgatccacttgtctcctctcctccactagatgataatgggagcctaaggagtgcaggggaawgttttgcttggaattagaagatggggccctgacgtcaacctggttgttaacaatggaaggttacttagcttttctgggcttcagtttcctcatctattaaatgaagtggttgatccaggtgcccttgaaggtctccaccagcactaagtctctgtgaactctttagcagaactttagggtccacccaacaatatgtatttatcttctctccttgcctctgcctctttctgaaaggggatgagaattagctgagcattttctcagtggcagtgggctacccagtaatgcagagggcactaaaatggtagttaaaagaatgggccttgggtcattcaggttggagtttgaattcagctctatactttttaactagagcattgaacttgagcaaatgtgtaacctttgtatacttcagtttttatttataaaatggagaccataagaacatctaccccagagggttgctgacaggttaagaagataatttaatgaaggtctcataataaacaataaatagatgtataagtggtaaagacccaccttct

SEQ ID NO: 520641 - DNA, 563 bp, Homo sapiens
tgaggcatatatatgtgaaaggaagacttgcctttcaggatgaaggtggggggatgttacctattagcatctgcatttgtttcttattgctgcctaacaaattatcacacatttagcagcttaaaacaacacctgcttatgaactcactgttctgaggtcaaaaggttgggtgcarcatgtctgggttctctattcagaattttgcaaggctgaaattgaggtgttgaccagatactggtcttgttagaaggcatgactgaaaaagaatccacttccaaagctcatttgtgttgttggcacaattcagttccttatagttgtaggactggggtcccatttcctggttggccatcagccgatggccacctgcgttccttgcctgtgacctcctccatcttcaacggcagaaatggggaatgttttttcacaattcaatctctcttgctaagaatagtcctggctcttaagagttcacttgattaggtgaggcccaccgacagtgatctccctttcttgaggtcaactgatttgggactttggttacagtgacaaaatctcatca

SEQ ID NO: 520642 - DNA, 629 bp, Homo sapiens
tgagaaaaattctgccacccctttttggtggtctaatctagatgtatccaagattgagctttctgtcccgttttctgcatcagttgatytcttttcatgtttttctaggaaagttttcttctgctgtttccccctttctagctttcttcatgcacattggcctcattgtgttagtgtaattttccctctccgatattctgtcaatattctctgtgagcctttcattcgttcttcattcctattttgtctcttaaattgccttgcattgattctactcctcaccgtcttcttcatgtcttttttcctgcaattgcctatcgatcttgtctatcttgaaggctgagaaggactttctgttcattaattacttggcttactttcacctattctcctcctgtctagaaaattactcatctccatacacccttagcaagactactgagatgtgctcaaattgctggaaagctaaagaacaaggtcagaaggcaggtaggagccacgggaagctgagtagctttgaggtcatgccatagaagcagtctggctaggacactgtcacaggcgtagcagctattgtcactgctggacattgtcactgaaaatggatttaaactgcccttgtgctttca

SEQ ID NO: 520643 - DNA, 629 bp, Homo sapiens
tgagaaaaattctgccacccctttttggtggtctaatctagatgtatccaagattgagctttctgtcccgttttctgcatcagttgatttcttttcatgtttttctaggaaagttttcttctgctgtttccccctttctagctttcttcatgcacattggcctcattgtgttagtgtaattttccctctccgatattctgtcaatattctctgtgagcctttcattcgttcttcattcctattttgtctcttaaattgccttgcattgattctactcctcaccgtcttcttcatgtcttttttcctgcaattgcctatcgatcttgtctatcttgaaggctgagaaggactttctgttcattaattacttggcttactttcacctattctcctcctgtctagaaaattactcatctccatacacccttagcaagactactgagatgtgctcaaattgctggaaagctaaagaacaaggtcagaaggcaggtaggagccacgggaagctgagtagctttgaggtcatgccatagaagcagtctggctaggacactgtcacaggygtagcagctattgtcactgctggacattgtcactgaaaatggatttaaactgcccttgtgctttca

SEQ ID NO: 520644 - DNA, 561 bp, Homo sapiens
tatgtgtttctaatccttttacttttataatctaatgtgattcttttttaatgaaaatagagtttattaacttttaatataaacatgagaaataaaaaccacataaattgtagcattcttttcaaaataaaactgcaatcaatacttgaatctccaagctccgaattccataaacaattttgttttttgaggtggtagattgtaatatttttataccgttatttatcatttatgtctctgtcctttaaaaatgatggaaactgcagcataatatgatgtgaagcattgctgtagtagaggaagtattcctggcccagaaatgctttgtttataagcaagattcctaggattagatttgagaaagtaggacaaatagatttcacatagttgagaacactaatctctttttagtatttcaaatttaggtgacattattggtctcctaatattatttgctccttgccttttaaagcctgaagtaagagttcctaagggttaygtaagttatttcttaaatagcaagacttaatgggacacctacagcttggtagcatgtagtat

SEQ ID NO: 520645 - DNA, 565 bp, Homo sapiens
gctctacttgtcaaagttggcatattattgttagtcaaaccagagtccaatttgatcaccccctcatgcacacaatcccaccaccaccaccggactccactgttgcctgtggggcaataatgccatgttaacagggagcatctggaattactcttcaaacatccgcccattttgatcactgtggaaggcaaatcttccttccacatttaccccttcagagcaacttgtgctcacttctctcatcaacacagtgtacttttaaagctaagatttcattttctttaatcctttttttcaagaatcasatttttctctgctgacgattcctttaaacaaatatttcttgttttggtctgaggaattcattctttgaaatggagttatagaagtctaggctttgttttgatgactgaggtgaaggccaagaatttatgaccagcatacaatagatagggtaatttgtgtgtttgtgtaacttacatgtgaggataggctgttttttaaaattagaatttgtttctgccttcttagaatttacttactgactcgttatgaacttcgcaaa

SEQ ID NO: 520646 - DNA, 639 bp, Homo sapiens
cctatttcctctggtcagaccccaaattctcatcagattactgaaattaggcaaaaccaaagactaaagccaaattctcataatttcaccacttcccatgtaggtgagtctacttaaaatgaaattttatttcatagaatcaatttttttttcttttgagacagggtctccctcggtcacccaggccggagtacagtggtatgatctcagctcattgcaacctccacctcctgggctcaagcgatcctctcacctcagcctcccaagtaccagctacttgcgatgctgaggtgggaggatcgtttaagccacgatgcccagctaatttttgtatttttagtagagacagggtttcaccatgttgcccaggctggtcttgagctcccgagctcgagatcsgcccacttgggcctcccaaagtattgggattatgggtgtgagccaacatgcccagcccatggactcaattttaaaagaactgttgtgtctaacagtttgaggtcttttagcatttggatataaaacacaccaaaagaatatacgactgaacccataccaagcagcccacagaaagcagcatatggagcaacacaattgtcacaattgtggccaatgcaacgcgtcggttatcctcacgaa

SEQ ID NO: 520647 - DNA, 639 bp, Homo sapiens
cctatttcctctggtcagaccccaaattctcatcagattactgaaattaggcaaaaccaaagactaaagccaaattctcataatttcaccacttcccatgtaggtgagtctacttaaaatgaaattttatttcatagaatcaatttttttttcttttgagacagggtctccctcggtcacccaggccggagtacagtggtatgatctcagctcattgcaacctccacctcctgggctcaagcgatcctctcacctcagcctcccaagtaccagctacttgcgatgctgaggtgggaggatcgtttaagccacgatgcccagctaatttttgtatttttagtagagacagggtttcaccatgttgcccaggctggtcttgagctcccgagctcgagatccgcccacttgggcctcccaaagtattgggattatgggtgtgagccaacrtgcccagcccatggactcaattttaaaagaactgttgtgtctaacagtttgaggtcttttagcatttggatataaaacacaccaaaagaatatacgactgaacccataccaagcagcccacagaaagcagcatatggagcaacacaattgtcacaattgtggccaatgcaacgcgtcggttatcctcacgaa

SEQ ID NO: 520648 - DNA, 379 bp, Homo sapiens
gcttgccgtctttctggtttcagcatagaaatcacttcctcagtgaagtcctcttgacttctctaaccagaattagcttccccttctccctgctctcgtagcccacgcacaccctccgcctctggacttcatttaggaaatggtagttttttgtttacttgtctattccccgcactagaccatgacttccttgagagaagagggtgttttatttgtcactctatgcccagtgctaaggggagttgcaggccccaggttttgttagaaatggtcccakttctgtctctgccctgggaggtttgagatccatatcccctggggagggctctgactacagaaatagtcaaccaccagctagaagccatgattgggggccggg

SEQ ID NO: 520649 - DNA, 599 bp, Homo sapiens
tgacctcagtttattcaacaaatgttcactaattccattggtagtaagagcaatggtaataactaacttaccacatgcccatgtgccaagcactgtaacagaaccaggccaatttgctgaatgccagtcatctgcagttcagttccctgaaagycagcttgcctcatggccaattcatggaatgtacttgcatcatgtaactgtccactttcagtgaggcagtttacattttaaagactgttgaatttggtctgagccccgtggctcacgcctttaattccagcactttgggaggctgaggcgggcagatcacttgaggtcagaagttcaagaccagcctggccaacatgatgaaacctcgtctctactaaaaatacaaaaatcagccaggcatggtggcatgcacctataatcccagctactcagaaggctgaggcatgagaatcacttgaacccaggaggcagaggttgcagtgagccgagatcgcaccactgcactccagcctgggtgacacagcgagactctgtcttaaaataaaataaaataaaatataaaataaaataaaaactgttcagtttgtctctgctccctgctgctg

SEQ ID NO: 520650 - DNA, 599 bp, Homo sapiens
tgacctcagtttattcaacaaatgttcactaattccattggtagtaagagcaatggtaataactaacttaccacatgcccatgtgccaagcactgtaacagaaccaggccaatttgctgaatgccagtcatctgcagttcagttccctgaaagccagcttgcctcatggccaattcatggaatgtacttgcatcatgtaactgtccactttcagtgaggcagtttacattttaaagactgttgaatttggtctgagccccgtggctcacgcctttaattccagcactttgggaggctgaggcgggcagatcacttgaggtcagaagttcaagaccagcctggccaacatgatgaaacctcgtctctaytaaaaatacaaaaatcagccaggcatggtggcatgcacctataatcccagctactcagaaggctgaggcatgagaatcacttgaacccaggaggcagaggttgcagtgagccgagatcgcaccactgcactccagcctgggtgacacagcgagactctgtcttaaaataaaataaaataaaatataaaataaaataaaaactgttcagtttgtctctgctccctgctgctg

SEQ ID NO: 520651 - DNA, 599 bp, Homo sapiens
tgacctcagtttattcaacaaatgttcactaattccattggtagtaagagcaatggtaataactaacttaccacatgcccatgtgccaagcactgtaacagaaccaggccaatttgctgaatgccagtcatctgcagttcagttccctgaaagccagcttgcctcatggccaattcatggaatgtacttgcatcatgtaactgtccactttcagtgaggcagtttacattttaaagactgttgaatttggtctgagccccgtggctcacgcctttaattccagcactttgggaggctgaggcgggcagatcacttgaggtcagaagttcaagaccagcctggccaacatgatgaaacctcgtctctactaaaaatacaaaaatcagccaggcatggtggcatgmacctataatcccagctactcagaaggctgaggcatgagaatcacttgaacccaggaggcagaggttgcagtgagccgagatcgcaccactgcactccagcctgggtgacacagcgagactctgtcttaaaataaaataaaataaaatataaaataaaataaaaactgttcagtttgtctctgctccctgctgctg

SEQ ID NO: 520652 - DNA, 599 bp, Homo sapiens
tgacctcagtttattcaacaaatgttcactaattccattggtagtaagagcaatggtaataactaacttaccacatgcccatgtgccaagcactgtaacagaaccaggccaatttgctgaatgccagtcatctgcagttcagttccctgaaagccagcttgcctcatggccaattcatggaatgtacttgcatcatgtaactgtccactttcagtgaggcagtttacattttaaagactgttgaatttggtctgagccccgtggctcacgcctttaattccagcactttgggaggctgaggcgggcagatcacttgaggtcagaagttcaagaccagcctggccaacatgatgaaacctcgtctctactaaaaatacaaaaatcagccaggcatggtggcatgcacctataatcccagctactcagaaggctgaggcatgagaatcacttgaacccaggaggcagaggttrcagtgagccgagatcgcaccactgcactccagcctgggtgacacagcgagactctgtcttaaaataaaataaaataaaatataaaataaaataaaaactgttcagtttgtctctgctccctgctgctg

SEQ ID NO: 520653 - DNA, 478 bp, Homo sapiens
aatctattgctcatacttctgcttcccagagttttgccaatctaaaggcattgtcatgtggcctgcctttcctgtccacatccccacctctgatgctcaagatgctatttccaagatctcttactgctgcttctcctggcttactggccagaaactagctcactcaaggctgccatccttcacttgcagcctccctgccattctccttcactggttggcaaccttgagagttcaaagaaaatcaacctctgtggtggtcaactaaaggtattaggaaactaagtctgtggctcttctctgctgatggaaacagaagggcgccaagccatgcctaaaaagatctcgccaataattcttgtctttgrgtgttggagccctggattctggtgctatagctcctggtgccaaagtctggatctttccacatttcagcagcaccaacatctgctgctactcaaaatgtcctgttgaagaggga

SEQ ID NO: 520654 - DNA, 453 bp, Homo sapiens
cctactctctctgtggatgagtctcttccacaaatgttccctttagacagatgtcataaagaaaaagaaaggacgaattagagcacgcttctcaaaagttctggctagtattaaaattttttctttgagttaaatattggactggattcaaatagagtttgcattttattcacagagctcctccattctctcctccattgtctcttcaggcgtggggtaaaggagtgttgggaaaagtttatgcggcggaagggagttacatacacaaacacacatctacggataaatatacgaaagatttgtttcttataaaacaataggracaatctaagtttctgaggttaatggctcctcccttaagaagtttagtatttcataattttctgtgtacaaaatgcagtttcacattgcctgtgccctaaattgctttctgatgttgaatgatagaaatca

SEQ ID NO: 520655 - DNA, 432 bp, Homo sapiens
cacagctgatccccaacagacatgttatatgggggcaaagaccttttgtcatttttaaatgctaagacttggggatttgttgttgttgttgctgctgctactatatatcctaatctttgtgactgggataggttccttcacattcttgataggaaggaaaacacgaactttcaatttaaggaaatatgacaaacagtacagttggcagaaagtgaagaggtttggattcaaatgcaactagttttaatactatctttgcaacttacttgctctctgagtcttctttttctcatctgaaaaagagtaataacagtataagyttgctataatttaatatgcaaagttcctagaaggatgctaaaccacagatgatgttcaatgaaaatagctatttctgtgaggggtaatggtaaatagactaaaagtatagca

SEQ ID NO: 520656 - DNA, 575 bp, Homo sapiens
ctggttccaccagttattagctgcgtgaccttgggcaagttactgcaacttgctggccctcagtttccttcttggtggaatgggaataaaggttgtaactacycctataagattgttggtggaattaaaggattaatgcaggctgcccattatgtctgtaatcccagtgctttgggagacctaggcaggaggattcctggagcctaggaatttgagggatcccaggaatctgagccatgatggcaccaatgcactccagcctgggtgacagatcaagaccctgactcttaaatttttaaaaaaggggttaatgtatataaaacacttagaacagaatctgatgcaatgacacaaagtaagcactcagaaaatattagctattcctatttcagccataacaaacaggccatttattatgctagcctcacctagaggttcttgtaagggaaattccctggcccacaacttctgaaggggcaactacaggtcgcctattttgtgcaaagattctgtacattttaggcatacctgattggacaaggtgtgcaagctcaagcaataggttagccactgat

SEQ ID NO: 520657 - DNA, 575 bp, Homo sapiens
ctggttccaccagttattagctgcgtgaccttgggcaagttactgcaacttgctggccctcagtttccttcttggtggaatgggaataaaggttgtaactacccctataagattgttggtggaattaaaggattaatgcaggctgcccattatgtctgtaatcccagtgctttgggagacctaggcaggaggattcctggagcctaggaatttgagggatcccaggaatctgagccatgatggcaccaatgcactccagcctgggtgacagatcaagaccctgactcttaaatttttaaaaaaggggttaatgtatataaarcacttagaacagaatctgatgcaatgacacaaagtaagcactcagaaaatattagctattcctatttcagccataacaaacaggccatttattatgctagcctcacctagaggttcttgtaagggaaattccctggcccacaacttctgaaggggcaactacaggtcgcctattttgtgcaaagattctgtacattttaggcatacctgattggacaaggtgtgcaagctcaagcaataggttagccactgat

SEQ ID NO: 520658 - DNA, 629 bp, Homo sapiens
tcacgacagccctagggaaatgggagagctaatgccaacttcagcagcaggaggaaacctttgcaaggaagggcctttgccgacaaaatccttctagtgctagaagaggagacagcatagaaagaggagtaggagataacatccttacttctccattacgatggcctcagagtcaaaatccagaagcgggagaaagaacagaaacacacagagaatgaagaaatggtcacaagctctttagtacacaggctcatgaggtgtcaccgcatgcgtgtgtggacatgaaggagaaagccaattatgattccctgactctcctccagcctccctgaagtctccctggggcttatggaaggcagtggaaagctgaacaccatagagactgccatggagttgctattgttggaggccraaagagtaagagtcatgatcaactcagtgtaccactggaggctatatgagtaaacagcaaactgtttctcataaatgcagaatgttggcgaactgacaaactgtgtatgccacccagaaggactacaggagggcagtcacaatccaggcacaagtgtttcttgtgattaggcaaatctgaagcctgttagtaataatgtgaacctgtgatcaattaa

SEQ ID NO: 520659 - DNA, 653 bp, Homo sapiens
tagatacttgaaaataaattcaattaaccttgtttttcttcttcaataaaattagatatgaggtccctcaatgttaaattcccccctcttctaacaagtatatctagatatagatctggatatacttactttcttcccacttccagatattctcttatgaacctcacttctctttttctgcatagtggaacacattcawctttaaaccatttgtttttcagtattactgtcctacgtttgttacatatcccccactaagaaagcagatgtatcacagatggtgtccttgttaaagggaaaacttctagagagacagcgcaagactcctgggtctttggtttgctttataaagcgcatgtgtatacatgggacatgggtgaatatgtctgtgcgatagagcttatgacaccctaaaagctagaggaatcatgctatactcattttctgagaaattcaccaagtattgaaaagtgaactggtcttgggcagaagtctacattttgtacagttaggctaaaatgtctaaccatgttaggctctccttttgcagcagcccattaacaaaactgaggtgtaggtgaagagggttaataacaaaaagctctgtagtctctggagagctcagaagaaagattttcaggaatgactgggag

SEQ ID NO: 520660 - DNA, 653 bp, Homo sapiens
tagatacttgaaaataaattcaattaaccttgtttttcttcttcaataaaattagatatgaggtccctcaatgttaaattcccccctcttctaacaagtatatctagatatagatctggatatacttactttcttcccacttccagatattctcttatgaacctcacttctctttttctgcatagtggaacacattcatctttaaaccatttgtttttcagtattactgtcctacgtttgttacatatcccccactaagaaagcagatgtatcacagatggtgtccttgttaaagggaaaacttctagagagacagcgcaagactcctgggtctttggtttgctttataaagcgcatgtgtatacatgggacatgggtgaatatgtctstgcgatagagcttatgacaccctaaaagctagaggaatcatgctatactcattttctgagaaattcaccaagtattgaaaagtgaactggtcttgggcagaagtctacattttgtacagttaggctaaaatgtctaaccatgttaggctctccttttgcagcagcccattaacaaaactgaggtgtaggtgaagagggttaataacaaaaagctctgtagtctctggagagctcagaagaaagattttcaggaatgactgggag

SEQ ID NO: 520661 - DNA, 609 bp, Homo sapiens
tattagacttgaagtccgatattttagacttcgagggccacatatagtctctgccacatactctttttttttttctggtttgttttgaccctttaaaaacataaggaccattcttagccccacagccacaggaaaacaggttgtgggctgaacgtggctatgggatttagtttgccagcccctggagaaacgcattagttaaaaatgcacattaacttacatttatggaggttgtgagtgacacaggtgcttccaggcagtgttcctgcctaccagggacaggctgtattccccaggcttctgcacctctggcctttgcattcctgtggtgtgcttgccaccaaccaggagayacactcaacaccaagtgtggagggggtggaggacagttcagggcctccacctaatttatcttacttagttcttaaacaacctcatgggaaattctcatgcccattttctacagagctgacattgcaacctgagtcacctgactccaaagccttggccccagggcaggcccctgcatgtgtctttggaggagatcagagggaggattagggaagagaggcaggatggaagagagaggcacagagggggcaacaagac

SEQ ID NO: 520662 - DNA, 617 bp, Homo sapiens
gcaattctcctgcctcagcctcctgagtagctgggattataggcagatgccaccacgcccagctaattttttttttttttttttttgtatttttagtagagaccrggtttcaccatgttggccaggctggtctcgaactcctgacttcaggtgatccacccgccttggcctcccaaagtgctagggttacaggtgtgagccaccgtgcctggcctcacattcttgaccaaataggttggtgaacaagtgtctccctcttggaccaacccattgttttaatggggatgcccatggagcagtggagtgggaagaaaccatctcagcctgatgcatcttggccctccaagaaagagtggatatgagagcagcacgtcaccctcaaagcttcagcctcaggacaacagggaattccttctcagtactagccagggattagagagattcactctgtgtttcccttttcccctgaacgtctaacagtagtttgggaaatgctgaatcatagctcagtcattccctttcaaccctgtgactctggtgatggcccagcccaccagggtctcccggtctcgcctacttctgtggtccccactgacccccctgcttgctgccttcca

SEQ ID NO: 520663 - DNA, 617 bp, Homo sapiens
gcaattctcctgcctcagcctcctgagtagctgggattataggcagatgccaccacgcccagctaattttttttttttttttttttgtatttttagtagagaccgggtttcaccatgttggccaggctggtctcgaactcctgacttcaggtgatccacccgccttggcctcccaaagtgctagggttacaggtgtgagccaccgtgcctggcctcacattcttgaccaaataggttggtgaacaagtgtctccctcttggaccaacccattgttttaatggggatgcccatggagcagtggagtgggaagaaaccatctcagcctgatgcatcttggccctccaagaaagagtggatatgagagcagcacgtcaccctcaaagcttcagcctcaggacaacagggaattccttctcagtactagccagggattagagagattcactctgtgtttcccttttcccctgaacgtctaacagtagtttgggaaatgctgaatcatagctcagtcattccctttcaaccctgtgactctggtgatggcccagcccaccagggtctcccggtctcgcctacttctgtggtccccactgayccccctgcttgctgccttcca

SEQ ID NO: 520664 - DNA, 602 bp, Homo sapiens
tgtctgattctgaatcatgtcttttgctataaagcacattatagggacaactggaggaccttgaatggggtctgaagattagacagcagtgacaaatccatgctcatgtcctgatttcracggttctgtagacctaccttgattgtgagaaatgcacgttcaagtttcaatggtgcctgatactaaagtatcagatggcttcactattttcatccgaatgccatcctgggtcagaaacagcccaagagggacagaccagagccctgtcacagcaaaggtgtggtaaggacatcaatgggcttggtggctggaaaaaattcatccagcctactgacccagccatgatccgcccattgcccattaagtccaaggccaaggttaagcagagagcaaccacattcctctaacttgtaggccaagggctggctaggcagggggttttgaggggataacccctcttctaggaccaccttgaggagtaagggcagacaagcaggtgagggtaagtgtgacacacagagactgtgctcttcctgccctcaccctgccccactcccacaacattgggcctacccttgggagctggcattcaccgatcctct

SEQ ID NO: 520665 - DNA, 600 bp, Homo sapiens
ctgattctgaatcatgtcttttgctataaagcacattatagggacaactggaggaccttgaatggggtctgaagattagacagcagtgacaaatccatgctcatgtcctgatttcgacggttctgtagacctaccttgattgtgagaaatgcacgttcaagtttcaatggtgcctgatactaaagtatcagatggcttcactattttcatccgaatgccatcctgggtcagaaacagcccaagagggacagaccagagccctgtcacagcaaaggtgtggtaaggacatcaatgggcttggtggctggaaaaaattcatccagcctactgacccagccatgatcygcccattgcccattaagtccaaggccaaggttaagcagagagcaaccacattcctctaacttgtaggccaagggctggctaggcagggggttttgaggggataacccctcttctaggaccaccttgaggagtaagggcagacaagcaggtgagggtaagtgtgacacacagagactgtgctcttcctgccctcaccctgccccactcccacaacattgggcctacccttgggagctggcattcaccgatcctctg

SEQ ID NO: 520666 - DNA, 631 bp, Homo sapiens
tgtctgattctgaatcatgtcttttgctataaagcacattatagggacaactggaggaccttgaatggggtctgaagattagacagcagtgacaaatccatgctcatgtcctgatttcgacggttctgtagacctaccttgattgtgagaaatgcacgttcaagtttcaatggtgcctgatactaaagtatcagatggcttcactattttcatccgaatgccatcctgggtcagaaacagcccaagagggacagaccagagccctgtcacagcaaaggtgtggtaaggacatcaatgggcttggtggctggaaaaaattcatccagcctactgacccagccatgatccgcccaktgcccattaagtccaaggccaaggttaagcagagagcaaccacattcctctaacttgtaggccaagggctggctaggcagggggttttgaggggataacccctcttctaggaccaccttgaggagtaagggcagacaagcaggtgagggtaagtgtgacacacagagactgtgctcttcctgccctcaccctgccccactcccacaacattgggcctacccttgggagctggcattcaccgatcctctgtcggcagggcctgctacctgtgctagac

SEQ ID NO: 520667 - DNA, 625 bp, Homo sapiens
taacagggccccagagtctgcctcctaaatcacccagtaccagccctggcccgggctctgctggctcctcgacatgacaagttcattgttccccttcttccgaaggctgcttttccccaagaggcagctctgagcrggcaggtttctgtgggcagatgccctgaggcagggttcacaaaggcagtattgtgtggctccacagagcaggatcctcgccccatcctccagcccccacatcaaagaggaaagaaatcaaagctgcagcggcaggagaacacagcccatccctggtcccagagggagctctcgtgtggtacatttcatccctggcagatgaggaggtagatggaggcaggatactagcagtatgtggccagcaccggctgaacagaatgaccaccaggacaagagccaagtcgagggacagcatcatctccagggagcacagcactttaccatttgcagcacagcacgtgaaggcagggctggaactgagaggctcacggcagatgagaaaatcaaatcagagcgtaccaaggtcacagagctagctagagagccgaggctctcaggtcccctgcccagtgtgtttcccgggagtacaaggtggtttccacaccagcag

SEQ ID NO: 520668 - DNA, 569 bp, Homo sapiens
tctgctggctcctcgacatgacaagttcattgttccccttcttccgaaggctgcttttccccaagaggcagctctgagcgggcaggtttctgtgggcagatgccctgaggcagggttcacaaaggcagtattgtgtggctccacagagcaggatcctcgccccatcctccagcccccacatcaaagaggaaagaaatcaaagctgcagcggcaggagaacacagcccatccctggtcccagagggagctctcgtgtggtacatttcatccctggcagatgaggaggtagatggaggcaggatactagcagtatgtggccagcaccggctgaacagaatgaccaccaggacaagagccaagtcgagggacagcatcatctccagggagcacagcactttaccatttgcagcacagcacgtgaaggcagggctggaactgagaggctcacggcagatgagaaaatcaaatcagagcgtaccaaggtcacasagctagctagagagccgaggctctcaggtcccctgcccagtgtgtttcccgggagtacaaggtggtttccacaccagcag

SEQ ID NO: 520669 - DNA, 523 bp, Homo sapiens
gcttttatttacaagaatgtcattacaaataatacattttcagtgagttttgagtaatcgacaagctatactttatcattattaaaatgatttgcacttctttggcttatagttcaaataatagaatttattaatttaaaaagacatttttcttaatgttgtcactatgtacatgtccaaatctggtagttctgccagaacatgcctctgtgtttttcacacgactgtttttatttcttctaataataaaataaactgtgttaaggatagttggtataactttgattaaaatgtacaattatcacaaggttgaaaaatgcctgacagttatgcctaattcaaaaagcacactgaaakcttctaactcatagccaaaccttggtggaaagtcttcctgcctttgccaagactagataaagttcttctaaacctcactttataattagctataaattacattgacataaaatgaaactataaaacatgaactctcctgatacaattatgatcaattccaaaaaat

SEQ ID NO: 520670 - DNA, 518 bp, Homo sapiens
tgtttcaaaatgtaaaatccaataggtaatcagtgaggaatataacctagattaacttttttttttcaaaataaccaaagcacactcagtttaagtttcatgttaaagtgagccaaatgccagttaccaaaatattggatggctatgtatataatcctttgctgatgagtaatttagcatcaatttagagatgttattttttttctaccagatgctcgaaagcattaaggcaagattagaagtcattgtcccttcttctgttatcagtggtcccacaatatttgtttatatcaccattagaaacaaattgtactgtattatagttatttttttgtttgtccctcctattagagagtgagttcactaagggcagacattatgttttatactttattgatgtggaaagcaggcartaaagaaagaatgaaggactgattattggacatttgttattaatgatcttagcttattattttcctccaaatgaaaatgttttagtgaacataaactgggaaaac

SEQ ID NO: 520671 - DNA, 555 bp, Homo sapiens
actaatatagcccttttgcgtttttattttcaaacatcataaaattaaaaaaagtcagatttttactcatatttgttttggccactcatttcccacaacaacagtgacaacaacagtctctttctttcacacacatggacacacacacgcacatgtctgcgcatgcgagttcacccgtgcatgcacgccgtgctcacacacacccacagaggctcttccttttggagattagacttaaacgaagaaaaatgtgcctgtcaattaaaaacatttattgaatgtgaactctgtgtagagcattatactaagtgtcatgtggagaaagaagaaatataaatcaaactgcccagtactgaggaaggaataagagaagaggaaatatatgcaactgtggaaggctactcattcatgatgaaggggctgggctactacaagtggtacagtctccatgccacatttgtatacagactatttgcaatatgtcttgcyattaaaatatatgattagaagacttgctgctactgaaagtttttccagtgatcatgagagttttag

SEQ ID NO: 520672 - DNA, 598 bp, Homo sapiens
ttcctggcctacactttttattttttgataatacccatcccagtgtttgaggtggtattgaaaggtaaagctttctatacaatatttcttccttccccagtttgcctctcaataggatataaactccataaaatcaagtactctgtttattcactgctttatccccagccaggccacgcatatagccattgctcaatacatgtgttgtattgactgagtgaatgattttttttttttttttttgagacagggtctcattctktcaccaggctggagggcagtggtgtgatcttgtctcactgcaacctctgcttccaaggctcaggtgatcctcccacctcagcctccccagtatctgggactacaggcacacaccaccacgtctggctaatttttctattttttgtagaagtggagttttgccatgttgcccaggctggtcttgaactcctgggctcaagtgatctgccaacctgagcctcccaaagtgctgggattagaggcatgagccaccctgcccagccgtgaatgaattttaaatgctcagtaagtgagagttgtattcaattctttaataaataatatcatatatttagtc

SEQ ID NO: 520673 - DNA, 574 bp, Homo sapiens
ctggtgcctcccattgaccaaacttaataaaaagccagaggccaagggtgatgcagtccataaaggttagtctccaggggcccagtcagggcaaaaaatgagagggaagatctgtgcgtgtacgtgtacatgtgtgcgtgcatgtgcacatgtctttgttgagggaagcaaggaacaaatggagaaaaaacagcttgactgacaaatatagccaataaaagcctgggtcaggacaagcaccctgttattctaatttcaggtcccaaatttattctacttcaccaggtcgatttgacacaagataaatatgatgcataaatccttacctttgcttctgtttatttttattgcacagaatgtgttcaatattaaggcaatttgagcttttcattatgtattttaattggcaaagtaaaattgtatgtttttatatgggacaatgtgatgtttcgatatatgtatacaatggggaatgattaaagcaagctaattgacatattcatcacctcacatattattttttgtggtgagaacatttgaaatgyactctttcagcaagtttgaaatatataat

SEQ ID NO: 520674 - DNA, 589 bp, Homo sapiens
ctgccaactgaggaaaattccattaaattatgttcactggaatacgggcatattatttggcgcgttatcatttgttttgtttttcagtacatttaaattcacttagaaaatatatagctcttgtctaaatacattttgattaaaattagagttaaattgatgctaactgaacaaaaattgtttatttgtgatgtattctgtgtatgsaagtagcccttatttgagaagaagaaaaaaagaaagaaaggaagaaagaagaggaaactatgaaaacaagagaaacacatataaccaagtgatgcatttagcacaaaggggagatttttttcaataaactatcacagtaaacttgcttctgcctctggcaaaatctattgatcaaacctttggttcactgttggcttggaaatcaaatataagtgtgttgctgtttctagcccaacctgaaatggatgctcaaagtattatttctcagtcgtataaactatagctaggagtgactgctggaacacagtgccgggaatgctgtctttctgggcatctggaaacatatttaattttctatccaaagacatgtctaagaatttat

SEQ ID NO: 520675 - DNA, 542 bp, Homo sapiens
gcttctaaaatctgaatggatcaagtcaacaatatggtatccttcttctgcatagatctaaagggcagaacaggtcaaaaagattttgttgtagagatcagagcatagtttaatagaaaaaagggtcaaagaactttctatcaattacaactgtttataaatgaaataggcttccttgcaaatcaatctctcctgtaacagatgtgtttaagcaaaaagacttaggttggttaatcaaaaggtatgctgtatgatgtgatgatattgcttaatgttttgtgctttttaaaattattaatatattttayaattgccttctactctgtaattttcgttgttgttgtcgacttaactttatttgtaagaagcgtcgcatgaattttaggttgcaaatcacaaatcacaaagcagttaagcaaaaaataaatgtgggggaaacactttatataagtttgacattagtcacttctcaccttttcagatcaggaccctctggtaggcacagttcaaatctttcatccccaactacaaatgtaaatgtt

SEQ ID NO: 520676 - DNA, 609 bp, Homo sapiens
tttgcaggttcagtaacaggactgtacttagaaaccagggctaagatgattacaacgatgatgttctttgggaatgttttctggattaaaccaaattgtgcactaccttaaccttgtgtagaaagctgtttttattctgaaacttctggctttttaagacattgtcttgctgggtggaactaaagaagagtacacacctccgagaccttggtttagatgtaaactggtgaaatatttatgagaggcaatttgtcaaagtatattyagagctctaaatgcatgcatatatacacttggacatactgcttttaggactgtgtcttaagaaagtggaaaaacaacaaatggaatagatatatgatggagtactagacaagagttcagattcttactttgggtgaatatttaagaatatcttcatgcggtgatgccaaattttaaaaagctaaaggatggcatgtatactataattccaacttccaaacgtactaagaatattgatagttgagactttagaatggagtcaaggagagaggaaagtaaaaaatatatatatatgaaatgggtgagaggtaaaagataaaacatcgccatgtcaggaaatagaca

SEQ ID NO: 520677 - DNA, 604 bp, Homo sapiens
tgtcactctctgggaagcccagggagtggggctgactgagcaggggccatagagcctagtaagggaagagggagctggcaaggagcccagggagggaggctctgtgaattgtctctgattcctttcctggagcccctgcctcgtcacctcctgggatgcgtctcaaggtcatggaggttgtagtggaggaggactgggggctgtttctcagacaaagaatgaggttattggcacagaattggatcagggggcctctgtgccaactccttcctgccttcagaaagggagggggcattgaagggatgagaactccactaagtccctcgaaccccccactccccaatgaggctcctcaaagctactctcagcccctgagtgggagacacggccagctcygggcacagtctctgggtggcctagcccttaggcactgtggcataggtggcatgggcatgtcagaccctcactatctgtgagagagaaaacaggagtcataggagtggtaaggcctccgatgccaccaaccctggtgcttcccctccccgaggagggtgagcaggcccttctcaggtcctgggatagagggtcattcctgggggaaggt

SEQ ID NO: 520678 - DNA, 362 bp, Homo sapiens
cctgacctttttcttttttgagcccaggytggagtacagtgacgcgatcatggctctctgcagcctcgacctcccaggctcaggtgatgctctcaccttagcctctcaagtagctgggattacaggcacgcgccaccatgcccagttactttttatatttttaatagagatggggtttcaccatgttggccagggtggtctcaaactcctgggcttaagtgatcctcacgcctcagcctcccaaagtaccgggattacaggcgtgagccactgcacctggccaaccttgttgattatgcgtccttctcagtaaaaatgtggggcacagagtcccagaatatggacagatattcctcatttga

SEQ ID NO: 520679 - DNA, 503 bp, Homo sapiens
gggatatctctgtattattgttttacaattgcatgtacmtctaaaattgtctcaaaatagaaagtttcatcaaaataactttcaggccaggtgtggtggctcacgcctgtaaccccagcactttgggaggctaaggtgggaggattgcttgagcccaggagttcaagatcagcctgggcaacatagggagaatacatctcttcaaaatacaaagtaaaaaaaaaaaaattagccgggtgtgtggtgcatgtgcctatggtcccagctgcttgggaggctgaggtgggaggattacttgggcctggaaggtcgaggctgttgtaagccatgattgtaccactgcactccaacctgggcgaaagagtgagactcttgtcttaaaaaaaaatttttttttaagatttacaatgtttgctggtatatacatatgtttttctgaaggataaccctatgctctccaaaacaacaaacttgtgttttttttctttgtttgttttgagatg

SEQ ID NO: 520680 - DNA, 503 bp, Homo sapiens
gggatatctctgtattattgttttacaattgcatgtacctctaaaattgtctcaaaatagaaagtttcatcaaaataactttcaggccaggtgtggtggctcacgcctgtaaccccagcactttgggaggctaaggtgggaggattgcttgagcccaggagttcaagatcagcctgggcaacatagggagaatacatctcttcaaaatacaaagtaaaaaaaaaaaaattagccgggtgtgtggtgcatgtgcctrtggtcccagctgcttgggaggctgaggtgggaggattacttgggcctggaaggtcgaggctgttgtaagccatgattgtaccactgcactccaacctgggcgaaagagtgagactcttgtcttaaaaaaaaatttttttttaagatttacaatgtttgctggtatatacatatgtttttctgaaggataaccctatgctctccaaaacaacaaacttgtgttttttttctttgtttgttttgagatg

SEQ ID NO: 520681 - DNA, 628 bp, Homo sapiens
cccacctagttttagaatgtatgtttttagtcaaagctccatacctcacaacacagatcctcctcacttgggctcaatccagtctttttcactagctatccaccccaaacatcaccattttcacacagagaactacctactcagcctttgcatgtgcagygccttccacctggagcacctatctcaagtgctgctgtcatgcatccagtgcctcctctcctctctgaagtctgtgctgaggtggaggtgatgggaaccagggcctccacggttcttgtgcaatctgcccttactctgctctttccaccagcattcatgcctgtaaacactgcccattttcgcctgaggacaggaacaaagaatttttatgcctccagcaaaaccaaaggtatcttgtactctgctggtgaacaacgtagactgcaaacctatggaccataagtctgagtcagtcgagccattttgtttggtcattatagcattttcaaacaccaacaacataatgggaatgccttccccagggcacccgatcctggtgtggcatactgctgcttggtattttagtgatgggcagctccaggcttgtaagctgtcctgacctagtcattaactaactcactcattactc

SEQ ID NO: 520682 - DNA, 554 bp, Homo sapiens
ccaaaaggaatattcagatgtatagtctggagtgtccagaactgagaaaacacaagccagactgtggccaacatggctttcttggccccaccacgcacatgggtggggctgagaggtcgtggagtgtcacaaygtgacctgtgccgtgggacaaggttaacatacagaccacgtcactgctggaaggaaaacgccagtccttagtattttcaaaactggttggtccttttgttcctggagttccctgcctttccgttgtggtgccagatttagtgattcctactgaacagtggggtcagggcaggcaagcaagatctttgtcccagggaaaagaaagaaggggatgcagggtaaccaactcatcctggttcacctgagacctttcccagtttcaaaactgaaagtctcacattcaaagaaacccctctgtcctgggcaaatggggacaatgagttgccctgcaagacagcataaccctaatgaccatcataatcactctggagccctgattaagtgtccctcgacaggcttatatacattgtcgcacttcatcc

SEQ ID NO: 520683 - DNA, 489 bp, Homo sapiens
aaaataaagtcgaggcagaaataaatcacaaaaacttaggagagtttaacaaaagtaacaataacttaaatttttttttttttaatgaacatggaatttaaaagtgtttggggggaatcttggaagagttacttcattcttatttggcacaactagcttttctcacaactgaacatttcattcatcccaatgttcaaaaattaaagagcaggtagctcatgtggggcagcaaagaaccacagtggagggaggggagtgctacatctcgttctctttataataaacattatagttcagtataaacaaatgatgacagcayactgttgatttttgtttactcacactggtttcaatttgtgagggagattttgatttttttttttttgcatctctgggaaaatttgttatatgggcatataatgtgttagagaaataagaccacaaaaatggttcacaccataaattaaaactaaagtgcatttacgcaga

SEQ ID NO: 520684 - DNA, 526 bp, Homo sapiens
tccaaacacagcagctaaaggccaaggaactgagctgggtttcccagtgcaagaggatggactccctttgactcccatgcctccttccttctcatctccagtgcaggtgctgaatggtgccaccaaaccaggatgctgtactctcctccagcagaaaagaagaggagagtctaaagggtcaygcaacgggcaacacagtccatgttgtgttcagaatcagcggggctcattcaaccttggtttcagcattccccagccctcgctgcttggagctctcctttggctatcagctatggttcagcactctatcctaggctcctcccaagaagaaggcttctcacaggtaaacgtgaaaaacataaacttcatttgtttttgctatttttttgcttgctattaaaaccatcagaagggactaatggcttcttaaaagggaaaaacaaaagatggcatgggcagggggagaaatgcagtgtgaaaagcagggacccaggagatgaaagctagtgctctccacactttggac

SEQ ID NO: 520685 - DNA, 591 bp, Homo sapiens
aaaaaatctagtcatcatacccaaatgtcatgggctccaaccacttaagactttcccctagacacctcgtattgggcaccactcaaaagataacataacccagcatgcaggcaagttgctacaggtcctgaggcagcttccatttcctgtgaccacaacctattgctgatgaagtactgagtcaagacctgtaaacctgggaggatcacacattaccacaggtatattattccttagacccaggatagctgatggctgtgtgtgtgtgtgtgtattttctgtttgtttgtttttgagacagtcttgctctgttgcccaggctggagtgyagtggcgcggtctcggctcactgtaatctccgcctcccgggttcaagcgattctcttgcctcaacctcccaagtagctgggattacaggtgcctgccaccacgcccagctaaatttttgtatttttagtagagacagggtttcaccatgttggccaggatggtcttgaactcctgacctcataatcagcctgcctcggcctcccaaagcgctgggattacaggcgtgagccactgcatccagcctaggtgatggctatattt

SEQ ID NO: 520686 - DNA, 513 bp, Homo sapiens
ggggccagagttagtgcttataaccacctcacatggtggccacgtgagaagtttgtgtgtgatatggtgtggcagcatggcagggtggaagtatcacgctctgtagccagacagacacacatttccctcctgcstccaccacttatgggccctggggtctgctgagaaccctccacatttgctgtgtgaccttgggtgagttactggacttctctgaacctcaggctcttcttcttataaagtgggtacaagatagcaacttggtagaattgtgagtgatacatgagctggtgagccccacgtgtttggtatattacctggcacgctgccggcatgaaataagtgagagatttgtagttttattatattttatgtgggtataaacaggatgatttctgagatttacattctacctgttctatctgtatctctcccttggtaaaataatgggtttcagagactcatggcatgtgcaaaggtggtatttagagactgttcaataaaatggggtaa

SEQ ID NO: 520687 - DNA, 513 bp, Homo sapiens
ggggccagagttagtgcttataaccacctcacatggtggccacgtgagaagtttgtgtgtgatatggtgtggcagcatggcagggtggaagtatcacgctctgtagccagacagacacacatttccctcctgcctccaccacttatgggccctggggtctgctgagaaccctccacatttgctgtgtgaccttgggtgagttactggacttctctgaacctcaggctcttcttcttataaagtgggtacaagatagcaacttggtagaaytgtgagtgatacatgagctggtgagccccacgtgtttggtatattacctggcacgctgccggcatgaaataagtgagagatttgtagttttattatattttatgtgggtataaacaggatgatttctgagatttacattctacctgttctatctgtatctctcccttggtaaaataatgggtttcagagactcatggcatgtgcaaaggtggtatttagagactgttcaataaaatggggtaa

SEQ ID NO: 520688 - DNA, 567 bp, Homo sapiens
acagatggggacaaggaggactaggaggctggctctgctctccccagccctgcccccgggcagagctgcgccctttaccttgactgcaaggttaacacaggactttgttcccgaggcatcgtgagcagcacgtgggcctttctacagtccggcttgctggagacgctcgtgmtgggatgagactctgctctcctgggtccgaggctcactcttcctctcgtggcttgacatcctgacatgcgccgcacacccaaccctgaaagtgcttgtccccttgttcctgtgacgtgaacctgcattcgtgagacgcaggtcctagattgttgcccagaaaggagaaaagccacacgccctcaggtagcaggatcaacacatcgcacctgttgtctggccccaatctggcctctaaaacaaaacaaaacaaacccagaagagagagagacgcacacagccacttcaaagttccctggctttgaatgggagccaccaggagccaccaagcagggccctccctgcctgctgtgaaggcctcgggaaggacaggcacgcaccctgtgtctcttacca

SEQ ID NO: 520689 - DNA, 633 bp, Homo sapiens
actgaaaaataggtcaactttcagtctcaagagtaagaaactaaatgcatcaatgggaagaaactaactgcatcaatggggtcctttttccagttcaaattagggactttaagtcagttttccttgggagtctcccagcctgaaggaaataaaaaaaaaaaataaaagcaattaacaccacttcagaactagactagagatccacaaggtaaacattttgagaaaaagctaagaaaaaatccaaaagatgaaggaacaaggcatccagttcatccagaatccttcaagcttctctttagactcatccactcacccacccatccatccatccatccatctttccatccaactttctatttgatttttgttcggctgtcgttgaccaagcagctactaagtgtctagctgaggttcacatatcgacaagacacagttccagtctttgaggagctaatttgtaatgttkcaacaagccaccaggtaaccacacagacaatttccatactatctaagaactgtcatgatagagttagcacaggtgctttggggacacataatagggtggggaacttcattcagtaaagggcagggtagagggggagcaggtcaatgtctttaaggaagtcatatcca

SEQ ID NO: 520690 - DNA, 626 bp, Homo sapiens
ctgtataaatttgataaagacatttaatctctctagtttgcagcttctttatctaaaaaaactggtggtaggggaatggatttattatgatgtttcttctagctataaaatgtcatgatcaagaatttatttaagggtagtatgaagaataaatgcctaagtcactcaaaagcagggaacaatgactttagattgagttgatcagggaagacttcatggaggaatgagaaagcccatatctatttgggaagcccctgatgcttgtcaggaatttcccattgagatgcaggccamgctgtgggcctagagaatgggatggtacactgggaatggagattagttttgttctttactaaaaaatctttcctcacagttaactacgtagcactgatcaaaaagaaaataagaaatgctttatttatttcaggatttagcctatttctggctaaatttgaagactctaagttttggggagaataaagtggcatatgtccatctgagaaagagttgaaatgtgactgcagaaacacttttcttaagggaactgaccagcaaagatttcaaagatatagttctaccacttaagataagtaaaagtaattgagaaaagatgcaggaggaagcag

SEQ ID NO: 520691 - DNA, 626 bp, Homo sapiens
ctgtataaatttgataaagacatttaatctctctagtttgcagcttctttatctaaaaaaactggtggtaggggaatggatttattatgatgtttcttctagctataaaatgtcatgatcaagaatttatttaagggtagtatgaagaataaatgcctaagtcactcaaaagcagggaacaatgactttagattgagttgatcagggaagacttcatggaggaatgagaaagcccatatctatttgggaagcccctgatgcttgtcaggaatttcccattgagatgcaggccaagctgtgggcctagagaatgggatrgtacactgggaatggagattagttttgttctttactaaaaaatctttcctcacagttaactacgtagcactgatcaaaaagaaaataagaaatgctttatttatttcaggatttagcctatttctggctaaatttgaagactctaagttttggggagaataaagtggcatatgtccatctgagaaagagttgaaatgtgactgcagaaacacttttcttaagggaactgaccagcaaagatttcaaagatatagttctaccacttaagataagtaaaagtaattgagaaaagatgcaggaggaagcag

SEQ ID NO: 520692 - DNA, 574 bp, Homo sapiens
gaattctgactggttttcaaaatttttcttctccaaaatatagggattctgaccagtgattctctttattggtaatttgcatgataattccatatgcattttcatctctataactttagaacatgaagaagctgaagttagggaatttagaaaagtactcaaggtgagacatcttccgagtggcaggaagttgcttaaaaccatgtctgtctgatgctaaagcacatgcattttatccgttacatagcaggcctcaagacacacattgtccaaggcaaaccttagtaccagatcactcaaggccaatcaggaagtacttagcagagctgtaattrgaagcaaagtttctgactgctaatgcagtgctttttccatgtcttgacatcctccattactaggtctgagtagagagcacaaacactgacttggtattttatatagtattttgaaggattagatgagctttgagtgtggcaggatatagcatcattagatccaaatatcatgttggaaaaacactggcatctctttatttcctgtcttcattcacatgaagtagaaatcatcggtacat

SEQ ID NO: 520693 - DNA, 642 bp, Homo sapiens
tgctatagaggatactaatgtatagtggtagagttccagatagaattttaaattgtattctgtaccttctcttggacaaagcratgacaataggagggaactttttgtaatataagttcaactatgaaatcctgagaacatgcctcgagccttattgctcttaaggttgaaagtaaaggtgtgaaatcaatctatcactcaaaaatgttaattgagcatctgttgaatgccaaacactatggtagatgatcagtctacagagctaattaagactcatgaagtcttaattagcttcatgaaggcaaacataccaagaaataatttcaatatagaatgtaaatgctgtgatggaggtagagatacagagtagctttgtctggtgtagaatttctagaaaagctttatataatgtaatataagggaaaaaatttgaattaactttggaaaaatgggtagagattccgcttgtgactgtgttgtggggcagctgggggatggttgagaataatccaggcagagggaagactggacatgcctccatttttctttttaatgcacatgcttttccatatacaatcttttttacaggatttttttttttttttttttttttttggtcagtgaagtggtggcaaaggagag

SEQ ID NO: 520694 - DNA, 642 bp, Homo sapiens
tgctatagaggatactaatgtatagtggtagagttccagatagaattttaaattgtattctgtaccttctcttggacaaagcgatgacaataggagggaactttttgtaatataagttcaactatgaaatcctgagaacaygcctcgagccttattgctcttaaggttgaaagtaaaggtgtgaaatcaatctatcactcaaaaatgttaattgagcatctgttgaatgccaaacactatggtagatgatcagtctacagagctaattaagactcatgaagtcttaattagcttcatgaaggcaaacataccaagaaataatttcaatatagaatgtaaatgctgtgatggaggtagagatacagagtagctttgtctggtgtagaatttctagaaaagctttatataatgtaatataagggaaaaaatttgaattaactttggaaaaatgggtagagattccgcttgtgactgtgttgtggggcagctgggggatggttgagaataatccaggcagagggaagactggacatgcctccatttttctttttaatgcacatgcttttccatatacaatcttttttacaggatttttttttttttttttttttttttggtcagtgaagtggtggcaaaggagag

SEQ ID NO: 520695 - DNA, 265 bp, Homo sapiens
ggggatggttgagaataatccaggcagagggaagactggacatgcctccatttttctttttaatgcacatgcttttccatatacaatcttttttacaggwtttttttttttttttttttttttttggtcagtgaagtggtggcaaaggagagacacatcagaaacatcttttcagaaccaatacatgccataagaaagaagctgaaggctgctaatttgattacctatagccatatttactatcctaaagttttactcagcttgc

SEQ ID NO: 520696 - DNA, 444 bp, Homo sapiens
gcccaggcgggctgagcagcctcggsgggctgggggtctggccaaggggcccctgtggccacctcccatggctttcctgggcctctgaaggccgcccaggcacgtacaaacccggccttttctagctggacctggatgtgtatcccccactccagcgacacccagcgggagatgtggaccccccaccacacctgccgctgctttctcgccaccacctccccgccctgggcctgtgcccctaggtgtgtggggggtaccttttgtccagggcctgcatctggttctggagaccagagaactgcgaggaggaagaggaggctgtgggctggacctaggcccgggtctggcacctgcccctggagtccacccagctccggcaccactggcccctgggagctctgggcctgggcagcaggggtgagctgggctccaggcccagaagca

SEQ ID NO: 520697 - DNA, 502 bp, Homo sapiens
gtcatccaaacaaagaactatttataaccctgatattccaaggtgtatttaaaaaggtgttatttgtggcaatattgtatctattttctcgragatcttaaaattagcaattactatcaatgaacatttattgaatataaagtaactgtatagcatttgtatctaatgcatttctaattgctaagttacagttccaacattttcatagtgtccaagtgattattttatatatttctttttaaataataaaagtatcataaactttttggaaaaactaaacttcctattttattgctacttattgcctattatttaatcttttatatgttaacatgatcaaaggtgtaaaaaattaatgatccttaattttacctaaaactaaaaaaaaaaaagcaaatatttatcaaatgctgaatattttttaagcactgttagcaattatctatctgtctatcctagaatctccactctgaacactgcattccatgtgatgaaacattag

SEQ ID NO: 520698 - DNA, 636 bp, Homo sapiens
taagtaaaaaagaaagtaacaacctattacatttctttctttgtcaaaaatatgtaatctacgaatcattggggtgagcatcaatattatatacatgggatgaaaatgaatttaatttcattaggatcaggctttaaagatctaaactaaggctgtttgaatttttctttttaatttgataaactacaagttcacaggaagtttcaaaaaattgtatagggaggttgaaggtcctgtgcacccttcacggaggctcactcaatatttacatcttgcaaaactgcggtataatatcaaaagaattgacattggtataatccataaaccttcttctgatttcaccatttatgtacgtatacatttgtgtgtgtatgtgtgtgtgtatatatagttatactcaattttaccacatagatcacttcacgtaagcacaacrcaagtggtagatgtaccatcacctcaagacaccccatgttatccttttataggccacctgccaccttcccccaatccatatcacattatgctgagtgaaataaaccagtcacaaggggctgcatacagcatgattccattgacatgaagaccaggtcacccaaatccttagagacagaaagtggtttcgtggttgccaac

SEQ ID NO: 520699 - DNA, 615 bp, Homo sapiens
agatggaaacagagtttaggctcaatttgaacaaaagtgtgagtgatcagaacttgggattggtctgtagttgtgtggaacttgaatctgtgttaggcttaaatggagccacgtaatcaggtagatcggggtctattaaaatttattctgttccctcctccaaatgaaaatatccagaggcctttctccataacttcccaaattccttgggtgagaacttcataggcactgaatggttcaaatgttagaatttggaagttggctagaggaagaaaaaggctggtatgatcagagagggcacctcttgaagctgagcatttccacaagaataccctgagagtagtttctcacatccctccactatttcaaagtcaacacaatcatctttctgtccttctcgtctccctcatccagactctcttttttcttgcgctgctcctcaattctctctacatatgggaactaatcactgccagtgtttttgttttctttttaaaaaatatcccaccaacactgttataccctgtagattgtyttgtgaagaagacgaagatggggaaactgagcctcagaaaggaaagtgaccttcacacaggcattcagtgggtcacacac

SEQ ID NO: 520700 - DNA, 615 bp, Homo sapiens
agatggaaacagagtttaggctcaatttgaacaaaagtgtgagtgatcagaacttgggattggtctgtagttgtgtggaacttgaatctgtgttaggcttaaatggagccacgtaatcaggtagatcggggtctattaaaatttattctgttccctcctccaaatgaaaatatccagaggcctttctccataacttcccaaattccttgggtgagaacttcataggcactgaatggttcaaatgttagaatttggaagttggctagaggaagaaaaaggctggtatgatcagagagggcacctcttgaagctgagcatttccacaagaataccctgagagtagtttctcacatccctccactatttcaaagtcaacacaatcatctttctgtccttctcgtctccctcatccagactctcttttttcttgcgctgctcctcaattctctctacatatgggaactaatcactgccagtgtttttgttttctttttaaaaaatatcccaccaacactgttataccctgtagattgttttgtgaagaagacgaagatggggaaactgagccycagaaaggaaagtgaccttcacacaggcattcagtgggtcacacac

SEQ ID NO: 520701 - DNA, 522 bp, Homo sapiens
tcaaaaactcccttgagtgtgactttcattgaccataaacagccctaaatgtaggagaaggcagtgcaggtaaatgaaatcagggggctagaatgtttccagatgcacacacacacacacacacacacamacacactctctacaaaaaggaaataagaaacataggaggaacattaactagacatacagacatatggacaaccaaccaaagttatttctcctttcttgggagtgagttcagttatgatgtctagccttttgccttcttcctccccttgcttctacttctactgctccataatcccttccttttactctcctcactttttctcttacactccatcctccaaaacccttttccttttaccttttttcttgaggtatccttgttcccatattcagtaaaacataggaatagtaatcatcactgcaaatgaatttacaataaaatgaagacagaactttatgtttcaagggttataaaaagttctccttccttaatgatttttaacatgtgtccag

SEQ ID NO: 520702 - DNA, 585 bp, Homo sapiens
aacaattgttggagggttctattcacccatattgctccacctcctctcattgttaattagtgtagatttaatctgcttctgggcaaatgagtgaggttgtgccttgactgtttgggaacaggattggtgtacaaaagatcccagagacaaaaacctttaacttggagtattgcttgtcttcagtgttggagaactgctgctccctggaggtcaagttttctttctttcttttttttttttttttttttgagatggagttttgctcttgtcrcctgggctatggagtgcaatgccacgatcttggctcactgcaagctccacctccccggttcaagtgattctcctgcctcagccccccaaatagctggaattagaggtgcccgccaccacgtctggctaatttttgtatttttagtagagacaaggttcgtcatgttggtcaggctggtttcgaactcctgacctcaggtgatccacctgccttggcctctcaaagtgctgggattacaggcatgagccactgtgcccggcgagttcaagttttaattcacaggatgctcaaagcagctgggtaagtgttttctt

SEQ ID NO: 520703 - DNA, 332 bp, Homo sapiens
tgtcctctacccaggatggccttccctcttcacctatcgaagtttaacccaggctttacccatcctccggaaacccacccagagacttccttcttgctctattggccccacacccacaggacatagtcacagcgtaacttgtataagttctagtgtttgtrtatctctgtctccctccacccacctggctctcagtagctgctcaataaaggcttgttgaatgaattaatgaccgtaccaggggttctaaggaggagagagagacaacttgttcaagcccaagccaggttcttggggttggcccgggagctctgataggacttgtggtgcca

SEQ ID NO: 520704 - DNA, 437 bp, Homo sapiens
gagctgttcccagtgggaccagttcccagttctctgtgacatccctctctctgctcctccccttcggacctgccctgcaggctccaaatatcgtggttgatatggaaactctcctgttacacattccttttccagttgtgtgaccctggcagtgtccttcctctctggagcttyggtttccccatctgtctaatgggagtgataaatggagtgatggctggcactgattatcaagcactcgggcatctcctccaattctcccaaaggccccaaggaagaagagggtctgccattatcagtgccctgtccaccggcagaaagtgtgaggcagagctcgttgtggaaagcaaggctcataatttacctcactaacctgtgtggttctggatggcacagagccaactgggactctcgtttttctcattctggtccctact

SEQ ID NO: 520705 - DNA, 644 bp, Homo sapiens
ttcaaatccttactctccactgctggcagggtgatcttgggaagaggatgtaacctctcaaacccctcatttcctcccctgcaaagtgaagataataataactacctccctcatagcattattgtgaggtgcttatcattagagtacatgatatagcaaggctcagaaatgtatgagcgcatgggggtgggcrgggtgtctgtagacacagatataatttctatacttcactggaacacatcactattttatctggggaatatgggataattttgctgtttgtttttagtagtgcatgcttctgtggagggcagattttctgcaactaaaccacaactttaccagtctaatatcagagtcaaaaattaaaataagccatgaggatttttccatcccaaaattcatagtccaggctccttcctccttctcctttgtctttcataaaaaaaaaaaaggaagcacattagaagctacaacatacagtaatagaggtaacaacccataaaaagcctggaaagggatgctgtgaggctgggtaagaggatcagaaaggggcactggagacaagtggtaggtttaggagcagcagtccgtggcaaacctcagaaacctccctgcaacacagcatggtggtggccatgggg

SEQ ID NO: 520706 - DNA, 644 bp, Homo sapiens
ttcaaatccttactctccactgctggcagggtgatcttgggaagaggatgtaacctctcaaacccctcatttcctcccctgcaaagtgaagataataataactacctccctcatagcattattgtgaggtgcttatcattagagtacatgatatagcaaggctcagaaatgtatgagcgcatgggggtgggcggggtgtctgtagacacagatataatttctatacttyactggaacacatcactattttatctggggaatatgggataattttgctgtttgtttttagtagtgcatgcttctgtggagggcagattttctgcaactaaaccacaactttaccagtctaatatcagagtcaaaaattaaaataagccatgaggatttttccatcccaaaattcatagtccaggctccttcctccttctcctttgtctttcataaaaaaaaaaaaggaagcacattagaagctacaacatacagtaatagaggtaacaacccataaaaagcctggaaagggatgctgtgaggctgggtaagaggatcagaaaggggcactggagacaagtggtaggtttaggagcagcagtccgtggcaaacctcagaaacctccctgcaacacagcatggtggtggccatgggg

SEQ ID NO: 520707 - DNA, 644 bp, Homo sapiens
ttcaaatccttactctccactgctggcagggtgatcttgggaagaggatgtaacctctcaaacccctcatttcctcccctgcaaagtgaagataataataactacctccctcatagcattattgtgaggtgcttatcattagagtacatgatatagcaaggctcagaaatgtatgagcgcatgggggtgggcggggtgtctgtagacacagatataatttctatacttcactggaacacatcactattttatctggggaatatgggataattttgctgtttgtttttagtagtgcatgcttctgtggagggcagattttctgcaactaaaccacaactttaccagtctaatatcagagtcaaaaattaaaataagccatgaggatttttccatcccaaaattcatagtccaggctccttcctccttctcctttgtctttcataaaaaaaaaaaaggaagcacattagaagctacaacatacagtaatagaggtaayaacccataaaaagcctggaaagggatgctgtgaggctgggtaagaggatcagaaaggggcactggagacaagtggtaggtttaggagcagcagtccgtggcaaacctcagaaacctccctgcaacacagcatggtggtggccatgggg

SEQ ID NO: 520708 - DNA, 644 bp, Homo sapiens
ttcaaatccttactctccactgctggcagggtgatcttgggaagaggatgtaacctctcaaacccctcatttcctcccctgcaaagtgaagataataataactacctccctcatagcattattgtgaggtgcttatcattagagtacatgatatagcaaggctcagaaatgtatgagcgcatgggggtgggcggggtgtctgtagacacagatataatttctatacttcactggaacacatcactattttatctggggaatatgggataattttgctgtttgtttttagtagtgcatgcttctgtggagggcagattttctgcaactaaaccacaactttaccagtctaatatcagagtcaaaaattaaaataagccatgaggatttttccatcccaaaattcatagtccaggctccttcctccttctcctttgtctttcataaaaaaaaaaaaggaagcacattagaagctacaacatacagtaatagaggtaacaacccataaaaagcctggaaagggatgctgtgaggctgggtaagaggatcagaaaggggcactggagacaagtggtrggtttaggagcagcagtccgtggcaaacctcagaaacctccctgcaacacagcatggtggtggccatgggg

SEQ ID NO: 520709 - DNA, 549 bp, Homo sapiens
cctcctagaagtatccttaaagaaagatgtcaagagggattgctttagactaaaattgacttaagagacataattatcagagacatagtgtgaaatctggtaccttgattcaagcaatgtaactataaataggggaaatattaagatgggctgtgtattatatcatagtaaagaattacgccaattttgttggatatagcattgggatggttggctccaaattaaatttagagctgcagagacaagttattaggaattaaatgttctgatatatggaattcaccttaaaatatttcaatagagaggaaagagaaaaaatgaaaggaatataaaggaaatgtggcaaacaaatgtttataattgttgggttatcatcataaatatatgaggggttattgtactgttctctccacttttgtgtatacttgaaatgttttgtaacaaagagtttaaaatatataaataaattcctagaatattaacttgccaaaaataattgtctgtgatttttttttcctgagcargatttaagaactaatttttccacag

SEQ ID NO: 520710 - DNA, 521 bp, Homo sapiens
ctgcctctgatgtttctcacactaatttttcttctcttcacacatctttttctttatggtctcastaacaggtttttaagagcaatcatgaacctatcagggcacaaatatcttgggttccttcaggactggtttttcaacataaggtcattgggccaagagctggaggctttacaaaaatatgtattcttatgcctatctgacacttagctatcatctctaagaaaagaatataggaaatacagaaatacattttagataaactcctctcctctgcatgctaaattttgaggactgtttttttaggaacattatgtagcactttttactatcttttgagcccttagtagaaaccccactaatcgcctgcaaagacacttatcaagcctccttaaagaaacagaggttttatcctcttgccacataatagtaagaattaattcctacatcctttctgtgaaaggacatctacagctcttttataatagttttcagccacccaacatggagctaaggcttac

SEQ ID NO: 520711 - DNA, 521 bp, Homo sapiens
ctgcctctgatgtttctcacactaatttttcttctcttcacacatctttttctttatggtctcactaacaggtttttaagagcaatcatgaacctatcagggcacaaatatcttgggttccttcaggactggtttttcaacataaggtcattgggccaagagctggaggctttacaaaaatatgtattcttatgcctrtctgacacttagctatcatctctaagaaaagaatataggaaatacagaaatacattttagataaactcctctcctctgcatgctaaattttgaggactgtttttttaggaacattatgtagcactttttactatcttttgagcccttagtagaaaccccactaatcgcctgcaaagacacttatcaagcctccttaaagaaacagaggttttatcctcttgccacataatagtaagaattaattcctacatcctttctgtgaaaggacatctacagctcttttataatagttttcagccacccaacatggagctaaggcttac

SEQ ID NO: 520712 - DNA, 521 bp, Homo sapiens
ctgcctctgatgtttctcacactaatttttcttctcttcacacatctttttctttatggtctcactaacaggtttttaagagcaatcatgaacctatcagggcacaaatatcttgggttccttcaggactggtttttcaacataaggtcattgggccaagagctggaggctttacaaaaatatgtattcttatgcctatctgacacttagctatcatctctaagaaaagartataggaaatacagaaatacattttagataaactcctctcctctgcatgctaaattttgaggactgtttttttaggaacattatgtagcactttttactatcttttgagcccttagtagaaaccccactaatcgcctgcaaagacacttatcaagcctccttaaagaaacagaggttttatcctcttgccacataatagtaagaattaattcctacatcctttctgtgaaaggacatctacagctcttttataatagttttcagccacccaacatggagctaaggcttac

SEQ ID NO: 520713 - DNA, 563 bp, Homo sapiens
tttctcacactaatttttcttctcttcacacatctttttctttatggtctcactaacaggtttttaagagcaatcatgaacctatcagggcacaaatatcttgggttccttcaggactggtttttcaacataaggtcattgggccaagagctggaggctttacaaaaatatgtattcttatgcctatctgacacttagctatcatctctaagaaaagaatataggaaatacagaaatacattttagataaactcctctcctctgcatgctaaattttgaggactgtttttttaggaacattatgtagcactttttactatcttttgrgcccttagtagaaaccccactaatcgcctgcaaagacacttatcaagcctccttaaagaaacagaggttttatcctcttgccacataatagtaagaattaattcctacatcctttctgtgaaaggacatctacagctcttttataatagttttcagccacccaacatggagctaaggcttaccaccccaaagccttatgtcataaaatgacctgctgatgaagaaatatgacctgg

SEQ ID NO: 520714 - DNA, 599 bp, Homo sapiens
atgacattcacatcacgtttaagttgacttttgtacataagaaagatcaaaccaattgtaaaagcaatcacttaaaatgctctgttatctctgtccatctgtatgtagtataagaaaatgtgtgactctacaccacaggatcatttcaaatattgaggaaataagattgagaaaaaaagttatttggaaagaacaattttttttaaattgaggaataaataattttgaaaattttgcttcaaaagttttattcaccacccagtgtcttaagatgaaatttacatttctccgcatgcctcttcagagcttacagaccygttccttgcttgtcttgcgtctcttttttttttttaattttttttcttttttttaaattttattattattgtactttaagttttagggtacatgtgtacaatgtgcaggtttgttacatatgtatacatgtgccatgctggtgtgctgcacccattaactcatcatttagcattaggtatatctcctaatgctatccctcccccctccccccaccccacaacagtccccggagtgtgatgttccccttcctgtgtccatgtgttctcattgctcaattccca

SEQ ID NO: 520715 - DNA, 596 bp, Homo sapiens
ggtaagcgaacagaacactgcgtgaagcctcttttrtaagggtcataatcccattcatgagagaaggagtcctcatgactgaatcacctcttaaaggggccaccgtttaatatcatcacgttgaccattaagtttcaacacctacattttataggggacacattcaaaccataatatttggtctttttactaatcccaatagtcacagcttaatttgttacatttttacaaatatttttcttattaaagttaaacatgcaatgtcatgtttaatacttctccagagatatatttaacttgccagactttaacagattcacatcaatggcttcttctttttttaatcttattcaaggaatctaacaatttttttaaaggtgctgcatcccacctctttttcctcttccctgtgtggaaggatgctgtcaactcacatcagtgatggtcctgaaattgacaatcacggatacgtttcttctctcacgagtcctttttctaggaagtgtctacgcttccgaccatgtcatttccatgccactgcaccccaatctactcaggcagatatggctctcacgacacctagtccttcattctgc

SEQ ID NO: 520716 - DNA, 640 bp, Homo sapiens
atagcaggaaggctctgtcctcacatggcagaatagctgcagggtaagcgaacagaacactgcgtgaagcctcttttgtaagggtcataatcccattcatgagagaaggagtcctcatgactgaatcacctcttaaaggggccaccgtttaatatcatcacgttgaccattaagtttcaacacctacattttataggggacacattcaaaccataatatttggtctttttactaatcccaatagtcacagcttaatttgttacatttttacaaatatttttcttattaaagttaaacatgcaatgtcatgtttaatacttctccagagatatatttaacttgccagactttaacagattcacatcaatggcttcttctttttttaatcttattcaaggaatctaacaatttttttaaagrtgctgcatcccacctctttttcctcttccctgtgtggaaggatgctgtcaactcacatcagtgatggtcctgaaattgacaatcacggatacgtttcttctctcacgagtcctttttctaggaagtgtctacgcttccgaccatgtcatttccatgccactgcaccccaatctactcaggcagatatggctctcacgacacctagtccttcattctgcca

SEQ ID NO: 520717 - DNA, 641 bp, Homo sapiens
ttatcatttaattaatcatattaatatattgatcagtctttatatagacaaatatacatacatgttatataaatatatttctctttctcattctttttaatgaccatatagtattacattgtagaaatatggcatatttaactatttcactatcagtaatcatttaggttaatttaaccattaactaacaatttaaaatattaataaataacactttgtaagcagttaatatgtgccatgtaatgaactaagtgcttctcattaattattttgtttaatctttaattctgtgatgaattaatattatccccattttacggtagatgagacwgaagtttaaagattcttagtaaccccattcaataaatcagagaaagtaggtggtaaaattgctatataaacccaaaagtgttattcaaagtcatcaatcatgagtgctgaccacagtgactctcaagctatacatacataataggtttcagttttataattggctattataaaatgagtctatggtttccttttatattcaaattgttgaatataaaatatactcatggggcaagaggtcccatgagtatatttatgggaaaaaactctacatcaaggtgttgtctgctacccacatttcctcttctcta

SEQ ID NO: 520718 - DNA, 524 bp, Homo sapiens
gtataaggaaaaggctcagagggataaggtgactgagcmaaggtcacacagcatgtacctagcagagcagggatggaaataccatctggcactgagacactaggctgattccatttcttttcatgcaaccgggattgggggagctcccttccttctcactatccctctgaatgctctgacatggtttgctccaaagcatatcttgggaactgagcagcctgggagtggaatgactgtggaaaatggatttgcacaactgcctccctgggcagcccactttggaaaccatttgtgacctgtaattgaccatgacgatataaaaattggaagctgaaaattacaaacatgtgaggttattagatggtgaaattgcagcttcccatcagcctgctgcttcctgaattctcagttttgcttttgggggctagagcttggcaaatcctcatgatacaccccctcccttgcctgaatgtgctccaggctacctgtttcccctgctcaggggaaaaagaacaagaaccctg

SEQ ID NO: 520719 - DNA, 602 bp, Homo sapiens
atgcacaaaggtttggtctagtcaggaatgttaaacacttgtttatctgtctctttattcaccacatccaggggggatcaagacaagaacaaacacactgctttaggaaattaaatccactcagattggtgtaaaattccttaacatcaggtggtctcaataaagctatgttctttcaatttatccatactcttttcaaactcagcatgatcccaaaatatacaatattgatggtctttaaacatagtaattcccagcaaatcccactgtgttctgagtaaaactgatcagatcctgcacatggattaggtatgccatgtctgtctttcttaattttatattctatggcgatttggctcccaaatcatgagcacactgtcagatttagtgaccaaatttctcatcaatgacaggcttgatgacactcaaatatrtcattcatttcttcctcattccaaaatacaccaacattatatatcatcattcacccaatttgacttataggctatttttaaaaaatcattctcattctgtccagacaaggttgataattcaactggaacttacatccacaggaatttaataattatcaaatttggagg

SEQ ID NO: 520720 - DNA, 505 bp, Homo sapiens
tttagatattatcctccaaggtgcgcagaagagagacaggtgttggcagtgtagaaaaaccatgttgcggctcaaatacacaaggaaaccaggcagtgccctgcttcactctctctgtcttggcctcagaggtggggcatctttgaagcgtaatgaatttatgcacatttttgtgcatttaattgggggaaaatatttttaaatgtctatcactgtgttgacatygtgtgtctgtgtatgcgtgtgggtgtgtgttgaaacaacatcattggaagatagtgtgggctaaagaggctgggctttggagctagacatcctggatttaaatgaaaacccccttgtgtgaccctgaataagtctgacaattcctctgagtcttggatcctttatcctataaatgggaggccgtaatacttgagtaaggaatgggattggctgccacaaagtcaagtatataaagcacctaccaccttgtagggctccaagaacatttgcagcctttccc

SEQ ID NO: 520721 - DNA, 505 bp, Homo sapiens
tttagatattatcctccaaggtgcgcagaagagagacaggtgttggcagtgtagaaaaaccatgttgcggctcaaatacacaaggaaaccaggcagtgccctgcttcactctctctgtcttggcctcagaggtggggcatctttgaagcgtaatgaatttatgcacatttttgtgcatttaattgggggaaaatatttttaaatgtctatcactgtgttgacatcgtgtgtctgtgtatgcgtgtgggtgtgtgttgaaacaacatcattggaagatagtgtgggctaaagaggctgggctttggagctagacatcctggatttaaatgaaaacccccttgtgtgaccctgaataagtctgacaattcctctgagtcttggatcctttatcctataaatgggaggcmgtaatacttgagtaaggaatgggattggctgccacaaagtcaagtatataaagcacctaccaccttgtagggctccaagaacatttgcagcctttccc

SEQ ID NO: 520722 - DNA, 478 bp, Homo sapiens
ctggtgatgctaaaacccacacgctgggattaccagaaaggtcgtttgaattttatctaggagtcccactttaggcaaagtgcaaatgttaacccgattttggatgggagccactttgacaaccttaaacattgaacttagccatagatttagagggatgtatataaaagagggttacttgattcccgagatgtatttttagttataggtgccattcagagagagttaaagtcaatgagaaaaaagaaaagaaaatcttgtatttctcttctggcacatttctttaaataacaagtatgctaattytgagagaaagtagaatttatttttgctagagcatttgtcctgtttgtcatacaccgtagacctttcattttctgtgtttcggtgtccttcatataatgcaaatcatcctgctgtacaaaccatgtgatactttaacaatgagttatatatatctggggctttacaaaagtaa

SEQ ID NO: 520723 - DNA, 537 bp, Homo sapiens
aatgcatttaatacatggctgatattttatctttctgaatctgaaaaaagctttttccaacttgaaagtctaaaragggaaaagtaaccatggcatgtgacaaattagtacatctgaacgggttagaatgaaagatatatgagaaattcaattgactagagtttgcctttttatctgctttatccccttgtatctcagtgtatccctctgatatggtttggctatgtccccacccaaatctcatctagattgtagttcccataatccccatgtgtcatgggagggaccccgtggaggtaattggatcatgggggcggttaccaccatgctgctgttctcatgatagtaagttcattgaggtctgatggttttataaggggcttttccccccactcattcttctccttcctgttatcatgtgaagaaggatgtgtttacttccccttccaccacgattgtaagtttcctgaggcctctccagccctgtggaactgtgagtcaattaaactgctttcctttataaattacctagtctca

SEQ ID NO: 520724 - DNA, 537 bp, Homo sapiens
aatgcatttaatacatggctgatattttatctttctgaatctgaaaaaagctttttccaacttgaaagtctaaaaagggaaaagtaaccatggcatgtgacaaattagtacatctgaacgggttagaatgaaagatatatgagaaattcaattgactagagtttgcctttttatctgctttatccccttgtatctcagtgtatccctctgatatggtttggctatgtccccacccaaatctcatctagattgtagttcccataatccccatgtgtcatgggagggaccccgtggaggtaaytggatcatgggggcggttaccaccatgctgctgttctcatgatagtaagttcattgaggtctgatggttttataaggggcttttccccccactcattcttctccttcctgttatcatgtgaagaaggatgtgtttacttccccttccaccacgattgtaagtttcctgaggcctctccagccctgtggaactgtgagtcaattaaactgctttcctttataaattacctagtctca

SEQ ID NO: 520725 - DNA, 627 bp, Homo sapiens
ctgtgaatttcagatcaaaaaaccaattcaaatgatttataagttcagtgcttactccatgatggtcagcattatattattcaggtgarggacagagaaggacagagaaggcacataaactctagttgggggagaacaattactatacaaaagaattcccccccaaaatggtaattaaggactattataggtaagctagcctacaattaattttgagaaaatttacaaaaaatgaactaaaatatacagccaaggcagaacaagcttaaaatgtttattaagcattctgtttggcaaaactacatgcaaccaccaaccagtaaaaactgaaattcctaatactctgcagagcaagtagccaacttaataatcatttacaaatagaagatataacaggtattaaatatcaatattcctagaaaaagccccttcaaagtaaaatatatgtatcagaagtcatccaaacaattcacaataattagtattatcaaattagtgctatttaactagtactagttttgctcgttagcagttctatcagaaggcactcaaggcactttgaaagaaaatatctgaagttttttttgtctgcctggtaatgacatattataaaaaatttattactaa

SEQ ID NO: 520726 - DNA, 628 bp, Homo sapiens
gctagctgcaaaaatgtaaatgtgtaattaccctgaaataacagacttacagaagcatggaattcttggccttttgttctgttttcatttgttcatggcctgaaagccatgaaggaaactatcactgtaatcacccactgatactccaaagtcctgcttggagagaagcaagaaaccagaaggaaaaagctctttatgcctttgggagctcagagtaaatcttgattaacagagatcaaagtgaaagccaaagtcatttagaacttggtctttttacagagaggtcagaaggatcatttggccagagtctcacactttgaattagaatgtgaataattgggacctcttgtccctgttgatggtagtagcatgacaaactgctttgcaaaacagaggtatgtgtatatactaaacactcatgaatatatagtttacaataggttcagagaatggaatagtatgcagcattgaaaataattrctgccaaacatattgacatcattcccttgataccccatccttcggcaaacacagcaccatttctctgttccatttcctagttaaagttcttgaaaaagttgtcaacattgctgtctcctttctcaccattcattatctcctgaatatt

SEQ ID NO: 520727 - DNA, 529 bp, Homo sapiens
ttctggacattggaaggctttgtaaaagtaactgaagggatataggctattaatcatgattttaaaaattattttacatatataaaatttatatctttctaaaagcaggtggttgaacaattaacctctgcttacacttctccaaaggttcttagcaagtcccaaagatgcctgcaaggcactaggaagtaggtgcagtaatgttcccagctgtggcagtacacagacgctccctccctctcctacatctcacccctacagtaaaactatttctggggaaaatggagaggrtttgagttactcagatattatttttagatgacttctaaacagggatcagtaaatcttagacagcactgccacttttcatacaaacaaaacaactctggcttacaaagagtgtcaatgaaaagtgtcaggatcccaaggtcttgcatcatttaaggagaccctgcagtttgacacttggttttacttcttaattgcctcatctgctccgtttaactttactcaactagacttataaata

SEQ ID NO: 520728 - DNA, 634 bp, Homo sapiens
tgctagttaatccaagatgcacattgagtwttgttacgcagcattattatggcaatagctgactgatgcaaccagttccattacttcacacatactattttcttcatacatgctgataacacctggtgaataagcattttgccaaaattctacatggattgtatcatttattccttatacaaaaacccatgaggtacatgctgttattacccttactttattttatttatttattttttgagagagggtcttgttctgtcacctaggctggagtgcagtggtgcaatcacagctcactgcagcctcaacctcccaggttcaagtgattctcctgtcctcagcctcctgagtagctaggactacaggtacatgcctccacactcagctatttttttttaattgagacaaggttttgctacgttgcccatgctggtctcaagctcctgggctcaagcaatcctcccaacttggcctcctaaagcactgggatcacaggtgtgagccaccatgcccagctaccttcactttcaagatgaaaatataaggtgcaaaaatttaaataccttacccaagcttacagttagtgatgggcaagcatttcaagctgggcagctcagcttcagagcctccgcca

SEQ ID NO: 520729 - DNA, 607 bp, Homo sapiens
gttgggatgctccccattgctgtcccatagagaatgaacagcagcaaggacatgaagttggtaattagcacccaggaggagaaggctggtagaaaggtccaagaatgatgcaagaaggctctccctagcacagtgcattcaaggatgaagaaaacaaaaaacaaaaaacaaaaaacactgtcccagacaggcaggcaggcaggcaacttagggaggacctctcaaaaagctgcagtggaacaaggaagtagcaactggccacaaatgagaacatcccacaccagacatccagggccactctacccccagaacccactcattgagggcacgaaactattcaagcggatggttactacagagaggggtagggacaagcgaaagagttatctctttgcagactgcactacgtccaacacatccagacaataccagctttgctggataactatttttcctgtgtacctatcatgttctgggcaccttgaatgactctctacatatctgttcattaaagcctcacaggagcccactgagatgggtacagttattccaaatgtatagataaggaattagcccagagaastttagtaagttgctcaggttcaca

SEQ ID NO: 520730 - DNA, 549 bp, Homo sapiens
ccagcagccacaaggagaagcaatttaaatctttagttctttgaaaattccaggccgggcgcggtggctcacgcctataatcccagcgctttgggaggccaaggcaggcggatcacctgaggtcaggagtttgagaccagtctgaccaacatggagaaaccctgtctctactaaaaatacaaaattagctaagcgtggtggtgcacgcctctaatctcagctactctggaggctgaaggaggagaatcgcttgaacccgagaggcggaggttgcggtgagtcgagatcgtgccattgcactccagcctgggcaacaagagtgaaatttcatctcaaaaaaaaaaaaaaaaaaaaaaggaaagaaaattccaaagggatctccatttacaacacaaggcccaactgcttggccattgttccagttgctatggctgtgtaacaaatcccaaaacttagctgcttaagacagcattgcattaggygcggggctcctgagtcagggactcttacaggacacagtgggactggcttgtctctgtgacattgggg

SEQ ID NO: 520731 - DNA, 588 bp, Homo sapiens
actgaggccaggagaaaggcagtgcctcatcacacagcaagccaggagtgcctggtgtccatgccatttccggaccctgaaaaaaccctccccaaaaattgtggccccagaagccccagcagcacctctatgttgcctagccwttggctgccttcaactaccagaggcagagctaatttttccttcagccacctggtgtggggaaggagggagattcattaaggattcctcactgagggtgaatttgtcgccaaacccaggatgttttgtataaacaccttctggttcagaaatgcaggcacaggccctgagaaggaaagggggatgtttgccaaagcagaaatggggctcaccaggcatccctcggcctggaccccagcactgcgtctcctccaccttgggacccacagagggctggaccaggttgacccttgacccctaccacatgggcctggatggggagaggctgagggaggctcccacattagcagcttcttggcggtaactggcctttagaggccacccctggccactggaaatgttggggaggggaatcatagtcatttccaagactttgaaatggtcaga

SEQ ID NO: 520732 - DNA, 588 bp, Homo sapiens
actgaggccaggagaaaggcagtgcctcatcacacagcaagccaggagtgcctggtgtccatgccatttccggaccctgaaaaaaccctccccaaaaattgtggccccagaagccccagcagcacctctatgttgcctagccattggctgccttcaactaccagaggcagagctaatttttccttcagccacctggtgtggggaaggagggagattcattaaggattcctcactgagggtgaatttgtcgccaaacccaggatgttttgtataaacaccttctggttcagaaatgcaggcacaggccctgagaaggaaagggggatgtttgccaaagcagaaatggggctcaccaggcatccctcggcctggaccccagcactgcgtctcctcyaccttgggacccacagagggctggaccaggttgacccttgacccctaccacatgggcctggatggggagaggctgagggaggctcccacattagcagcttcttggcggtaactggcctttagaggccacccctggccactggaaatgttggggaggggaatcatagtcatttccaagactttgaaatggtcaga

SEQ ID NO: 520733 - DNA, 576 bp, Homo sapiens
tgcttctagaggatttctcttacctgcaaccaagaagatctcactaggaacttaggatgcaggctgggcgcagtggctcacgcctgtaatcctagcactttgggaggctgaggcgggtagatcacctgaggtcaggagttcgagaccagcctggccaacatggtgaaaccccatctctactaaaaatacaaaaattagccagrcatgatggtgggcacctgtaatcctagctacttgggagggtgaggcaggagaatcgcttgaactcgggaggcggaggttgcagtgagccgagatggtgtcattgcactccagcctgggcaacaagagcaaaactccgtctcaaaaacaacaaaaaaacttaggatgcagtaagtgctcactaaacactacaaggttccctttcttgcccctttctgagtttttctcctcttactttccagctttggtctgactccgatcttgctggtgggctgctgctttcttccttattttctcaaggagcacatttattcttgcggctttatagtccagaagggacaaagcctaagactctatctttagccctgacagctc

SEQ ID NO: 520734 - DNA, 512 bp, Homo sapiens
agatggagagacagggtgtacaaagcctggaggcttccaagtgcttgttgtgctttggggcagtgaggtgcttgtgcaactggagcagagatgggtggggaagtgcagtaggaagcacctggggaaaagcgggcctggttagaaagggtctggcgtggggccccagccagtgtgtgcctgggcagcacatcacagtaacaaagtctgaagagatgacaaagcacagtctgagaggcagccagagtagcrgggagctgtttatggaggaaataggggaggggagggcagatgagagagatttgcggtcttttctataggcctccgtatttgattaggttcagggagttgtaggggaaaacctatgatggaagaaagcactggtgttctttgctcaagagggtgtttgattaattggggtattagcacagaaagttggaagcaagcagatcgggggtggacatttagggggcagttttcagccttcagtcgggaagatgagtctagaacgttgg

SEQ ID NO: 520735 - DNA, 649 bp, Homo sapiens
gaagagtgggaaagtgacttcccttctggtcacacagccatacgtttcagtttgggcctaaacggaggtctccagaatcccacaccattgctgcttctgctaggtcacactatctaggtgagcttcgtaaagagaattcatgtagaattgctcaggaaaaaacaaaaaacaaaaaaaaaaccaagaaataccatcagaatgcttgtcgagccttctggtttaactctggaaatcaaagttgggccaggcatggtggctcacgcgaatcttgctttgcagggccaaggagggaggatcacttgaggtcaggagttggagatctagtgagactctgtctctacaaagaatttaaaaattaagctgggtgtggtggcgcgtacctgtagtcccaactactcaggaggctaaggcaggaggatcttttgagcccaggtgtatgaggttacagcaagctatgatggtgctactgcacttcaacctgggtgacacagtgaggtcctgtctctttaaaaaaaagaaaaagaaatgagagcgggaagttcgtttagggcttccttagagccatggctcagggagagagggatgaattatgggtggaaagatctgtagkgaggctctgttaccttttaaaaaggtatagtgttaccac

SEQ ID NO: 520736 - DNA, 550 bp, Homo sapiens
ggggaaactagggaggcagactgcagatcaggaggcaaggmataagagagaccttgactctagaagactggcagggattgactggagaaatgatttccgtttgcctggtgtgatgggaaagaactgtcagccagtgtatacttctccccatctaaaatacttctgattctgtgggtgaggatttgcaagaaggcactctgccagggggagggacttaactgttggctctgtggctgtttcaggaacactctagggcagaggggggtggggtgggcagagacttttctttttgaaatttgtgagtttgtaccctgacttgcccatttcattcatgtattcatgcaacaaatatttcttaagcacctattatgtgcccacctttctgccaggtgttggagatgcaacaataaataaaagatagaatagtccctgaacttaaaaatcttacatctagctgggtgccatggctcacgcctgtaatcccagcactttgggaggccaaggcgggcagatcatgaggtcaggagatcgagaccatcctggctaacac

SEQ ID NO: 520737 - DNA, 626 bp, Homo sapiens
ctgtggtacccaacattgtcagtgcagacgctgatggcctctgttccccatgcctgcccacatttgtgcaccctgtcactgcagggtgacaagcccaaacacagggagcctccctttcttatgctaatgctctgtaatgacagcttccccagcccaccaggtgtgacagccaccagaggcagcctccactcccactgctgagtttcccaccccgagtcctggacctgattcaggatggagcctggagaaggacagacaccctctgccagccatgaagatcccaggcccacaagttgctggccctctgtagcctagatcttgactctctcctgctcattagggcatcttgtcactgtccactgtcttcatcttcatccaccctactccttgctgtctaaccacaagcgtcttctttatgttcttacatgcactaaaaccttccttgttttctcttgctgttctttcttgcttggagacctttgacacttgctcttcccttccttgatttattcctgtccttcaggactctgctaatgctgccgcttctctggctttcttgttctrtatcgatagccctgtgtttgttcttcaacatcactgtttatttcctagatactattgatatt

SEQ ID NO: 520738 - DNA, 611 bp, Homo sapiens
catggtcctgttgctttctggttccctgggaagctacatggacaaagatgtctgtagggctgaatttagttgtcttttcttcttacattgaaaatttcatttaggcttctgaaagctgtggaattcatagtcttctatggagacggcctcttttttggtggtgtaattggagtcaagtacttatttgttgcttgcaaacttttagtagcraaaataacattaatatgacgggtaagacaggagttttactgagagatcaatgacaagaactggctccagaaagacaaataatcttcatttcacatggcaacctaatgataggtgaggacagatggtgacaaccctcaacctggaattcttcttgaatcaatcaatcaatcaatcaatcaatcagcaactatttattgatctgctgttttggctaaaaacacagaccttggaagcagaagcctgaattcaaaacccaagttttccatgtacccgtggcttatttttgggagagctcccgaacccgtctgagcctcaatttctttctctgaatagtaaggaaaataattgtagttaacccaatgggttcttgtggggaccagttgaaatgtaaggacccagta

SEQ ID NO: 520739 - DNA, 538 bp, Homo sapiens
tgtcttttcttcttacattgaaaatttcatttaggcttctgaaagctgtggaattcatagtcttctatggagacggcctcttttttggtggtgtaattggagtcaagtacttatttgttgcttgcaaacttttagtagcgaaaataacattaatatgacgggtaagacrggagttttactgagagatcaatgacaagaactggctccagaaagacaaataatcttcatttcacatggcaacctaatgataggtgaggacagatggtgacaaccctcaacctggaattcttcttgaatcaatcaatcaatcaatcaatcaatcagcaactatttattgatctgctgttttggctaaaaacacagaccttggaagcagaagcctgaattcaaaacccaagttttccatgtacccgtggcttatttttgggagagctcccgaacccgtctgagcctcaatttctttctctgaatagtaaggaaaataattgtagttaacccaatgggttcttgtggggaccagttgaaatgtaaggaccca

SEQ ID NO: 520740 - DNA, 538 bp, Homo sapiens
tgtcttttcttcttacattgaaaatttcatttaggcttctgaaagctgtggaattcatagtcttctatggagacggcctcttttttggtggtgtaattggagtcaagtacttatttgttgcttgcaaacttttagtagcgaaaataacattaatatgacgggtaagacaggagttttactgagagatcaatgacaagaactggctccagaaagacarataatcttcatttcacatggcaacctaatgataggtgaggacagatggtgacaaccctcaacctggaattcttcttgaatcaatcaatcaatcaatcaatcaatcagcaactatttattgatctgctgttttggctaaaaacacagaccttggaagcagaagcctgaattcaaaacccaagttttccatgtacccgtggcttatttttgggagagctcccgaacccgtctgagcctcaatttctttctctgaatagtaaggaaaataattgtagttaacccaatgggttcttgtggggaccagttgaaatgtaaggaccca

SEQ ID NO: 520741 - DNA, 611 bp, Homo sapiens
catggtcctgttgctttctggttccctgggaagctacatggacaaagatgtctgtagggctgaatttagttgtcttttcttcttacattgaaaatttcatttaggcttctgaaagctgtggaattcatagtcttctatggagacggcctcttttttggtggtgtaattggagtcaagtacttatttgttgcttgcaaacttttagtagcgaaaataacattaatatgacgggtaagacaggagttttactgagagatcaatgacaagaactggctccagaaagacaaataatcttcatttcacatggcaacctaatgataggtgaggacagatggtgacaaccctcaacctggaattcttcttgaatcaatcaatcaatcaatcaatcaatcagcaactatttattgatctgctgttttggctaaaaacacagaccttggaagcagaagcctgaattcaaaacccaagttttccatgtacccgtggcttatttttgggagagctcccgaacccgtctgagcctcartttctttctctgaatagtaaggaaaataattgtagttaacccaatgggttcttgtggggaccagttgaaatgtaaggacccagta

SEQ ID NO: 520742 - DNA, 510 bp, Homo sapiens
gctgctgcccacgtccttaatgctgtaacagcaaacatctgaacaaagaggggaaaagtcagtaaaccatcyggatgtttcgttgatgttttgccatgcaatagaagttatgcaacatctggatgacaacctagtactttgcctttctattgggctgcttgggtattgagtagacacagattttattgtaacatggtcataatgtacaagttcagaatttcaaattcaacccaaatcttttggagcctgaattcattcacccttggcaaaacgtgagtatgtatttttaaagcaataagacttggaaagtttattaaaatgtctcaaaaggcatttggacgtcaaataactctcaaacccaatgtttttgcgattcaaatgaatcagaaacatatggattaaatttcctttaaattgctctcaagattaaaaatcaagggaaaaagtgcccagggccaaatatgttttgggttttgcaggacaaagtatggttgaaactgagctgaagat

SEQ ID NO: 520743 - DNA, 612 bp, Homo sapiens
tgccccaggtggagctaagttactgcatgagttgagtttcctccaagggtagaaaggacacatcatgtcctccttcttcccagcattctgatttttaaggggcactaacccagcatctgagccatgtgccatgtgcaaatacacacacacaagtacatttccatgtctacttactcagttggcaggacatcaaagttcctttccagaggttagataaaggggctgcaggacaagagggcaggaaggatttaaataattgatcaagatgtgcatgtcagagccttgtcatttatttgcttgtttgtatgtttgattctkttgttttgatttttaaccacaaatcaatggtttctttgccaacgctcttgctctaagaaggtagactaatagagaagaaacttttagaaacgagtttcctgagtctattttaagtgattcttaatcttaggtgcatatagaaattacctggggaactttaaagaatattgatactggagtcacatgcctagagtttctgatttaattgtctaggttgcaaaatgtacataataatatctaaaagctctataggtgattataagtgtcaactacgtttgagaatcactggcctat

SEQ ID NO: 520744 - DNA, 287 bp, Homo sapiens
aacagttctttgaggatttcatgtttatatacatttctaattcgacccttgctttatacagaccttgggttgtatattcctatccttytgtggacagtgaaacccctgccatctgttcctgactctgaaagcatcctgaaccattgcagtgtcagctcatacatttcctgcctttatcttagcatcttgagatatatttttctttctttcaagagcttctatgaatttttacataaaaatttatatcttggattttactcaggatttctgtcagtttgttatgggag

SEQ ID NO: 520745 - DNA, 287 bp, Homo sapiens
aacagttctttgaggatttcatgtttatatacatttctaattcgacccttgctttatacagaccttgggttgtatattcctatccttctgtggacagtgaaacccctgccatctgttcctgactctgaaagcatcctgaaccattgcagtgtcagctcatacatttcctgcctttatcttagcatcttgagatatatttttctttctttcaagagcttctatgaatttttamataaaaatttatatcttggattttactcaggatttctgtcagtttgttatgggag

SEQ ID NO: 520746 - DNA, 459 bp, Homo sapiens
ctcaaggaaacattaattttggagcatggttaatattgtcaatgatgtcttgctcacctttgtacttttcacaatgattaacatagtgccttaaacagaagaaaaaaataggaagagaaaaaacaggacaaatgatggatttctctttggggayaatgacatttattctagccattaaccccttattggacatcttcaggtgtttcttggttgcacttgctcccctttgctcaatccagaaaacacaaagaagccttttgcaggctattttagccgataggtctcagaagttgcctatgcactgcatcatgggtaaaatttgggttaaagataattgtaaatacggtattgatatcaactgatgttttcccaacattgcaataatgcttgttttgtttgttggagagtttattactttttgatcaatagaatgtgagatttgtgggtgaaattagcata

SEQ ID NO: 520747 - DNA, 448 bp, Homo sapiens
ccagagactgagaattccttggggttaaggtttggagcaggaggtgggcatcctctggggctggcgctacgccccaccctcgactgtcccgggcctcccctcccaggcacaggagcagagaagactggcgtgtgccccgagctccaggctgaccagaactgcacgcaagagtgcgtctcggacagcgaatgcgccgacaacctcaagtgctgcagcgcgggctgtgccaccttctgctctctgcccaatggtaaccccacggcggccgagcgggaacggggcggggccgcgctgggctgggaggaggtgggagggcccgggttccgggaacaggggcgcccccggacccggggacccccgggaaagtcaaggcggttgaaaccagatccgtcagtcctctccctcgcacggcccmggggtagacaaaggcgtcgttgaaacgcagcca

SEQ ID NO: 520748 - DNA, 609 bp, Homo sapiens
taaacatgaagagtagaagcaggcaggcctggaatatctctgtgtagtctacatggagaggtccaggggattttatgggatggggaggtaaataggtcatggcagagctgaactttaatgatarcaaactgattaaaaagcattggctctagaattagactttgattccaacaccatcttcattccttcctaatttgttattctgggcaagtaatttatctttctgaccttcaactttttcatttgtaagatacagatattaatagaatcttcttctcagggctattgcgaatattaaatgagataatgcatgcaaagcacttaggttggttcctgacatatcctaagtgtttcataaacagtagttattaaaatcttaaaggaaggtattatgtgtcaaaagcttttcaaatgcatgtccacagttgacccagaaattccacttagaatctatcatgagtaaacaaccagaaatacccatagtgattacttactatatcgagaaaacctcaacaacctttaacatttaacattaacatgtaaccattgaagcttgtttaaataaatggtgatctctttatgcaagtaaagctctacacatattagcaa

SEQ ID NO: 520749 - DNA, 608 bp, Homo sapiens
aaacatgaagagtagaagcaggcaggcctggaatatctctgtgtagtctacatggagaggtccaggggattttatgggatggggaggtaaataggtcatggcagagctgaactttaatgatagcaaactgattaaaaagcattggctctagaattagactttgattccaacaccatcttcattccttcctaatttgttattctgggcaagtaatttatctttctgaccttcaactttttcatttgtaagatacagatattaatagaatcttcttctcagggctattgcgaatattaaatgagayaatgcatgcaaagcacttaggttggttcctgacatatcctaagtgtttcataaacagtagttattaaaatcttaaaggaaggtattatgtgtcaaaagcttttcaaatgcatgtccacagttgacccagaaattccacttagaatctatcatgagtaaacaaccagaaatacccatagtgattacttactatatcgagaaaacctcaacaacctttaacatttaacattaacatgtaaccattgaagcttgtttaaataaatggtgatctctttatgcaagtaaagctctacacatattagcaa

SEQ ID NO: 520750 - DNA, 452 bp, Homo sapiens
caagttatattaaacaacaaacttatttgacaagagatagcaagtcttggtgtgctgtgatgacaagctgcctgttgtgaggttcccttctcaagcctggcatcctcttatcttgcccagtcctatgggygtctctttcttctttctctctccctatccttccttctactcccttttcatcttttttttctttctttttttttttttgagaccaaatctcgctctggagtgcagtggcgcaatctcagctcactgcaacctccgcctcccgggctgaagagattctcctgccccagcctcccgagtaggtggtattacaggtgcccgccactatgtctggctaatttttgtatttttagtagagacagggttttgccgttttggccaggctggtcttgaacttctgacttcaagttatctgcctgccttggactcccaaagtgcctgggatt

SEQ ID NO: 520751 - DNA, 518 bp, Homo sapiens
ttattttgttctgtggtcagcctttgctgaacatagcagtctaaaccagagccacagagctgtgagtggtccttgtctgtaaaatgcacttggactgtcctcggtgaccctaattgcatgacttggcaagaacaacaattaaataggatattttggaccaaattctctcagagtacattattttctcaaggtaacctgagttttggggtgacacacacagtgtaaccaaaagtgccactttgcgagggtttgctaactgatgtcctcgtaacctccaaaatcaatttcagggcattgcagagtcaacacatcaatgttcccctgcctgcatttggggcacttgctggctgagtcacctgcaggagtgttctggagttgcctcttagkagatcatgagagccaattgctaaattttcaggaattttgcaagctggttgacacctcatcggtagcttgaaattggaaacggtgagagtatctacaccacaagaatgataaacactacaaaggaagacatt

SEQ ID NO: 520752 - DNA, 599 bp, Homo sapiens
gggaggcagacgttgcagtgagctgagttcatgccattgcactccagtctgggcatcaggagtgaaactctatctcaaaaaaaaaaaaaaaaatgcaccaagagggatcagggcaatgagatagattcaggcaagacctcatagtgcctgggaccagacagacatcctgatccaaggtggctgcaggatgccagccccaagaatgtgtggaaagccacaggagggctctgcggtcacggggctaggccacactcaccctgtttgcttctccccggtttcgtggctccggctctccaactcacccttccccttccttgaggcttatgcttagaggtgtttccacttggacaccaccccattggcacccttgcttgttacaatctgtcagcctctgctccagctgccacctgcccttgatgctttcagggaaattttggctcaaaattaggggaaacaccccaagatgagcctccaaaaccaagaagtgtggttctgttgggaaggtttggaacttgcagggtcagaggccagtcagatggtttctaayaaaacccctttctttctcctctgaggacatcaaagggtagttgtctatattc

SEQ ID NO: 520753 - DNA, 350 bp, Homo sapiens
ctgctctgagttatgttaaaatccgctagagcagcccaaatttttctcagtttgtatagagttcatcccagccccaattttctggggctcctcacatagctacccaaaagagaaaaaaaattaagacaagcctggcaacacacctggwgaagagtagtttactagcttttcaaacaagaatgtcccttttcctaagtcactttgaggtgtctcaatctgatctgagtgagaggcgacaggagtatttttttttttttacagctttacacacacagatgtgggctttgatttccaagtaatataatggaagagaaatctcatactcccccacagtttgatgtcattaatgt

SEQ ID NO: 520754 - DNA, 623 bp, Homo sapiens
gtatatgctaggattccagacaaatcatttttgtccagctaaagttcagggacagccccatgtttttagaccttgatgcctctaacctactgtttcctcagcctggaacaaccttctccctaaaaaaaaaaaaaaatctgttacgtagtaattcagacacatgaaaaggcagaaagagagtttaagaaataattccctttccggtgaagacacaactcaggcagcacttccaagtagcctttcccaggatactcatgaagtatctctgtgctaacctctgtaacagcaattatctctctaactcacctatttcccatgccacaggggaagtgcatgcctctaaagyaggggcccaaccctaggatccctgaacccacagagaaaaacatttgctgaatagaggactcaccaaaaatgtacaatgcacaggtccaagcaatgggtgaaaacacagagcaaagaaaatatgcgcttgaaaaaagccagtaatcttggcatcagacaaaaataactgagtggtggtactgtcagaagtggggtaaactccagagatagaggaccagaggtttctgccaaccaaaaccaggttggggcaggacttgctggacctgcagcagtccagt

SEQ ID NO: 520755 - DNA, 518 bp, Homo sapiens
gctcaaatttacataatctaaactagacccttggcttctcctgccatacccagatctgtcagcacaattactgacacaatctagaaattctctgttgggggccctgttctacattttgtaggatgttgggtggtatctccctggcctccctccattaggtgccaggagcaccccaaccccaggtgtgacaaccaaaaatgtctccaaacattgccagtgggtggggaagtgttacaaaattgcccccagatgagaatggttgactgatatggactatttgaaacacagcaccgagggcttcttctgagatgtgaagtccattcacatccctcctgcgctgaaccctccatccacaccagggtctacgaggcccccgtactgtctccgactccacggactggcctcaccctcactcactgggatgcagccaccctggcctccttgctaatcctacaacacacccasttactcctatagcacaccaacttaatcctaaccctagagcctttaaaatctct

SEQ ID NO: 520756 - DNA, 565 bp, Homo sapiens
tctgcgcatgtgggaagttgcaggctcttggagcctgagtttcctccacgtgtgctttagctacctcataaagcagctggaaataatggatacaaagctctattcaaaactaagttactatttgtatcacaaaaatatttacccaagttactaacaaatatgttgaataggtcaagaccaaaggcagtgttgaactactcgtcagtattattcctcyttaatttcatgtgttccaatcttctcaagagcctttccttcccacaagaatatgaactcttgttgcattatttctatatatcccagcacagtttcctctattctcggccaaggaaaaaccactactttgggaatagatcagaaaacagacacaaagggctgtgtaggctctattacagggtttagtctttattccaagaataacacattaaggttaaggtttgtggcattttctgatatatagcattatagatttgtttaatattaaaatccatcagtccttcctcttgctataggtacaatacttagaaattcccaagtttacataaataaaattatttatttgttt

SEQ ID NO: 520757 - DNA, 600 bp, Homo sapiens
tacaatgagacacttcagacactgcacaaatcaccttcaaggcctctgcccctcagctgtaactgtaaattccaagttcacctcaactgacaatctgtgagaatctgaatggaattgagtgatgaagtgtcatcttaacatctcacaggtgtgatcagcaaacacaaattaatttatactccccaaaactgcttcaacgagcagaagaatttgggagcraccttatgtatcatctgggctgactctatctccaatatgagactaagagatcaactgattaatcccaataccctgaacagtgattagggattaggaaactagaaggtagggcaccaataataacctgtcttttccaggtgagaaggcatcttggacctccttagattcctgtccatttttacacattctaaggctatgtccttcacgtgagaattattaattatatcttcctggtgagttgtatctatcatcattgtgtaatgaccccctttcttccaaattatgctttttgcctcacagactgtgtgtgatattgatttgccttaccgggttgttagtattttctggggatgtcttgtttcacctcttggatgtcaacct

SEQ ID NO: 520758 - DNA, 541 bp, Homo sapiens
gcttgcttgaggattgctgtcatagcaaagcaataacctccagcttgcttgggggaaaggaattgcatgcaaagggctctgggctctatgaggtcccgggttcccctgcttccttccccagttttcattaaaactaaagaagatccttttgtccctttggagcagcaggccagagcagaagaacagccaaacaggagagggacctgtaggttagattaactggaaggcagttctagggattttggctgtggcagtgagacagggtcctragcctgagaacatggccaagagagcaaaatctaagctggataacaacagcttaagaaaccaaggtctgtgagcgttggtggttctagaaccttgagatgagtgagagatgaataaaggggtcttattgaatgggacagattggggggtgctcaaaagctactttaccccattaacacaaagcagaaattgcttctttggaattatctgtcattgtattatttgagtctccactatccatccttcccctcattgccacctcccatatccccaa

SEQ ID NO: 520759 - DNA, 371 bp, Homo sapiens
ccctttgatgacttttaaacttcatttacagaacagaatagctataatcaaccaacagcaagcagtgactaatcttgccacattatcagtgtgaggagccaactcttaaggcataggaatggggcgggggccatccccaaagctcacagcaagtgctgattggctcttggacttgagagtatgccttcagctaggccctgtgagtttatgctcaaaggatcagtgttaggaggtagaggaagaaactgacctccaggcagatacagggcatgcccagttttgaagccattctgggccaagattatgagaccagctctggtctcrcacatattcatcctacctctgtcatttcctggcttgagcaagaccag

SEQ ID NO: 520760 - DNA, 627 bp, Homo sapiens
tcctccattccccctacccaactctccatcacccatccagcagcccatcacctactctgcatcctcatcttgtcacggtatcctccctgggcctgcagcagcagcacacagagaaccaggacargcagcagagtctggggtgccataactctgaccagagcgtgagccctaagtctggccaggcagtcacagacttccctgcagagctgcctgtggagagggaaggaaataaagaaggaatgatcttcagctcctcgctgcctccactggacaagtcagggcagagcaagagtccttgcttcctgcccttgccttctcctggccctgtccttctccatgtaggatagggcttctgcaggaatgatgcctcctctcacatcacataaccagtcctgtgttcttgctaacagagtttttcttttccaaaaggtactctttatttctgctttctaattataaaatgctttatggaaaaaagaaaagaagaaatataattttttaaaaggtgcttagaattaacccatattttattacattatcttttagttcctctgtatatttaatgtaaacaatcttttattttctcatttttgaatcacctatcttttgttacctaccgtctgccac

SEQ ID NO: 520761 - DNA, 488 bp, Homo sapiens
ccaacaaggttgtcaaagtattatcagaatacctgataattgctacctgggctttatatacttagcyacagtttccattattcagaattgcagaatcctgctttccctgtcctccaaaatatctgaataaatcatgcagcagacaatgacagaagtataagaaagtatatgtctttctcatactgaaactgctatttgtcatattcttttttttttctctctcacccaggctggagtgcagtggcatgatctcacctcactgagaacctccacctccagggttcaagtgattctgctacctcaacctcccaaatagctgggactacaggtgtgtgccaccttgcctgctaatttttgtatttttagtaaagacggggtttcaccatgctagccaggctggtctcgaactcctgacctcaggtgatccacccacctcagccttccaaagtgctaggtttacaggcatgagccaccacacctggcctgag

SEQ ID NO: 520762 - DNA, 488 bp, Homo sapiens
ccaacaaggttgtcaaagtattatcagaatacctgataattgctacctgggctttatatacttagctacagtttccattattcagaattgcagaatcctgctttccctgtcctccaaaatatctgaataaatcatgcagcagacaatgacagaagtrtaagaaagtatatgtctttctcatactgaaactgctatttgtcatattcttttttttttctctctcacccaggctggagtgcagtggcatgatctcacctcactgagaacctccacctccagggttcaagtgattctgctacctcaacctcccaaatagctgggactacaggtgtgtgccaccttgcctgctaatttttgtatttttagtaaagacggggtttcaccatgctagccaggctggtctcgaactcctgacctcaggtgatccacccacctcagccttccaaagtgctaggtttacaggcatgagccaccacacctggcctgag

SEQ ID NO: 520763 - DNA, 553 bp, Homo sapiens
tcaaggcttttgagggcccagaaccctcatttggttctggcatctgaagagggtttatattgcaccccagtgggtgaaagaccaggcccccaagggcccactgtacagaacacccagaggtggtccagggcctctgtgctgttatcttggccaggaattgttggagcctgaatcacgtgcacacacgggagctttaacagcacagggaacctactgaaaggtccaatgatgtggctgcatcctttgagcctgtgagctccatgagagcaggctccttgtttccctgctgtagactcagagcctaggacaccctgcaacactcaatactgctcaaatgtttgactgaatggtacaactgaaccagggcctgcaaagacatcacaaccattacttcttgtttgagtctgtttgggctgccaagacaaaatacacagactgggtggcttgaataacagaaatgtgtttctcacagtgctggaggctgggagttcaagatcgaggtgtragcactcaaaatcaaggtttctctgaccctctctccttggcttgcgga

SEQ ID NO: 520764 - DNA, 557 bp, Homo sapiens
tgttcactttcaaaacttaatttaaaacaataaaaaatakacctcgaaatcattttgtttccctatttatttaatgtgatttattctaaatgtgtttcatatcaccataatgtatcggagctcaaccaccacctgttattttgtaggggaaataaacaagacctctctcatcagatgagttaattacactgacatattcactcctccccagagataccataaactaaaatgctgcaaagctttaattcaaacaagcaggctggaaacaagagctattgcagtggtataattttctttgggagaatcaaaagctcaacacagacttgaacttcaggggcaaaatagctggagttgatcaaatggaggcttgtctagggtcgcataataaatctgtaggtgagttgagcttgaacccatttctcaatattatggcactattttccaacctttgtgcttctgagcatcatgtggtcatttttaaaacttgtttcatcccgtcatttctccctcctctcaggtatttgtctggggctggctgtgcacccagaaggccattc

SEQ ID NO: 520765 - DNA, 602 bp, Homo sapiens
gtgattttacccactacaggacccttggcaatgtctggagacactttgcgttgtcacactgaaaggtaagggaggtgcctctggcatctagtgagtacagcccagggatgctgttaaacatcctacaatatagaggacagcttccaccacagaaatgacccaggcccaaatatcgatagtgccacagttgggagactctgatgtaggctaagagctgggaggagtattccagccatgtgacaagaataggctgtttagccaagaaatagccagacggaaatattatcagaaaaagtacaattttttttcaaactgataatcctgaggttgtctttgaagagaggtgaagttaagtttcccaaagcaagagagacaattgcrtggaccttgaaaccctaagtggtgaaagaaaggagtgaagcaaccaggtgtgtgcaagagaaatcgtgttaaaactgaagagagtcaccagctctgaggttctgcctgtcatgactgtgaagaaaggtctatttagagttgctaaacactctaagtcttaaagaaaacttgcatcttgaaattttacatcttggcaaatcctttattttaatcgcttttaa

SEQ ID NO: 520766 - DNA, 560 bp, Homo sapiens
gtgtcagatgtttgagttaaggactttcacatgagattcttttgagctgatagaatctgaaaactcattcttgtggggcttttcatgtgaacatttccctgggtttaatttgggcttcaattaggaattcagataaaacagtctctcagcagattgccaaatgacaggccacaggcaattttttctttaacttctcaagagttcccaccttcyctaaagaggaatttctgctctaggaagccactttaactttacttttgcagtaacaattaagctgcctgtgctgccagccaaggccaagtattcttaaaggatctgtcatagaagccggcaccaagacctaagggagaagctctctattctatgtgataataaccttggccttggctataccaattcattacctggggatacccttgggcagtcatatggacagggatcttgccctgaacccaaggtgggcaccagtagacaaagatcaccctggtgcaccgtgacatttgtcttccctacacttcaaccctatgccataaccttgccatttatggccagttgttttc

SEQ ID NO: 520767 - DNA, 562 bp, Homo sapiens
ttccccaaattctcatggtttgtaaggagacttaaccactccatggtgctgctctacactgatttgtattccataattttccctgctcctctgcacaaagagaattatagagcaggaagagtcttaaggaaacattgattcagcccttgaccttgaagcattaaaatataattttaccattgaggcaaaatagacccagagagagagaaggtgacttccctggggccacacagctataactgataggaagaaaataaaactcgtgactcctctcaatacgaagtctgatttaartaaaaaactaagtgagaattgatactgcttatgaatctgtcgttctttaaacaattgtttgcactaattagtcactgaattttctcaattaaaaataatgtgctgaaaagaagtgaagttgcctcctgagtttatgtcacttatgtgaattcagtgagctcagctataaatggaaaagtgaaaaagaagagggaaataaaaagggcggcacttgagctcactgttctgctcaatttgcttatgccctggagtggccttgaactgaagg

SEQ ID NO: 520768 - DNA, 562 bp, Homo sapiens
ttccccaaattctcatggtttgtaaggagacttaaccactccatggtgctgctctacactgatttgtattccataattttccctgctcctctgcacaaagagaattatagagcaggaagagtcttaaggaaacattgattcagcccttgaccttgaagcattaaaatataattttaccattgaggcaaaatagacccagagagagagaaggtgacttccctggggccacacagctataactgataggaagaaaataaaactcgtgactcctctcaatacgaagtctgatttaaataaaaaactaagtgagaattgatactgcttatgaatstgtcgttctttaaacaattgtttgcactaattagtcactgaattttctcaattaaaaataatgtgctgaaaagaagtgaagttgcctcctgagtttatgtcacttatgtgaattcagtgagctcagctataaatggaaaagtgaaaaagaagagggaaataaaaagggcggcacttgagctcactgttctgctcaatttgcttatgccctggagtggccttgaactgaagg

SEQ ID NO: 520769 - DNA, 517 bp, Homo sapiens
atggtgctgctctacactgatttgtattccataattttccctgctcctctgcacaaagagaattatagagcaggaagagtcttaaggaaacattgattcagcccttgaccttgaagcattaaaatataattttaccattgaggcaaaatagacccagagagagagaaggtgacttccctggggccacacagctataactgataggaagaaaataaaactcgtgactcctctcaatacgaagtctgatttaaataaaaaactaagtgagaattgatactgcttatgaatctgtcgttctttaaacaattgtttgcactaattagtcactgaattttctcaattaaaaataatgtgctgaaaagaagtgaagttrcctcctgagtttatgtcacttatgtgaattcagtgagctcagctataaatggaaaagtgaaaaagaagagggaaataaaaagggcggcacttgagctcactgttctgctcaatttgcttatgccctggagtggccttgaactga

SEQ ID NO: 520770 - DNA, 601 bp, Homo sapiens
gatgcagcaaatttactgcaaaccagaaaataaaattggcttttctatccaagaaggaaataaagaaaamtctgccttatcttactttataaagataattcttttgttttccctgaaataaataataatcatttaaaagcattgggagaggtgtgcagtgactcaggcccgtatcacaacattttgggagtccgatgcaggaggatcacttgagctcaggagttggagactagcctgggcagtatagggagacctgactctttaaaaaaaatgtttttttaattagccaggtatggtggtgcatgcctgtagtccctgctactcaggaggctgaggcaggagaatttcttgagcctgggaggttgaagctgcagtgagctgtgatcatgccactgtattccagcctgggtgacaaagcaaaaacccatctcaaaaaaaaaaaaaagcattaggagaagagaaagagggaaataaggtctaaatgtcccctttctgcatacaatgtgcctgggttcaggtcagatcaggcaggtactggaacttgggttcaggtcaggcaggccctggaacttgggccagttgctcttacctgtccctgaac

SEQ ID NO: 520771 - DNA, 589 bp, Homo sapiens
ctgtagatgagaacaggatgcagcaaatttactgcaaaccagaaaataaaattggcttttctatccaagaaggaaataaagaaaactctgccttatcttactttataaagataattcttttgttttccctgaaataaataataatcatttaaaagcattgggagaggtgtgcagtgactcaggcccgtatcacaacattttgggagtccgatgcaggaggatcacttgagctcaggagttggagactagcctgggcagtatagggagacctgactctttaaaaaaaatgtttttttaattagccrggtatggtggtgcatgcctgtagtccctgctactcaggaggctgaggcaggagaatttcttgagcctgggaggttgaagctgcagtgagctgtgatcatgccactgtattccagcctgggtgacaaagcaaaaacccatctcaaaaaaaaaaaaaagcattaggagaagagaaagagggaaataaggtctaaatgtcccctttctgcatacaatgtgcctgggttcaggtcagatcaggcaggtactggaacttgggttcaggtcaggcaggccctggaacttg

SEQ ID NO: 520772 - DNA, 589 bp, Homo sapiens
ctgtagatgagaacaggatgcagcaaatttactgcaaaccagaaaataaaattggcttttctatccaagaaggaaataaagaaaactctgccttatcttactttataaagataattcttttgttttccctgaaataaataataatcatttaaaagcattgggagaggtgtgcagtgactcaggcccgtatcacaacattttgggagtccgatgcaggaggatcacttgagctcaggagttggagactagcctgggcagtatagggagacctgactctttaaaaaaaatgtttttttaattagccaggtatggtggtgcatgcctrtagtccctgctactcaggaggctgaggcaggagaatttcttgagcctgggaggttgaagctgcagtgagctgtgatcatgccactgtattccagcctgggtgacaaagcaaaaacccatctcaaaaaaaaaaaaaagcattaggagaagagaaagagggaaataaggtctaaatgtcccctttctgcatacaatgtgcctgggttcaggtcagatcaggcaggtactggaacttgggttcaggtcaggcaggccctggaacttg

SEQ ID NO: 520773 - DNA, 608 bp, Homo sapiens
ctcacagccagcgaatggcaggccagggcaccagggcctaggtctgcctgcctcttccatccaccttctgtcatcacaagccttctgatctccagccctctgatctgccccagtgggaccctcctgcgtctctgctctagttgtagaggacccatcaggcacttagagagaaatgartggtgttgtgaacattcgactgtgtccatgtggaatccacacacacagtttgcctgaaaatgactgataggatggaaactgacaagtcatcatccgcttcgggcaccagcgatgactggttaacatgaatattgtgttgatttccgctagatagaagaagatgtcacttgtcgttaatggggtgtcacacgtacacttgcctaaaggaaaatgctcttttggtgattgttctcaattttcacctcattttatagccataaaaaagaaaagattcagcagaaaggatgaatccacctaggggtaggatggaaaggcattcttctcatttatttccttctttctttaccagaacaaccaaaacccagtgaaaatgctggtgcaagtcagaagagggggacctgggttctaagagcagccaggtactctgggct

SEQ ID NO: 520774 - DNA, 584 bp, Homo sapiens
attctagccttatgatctctcaggttcaactcctattttcaatattctggacaaaatctccttgcctatcattgcctctggttgcaccgttcctgaaataacctctgtgaaaaggggaataaagtgctctgattgggtcaaattcctacaacctcttgaagagggtattgaattcattatatccaaatatggggcctaacagtggagaaagggtgctttcctagtagggtattggggtgctgataccaaaataaatgagagtgaaagctgaggagtcagggaacatatgtgccctctaacagtgttagaggcagaaatgttgccatgtttggtttctaataatttgtcraggaaaaattcttgtcctctaagatgataaatcattcagggagcttctcagtagtttgcttctgaactcccggcactagaggcaggcctggacttagagacagcagaaaggggttgcctaccccatgccacgtgcttgacatagactatctcattgactactcacaaatattttattagtagtcctatcttttaaatgaaaaacagcctcaggcaggctaaggaacatgtctaag

SEQ ID NO: 520775 - DNA, 589 bp, Homo sapiens
atgacatgcttttcttgctgatcctgggaagttctctctgaatcaaagaaacgtctcagcagaacccagaagaagaaaattgtgaggtcctttctcatgatacacatgtattagcatcttccacttgcacagggaagtgagacacatcacagttcatttgtttagggttgtagtgtggcataaaccatcatttgatttggaattagaagccgttggttctgatgctggccgagccctgggtggtctccaacccttgaagcccggaagccttgcttgtggttggggataatcactcccacccctctcaactcacaaagctgtggacacgatcacatgagatggtgcgcatgggaagtgtatgcatatctaccagggcaggttaaactgagatcacacttggcgttgaatgtcagtttcagtccagatttgggggaaaattgttgtttttaatgaggcagcaggaacagcctctaaccttatgcttctgccatgtctttctcagactgcaggktccgtcactgaccctcactgggcccaccttgacatcagtttaaagaaagggtgtggagtggggagaagctctgacatt

SEQ ID NO: 520776 - DNA, 597 bp, Homo sapiens
tggctgtgcacccatgccaggcagaatgggatgcactgttggctctggcagatgactaagaaaagagcagagggtagagagggacatggaaagagcctggacccaagaggagactcatgtgtggtcttggctcctaccacgggcactagctgtgactctgggcgaggcctcatgacgccaagttcatcctgccagaaagctggaggacagctccatgaatggcatgggatgaatgggtgtgaaagtgctctgtatgcttctgtgtgtggtctaaaggaaaggaggggttttgcttattattgtggttgttgctgttggcctgggagccaaggaaaatcagaccccgggcactcctttcaatgacctgacaaggaaagctgcagaggtgacagggaggtggtgctccccttaaaagggaacctgaagacacacagtcttggctctgccaagtctcctcacctctcgtaggctttgtttcctcaactgtaaaactgagtggaattgctctgagaatcaaaggagacagcaagtgtaaaaggttcagcacggcgctgggcacagcycagtgtaaaaagttagtattaataatattatatt

SEQ ID NO: 520777 - DNA, 601 bp, Homo sapiens
tatcttcaattaatattttattacttcatgtattatataagaaatttacatcagtgtttttttttccttcctggccattgtgttattattttcatacattttacttctacaatgttgctattatttttgctttaaatgtagaggatgccaccactgaatttcttagtgatgttgatgcctctgtcactactcatttctgatggccttggtgaatggtgggtgggtcccctgggccctctgagggaacacaatcctttggaagatgtctcctggcccctcataatatgtcaaccccagcacgcccatttccctgagccttttaattctttcctctatcatgcagcataggaattcagccatttcaactgtacttagcgtaagtcatcacttcttccagatgtttggagccactaagccagtttgcaccagctctcaggatcctcacctgggtattaaatctcgtatcacaaaagaatggccccaagtcaataaattcttcattgtttaggytcctgttatggcttccttgattaagcaccctcaaatccactcccagagttctcccgtgatcctgctgtcacatgatcctagtttttcggat

SEQ ID NO: 520778 - DNA, 437 bp, Homo sapiens
gaacttccccttgatatacaaagtacagtgaagagtcatgagatctaaatggcacttatcaatgtccccatggatgggaattcacaaataggtaatttggataaacaacatgctggttttcaaggattgtaatgagactcttatctcatwctttaactttttttcccctttaaagaacaaaaacatacttatttgcgacaaagctacaaaacaatccctacaagaagtccaaatcttcctcttcaccaatactctttctggtggaatatttctaccccaggctaattttaaatttcttcagacctttcatgtacagcccagtttgtggtaacccaattgtgtcagatgtatcaacccatccaggtatacgctcagagttcaggccaacatttggccaatgtctgcaaagtctggctaaatagattatttactttttt

SEQ ID NO: 520779 - DNA, 381 bp, Homo sapiens
ttccttgcatctctaaaggcctccyacttgatctactgtgaactcagaaataaagggttctaacaatagccctgtaaattaagcagagcaaacatttggctaaaaataaggtgagggaaggcttactatataggagttacaaatatctcacaatccttgttctcaaactctcacactttacaattgtttgacagattgagtgcaagcagtcatgccttcaatactccatggctccccttgcatctggctggcctagttacttgttttggccaataacatggtagatgtgatggtggaggcttgcatgctccacattctctttaaactcttctgctcccatgtgcgaaagcctgggctagccaggtgggagatgacagagaa

SEQ ID NO: 520780 - DNA, 634 bp, Homo sapiens
gaaagacatgagatacacacctaaccacatttgtctcatccagtggaactttattttttttaagggttgaattgtttcctgaagaggtcatcttagtctaagttgcctgtttctttstttttaaatttgactttttttttttagagacattttaggttcacagcaaaattgagcagaaagtagaaagatttcccatataccccctactcccacacatgcacaggctctcccactacaaaaattccacatccaagtggtacatttgttatactagatgaacctatactgatatatcattatcacccaaagtccattgtttacattagggttcactcttagtgttttatattttatgagttttgaccaatgtataatggcttacgttccccattatagtattatacagagtagtttcactgagctaaagatcttctctgctctatgaaatgatccctgcctcctccacccagctcctggctgattctttcactgtctccatagttttgacttttgcaggatttcatgcagttggaattatacaatatatagcctttttaggctggcttctttcacttagtaatatgcatttatgtttcctccatgtctttttatggcttcgtagttcacttctagt

SEQ ID NO: 520781 - DNA, 622 bp, Homo sapiens
ctgaaagacatgagatacacacctaaccacatttgtctcatccagtggaactttattttttttaagggttgaattgtttcctgaagaggtcatcttagtctaagttgcctgtttctttgtttttaaatttgactttttttttttagagacattttaggttcacagcaaaattgagcagaaagtagaaagatttcccatataccccctactcccacacatgcacaggctctcccactacaaaaattccacatccaagtggtacatttgttatactagatgaacctatactgatatatcattatcacccaaagtccmttgtttacattagggttcactcttagtgttttatattttatgagttttgaccaatgtataatggcttacgttccccattatagtattatacagagtagtttcactgagctaaagatcttctctgctctatgaaatgatccctgcctcctccacccagctcctggctgattctttcactgtctccatagttttgacttttgcaggatttcatgcagttggaattatacaatatatagcctttttaggctggcttctttcacttagtaatatgcatttatgtttcctccatgtctttttatggcttcgt

SEQ ID NO: 520782 - DNA, 622 bp, Homo sapiens
ctgaaagacatgagatacacacctaaccacatttgtctcatccagtggaactttattttttttaagggttgaattgtttcctgaagaggtcatcttagtctaagttgcctgtttctttgtttttaaatttgactttttttttttagagacattttaggttcacagcaaaattgagcagaaagtagaaagatttcccatataccccctactcccacacatgcacaggctctcccactacaaaaattccacatccaagtggtacatttgttatactagatgaacctatactgatatatcattatcacccaaagtccattgtttacattagggttcactcttagtgttttatattttatgagttttgaccaatgtataatggcttacgttccccattatagtattatacagagtagtttcactgagctaaagatcttctctgctctatgaaatgatccctgcctcctccacccagctcctggctgattctttcactgtctccatagttttgmcttttgcaggatttcatgcagttggaattatacaatatatagcctttttaggctggcttctttcacttagtaatatgcatttatgtttcctccatgtctttttatggcttcgt

SEQ ID NO: 520783 - DNA, 622 bp, Homo sapiens
ctgaaagacatgagatacacacctaaccacatttgtctcatccagtggaactttattttttttaagggttgaattgtttcctgaagaggtcatcttagtctaagttgcctgtttctttgtttttaaatttgactttttttttttagagacattttaggttcacagcaaaattgagcagaaagtagaaagatttcccatataccccctactcccacacatgcacaggctctcccactacaaaaattccacatccaagtggtacatttgttatactagatgaacctatactgatatatcattatcacccaaagtccattgtttacattagggttcactcttagtgttttatattttatgagttttgaccaatgtataatggcttacgttccccattatagtattatacagagtagtttcactgagctaaagatcttctctgctctatgaaatgatccctgcctcctccacccagctcctggctgattctttcactgtctccatagttttgacttttgcaggatktcatgcagttggaattatacaatatatagcctttttaggctggcttctttcacttagtaatatgcatttatgtttcctccatgtctttttatggcttcgt

SEQ ID NO: 520784 - DNA, 559 bp, Homo sapiens
gctgtctcaggtatgaacccaaaatgactcaggcaaaaatgtgtatgcttagtgactcagaaactaaatcattaacttggtaagtacatgcacgggtaaggaggaattcaaggagagacttagaacataggccttccagtaatgccactgatgatgactgcctgagtacagcaacgctgaacggtgtcacttctcaggtggaccagtgacgaaccctagaatcaccaagaatctcaaatcagtcattctcaggagcaacaatccacatagggtaatttacaaagaatgctgatttcaattgtttgaatccttacctggtgaaacaagaaaatgtggaaaaagctccttgactttaaaaatacacacccacacacttttttttttttaaagggacaagggcttgccgtctcccacacaggctcgtgkgcggtggtgcgatcatggctcactgcaacctcgaactcaaggattctggcaatcctcccacctcagcttcccaagtagctgggactacaggcatgagccatcacacccggctaattttctttttttcttttct

SEQ ID NO: 520785 - DNA, 502 bp, Homo sapiens
ctacaggcatgcagcaacacacccagctaaytttttttgtagagacagggttttgccattttgctctgggtggtctctaactctgggtttcaagtgatcctccccttcagcctcccaaagtgctgggatcacaagcgtgaaccactgtgcccagcgcaccattgattacattttagactttatttagatagcaccagttttccactaatgtccttcttctggcccaagacctaatccagaatactgcatcgcatttcatacccattctttgttacagcttcataatatgtaaccaatttaatttatttaacaaccccctattgttggacctttgggttatatcaggttttttctgtttggttttctgttttgagatggagtttcactcgtcgcccagactggagtgcagtggcaacatctcagctaaccgcaacctctgcctccagggttcaagcgattctcctgcctcagcctcccgagtagctgggattacaggcatgtg

SEQ ID NO: 520786 - DNA, 639 bp, Homo sapiens
ttcttctggcccaagacctaatccagaatactgcatcgcatttcatacccattctttgttacagcttcataatatgtaaccaatttaatttatttaacaaccccctattgttggacctttgggttatatcaggttttttctgtttggttttctgttttgagatggagtttcactcgtcgcccagactggagtgcagtggcaacatctcagctaaccgcaacctctgcctccagggttcaagcgattctcctgcctcagcctcccgagtagctgggattacaggcatgtgtcaccacaccctgctaattttttatttttagtagagacagggtttctccatgttggtcaggctggtttccaactcctgacctcaagtgatccaccggcctcagcctcccaaagtgttgggaacaggcgtgagccacagcgcctggtctctgatggatatttttaaaaaaatcwctgtggtattcatgtggggcagagggtgagggggaggcagggattagtcctggcaagcaggggtggaggcgggaaggagtggacaaattcaaggtatttctgaggagcagtggaatctcttgaccaaggccttcttcagcagggagatggagccctgtcctgagggactttgcagcc

SEQ ID NO: 520787 - DNA, 308 bp, Homo sapiens
tgtttggctcgtggtggccaagggagcttgacctaagttgaaccaattactccctgtcctgaaattytggacatgggacaaagcgagaattgaatctgtccctccctatgagggttgaaactgagatttcatgctccagagctattggtcgcaatgttgttctaccacttccatgcaagtttctttcacttacaacccaaagagatctgactcaaacaagaaaacgtccctttcactattacagccacccaagggtaagaataacatttcacaacatgcaggagacaagggggaaataaaccatgcaa

SEQ ID NO: 520788 - DNA, 623 bp, Homo sapiens
ttgaggtcaggagtttaagaccagcctggtggacacagtgaaaccctgtctctactaaaaatacaaaaattagccaggtatggtggtggacatctgtagtcccagctacttgggaggctgaggcaagagaatcgcttgaacctgggagatggaggttgcagtgagttgagattgcaccactgcactccagtctaggcagtagagtaagactttgtctaaaataaataaataaataaaatagcactcctrggcactgcagcacacacaggaggggaacatttattatcttacctgttttaaagaaacataatatttgtcagatacccacaaactacagctcaaggcagttcactgtttcaacattagcttgtgctacatcgctttcagtgacatcatatctttgaaaagctgggttttctgtagttacagttataaaaagcaaacatcacgtgaaaatcaatgtagaacagaaaatgaaggaagcaacgtccaatctgattcaagttttgagaagctgtgcagtgcccaacaggcatatgcatacatcccatgactatgtcattctggttgagatggaagaaaattattttttgtttcaatttatgtgagttattttttcaaac

SEQ ID NO: 520789 - DNA, 525 bp, Homo sapiens
ctattgtttagaagcaattcacaagtcccactcacactcaaggagaggagattatatgaagatgtgaataccagaaggtggggattattgggggtcgctcaagtcctgtccaccacaaggaagatgaaataaaaacattttaaaatgaatgaaaactaagagacttcactcagcagacctgcattacaagaaacactaaatgaagttcatcaaatgaagggaagtgacacagatgggaactcatatatcttcgagaagaagtgaaatccctggtgttttgtgaaaaggccatctatgcaaagygacacccaaaaacagaaggagccaagaagccaaagaatgaggctgacaaatccagtttgtcagtaggaacttatagacagaagcgtagtcttgggtgacagcaagacaaaaaatctctgcaccgttactccccagacccagggcttttataccatagggcaagagtatatgtgctctatagagacaattaaaggcaccctccagacaggcaaaaatactata

SEQ ID NO: 520790 - DNA, 608 bp, Homo sapiens
ctcccaaagtgctgggattacaggcrtgagccactgcaccgggccttagggtgggatgaaagaggcttaaccaaggctctctgaggacaaaaacatgggatgaccttcttagctttttttttttttttttttgagagggagttttgctcttgtcacccaggctggaatgcagtggcacgatcgtggctggctgcaacctctacctcccgggttcaagcgattctcgtgcctcagtctcccgagtagctgggactacaggtgcctgccaccatgcctggctaatttttgtattttttagtagagacggggtttcactgtgttggccaagctggtctcaaactcctgacctcaggtgatgcacccacctcggcttcccaaagtgctggaattacaggcgtgagccactgcgcctggccagctttgttttttatcatctttattgatacataatttacatatggtaaagtgcacctattttaagtagacagttcaatgagttttgacaaatatatacgtttgtgtagacatcgcaataatcatgatctggaacatttccctcactccttcctgcctctcgacagtcaattccctcctccagtcgccagctg

SEQ ID NO: 520791 - DNA, 367 bp, Homo sapiens
tgtgaataagacataacttctgctacatacagtattttttaaagaagaaagaaaacccaccaattagagatcttacagaaatgttcagatgtacttgagtcaccaagggcttgcctttctggcagccagtacaaacttctacaaaggattgatttaccycaaatggcatactgagaacttcccatagagctcagctaggaaccctcttcacaccttccagtggagggagggactcccatattccaatagttgtatctttgcaagtaaacccagacatctttgtggatagtgactggtctttattcacctgcatagccttagtgtgtttgatggttgttgaaagctctaagacctgaaattcaccaac

SEQ ID NO: 520792 - DNA, 367 bp, Homo sapiens
tgtgaataagacataacttctgctacatacagtattttttaaagaagaaagaaaacccaccaattagagatcttacagaaatgttcagatgtacttgagtcaccaagggcttgcctttctggcagccagtacaaacttctacaaaggattgatttaccccaaatggcatactgagaacttcccatagagctcrgctaggaaccctcttcacaccttccagtggagggagggactcccatattccaatagttgtatctttgcaagtaaacccagacatctttgtggatagtgactggtctttattcacctgcatagccttagtgtgtttgatggttgttgaaagctctaagacctgaaattcaccaac

SEQ ID NO: 520793 - DNA, 504 bp, Homo sapiens
cctaccaaagtgctgaaattacaggcgtgagccaccacacctggccaacattcttgctcctatatagctgtggagccttcagggagcactccagcatgctaggaatatctggatcactgttaagtgatgccaagcccgagtccttcgattgagccacgggaagaggagcccatataatggtgggaaaccctttatatccagggtttaatccttcgctgtgccacagagagacgtctttggcagtctccagaagaccaggtaccaatttttacaaaatgttttattttgcatatttatcragataaaatttatgaaacaattaactcgtttaaaatgaacaacttagtgacatttagtacattcaaaaagttgtgcaactaccacctctatctaattccaaaacatttccattgctccaaaataaaaccctgtacccattaagcagttactcctcattttcctgttcccaagtctctggtaaccacaaatctgctgtctgtctct

SEQ ID NO: 520794 - DNA, 582 bp, Homo sapiens
ccacttatagaagactagtcaactcagcttgccttatatgtttttgggaaagagaatctccatctrtgggaaaagcagtgggggctttcagaggatgtccacactgtctattgggtgctccagtaagaagggttgagtccagttgctacagccacctgaaaaccttgcagaaggttctccaggttcctcatgaggaaaaaaggaaaagattaccaggcacaattacctttatgtaattggcaaacacttactgggcatcaagtgaatattaggaattgtgcagaataccaaggatacaaaaacacaattgatgcccccttggggcttgatttgataatagatgtatgacaataaatacttgcgttcacagtgatgtagtgacagttcattgaaagcacaaagagaatttctgatgttctttatatctactggaaattacccacgcaagaacataaatgtcaacttctaagatgggaaactcatgttatcctcaaagcaattcaacaatgaatgatagttgtgagccaagaattataacttgctgttgattataacttacatttgtgtcatacttatttttat

SEQ ID NO: 520795 - DNA, 582 bp, Homo sapiens
ccacttatagaagactagtcaactcagcttgccttatatgtttttgggaaagagaatctccatctatgggaaaagcagtgggggctttcagaggatgtccacactgtctattkggtgctccagtaagaagggttgagtccagttgctacagccacctgaaaaccttgcagaaggttctccaggttcctcatgaggaaaaaaggaaaagattaccaggcacaattacctttatgtaattggcaaacacttactgggcatcaagtgaatattaggaattgtgcagaataccaaggatacaaaaacacaattgatgcccccttggggcttgatttgataatagatgtatgacaataaatacttgcgttcacagtgatgtagtgacagttcattgaaagcacaaagagaatttctgatgttctttatatctactggaaattacccacgcaagaacataaatgtcaacttctaagatgggaaactcatgttatcctcaaagcaattcaacaatgaatgatagttgtgagccaagaattataacttgctgttgattataacttacatttgtgtcatacttatttttat

SEQ ID NO: 520796 - DNA, 556 bp, Homo sapiens
acataatttcagaaattgctatactttccaatcagaattgatctttttaaaatgctcaaattatttagagcaaaagatccagtttgactgaaatttaagaaacactttaataataatcagtctcaggtgatatattcagatacatacatttctaatctatgctgtctggttttaaatttgtcattactttgtacactgacataatagaatttgcttatggttgatggctcagctagtttttgtatttcaaaaaaatttaggtaatatggttcttttcagagtttcattttgcttttttttttcatgcgtgttttggttcaacaatgttaactattttacttacagataaaatgtgaatgtaaaatcattaatgtgtttaaattatataactctcagtatcagtaacccatacaaagattttcwtgttactgctctaggtcatcatgattaaaatcaacctcagtaaatgtggaagcacccttaaacttcttccctggatataactggacatgaaaagaactaataacttttggctgatttattaacagtcagggtg

SEQ ID NO: 520797 - DNA, 637 bp, Homo sapiens
gtactgtttttgtcttcaagtatttgttsatctgtgaaataatgcagtttaaaaacatgtcaaagaattactgaaaataactctttactgagaaagaggtatgagttattcctcttcctcgacatcagttgttgctctggctcagagcttttcagacctttgtgggtatctgaattacttggacatcctgttaaactgcagacacttatctaggatgtctgagtggggccggaaagtctgcctttctaagtagctcccaggggatgttgatgctgccacagttccagggagcacattttaactggccaggatgtagtacattcctacctccaggcttaagcacctggaagaagcttgaagcaactgtcatggcattttaatgtattttaactttttgacccaatcacaagcctgggcctttgatttttttttttttttttctactgcctgtaacactagaaagagggacacagggaatgccatgtcagaacaaagtcacaacatggctatgaattctgttcatgtcctctcaacagtgatcattttgtttctgtattaccttgtaatgaaggccatattggaaggtgagtagaggaccgacatataatatcaatttctggcttctacaagaaggcat

SEQ ID NO: 520798 - DNA, 656 bp, Homo sapiens
ccacaattagtcacagtttctgtcactgagaggtgggcagctgttttccgtgttcatcgcatctgctggggaagcaatgccaagcagaaggaaagggagacacctgaggcacagtgtggcctgcacagttgggttaagataattttgagtcaaccttccctgtctatggctgctgaaaactcatagttcccctctctaaagcagcaggattgaggaagggctcacccactctcacctccttccaactttggctttcctccttcctctcatctcctctacttgcaagccattcggcttatacatgtcaatgctgtttcaacaacagactcagtgggtttgcttcccctgaggtcttctttctctctctcctcttcccattcctcctcttaagtctgtctcttgccccagccttagaacagaatccttgttaactaacccttcttctgtactatacaagagaggagttagagtacacrttgggctttgcaacgggtctgctttcatttgttaagcaattgttttttatttggatttcatttattcatttaaatatttatgaagccctactacttaccctcaggatgctaggcattctaaaggaatatcttgctagagaaacgtctccgtttagattgtaccttaagtttcagtcacag

SEQ ID NO: 520799 - DNA, 656 bp, Homo sapiens
ccacaattagtcacagtttctgtcactgagaggtgggcagctgttttccgtgttcatcgcatctgctggggaagcaatgccaagcagaaggaaagggagacacctgaggcacagtgtggcctgcacagttgggttaagataattttgagtcaaccttccctgtctatggctgctgaaaactcatagttcccctctctaaagcagcaggattgaggaagggctcacccactctcacctccttccaactttggctttcctccttcctctcatctcctctacttgcaagccattcggcttatacatgtcaatgctgtttcaacaacagactcagtgggtttgcttcccctgaggtcttctttctctctctcctcttcccattcctcctcttaagtctgtctcttgccccagccttagaacagaatccttgttaactaacccttcttctgtactatacaagagaggagttagagtacacgttgggctttgcaacgggtctgctttcatttgttaagcaattgttttttatttggatttcatttattcatttaaatatttatgargccctactacttaccctcaggatgctaggcattctaaaggaatatcttgctagagaaacgtctccgtttagattgtaccttaagtttcagtcacag

SEQ ID NO: 520800 - DNA, 656 bp, Homo sapiens
ccacaattagtcacagtttctgtcactgagaggtgggcagctgttttccgtgttcatcgcatctgctggggaagcaatgccaagcagaaggaaagggagacacctgaggcacagtgtggcctgcacagttgggttaagataattttgagtcaaccttccctgtctatggctgctgaaaactcatagttcccctctctaaagcagcaggattgaggaagggctcacccactctcacctccttccaactttggctttcctccttcctctcatctcctctacttgcaagccattcggcttatacatgtcaatgctgtttcaacaacagactcagtgggtttgcttcccctgaggtcttctttctctctctcctcttcccattcctcctcttaagtctgtctcttgccccagccttagaacagaatccttgttaactaacccttcttctgtactatacaagagaggagttagagtacacgttgggctttgcaacgggtctgctttcatttgttaagcaattgttttttatttggatttcatttattcatttaaatatttatgaagccctactacttaccctcaggatgctaggcattctaaaggaatatcttgctagagaaacrtctccgtttagattgtaccttaagtttcagtcacag

SEQ ID NO: 520801 - DNA, 513 bp, Homo sapiens
tgtctgtaatcccacctactcagaaggctgaggcaggagaatcacttgaaccttgaacctgggaggtggaggttgcagtgagccgagatcgtgccactgcactccagcctgggcgacagagtgagactccatctcaaaaaaaaaaaaaaaaaaattgatggaaccatttgcttccatattcagttaatggcaaagacagagtctgactcctagcaggatagaaagagagatgaagtcaagagaagaaaaatgttgaaaagccttagaattcttgagtcaggaagaaaatcttggcaatcagtcagtaagatagtgtcagaaagtctgagactaccatcaacacagaggaaatgaggtaggaaactagattagtcaatgccatagcagaagyatctcatgaatttgaccatattagaagtagtaacagcactacctaacatacctcctcaaagctctgtcacttaaaataataagcatatgtttagtccttgaatctgagagttgagaatttgt

SEQ ID NO: 520802 - DNA, 612 bp, Homo sapiens
gaatcactctatgacctaaaatatataactccagtgagcttgggttattatactgttttatactgggttcctccaaaagcagtcctgagacaataatttcaggaaatgtaatccaatagtacaagcacaaaatgcagctactgtccaggctgagggagagaggtagctagagaatgaaccaagaataagcagagggatccctgtgtccccaaggcaaagattgaggtgaggccacttataatactgtaattttcagttatatatacatatacatgtacacacatatatacatacatatatgtgttagtccacctttcctggtgtagagctaccaaaacgcttggaatctctagtgataagagtgtcttttatatgataatgaaaagactggtggctggggaccccgagatagctttaggatgggggctgttcaccagaaagacctaggccaaattagagggttgagacttctgggaggggaggtgaagtttgrgtttatcaccaatggccattaagttaatcagtcatgcatagataatgaagctttcataaaaacccaaaaggactgatgttggggaacttctggatagccgagcacatggagattcttgg

SEQ ID NO: 520803 - DNA, 586 bp, Homo sapiens
tgagcatgggcaaacccagccagcctgtgacagcacctgggcttggccctaaccctgctccaagattgaagcgagcgccaggagcaggaagaggccaggcagcaggagcagacaccctcaagcctgcaggggtagtgggggatttcctgggcccccaagggtgcataatgcagagacatccaggtcctgcacctgggagggtggggcacctgcccgctccatggartgtacaggcagccctggctgtgcttccttgcagcctggggtaagggctccaggtcctcgcttggtccctctctgcccgcccatacctgaccgcactgctccccaactggctgatggctcggctgggctccatcatggtggccaccatgacggcgggctctgggagggttcccacttgtccctggctcccacctgctccatggagcatggcagcgtcagggacccagctttgccttccaccctgcaccttccccacagcagcagcgggtgacagtggtgacagggagccagggtctggagcggcagaggctccaggtctggtggcagatccaacctggctgtgtgagggtgatggcggtgt

SEQ ID NO: 520804 - DNA, 620 bp, Homo sapiens
tgccatgtgtttttattggcttcagtatagattttctatcaaataaatatttctggtctacctaatggctaaaaatcccttccyccactttgccaatttcttatgatcctgtgaagttggattcagaaataacacagagacagtggattctgattatttgtaaactattacagatttattttccagtctttagcaataaatgaccaataacttttctttgttactgagaatgtatgaaagatgcactaaacacagaacacgctggttggagcagatgaataataaactattttctatttatttctaaactaccagctcttggaaactgatcaaatggtggtcaatttctaacaaggcagaccccgggtggtaagcaactctaaaaatcagactgtagacagttagactgtgaaattcttagtataaatgatacattaggtgacagcttcctacctctacttaacccagactcctttggtggggtggaggtgagaagaacaaccctatgaagcaggtgctttgcctaactcctttcaccttaagcagggtttctcaacttcagcactgttgacatcttgggctgagaagcctttgttgttgggagctgtcctgtgtgcatt

SEQ ID NO: 520805 - DNA, 591 bp, Homo sapiens
acagctagccatttggttcagagcaagttattacataatccttctcctactgatatttaaaaccacctttaaatataagcgataactacatatatttgggtcagtttctgagcttcctattttattctctaaaatgaccattttcactgatatcaaactgatttatatggtggtttttcttttctttttttcttttcctttttttttttttctgtgagacagtcttgctctgtcccccaggctggagtgcagtcatgcaatctcggctcactgcaacctctgcctcctgggttcaagtgattctcatgcatgcttcagcctcccgagtagctgggattacaggcacatgtcaccatgcccggttaatttttgtatttttagtagagttagggtttcaccatgttggccagtctkgtctttaactcctgacctcaagtgatctgcccacctcagcctcccaaagtgctggtattacaggtgcaagccaccacacccagctatataatgctttaatagctcataaggttggtgaccactttcttcattctcatttttaaaatttctctggctatttttacatgtttatttctc

SEQ ID NO: 520806 - DNA, 551 bp, Homo sapiens
gagctgctcttcatgaagaagaaccacaaagaggaagtaaaaggcctataagcccagattgccagctctgggttgactgtggaggtagatgcccccaaatctcaggacgtcagcaagatcatgacagacatgcaggcccaatatgacaagctggctcagaagaacagagaggagctggacatgtactgatctcagtagattgaggagaacacyacagaagtcaccacgcagtccaccgaggttggaactgctgagatgactcacagaactgagacatgcagtccagtccttggagatcgacctggactccatgagaaatctgaaggccagcttggagaacagcctgagggaggtggaggcccgctatttcctgcagatggaacagctcagtgggatactgctgtacctggagtcagagctggcacagacccaggcagagggacagtgccaggcccaggagtaggaagccctgctgaacataaggtcaagctggaggctgagatcaccacctactgccgcctgctggaagacagcgaggacttcaatcttgg

SEQ ID NO: 520807 - DNA, 640 bp, Homo sapiens
ctactgattatggttattattctttcagtaccttgttggattctatttcctagagttttatttaagtgtctcatgtatattaatagatgaaattgatttatatcttggggtgacttccagattttacacacacacacacacacacacacacacacacacacacagattgtgttcaaactatttctwattataatctctgtgggtactgaaagaatcatgcatttatggggatgaaaaaaattacctttgagagcaagcattcagtgtacccaataaagcagaaactcttgcataatcacaaataaaggtgccacagaaatttatgggaaatgcggtcttgcattgcccagaggaagtcaccagggacagatgtttagtagctcctcctgcacacatacagttccattttagggaaagaggttgctcttgctctgtctacagccttatgggggagactccacatctttgtccatccaaagtattggtcctaggaaccaaactgaaagtgccttgaaaaggacatttgcatagagattgggggtggaagggggagaatgtcaggtggaattgacttgtgctcctgtaaggtagaaacaacacactgaggaatcgtattaagtgctcccagactgtcctagac

SEQ ID NO: 520808 - DNA, 540 bp, Homo sapiens
caatctcaaccttctctaaagacattctctgaagacacatgctttattttccactcattctttcctgatctgagctggccctacactcatattatatccatcattgtctttggcttctaaggatgtgctgattgccctatagattgacatacaaagttcagaacgataaaaatggaaaggcattatagtattatctaaatatgcctcctcaatttaaagattaataaaactgggctagactaggtcacacagttggttagaggcaatgtcaagattagaagttgccccattctcagtgtgctgttcatcattccaaataaaatcaaaataagatatctttaaargtttctcactagaaatgatgatgaagagagcaccatcaataaaagagacagacgtgcctgaaagctccttccctgccctgccctttccagtttcctgtggattctcaagaccatgaaaggttagaaatattagctgcagagagaaaagaaacataacatgaacatattttcctatcagtggattttcccctacaag

SEQ ID NO: 520809 - DNA, 540 bp, Homo sapiens
caatctcaaccttctctaaagacattctctgaagacacatgctttattttccactcattctttcctgatctgagctggccctacactcatattatatccatcattgtctttggcttctaaggatgtgctgattgccctatagattgacatacaaagttcagaacgataaaaatggaaaggcattatagtattatctaaatatgcctcctcaatttaaagattaataaaactgggctagactaggtcacacagttggttagaggcaatgtcaagattagaagttgccccattctcagtgtgctgttcatcattccaaataaaatcaaaataagatatctttaaaggtttctcactagaaatgatgatgaagagagcaccatcaataaaagagacagacgtgcctgaaagctccttccctgccctgccctttccagtttcctgtggattctcaagaccatgaaaggttagaaatrttagctgcagagagaaaagaaacataacatgaacatattttcctatcagtggattttcccctacaag

SEQ ID NO: 520810 - DNA, 566 bp, Homo sapiens
ttcaggcagcagacatacacccttaagcaaactgatgggggacccatcacactacagtaccacacttgcttaaccatattatgaatgggttggagaattctaagctgtcttttcccttggctggtgacttctcatatctcatactcacaattgctacccttaaaatagggacaagattcatcccactcaggcttttgtatttaaaatagtagagctcccagagctcctaggacaatacccacctaataaaaaataggtgctccataaaagacagttaattttaacttctctcattttacagagaaagaaactagggccaaagagggacagtgagtttttcaaggccctacaataatttttatgagctgaggctgaagcctaggtcccctggctggctgccaattccctcccactaggagatctcccaccaccccttattggctccatctttcctcctcctacyttgccttccacccaaatggcccttcaagtgaagcaagcactgattccaggtcttggttgtctccttcctttgtgtgctccattgaggtgaccaaattgctagt

SEQ ID NO: 520811 - DNA, 499 bp, Homo sapiens
aaaggcctatgaccacttgtgggccagtgcaggggacttagacctcccatgggagagtggggtcggagtgggtggtcttaatggcctttgcagccctgagttgccaagcccctgaccaaatcctggaagatggatttttgcctctttatttgacctccctagggatcgctgagtttgcagtttgagtttctggttcctgggccagccagtgggcaaggaaggctgttagactcaggaaggaaagagctttggagtcacyagacctgggttcaaatctctaccatgtgccttacaggtgtgaccttgggtaagcccctttacctctctcagcatctattttctcagttataaaaatgaggatagtaacctcagcttcagagggaaatatgaggattaaaggcaatgaggagtgtgaagaggctggcaaggatgtgaagcacacgtcagagtgtttgagggtgtggattcccatctggattgaaccctggctctgagaacc

SEQ ID NO: 520812 - DNA, 286 bp, Homo sapiens
ctgctgtttgtggaggctgtaccacctgctgggaccaccctgggctgagcccattgtaaacatccatttatcaaagccccatcacagccctccaaggtaggcactgttattatcccattttayagatgaggaaacacatccatgtccatcctctattcttcctctttgcaacagaggaaatggccctcctcttttctgagcctatgcacaccttcctggaatctgagaaagcttatactatggattctcccttctcctgccttattaccttcagccctctctaaga

SEQ ID NO: 520813 - DNA, 623 bp, Homo sapiens
gtctgaagggaaatccccagtggtgggactggaggtgccgtggagggtgggcctgtgtcctggtgtccctggcgtccccataccccctccgaggcacagccacagtctctgggtcctgagcaggggctgcagtcacagccaggccgtgggggggccagggaggaggggctgctctccatagtgtgtcgggtggggagtggcccacctggccttggctttcccggggcaggtagggaggggcctgggyagggcggggcagggagggatgaggtgcagactggggagagtgcagggtgtgcagcgggggctgggatgccgccgaataggggcctgtggctcccacagggaggccccttaggtgaagaggaccagagtgaggtcagccctggtccacagccaccccgccctggactccccgggccagcacccgacctggccgccagcgtgctgaggacagacctgctgggccgcgttggcaggggctcaccccgtcttcccgcaggaaagcgccttggcgggactgcttccgccagcttcccggccagacccaagggtggagctccaggccacgttcccatggagggagcgcctggtcccctggggtggtctctaatttgggccac

SEQ ID NO: 520814 - DNA, 641 bp, Homo sapiens
caggtggagctgcgagcctccagtgctcagccctcggcggggcctgcctggcagccccacacacagagggcatcggggtggcgggggcatgtgttacacgggggccctgggtctgagtcatccacttcctccgagtctggatgggaggacccagcgcccctcctccgccccctcctgatctggaagcataaatggggaggggagagcccgctgggtagaaggaacagggagtggccagggtaagtccctactctcagagaccctgacatcagcgtcacctggagcagagtggcccagcctcagactcagagcaccaagacccaggcccgcaggcctggacccaccccggtccccccgtcccagctccattcttcaccccacaatctgtagcccccagccctgccctgtgaggcccggccaggcccacgatgctcctccttgctccccagatgctgagcctgctgctgctggcgctgcccgtcctggcgagcccggcctacgyggcccctggtgagtcccagccggggtccaccctgcccctcaccacattccacagatcagggcctgggtgggttctggggaggccgggctggcccccacacagggaagggctggtcccaggcgtggggcggcttcttggt

SEQ ID NO: 520815 - DNA, 428 bp, Homo sapiens
cactgctgtgccttggggctccggcagcaaatgcctgtttcagcccaggtggcagacacgttctggggctgacaggggcagcagaggccgaggcccaaccctacagcctctcctccagaagtcttgctttgccatgagattgtaaccagggtgattgtggtggtgtgggaacacaagggagcactgtgaatgggtgggggtgtggggggtgcctgtgtgtgtgtgcatacgtgtgtgggcatggggtgtgcacatgcctctgtgtgcatgtatgtgtgtgcatgtgtgagtatgtgtgtgcatgtgtgtaagcatgtgagtgtgcatgtgtgtgtgagcatgtgtgtgcatgcatgtgtgcatgtgtgtggatgtgtgtgtgcctgcrtgtatgagtgtgtgcatgtgtgtacgagtgtgtgtgtatg

SEQ ID NO: 520816 - DNA, 356 bp, Homo sapiens
agaccctctaggtcagggatccctctttgatgtggggaaactgaggcactggtgggggggagttgcctgaccacccaccaggatgtggcctcccgggcacagacgtggctgtctgcacgccagcacgtggggtagccaaggctcagaactggaggttcagtgtttttcctggtgaccaataaggacaacaccagcatgcggggccagcagtgcacccacggccggacaccctcctccctcacggcagccgcacacctggagggggcgcctcaggggaggcaggacagtcccaccccacataagggagcgrggtctgagtcacaagtctccggcccagggtgcccctcacagggcga

SEQ ID NO: 520817 - DNA, 212 bp, Homo sapiens
tgccgcagcgcccaccccagcacctgcccaggtctgcctccaactgcagtgctgcaaaagggacctgcgcgtagtgggctctgtgccgttgtccaggctgcatcctgctttaggcacggggccctcaccacagttctgatctgtcccygatctccccccgcaccccactgtctgaatacagaggccccctcctctctactggggagcccaga

SEQ ID NO: 520818 - DNA, 537 bp, Homo sapiens
cctggtgtgaatccggtaggtggacgggtcggtgtccttcctgggggaggacagacccaggctactcaagggacctggtatggggcggccccactcccacctccccttggtggggtccccggcccaggactcaccggaaaatgcagtgagcggcggtcagcacccactgggggtggatgagggagcccccgyagatgggcacccaggaggcccagtggtagctatagatcctcaggctgacctgccacgaccacttcccctggggtgttgtggccccccacaatgcccaccaggtcattctcggggacgggagctgggaacaacagaaggaggtcagggagcccggcctctgccacccgagcctcaccccacgcctgccctcgggcaggagccgggccgtgcacgtgtcccctggatcctggggacggggtggcagagcccctgggaagggagggctgtgtggggtcgggactcacctggactcccagtgctacagctccccagggaggagacagccaggaacagcagcagcagcag

SEQ ID NO: 520819 - DNA, 580 bp, Homo sapiens
catcacttctgtgcagcctcgcccctccagccaccgccaagcacacccaaagcagcctagatgagccaaggtcaccgggattccatgggggaagggagagcagagactcagaccatctggcttcctccgacccccggccacaccccctcgctcgctcccgcctggaatgacagctcgaggagccctcccggcctcagagcaggtgcccttgccggctcaacaggtggcctggtcctgcgctttctcccggggccaacggaacattttaatgacggggatttgaggcacctcaggcagccctgaggcttcccccgggggtgagtaggggccggtcacggcrgagcaagaggactgggtgcacagggtggcagtgccctgggcgggagggctagggggaagatgagggacaccaacagcccagcacatggacaagaggctgagagggcaggctctgggaggaggctccggaggacttcttggaggaagagtcggccaggctgagcctccatgaacacggccccccgaggctgtgggagggggtgagggactgtagaggcggcgtctccctggcggccccaga

SEQ ID NO: 520820 - DNA, 580 bp, Homo sapiens
catcacttctgtgcagcctcgcccctccagccaccgccaagcacacccaaagcagcctagatgagccaaggtcaccgggattccatgggggaagggagagcagagactcagaccatctggcttcctccgacccccggccacaccccctcgctcgctcccgcctggaatgacagctcgaggagccctcccggcctcagagcaggtgcccttgccggctcaacaggtggcctggtcctgcgctttctcccggggccaacggaacattttaatgacggggatttgaggcacctcaggcagccctgaggcttcccccgggggtgagtaggggccggtcacggcagagcaagaggactgggtrcacagggtggcagtgccctgggcgggagggctagggggaagatgagggacaccaacagcccagcacatggacaagaggctgagagggcaggctctgggaggaggctccggaggacttcttggaggaagagtcggccaggctgagcctccatgaacacggccccccgaggctgtgggagggggtgagggactgtagaggcggcgtctccctggcggccccaga

SEQ ID NO: 520821 - DNA, 405 bp, Homo sapiens
ggtggtagcactgggccctgcgctgtgctcakgagcgtggaacaggaggggctgtctaactctgccatggcctcacctgtgtgcttcagcggctttggcgcctgcgtatccagagcctggtgtttttacctgcccccccatctccgccccccgccaccggcccggccctaaggaggaaaagctactctccctgcctgccagaccctttccagcacaaagtcctgagaatgtgaaaagagccaggcttgaaaaatggcttttctcagctttgcacaagcagccctggtgccccagcagcctcctcaagctctgaccccgtctgggcagggggtctcgtgtcccgacacatcggtgggaggtgttcctgcacctgcgccatcccctcactgtccccggagcacggca

SEQ ID NO: 520822 - DNA, 542 bp, Homo sapiens
tgagcacccactgggggctgagcagtgacccgccgcacacgtgcaccctccgcaggcggaggctggcctgccatggccatgcgccggccggggcagcgtgaccccccacgatccggccgcctgcatccgaaacctgcggccggccacaccctaagtcgaaggaggaaggggtgcctggtggggatcccaagaaacccactgcacttcctccatgaagccttccctgaccacacctccctgccttcttggggactttgctcttcagctctctcgtctgccagactctccccagaagcatcgtgggtgcagcagaaatgacgtctcaggagcagtgagcgcgcctggggctcaggtcgtcctttctaagcaccatgctccacaaactaaccagggctcccggaggcggtggaaaggctgcagagggcccctaggcggctagaaaggggctcagaacggtggagcccccgagaaggcccggggtgctrggggtggctgcctagtgggccccggttttccttcaggggtggtggagatattcgaag

SEQ ID NO: 520823 - DNA, 591 bp, Homo sapiens
gctggtcctggtagtagaggtgctgctcccgcagttgcaccctgagggcggccagatccttgacgtccctgggcagcggaggatcccactcagggccctgggcagcccccaggagcacccgggagccagggctcacatccagcccttccccacccctccaggccccgggagactcacggtcccacgcagtgcgctgcggtcagcacccactgggggtggatgagggagcccccgcagaagtgcatccagtatsggtcgcggactctcaggctcacctgccagggccacttgctcctgggggcctcctgacccccaacgatgcccactcgctgcagggcctggcctggggctggggcaggtgccaggtcaggaccaggaagcagccccaggcctgggcccagcccttccctgtgtgggggccagccgacctccccagaacccacccaggccctgacctgtggaatgtggtgaggggcagggtggaccccggctgggactcaccaggggccgcgtaggcgcggctcgccaggacgggcagcgccagcagcagcagattcagcatctggggagcaaggaggagcatcgtgggcc

SEQ ID NO: 520824 - DNA, 593 bp, Homo sapiens
cagctggtcctggtagtagaggtgctgctcccgcagttgcaccctgagggcggccagatccttgacgtccctgggcagcggaggatcccactcagggccctgggcagcccccaggagcacccgggagccagggctcacatccagcccttccccacccctccaggccccgggagactcacggtcccacgcagtgcgctgcggtcagcacccactgggggtggatgagggagcccccgcagaagtgcatccagtatcggtcgyggactctcaggctcacctgccagggccacttgctcctgggggcctcctgacccccaacgatgcccactcgctgcagggcctggcctggggctggggcaggtgccaggtcaggaccaggaagcagccccaggcctgggcccagcccttccctgtgtgggggccagccgacctccccagaacccacccaggccctgacctgtggaatgtggtgaggggcagggtggaccccggctgggactcaccaggggccgcgtaggcgcggctcgccaggacgggcagcgccagcagcagcagattcagcatctggggagcaaggaggagcatcgtgggcc

SEQ ID NO: 520825 - DNA, 373 bp, Homo sapiens
caggacccagcacgcaccacgggctggtgaggacggagctgctgcctttctggaacagacacagggcgtgtgtggggaaccttgcttcacctgtggatatacagagccacatgccaacgtgtgaatggagactggtcccagraagtggcagctctcgggaccgccctgagccagggcccaagcacgggcagtgcaaggacaggaaacggtcaaagctctgctgttaccacaggctgggaacaggactctctgtcccagcactgtcttgggcgtgtgcccatgaacagtttgcacggatgtgggacacctgcattcacgaagctttggagcctgggtaggctgggaatcccatgctgggtttcgggtctctgga

SEQ ID NO: 520826 - DNA, 345 bp, Homo sapiens
ccctctctctccttctctctytttcctatagaagagagatgatgtgtttgtaaagtgctttgagctccttggagatagagagtctataaatataagctgttatcactgttaccatggaaacacacacagacaactgtgctctgtttctgcatttgctgagcataattctggccttcttgccctgctggctgttaaacaatcaatggttttacaaagctcaacagccaggtaataggtggagcctcaaggctgaacttatttgctattcaactcttcttcatgtgaattttcaaaaactgtgtttctgtttgctaaggtagaggatcgtataagattggccagagc

SEQ ID NO: 520827 - DNA, 325 bp, Homo sapiens
ctgttaaaccagggatgcaaataatgacaggcataggtatgccacccaacccaggaccctgatctgtaacaagggagaattccaatgagctgcaaaaataatattctacccatttcctaaatttactccaactcctaactcctcaactttacaaccagagctggcaaaatgttggaataaagagagttatgagtttgcacccttctgccaatttgtgaccrtctgaaaagcaggggctatatctttttcattattgtctccacagggcctagcacagtgcctgcacatagcagatgctgcgcagaggcctgtggaaaaaaaaaat

SEQ ID NO: 520828 - DNA, 605 bp, Homo sapiens
tttaggtctctattacagcagcttggcttacatcttgcctgacacaagaattgagggctagcttatagatggagcttcccttgagtcagtgctcactccagtccactttgctatagctgggtggaaggggcaccgtagtaaaaacagcagtttaggtaatgcttctggcacatgtctatagatcatatcatgaggccagttcaatgaagaagcatttgaactcagaatctgtcaggttcctgaaaatcctctaccaggagtatgttagctctggaagcatcatattctaaaatcctcagtgattatgttttctcagtgcaagtcatcaattctcyggcatccagtgctcatatcatgtctaattacagcactggggagttttatatatacctgtagttctggttctcaaacactggtgcacatcagaatcaaccgacctccacccctagaatttttcactcagtagttctagaatggggccagagaatttacatttctgctaagttcccaggtcatgctgatgctgctggtctggggaccacactgtaagacccacttagacactgcatgtactactgccccatgtgatgtagggaacgcacaca

SEQ ID NO: 520829 - DNA, 633 bp, Homo sapiens
ctggcatgctggggctgagtaaccacacccttcccggctgcaacttgtrctaagaatggacaatagctgtctaaatcccacaagcccccaaagaggctgacagatattgcagccatgattgcaacaggaagtagagaagggtggtgggtgggcagaatattaacagaaccagcccttgccaactgggcaacgtcacagactgtgccatggcaaggcatgcatctgtttctgtgcactctttttaagatttttctccagctctatgcccctgtcatttccacagccatgtctcccgaccccagtggcctgaactcttctaatggtttgctcttcgaatggcttgtctttcttaccacaaaagaaagcgatttgatcttctcattggagaataaaatatgagacaatgggccccctcctaggattcgtcttggaaaaaggctttgacaatactaacacaaaagagcacatccatatgtgccaagtttctctgcatcactgtggcataagcagtgacagaacctctaatttttaacaggggacaagtaccctgagcaaagactgtatttccgagcatcccatatggctaagtgttgtcctgaggccaagttctgaccaatgatgtaggagcagacg

SEQ ID NO: 520830 - DNA, 501 bp, Homo sapiens
gcatgcatgtgggcctctgctctaccacctatgagctctggggcctgacacgagttayttaacctctccgagcctcggttatcccatgtgtaaggtagagaaatgatgcctatcttgcaggttgtcttgagaattaagacaatgtgtgcccagcacccagtacacggtcagttaattggtacgttctgttgttacgacccccggctatccagccccctggcctctccggctgtgtgtcaggaagggctctttgctcccgttgttctctttccatttgcctccccctcttcagccctggcctagcctcccaaagcctgactctggttccccaactccctgttctggctcctgggtggggaccccatctctcagggaccctcccagctcccaagctgctgccctgcctttcctgggggcaaaaggggcaggtggcagtttctttttcagcctcagaactggttttcctcaatcctggggggtccttggacctagaagggaaca

SEQ ID NO: 520831 - DNA, 321 bp, Homo sapiens
ccttggtttctgggggcagggggttggggaactcttggtcgccagtttacctgccataggtcccttttcagccctgcctcccccaagttccatcaacacaaactcccagggggtcctccatgcctggcctggccctctccttggtgctgatgagacacaactctggccccggcggctggcctctgaggggccatggtgcttgcggggcttcccctatcccccaggyctgcccaaggggactctcaataaactctagctgaaggcagtggctgtggtgtggactggattcaactgaggggccactcggggcttgagaagcag

SEQ ID NO: 520832 - DNA, 547 bp, Homo sapiens
gtctcactctgtcacccaggctggagtgctgcagcacaatcatagctcactgcagcctcgagctcctgggctcaggtaatcctcctgcctcagtctcctgagtagttggcagtggctaatttttttattttaattttttgtcaagactgggtctcgctatgttgcccaggctgatctccaactcctggcctcaagcaatcctcccactttggcctcccaaagtgctgagattacaggcgtgagccataaatgtgtgtcgaatgaacaaatgaatacacacgcacctgagcagggatctggctcctatgttctacgactctaatttttgctgccctcctcccacctcccccagagcttgtcaatccttcctctgcctgggccttgatttctccatctgcacaacaagggtgcattatctctggccctgccattcagggactgtgggaggaacaaagaggaaagctctcacggatgcagacccagtggyttgggacttgggcattagagtctgacatacaggggcctggaacttggctccatcgttaac

SEQ ID NO: 520833 - DNA, 367 bp, Homo sapiens
gcttctcgcagaaacatacagtcctgactagtgagctgagatggggctgttggggagccctgggtsggggggactcgggagtggggaacggcagtaatacaggagcaagagtgagggctctggaggttcaaatccaatcctgttcctgttaattgctagttgtatatctatgtgtgtttttgctttttagagacagggttgtgctctgatgcctaggctgcaatgcaatggcacgatcacagctcactgcagcctccatctcctgggctcaagtgatcctcccacctcagcctcccaagaagctgggactacaggcacgcacaaccatgcccagataatttaaaaattttttatagagatagggttt

SEQ ID NO: 520834 - DNA, 367 bp, Homo sapiens
gcttctcgcagaaacatacagtcctgactagtgagctgagatggggctgttggggagccctgggtgggggggactcgggagtggggaacggcagtaatacaggagcaagagtgagggctctggaggttcaaatccaatcctgktcctgttaattgctagttgtatatctatgtgtgtttttgctttttagagacagggttgtgctctgatgcctaggctgcaatgcaatggcacgatcacagctcactgcagcctccatctcctgggctcaagtgatcctcccacctcagcctcccaagaagctgggactacaggcacgcacaaccatgcccagataatttaaaaattttttatagagatagggttt

SEQ ID NO: 520835 - DNA, 367 bp, Homo sapiens
gcttctcgcagaaacatacagtcctgactagtgagctgagatggggctgttggggagccctgggtgggggggactcgggagtggggaacggcagtaatacaggagcaagagtgagggctctggaggttcaaatccaatcctgttcctgttaattgctagttgtatatctatgtgtgtttttgctttttagagacagggttgtgctctgatgccyaggctgcaatgcaatggcacgatcacagctcactgcagcctccatctcctgggctcaagtgatcctcccacctcagcctcccaagaagctgggactacaggcacgcacaaccatgcccagataatttaaaaattttttatagagatagggttt

SEQ ID NO: 520836 - DNA, 367 bp, Homo sapiens
gcttctcgcagaaacatacagtcctgactagtgagctgagatggggctgttggggagccctgggtgggggggactcgggagtggggaacggcagtaatacaggagcaagagtgagggctctggaggttcaaatccaatcctgttcctgttaattgctagttgtatatctatgtgtgtttttgctttttagagacagggttgtgctctgatgcctaggctgcaatgcaatggcacgatcacagctcactgcagyctccatctcctgggctcaagtgatcctcccacctcagcctcccaagaagctgggactacaggcacgcacaaccatgcccagataatttaaaaattttttatagagatagggttt

SEQ ID NO: 520837 - DNA, 352 bp, Homo sapiens
ggctgaacaaacacacgcggtcccatggcttctagtgccagcccccacacaccactcgccacccaggctgtcttgagtccacaggtgtccccaccccactccagatcttctgtttacactcggcagcagcgtcccatcttttgacttccctgggccacaatgtaagaaatattgtcttgggtcacacataaaatacaccaacgatagccgatcagctaaaaaacaaaggtkcatgcataaatctcagaatgttttaagaaagtttatgaatctgtggtgagccgcattcaaagccatcccaggtcacatgcggcccacgggccgcaggttggacaagctcattcacagattc

SEQ ID NO: 520838 - DNA, 584 bp, Homo sapiens
caggccagggagaaactgcttagggtttaaaatgtcaaactcttgatccttctcactggcggggagatgtctcatggataatccagaaatgtgaaataatccaaaaaccgttcctcccaggctctgggtgggaaaatggacgggtgtgggggctgggtgtttgggcaggtcacagctcagtgaagtacataatggaaccacccagtgaggcctgaacgcaggaggaactgggatgccatccagccccacattctggccctgctccccactcagggctgtgagttaactgcgctgtcctcaaaccaatgcattccattgttctagagacatctgtccagcacccactagaagccaggcattgggggcaccacagtgaacaccacaaatgaggtactggtcctcagggggcttcccatttagagggaaagacagmaaacagtggcattaagcatgtgttgattccagctgtgggaagcactgtacaagagaaaaaagctagaagcttgtgagcgcacacagcatgctgaccggaccttgaagctgaggcctgaggaatgatggggctgaacagctggcggggaggg

SEQ ID NO: 520839 - DNA, 343 bp, Homo sapiens
aagggcagtaccagcactactgccagcgctagctgccatccactgagcagtttgctcagtgtacccccacactgctccatggaatggcttaccggctgcatttctgcgggctgtccaccttgtactatcgggcccttctcacccacagggttgrgtgtgcctctggtcaggcgttacagacaccggcccgcctcagaatagccaccactgcatccagagtcacacagagcaaggaggtaggagcatcaaagctggaaaccaggtttcccagcttccttcaggcctttggttcaggtgtgtgattaagagcagggagttgcacggagacttgctttaggcctca

SEQ ID NO: 520840 - DNA, 681 bp, Homo sapiens
agagccaaatgttccataaaaacactatttttaaaaactgtcttgggttctaagaacatgatcttgtaaagcatgtcaagatccttacaaggatcttgtaaggaaaaggttggtgtcgtggatgggccagttgtccaggtccttcctcgtgagctccatgagggcagtgcccttgttgggcctgtttacctttgcatcccagcaagtgcaacacggatggacgcatggtgggcattagtatttgttggatggagggaaaaaaggagggtgcaatagaaagatgggtgggcgacrcttctttggagaatgagcttagatgctgagcagcatgatttgctgaatgtcttctgacggatgcatggtggacacttggtacttgttggatggagagaaggagggcgagagcaatagaaggatgggtgggcgacccttctttggagaatgagcttagatgctgagcagcatgatttgctgaatgtcttccttctacagagattgatgggggcagaggaggaggctatctgtgctgcaggatttctccctgggtgtgagacgggctgattagtcacggagtcagcccaggaaattagcatgaaaagctgcatttctcagaacttcctggaaggttgacctttactgagagttttgggatgttagtcaccgaacggtgccatattggca

SEQ ID NO: 520841 - DNA, 602 bp, Homo sapiens
tagtattgtccttgtgcggacgtggtaccctgcaggtaaggatgagctttggagcaggcaggtagaggcctgaggttgatgctcagaacctgcaggctgccccgggaagctgtctccacccctccattcccacatggtgtttaatgagcacttactgtacatcacatcaccaggctttgggaatacagtgcttggcaaagcagactgtaggagaggcacacgtcaaacaggatgcataaatagcgaataattgcagactgtgataagaacttatggggaaaagtggagggtgcatttgttttgtcagaggagccgggaaggcttccccgtggaagaggcgattggactggaatctcaagggcaagtggtagtgatctaggggaactgatgtacgatcygggagctcatgaagggttttaggcaggaatgggagaagatttgtgttttgaaaaagtcactttcgccgggcgcagtggttcacgcctataattccagcacttgggaggccgaggcgggtggatcacttgaggtcaggagttcgagaccagcctggccaatatgatgaaaccccgtctctactgaaaatacacaaaaattagcca

SEQ ID NO: 520842 - DNA, 602 bp, Homo sapiens
tagtattgtccttgtgcggacgtggtaccctgcaggtaaggatgagctttggagcaggcaggtagaggcctgaggttgatgctcagaacctgcaggctgccccgggaagctgtctccacccctccattcccacatggtgtttaatgagcacttactgtacatcacatcaccaggctttgggaatacagtgcttggcaaagcagactgtaggagaggcacacgtcaaacaggatgcataaatagcgaataattgcagactgtgataagaacttatggggaaaagtggagggtgcatttgttttgtcagaggagccgggaaggcttccccgtggaagaggcgattggactggaatctcaagggcaagtggtagtgatctaggggaactgatgtacgatctgggagctcatgaagggttttaggcaggaatgggagaagatttgtgttttgaaaaagtcacttkcgccgggcgcagtggttcacgcctataattccagcacttgggaggccgaggcgggtggatcacttgaggtcaggagttcgagaccagcctggccaatatgatgaaaccccgtctctactgaaaatacacaaaaattagcca

SEQ ID NO: 520843 - DNA, 563 bp, Homo sapiens
tttgtaaagatggggtctcaccatgttgcccaggttggtctagaatgcctgggctgaagcgatcctccagccttggcctctaaaagtgctaggattacaggtatgagccacgatgcacaacccgcccagcctcttaaatagcccagggagyagtactgggttaggggaaggagcgggaagtgtgtttgtggctggaaccactggttccccctgccatggaaaattcaggacccaacccctatgccgcctcatggataatcacatctgccacgggtttcccctcttctcctcttcccatgagtgtgtccctgtctctctggccttttctcccaaacctactcatctaggtagagggccctggtcagttgttaacctcagagcctgcctggcagagaaaggcagtcccagtcacctttacccagtcaagatacctggaggggagcgcacacctgtctgctgaggattctccccgagcaaacccagaacacttatgctgcaggtgcaaacgctttcctggcaggcttgtccttgactgggctgttgggtccacagctgtgcagcac

SEQ ID NO: 520844 - DNA, 563 bp, Homo sapiens
tttgtaaagatggggtctcaccatgttgcccaggttggtctagaatgcctgggctgaagcgatcctccagccttggcctctaaaagtgctaggattacaggtatgagccacgatgcacaacccgcccagcctcttaaatagcccagggagcagtactgggttaggggaaggagcgggaagtgtgtktgtggctggaaccactggttccccctgccatggaaaattcaggacccaacccctatgccgcctcatggataatcacatctgccacgggtttcccctcttctcctcttcccatgagtgtgtccctgtctctctggccttttctcccaaacctactcatctaggtagagggccctggtcagttgttaacctcagagcctgcctggcagagaaaggcagtcccagtcacctttacccagtcaagatacctggaggggagcgcacacctgtctgctgaggattctccccgagcaaacccagaacacttatgctgcaggtgcaaacgctttcctggcaggcttgtccttgactgggctgttgggtccacagctgtgcagcac

SEQ ID NO: 520845 - DNA, 563 bp, Homo sapiens
tttgtaaagatggggtctcaccatgttgcccaggttggtctagaatgcctgggctgaagcgatcctccagccttggcctctaaaagtgctaggattacaggtatgagccacgatgcacaacccgcccagcctcttaaatagcccagggagcagtactgggttaggggaaggagcgggaagtgtgtttgtggctggaaccactggttccccctgccatggaaaattcaggacccaacccctatgccgcctcatggataatcacatctgccacgggtttcccctcttctcctcttcccatgagtgtgtccctgtctctctggccttttctcccaaacctactcawctaggtagagggccctggtcagttgttaacctcagagcctgcctggcagagaaaggcagtcccagtcacctttacccagtcaagatacctggaggggagcgcacacctgtctgctgaggattctccccgagcaaacccagaacacttatgctgcaggtgcaaacgctttcctggcaggcttgtccttgactgggctgttgggtccacagctgtgcagcac

SEQ ID NO: 520846 - DNA, 563 bp, Homo sapiens
tttgtaaagatggggtctcaccatgttgcccaggttggtctagaatgcctgggctgaagcgatcctccagccttggcctctaaaagtgctaggattacaggtatgagccacgatgcacaacccgcccagcctcttaaatagcccagggagcagtactgggttaggggaaggagcgggaagtgtgtttgtggctggaaccactggttccccctgccatggaaaattcaggacccaacccctatgccgcctcatggataatcacatctgccacgggtttcccctcttctcctcttcccatgagtgtgtccctgtctctctggccttttctcccaaacctactcatctaggtagagggccctggtcagttgttaacctcagagcctgcctggcagagaaaggcagtcccagtcacctttacccagtcaagatacctggaggggagcgcacaccygtctgctgaggattctccccgagcaaacccagaacacttatgctgcaggtgcaaacgctttcctggcaggcttgtccttgactgggctgttgggtccacagctgtgcagcac

SEQ ID NO: 520847 - DNA, 336 bp, Homo sapiens
tgttgttattatttatcatccatgaagggtcaaggattctcaggtcctgcacatgtgggaacccccactcccacccaggttccctcccagyacccagcctggtgccttgaatgtgggtgctggctggtacctggcaggcagtcttggtgatggtcgcatggttccccttcggctggtgatgtttcgttaccatcactggagagtttaccgcggtgtttctctggggataagaagatctgtcgtcagaagctggggcccagcagagcagaggttaagcacagggactcagatgttggagtgcccataccaccactctacagcatggcttggacaagg

SEQ ID NO: 520848 - DNA, 572 bp, Homo sapiens
ttgttattatttatcatccatgaagggtcaaggattctcaggtcctgcacatgtgggaacccccactcccacccaggttccctcccagtacccagcctggtgccttgaatgtgggtgctggctggtacctggcaggcagtcttggtgatggtcgcatggttccccttcggctggtgatgtttcgttaccatcactggagagtttaccgcggtgtttctctggggataagaagatctgtcgtcagaagctggggcccagcagagcagaggttaagcacagggactcagatgttggagtgcccataccaccacyctacagcatggcttggacaaggcactgttggacctaacaggtattttccctcagggtaacatgagtggaaacatggaagcgtgtggcacgtgataagcatttgacagcattctccgttccaagtggtgtttccaggttaggctccatgctccccctctccccacatcccacctttggacatctgaagatcagacagggctcactggggcccccacctcaacagatggtgcgggagggcagggcacccaggcatggaagat

SEQ ID NO: 520849 - DNA, 568 bp, Homo sapiens
ctgtgggcatctgcctgggcaggygatgtgacttcagggcctggcattttcctctgtcttcctgccgttctgcgatgtggtctgggagaagctgttaagccttttttggcctcagtttcctctttgccaaaggggccggtgtaaatccccacatcataaagatgtggccaaaaaaatgttaataaggaaggagaagtgctgtgttcaatgaggttcactcagtaagattgactgaggactcactgtgtgctctgggctctgtgaaagctctcaagggcctgactgtgggttgggcagggaggagaggctgcatatgaggaggttaggggctggtgggcctggagacttgggtctgggtcctgccacctgtccccttccccagtgcctggcctgttcccaccaccgccttggctctccagggcctagcccatgggaactccccatccgtaggtctgagagctgtagtcttcctgatcacccagagtggccccgtctcctcctcactggctctccctcgtccaggcatcttgggcactcggtgtccacttactcaaggctgtgatggccc

SEQ ID NO: 520850 - DNA, 610 bp, Homo sapiens
catgcccatgggatttgcctgagctgaggcaaccatagccacctgtgccaccagctgccccctcctctagcatcctcatgcccgacattgagcaactgtgtgcttcaggcatggtgctgggtgctggggaggcaaagatggtcaagatagagttcctcttctggattatgtcacaggggagaaagacaagtccatttattcatgcacgcatttaaaagtgaagcaccaatcatattcaggcctcggatgcagagcaaataaacgacccgctccagcaacttgggacaagtgcttggtcagcacacaggacctccatggtagcacaagggagagagtgagggcatgatcctgccccagctgcctggaggctgcacccccagagaagcatgttcaaagcacagagctccttcccactcccctccaggtctgtgaacagagggcaggacctgccacccccacaggcaccatggagggaaagtgtctktcattccccaggaaacgataaaactgaatttccaaatgccctgttattcctacagttagtaattggaatccccaaagcccagcaaaggtggaatctttcctgtttgggggctggcaagaaggaggg

SEQ ID NO: 520851 - DNA, 610 bp, Homo sapiens
catgcccatgggatttgcctgagctgaggcaaccatagccacctgtgccaccagctgccccctcctctagcatcctcatgcccgacattgagcaactgtgtgcttcaggcatggtgctgggtgctggggaggcaaagatggtcaagatagagttcctcttctggattatgtcacaggggagaaagacaagtccatttattcatgcacgcatttaaaagtgaagcaccaatcatattcaggcctcggatgcagagcaaataaacgacccgctccagcaacttgggacaagtgcttggtcagcacacaggacctccatggtagcacaagggagagagtgagggcatgatcctgccccagctgcctggaggctgcacccccagagaagcatgttcaaagcacagagctccttcccactcccctccaggtctgtgaacagagggcaggacctgccacccccacaggcaccatggagggaaagtgtctgtcattccccaggaaaygataaaactgaatttccaaatgccctgttattcctacagttagtaattggaatccccaaagcccagcaaaggtggaatctttcctgtttgggggctggcaagaaggaggg

SEQ ID NO: 520852 - DNA, 228 bp, Homo sapiens
agtcccacatgagccccaacaggccaggggcccaggaacctatatttttaaaaagtacccccttcccatttttagccacatggaagtttgagaatacagatgtacaggaaacacactccwtttcttctctctggaggctgtggggaacttctgtttttcacctggcctcatccaccggaggtaataaaactaacaatggctgactgcaggtggaccgacggcctgtct

SEQ ID NO: 520853 - DNA, 503 bp, Homo sapiens
gcactgcccgcgtgtgctaaacacctacagcttgaagaccaagtggcaggagagacaaatatttaacagtcagcttagcggctgcaccaaaagcaaactaaatgttagggacacataaaaaggagaatcacacataattcagagaaaattattctcgcaagagcctaaatttgtgaaaattgtcagcaattctcttccttttattacaaaaaggatattgtgatatgcggaaaccctccaaaatggaaaagtccccgcaaggacgtccacatgccaggttgggggaaatctggtctgtactctctgaaaagcaggtgattaaggggccatacaaaatgctgagtggagtcccgagggcacaccgcctaccacggtttgarttcacatcaagcgggaggacaaatgtggtggcaacataaaccagggagatgggcacttaacggaaatgagcgacattttctttacagagcaacagaatcaaccatttgaagtggtggtgcaaa

SEQ ID NO: 520854 - DNA, 581 bp, Homo sapiens
tctaatcctggacttggtaggagaaaagcccagttgactctcatatgtaagccacattctcctggcccttttgcttccttttctctgaaggactggtcaatctattcttttttatttttcatttttttagagacaaagtctcacaggctggagttgccccaggctgaagcgcagcgacgccatcacaactcactgcagccttgacctcctgggctcaacaactcctctggtttggcctcctgagtagctgggactacaggtgtgtgccaccatgcctggctaatttttattgtgcttttgtagagacagagtctcactatgtggtccaggctggtctccaactcctggccccaagtgatcytcctgcctacgcctcccaaagcactggtgtattagtccattctcatgctgctaataaagacatacctgagactgggtaatttataaaagaaaaagatttaattgactcacagttcagcatggctgggaggcctcaggaaactgacaatcatggcagaaggggaagcaaacatgtccttcttcacatggcagcagggagaagaagaatgactgcccactga

SEQ ID NO: 520855 - DNA, 562 bp, Homo sapiens
gatagtttcagggcctctgccatacactattccttcctcatctgaggggggagaaactgcctctgtggaaggagaccctccttgttttcctagaacaaagttgacacttgcatttggccctccagcagcaacctgcttgaagtctaagagttgcttttctcttatctccaatccktttcttcaagaggttagacaggccatacatcatagtgaatctgcagcctggggcctaaggcagtttgtacacttccagaagagggaagccacttctaaaacaatttcttaaggagacttcacccaacccaagaagctgggtgttgcctgggccatttccctcctctgccctgaagcagtggccagctcagagagaaccctgttgttttgtgtttgtgtgatctttgggtggatgtgtgcacaccacctgctgagcttcgctgtgtgcgtgcctcaccgccagccctaatctgccagagcttcctggccttgcaaatgtttctgtggagggtccatattagactccagtggttcttgcagtctataaagtctccttgaaggtgattcc

SEQ ID NO: 520856 - DNA, 638 bp, Homo sapiens
aataaaacatgcattttttattgtgatccattattacacacatgcacacctaaaataagtttcatgcaacactacttactctaaatacatgtgatatactccrttctctaaactatactatttagtttaattaaaagttatggttgggtgcagtggctcacgcctgtaatcccagcactttgggaggccgaggtgggcagatcatgaggtcaggagatcgagatcatcctggccaacatggtgaaactccatctctactaaaaatacaaaaattagctgggagtggtggtgtgtgcctgtagtcccagctactcaggaggctgaggcaggagaatcacttgaacctgggaggtggaagttgcagtgagccgagattgcgccactgcactccagcctgggtgacagagtgagactccatctcaaaaaataaataaataaaaaacattaaaaaataaataaaataaaataaaataaaatatgctggcctagacatacaaaattacttttatgacccactaaaggggctcaacccattatttgaaaaacattgctataaggatcccagactcacctctgtctcaagtatgggtgaggagaggatgaacaccagagaagttaaactatttccaagttaacag

SEQ ID NO: 520857 - DNA, 577 bp, Homo sapiens
tattcacaagcttggatttgaagttttagcctgtagaagagaaatacacagggaagtgtccgaggataagagcccctttccccctccctctggccacagagtggcatttccagctgcctgacaacctctgtagcctagtgttgaacactggtgctcaccagctgctgctggagagaagccggctggtgggggaggggtctgtgtggagagcagcctcctccccatgtcctgcagtccacacctacctctctcgacctgtaactgggcctcctccgtgcccagcttggcttggcagtattgctctgtgcaacagtctccaagaagtctctatgcctccccagctcctggggcacccgaaagggcagcgctggataagtctcagtaacacagagcagycctggggagagggccgctccatggcttttgggcaggctgacctggaatgagctggcaggcctgattccagtcctgagggacaggtacccacatcaggaaaccaccatcctaactggccccatttttggcagtccgaactgagaggctaagcagggaaaggagaatgtagaattccacccca

SEQ ID NO: 520858 - DNA, 563 bp, Homo sapiens
caactaagtgagaaaatcctacctagcrtattgggtgacgcagaggtgctatgactgcaggaaaagaacaaatagttacctggctgaatgagaaactcttcccctaatagagttgatcatgaattttctatgatttctagtctattccaattagttcaggaacatgtattttgggaaacaattatttaataatgtgacttcaactatgtcttcttaaattcttgtatccaaagactagtaaattaaccataagtaatggttcaattaaactgactagaattttgggctatgtggcaagtcatgccatagtctcattgtagataataattgccttaatctttgcatattcagaattctgcctcaaacttattccaaagatctataaaactctgccaggtggtttatcacacacattttgggcaagtggtttttagcttatctttgggcctggagacatatatttaaatgatcttagtgaagaaaagggcaggactgttttgtgtgctctgatctctacttctgtggagtgtatttatgatctcctgagtttgacttctagccca

SEQ ID NO: 520859 - DNA, 563 bp, Homo sapiens
caactaagtgagaaaatcctacctagcatattgggtgacgcagaggtgmtatgactgcaggaaaagaacaaatagttacctggctgaatgagaaactcttcccctaatagagttgatcatgaattttctatgatttctagtctattccaattagttcaggaacatgtattttgggaaacaattatttaataatgtgacttcaactatgtcttcttaaattcttgtatccaaagactagtaaattaaccataagtaatggttcaattaaactgactagaattttgggctatgtggcaagtcatgccatagtctcattgtagataataattgccttaatctttgcatattcagaattctgcctcaaacttattccaaagatctataaaactctgccaggtggtttatcacacacattttgggcaagtggtttttagcttatctttgggcctggagacatatatttaaatgatcttagtgaagaaaagggcaggactgttttgtgtgctctgatctctacttctgtggagtgtatttatgatctcctgagtttgacttctagccca

SEQ ID NO: 520860 - DNA, 630 bp, Homo sapiens
ctgttttagccaatcctcaatttggtccaatgtctgagccccacctccagagttgagccctgcctcctaccgcagtgcaccgcacagctcagggcagccttgactttctgggctcaagcaatcctcctacctcagcctcctaagtagctgggaccacaggcatgcacygccatgtccagctaattttttgacttttttgtagacagagcctagaactcctaggctcaagcaatcctccctccttgggctcccaaagtgctaggattacagacgtgagccaccgcacctaccctgatactgttgatataattttgtgtcttgcttttttccactttctcctatggcatataagtatttcctcatgtaatgcccaagtctttataaatagcatcttgaatggctgggaaataccccacagagggagtgccgggccgtttccctagccagtcccctcttgctggacctcgtggttgtttctgggacatgagtagtcatcagagctggcagccagcagcagggaaactggtggaggcccggtgtgggatctcaggccgactgggcaggcctggggcaacgagtctggaaggctggctgagctgcattcaccggccacctgcaaggcctggcgcc

SEQ ID NO: 520861 - DNA, 480 bp, Homo sapiens
tggctaaccactagacccagtgcagctcaaagttctttctagaatgtttccagctcatccaggcagcctgcctgacccctggcccactgatgtgtctgtgcagagtgagcccagcctggggctcaggggaggacaggcagaggggcccccacccccgagtcagggtcccaggctggaagggacccagtgggtggctgtcctgccattccctggcctccaagctgcagccctcagccccatgcagagttcaggctcctgtgggtgtttgacactccaaagctagccccgtcaragaccagtctccatgtgtcactgagccccatcggagaccacagtccccgtgcatcaccaagttctgtcagagaccacagtgcctgtgtgtcaccgagccccgtcagagaccacagtccccgcgtatcaccgagttctgtcagagaccacagtccctgtgtgtcaccgagcatggccttgtaccactgt

SEQ ID NO: 520862 - DNA, 480 bp, Homo sapiens
tggctaaccactagacccagtgcagctcaaagttctttctagaatgtttccagctcatccaggcagcctgcctgacccctggcccactgatgtgtctgtgcagagtgagcccagcctggggctcaggggaggacaggcagaggggcccccacccccgagtcagggtcccaggctggaagggacccagtgggtggctgtcctgccattccctggcctccaagctgcagccctcagccccatgcagagttcaggctcctgtgggtgtttgacactccaaagctagccccgtcagagaccagtctccatgtgtcactgagccccatcggagaccacagtccccgtgcatcaccaagttctgtcagagaccacagtgcctgtgtgtcaccgagcccygtcagagaccacagtccccgcgtatcaccgagttctgtcagagaccacagtccctgtgtgtcaccgagcatggccttgtaccactgt

SEQ ID NO: 520863 - DNA, 594 bp, Homo sapiens
tgtgggctcattagcataatgcctctgactgactcaggcactgatggtgaaacactctaagttgccttccactcttcagtcaaaaaaggggcagcatgggacttctgtatggtgattactctcacgatctgatgtattagtggttctcaaagcttaataggtataagagtcattcarggagtttgttaaattacaggttttcagtcctgtctgtcagatattctgaatcagaagtttgaaatggggctcgggaagatatgcatttcaataaagtatctcaggatatatttatgcaaatgatttttggattatgcaagagaaacattgtaatttggatgagtcttggtttattttcactaaatagaataataagatttacttcatcagactgcaaacaaatcccttgagtgcagaaaccacgtgtgtatcttctaccttaattcttagcacgttgcctggcatagagtaggttaaattcagttagccacaactctcagtacctctttgttagactgagctgggggactgcagaagacttggttctcagtctctggggctgaagaagaaattggggtacaccgctcggggagctgt

SEQ ID NO: 520864 - DNA, 594 bp, Homo sapiens
tgtgggctcattagcataatgcctctgactgactcaggcactgatggtgaaacactctaagttgccttccactcttcagtcaaaaaaggggcagcatgggacttctgtatggtgattactctcacgatctgatgtattagtggttctcaaagcttaataggtataagagtcattcaaggagtttgttaaattacaggttttcagtcctgtctgtcagatattctgaatcagaagtttgaaatggggctcgggaagatatgcatttcaataaagtatctcaggatatatttatgcaaatgatttttggattatgcaagagaaacattgtaatttggatgagtcttggtttattttcactaaatagaataataagatttacttcatcagactgcaaacaaatcccttgagtgcagaaaccacgtgtgtatcttctaccttaattcttagcacrttgcctggcatagagtaggttaaattcagttagccacaactctcagtacctctttgttagactgagctgggggactgcagaagacttggttctcagtctctggggctgaagaagaaattggggtacaccgctcggggagctgt

SEQ ID NO: 520865 - DNA, 655 bp, Homo sapiens
gctgggggaacgggcccaaacccggggaagcttttcacttggaaccgacttcagttccgggttcatggaaggcagttggccccgatgcagcaacagattgccgtttgctgtggactctgcaaaaccttgcggcaggagagacctcttggaggccatgacattaggccaggacatttgcgcattcattaactcatgttactgwacactttctatgcatcacacagtcctgggagctgaggttgtagtgccgagcacagagaccagttcctgttcttttgaagctagcagtttggtggaagggaccgacattaatcccatagttacttaagagaatgctggcggggcacggtggctcatgtctgtaatcccagcattttgggaggcctaggcaggaggatctcttgaggccaggagtttgagaccagcctgggcaacctattgcgaccctcatctctaagaaaattaaaattaaccaggcatggtggcaaatgcctgtagtcccagctactagggaggctgaagtgggaggatcgatttagcccaggaggtcaaggctacagtgagctatgtttgtgctcagcctgggcgacacagtaagactctgtctcaaaacaacaacataaaaccaaagaatgttaaacagatttcctttagt

SEQ ID NO: 520866 - DNA, 651 bp, Homo sapiens
atgtactttaaatcatctctaggttacttatacctgatacagtgtaaatgctgtataagttgttgttatactgtattttaaaatgtgtattttctttagttgttctatttattatttgcattatttattgttgttgttttttttttttttttgagacggagtctcgctctatcacccaggctggagtgctgtggygcgatcttggctcactgcaagctccacctcccaggttcacaccattctcctgcctcagcctcccgagtagctgggactacaggcacccgccaccatgcctggctaatttttttgtatttttagtagagatggggtttcaccacgttagccaggatggtctcgatctcctaacctcatgatacgcccgccttggcctcccaatgttgtattatttttaattatttttcacacttttgagatccctgatgggttgaatctgtggatgaggacatgtggatacagaaggctgactgtacagtgaactcatatggttatgtgggacaatggcaagagagacagcctctgattccagaggtttcctggttctccattctgtgaggagactgatggctgcttgtcaaaggcaggagctgtggcctctgtttgtggcacctgaagtgccgcatgcaggctagg

SEQ ID NO: 520867 - DNA, 596 bp, Homo sapiens
agagggccttcaggaaaatgtgtggcccagcccttgcaatgtactggaccttatcatatgtgttttatatactaaagttacagactttattctactgttgactacgggccttttttattctgtccaaagcaattgtcagattgacttggaaaattttccaattcaaaagcctgctttaaagaatagctaaggtcattacattttgcttaattttttgaagtactttttaattttcatttagtaatacacaaacttattttaagaaacaacttgttgcctgtaatcccagcactttgggaggctgaggtgggcggatcacttgaggccaggagttcgagaccagcctggccaatatgwtgaaaccccatctctactaaaattacaaaaaataaaataaaatagctgggcatggttgcagatgcctgtagtcccagctactcaggaggctgaggcatgagaattgcttgaacccaggaggtggaggttgagatgaaccaagatcatgctactgcattccagcctgggcaacagatcgagattctgtcgcaaaacaacaacaacaacaacaacaacaacaacaacaacaacaacttgtt

SEQ ID NO: 520868 - DNA, 596 bp, Homo sapiens
agagggccttcaggaaaatgtgtggcccagcccttgcaatgtactggaccttatcatatgtgttttatatactaaagttacagactttattctactgttgactacgggccttttttattctgtccaaagcaattgtcagattgacttggaaaattttccaattcaaaagcctgctttaaagaatagctaaggtcattacattttgcttaattttttgaagtactttttaattttcatttagtaatacacaaacttattttaagaaacaacttgttgcctgtaatcccagcactttgggaggctgaggtgggcggatcacttgaggccaggagttcgagaccagcctggccaatatgttgaaaccccatctctactaaaattacaaaaaataaaataaaatagctgggcatggttgcagatgcctgtagtcccagctactcaggaggctgaggcatgagaattgcttgaacccaggaggtggaggttgagatgaaccaagatcatgctactgcattccagcctgggcaacagatcgagattctgtckcaaaacaacaacaacaacaacaacaacaacaacaacaacaacaacttgtt

SEQ ID NO: 520869 - DNA, 628 bp, Homo sapiens
atgaggctgagacctacatactgggctgcattcccagatgggtaaggcattctgtcacaggataaaatatgaggttagcacaagataccagtcataaagaccttgctgataaaatagattgcagtaaagaagctggccaaatcccaccaaaaccaagatggcaatgagactgacctctggctgtcctcactgcaacactcccgccagcaccatgacagtttacaaatgccatggcatcaacaggaagttaccctgtatggtctaaaaaggggaggtatgaataatccactccttgcttagcatatcatcaagaaatagccataaaaatgggcaaccagcagcaagtggggatgctctgtctacggagtagccatccttttattcctttactttcttaataaacttgctttcactttactctatggacttgccctgaatgctttcttgcatgagatccaagaaccctctcttggggtctggatccagacccctttcctataacaaaaggagaagacgaaaggaaggatgaggatatctcactctgagaagcaaaacttgtgtcagtcagcaacccattaagcggaggcagtcactgrttggaaatcatctgccagggtccaagttttca

SEQ ID NO: 520870 - DNA, 579 bp, Homo sapiens
tgttttcttagtacaggagaagaagtttcgctttcctacccaccttgttcctacacagtctcaaaagtaaaagcagacagaccagtctgtatttgccaaactctttcatgctctgagcttgtaatatattggcctatttctccttttccccaaagaaggaaacttagctctcatatttctttttatggtgagacaaastcatacatatatatttcacaggagttaaaaaaatacctaatttcaagtctcagaatattctttaatgatactttctcctctttcctcatctagaccaattagatacaaatgccctcagtggagtatggaaagaatatcttattctgcaaagggtttattttagaaggaatgtattaagagtgaggtctgttgggttaaacctgcttaatggctgtgtgcatccttgctcatgacaaaccaagcacagtctctttcctggagctggcacaagaaagtgctgggaggtgggtgtttgcaaaccagttcacgtgaaattacctaatttaatgaagtctgtgttaaagcatggctccccatgtccccatggtaagacagtcctga

SEQ ID NO: 520871 - DNA, 579 bp, Homo sapiens
tgttttcttagtacaggagaagaagtttcgctttcctacccaccttgttcctacacagtctcaaaagtaaaagcagacagaccagtctgtatttgccaaactctttcatgctctgagcttgtaatatattggcctatttctccttttccccaaagaaggaaacttagctctcatatttctttttatggtgagacaaagtcatacatatatatttcacaggagttaaaaaaatacctaatttcaagtctcagaatattctttaatgatactttctcctctttcctcatctagaccaattagatacaaatgccctcartggagtatggaaagaatatcttattctgcaaagggtttattttagaaggaatgtattaagagtgaggtctgttgggttaaacctgcttaatggctgtgtgcatccttgctcatgacaaaccaagcacagtctctttcctggagctggcacaagaaagtgctgggaggtgggtgtttgcaaaccagttcacgtgaaattacctaatttaatgaagtctgtgttaaagcatggctccccatgtccccatggtaagacagtcctga

SEQ ID NO: 520872 - DNA, 579 bp, Homo sapiens
tgttttcttagtacaggagaagaagtttcgctttcctacccaccttgttcctacacagtctcaaaagtaaaagcagacagaccagtctgtatttgccaaactctttcatgctctgagcttgtaatatattggcctatttctccttttccccaaagaaggaaacttagctctcatatttctttttatggtgagacaaagtcatacatatatatttcacaggagttaaaaaaatacctaatttcaagtctcagaatattctttaatgatactttctcctctttcctcatctagaccaattagatacaaatgccctcagtggagtatggaaagaatatcttattctgcaaagggtttattttagaaggaatgtattaagagtgagrtctgttgggttaaacctgcttaatggctgtgtgcatccttgctcatgacaaaccaagcacagtctctttcctggagctggcacaagaaagtgctgggaggtgggtgtttgcaaaccagttcacgtgaaattacctaatttaatgaagtctgtgttaaagcatggctccccatgtccccatggtaagacagtcctga

SEQ ID NO: 520873 - DNA, 579 bp, Homo sapiens
tgttttcttagtacaggagaagaagtttcgctttcctacccaccttgttcctacacagtctcaaaagtaaaagcagacagaccagtctgtatttgccaaactctttcatgctctgagcttgtaatatattggcctatttctccttttccccaaagaaggaaacttagctctcatatttctttttatggtgagacaaagtcatacatatatatttcacaggagttaaaaaaatacctaatttcaagtctcagaatattctttaatgatactttctcctctttcctcatctagaccaattagatacaaatgccctcagtggagtatggaaagaatatcttattctgcaaagggtttattttagaaggaatgtattaagagtgaggtctgttgggttaaacctgcttaatggctgtgtgcatccttgctcatgacaaaccaagcacagtctctttcctggagctggcacaagaargtgctgggaggtgggtgtttgcaaaccagttcacgtgaaattacctaatttaatgaagtctgtgttaaagcatggctccccatgtccccatggtaagacagtcctga

SEQ ID NO: 520874 - DNA, 585 bp, Homo sapiens
cttttaaatctgaatattataattttcatttctagaagttctactttacaaatttggttctccttacaaatgtgctcrtttattttcaaaactctaaaggaaataaaaatatttattaaaatacttggccaggcacagtggctcacatctgtaatcccagaactttggaaggccaaggcaggaggacagcttgaggtcaggagtttgagataagcctgggtaatgtagtgagacccccaactctactatatatatatatgccaggcatggcgggtgtgcacctgtagtcctagtctcgggagactaaggtgggaggattgctagagcctgggagcttgagactgcagtgagctggaattgtgccattgcattccagcctgagtgacagcgataccctgtcttcaaaaataaataaaatacttattttatattctatttgataggttccatatcgaaaatcttggtctctctgacatctaatctaactatctatctatctatctatctatctatctatctatctatctatctatctatctgacacagagatgtgccacctatattccacatcaaggaaagagttga

SEQ ID NO: 520875 - DNA, 642 bp, Homo sapiens
catgttatccatgggcactgcaaatctatttatgtacctgaggtgtgttattgccaattatcctcagttgatgggcagtgaaaatagtgtcatctcttctttggcacaaattctcctcagcagaatttctcttataattatacgtttcataatcctatgggttttaagtgtgttatcacattgaggttatttctagttatactaagattatatctcctgccattatacctagagctaaccagaaaggtccgcttttaaaaatatttgctgtaagtgagttcttattcaagagtcgactttgcttaaagtcacatattagagaagcactattttattagaacattttaaacctaaagtgcagtgtgytaaaagtaaaaccaggctgtgggttggaaagagtaaaccatgagaagctaatgaaagtcctatgaagaaaaccaattttagtaaagtttaagttcgtgacatttggttgttacaatccctttggatttagaaaaaaaaagaaaaaagaaaaatgatcaaggttgcaaaacctatatgacaaagagaagaaaaggtttagttctttcttaaatagaataatcaggaaggaatttcatcaacgatcactccacacaatatatatttcacatttattcc

SEQ ID NO: 520876 - DNA, 588 bp, Homo sapiens
agacagagccaagtgaactcttgaacatactaaactcttgaacaagtgaactcttgaacaagtcaacacactaaaaccaaaattttagtatgttaagatctctgagtctttattactgatttccttacctcaattgaccagagaagctcatggggagatattcaaattacagctattcactgtaatcctcaaaaacaggtaagatattaacccaacaattctgaaacagcaattataacacatcatgacttaaagtcaagtacatcaataaatttcctaatttattaatcccttccagttcctaataggtrtttcaaaacctctgcttgactattgccagttaaaggatccttgctgacacctagagaaatctattttattgttgaataatcacaattgtcaacatttactgagaattcattgtgtatcaggtactgaactggacacattatttgatattaagaattaactgaatacctatgaagcctaaagcactgttgaaagggcgctagggtttcaaaagctagctaaacaaaactgtgcccttatcatgattatattttattatttaatcttcagaataactta

SEQ ID NO: 520877 - DNA, 510 bp, Homo sapiens
caaattatgttactcatctgcttaaaaccctctctaatggggccctcaaacaatggaaagcacagcaatggaaagtctgagggcctttacaccttctgttccccttcctggaacactctcctccttcagtattcatgactttctcaggtctttattgaaacgtcactgtttcagtgatatctttccagataagatttaaaattgaattcttaaaaaaagaacttacaggaatacacatcttggggcagggtggggggtggatttaagttctcctgcaccaatactctctatcttccacctttattttcctttatagcaattatcaccatctaacatactatatattctctttacctattttgtttagygtttgatttgctccactaaaatagaacttccattgcgtgcaggcgtttttgtcagttgtgttcactgatgtatctccagtacctagactaggaatgttttagtagctaaatacattcctaaaggaatgtatgtctctggctc

SEQ ID NO: 520878 - DNA, 615 bp, Homo sapiens
ctggtttttactctttaaatgtgcattatcttatttgattcccagaatcatcctatatgaatgctattatcttcattttataattgaggaaacaggtttatctagattaggtaacttgtctraggctcttcggtaaatacgagtagccaagaagcttattcatcaacagtgtgtgactcagccctaagcactgcacttatacctcctagtaatgagatgtgcgaggaatgccctggctaccttttctgctcatgatattatccctagatgctttcgcatctttattaaaacagtaaaaatgcaagagtcttccacccaagttttctgtggtttagattatcacgttcctcaagatgcaaatgtcaaactatactgggcatccagttaacctgcaaggcctggaggtgatgggagcccctcctagcacaggttcccagtctcagtcagaaagcacctgctcaaaatagaaagataattacagagtaggggccaaagagactcccactggaagaatggaacttgtgtagctggggtgacacaagctggggacaagctgggggacacattcgcgaagggtgtttgacccaggcagtgcacccacggctcccttgagcc

SEQ ID NO: 520879 - DNA, 615 bp, Homo sapiens
ctggtttttactctttaaatgtgcattatcttatttgattcccagaatcatcctatatgaatgctattatcttcattttataattgaggaaacaggtttatctagattaggtaacttgtctgaggctcttcggtaaatacgagtagccaagaagcttatwcatcaacagtgtgtgactcagccctaagcactgcacttatacctcctagtaatgagatgtgcgaggaatgccctggctaccttttctgctcatgatattatccctagatgctttcgcatctttattaaaacagtaaaaatgcaagagtcttccacccaagttttctgtggtttagattatcacgttcctcaagatgcaaatgtcaaactatactgggcatccagttaacctgcaaggcctggaggtgatgggagcccctcctagcacaggttcccagtctcagtcagaaagcacctgctcaaaatagaaagataattacagagtaggggccaaagagactcccactggaagaatggaacttgtgtagctggggtgacacaagctggggacaagctgggggacacattcgcgaagggtgtttgacccaggcagtgcacccacggctcccttgagcc

SEQ ID NO: 520880 - DNA, 615 bp, Homo sapiens
ctggtttttactctttaaatgtgcattatcttatttgattcccagaatcatcctatatgaatgctattatcttcattttataattgaggaaacaggtttatctagattaggtaacttgtctgaggctcttcggtaaatacgagtagccaagaagcttattcatcaasagtgtgtgactcagccctaagcactgcacttatacctcctagtaatgagatgtgcgaggaatgccctggctaccttttctgctcatgatattatccctagatgctttcgcatctttattaaaacagtaaaaatgcaagagtcttccacccaagttttctgtggtttagattatcacgttcctcaagatgcaaatgtcaaactatactgggcatccagttaacctgcaaggcctggaggtgatgggagcccctcctagcacaggttcccagtctcagtcagaaagcacctgctcaaaatagaaagataattacagagtaggggccaaagagactcccactggaagaatggaacttgtgtagctggggtgacacaagctggggacaagctgggggacacattcgcgaagggtgtttgacccaggcagtgcacccacggctcccttgagcc

SEQ ID NO: 520881 - DNA, 574 bp, Homo sapiens
ctccagtgtacctggcagcggtgctggaatatctgacggccgagatcttagagctagctggcaacgcggctcgcgacaataagaagacccgcatcatcccgcgccacctgcagctagccatccgcaacgacgaggagctaaataagcttctaggtcgcgtgaccatcgcgcagggcggtgtcctgcccaacatccaggccgtattgctgcctaagaagacggagagccaccataaggccaagggcaagtgaaatgattactagtcaaatccgtcagtgatcccgagtcccagaaaccaaaggctcttttcagagccacccaccttttctgtaaagtgctggaatacacatacgatgcctgaaatctcaatgttcactgtcctartttttaacgaacgcttctgacgttactggtcagttctttattgaaatccttgctcacatttcatgcactaatttatcttactggtgtttctttgcagtaaaaatgcgtttataaaggtatacaagaatagaaaccgaggttgtgacaccaaggtttcactgcgttattttgtgtataggtccatgctgtg

SEQ ID NO: 520882 - DNA, 295 bp, Homo sapiens
ccactatccctacctgaggctgggaatcaggtgtcacttaccttgacatctgttcccttatttttccaacaatgggaatacatttttctgcattcatgtcrctaacagaactaggaaaagcaagcctggaccacaaggatagtgcagtgagagataatgtgagtataattcttgatgcaagtgaagaataatcatgagttcaatatggttaagtgcatgtgtttcaaaacaacacaacccaaacaagattcagcaaaaatactatcccccagctctattttgttatgttgcctct

SEQ ID NO: 520883 - DNA, 582 bp, Homo sapiens
aaagttgtggcctgcttgtccctctgttgactggtcatctggaccatcgtacttgctgtggctacttctaagacaatgtagagggttattaaaccttgaaactgcctttcctaagtagagaacaagactattcaacaacttctttgctgaagcactgaggagatttgtaatactcctaaaggaagggccaaactagagattttcaatcatagactttgtgacagcatttggggaactaaaagattcatgtgtttcagcctagtgggagagagtgggggagaggaagagagagagagagcatgtatacccgtatgttatcatagagcacgattctccagtggatggatacctggaatggatcattaagatgaagagagtaattcacatttactctagaacctttaacaagcactgaaaggaagaagcctgagatttgatccttgacaatttctggaargcactggtcagtcacactgtcctggacagagtccaagttacccactaaagcttgaggtggatgttggcttcactcctgcagcacaatgctggccctagaaagcgagcattttcattcttcccatg

SEQ ID NO: 520884 - DNA, 602 bp, Homo sapiens
tggcgtgaaaccccagaagcatgaaactgcrtggtgcattcagggaacagtgtgggtttgacataagaaagtggagggagataagacgagcaacataagcagaaactttgcagtaaaagaactacacaccgtgcagaggggtttggactttgtcctgttgggtcagtagtctcaactctggccgcgcattggaatcaccaggagaactttttaaaataccaatgcccaggacccatgtcaaagcaattaaatcggaagatcataggagatggtgatgaggtggcccaggctccagaatttgttaaatactctctccagcgattctaatgtgtggctgggttgagaagctcttcatagtattaggaatttgcggaatagctttaagaaatgaagtcaaatgatcagagttttgtcttaggaagatcattctgagggttgcatcgaaaatgaattattttccattctccagtaactctggaagccgggaaaccaagcgggtttctactgaaatagtccaggtcagggatgctgaggcctgaggccacgtagatgaatggaatggctgtgggggttgaggtgcggagccccctgagagaggcccc

SEQ ID NO: 520885 - DNA, 527 bp, Homo sapiens
atgaaactgcgtggtgcattcagggaacagtgtgggtttgacataagaaagtggagggagataagacgagcaacataagcagaaactttgcagtaaaagaactrcacaccgtgcagaggggtttggactttgtcctgttgggtcagtagtctcaactctggccgcgcattggaatcaccaggagaactttttaaaataccaatgcccaggacccatgtcaaagcaattaaatcggaagatcataggagatggtgatgaggtggcccaggctccagaatttgttaaatactctctccagcgattctaatgtgtggctgggttgagaagctcttcatagtattaggaatttgcggaatagctttaagaaatgaagtcaaatgatcagagttttgtcttaggaagatcattctgagggttgcatcgaaaatgaattattttccattctccagtaactctggaagccgggaaaccaagcgggtttctactgaaatagtccaggtcagggatgctgaggcctgaggccacgt

SEQ ID NO: 520886 - DNA, 632 bp, Homo sapiens
attgggactaggatggaatggctcagaagaaacgagatgggcataggtctagcatgaattgtggtaagaacaggaggcaatgggttagagagggagttaatggaatttgcgtgagctggaaatagggtggatggataggggagtaaggctccacccagaaaaacccacctggcttcctcaatgtttcctttcctccatccttcccagtaycctgatggatagctttgcacagataaattttgttcccagcccatgtccaaacaatatcacaaaatcagccctagccagttgtttctgtttacagccctgtctgtgattgatccagctctggaaaagcccatttatcatgaggaaccaaagcttcatggcctactgtctattttgttgctttattccctagcactaaatgggacttcaggacctcccacttgttccagtacccaatgacatgcctatatttccacactcagtttgcccttcccttcagcccctctagctctcagccttcctgggaccttaaataagtcacgcagctcctttcaccaactcttttcttgttctcgttacttctgggctcttctgcctttctatctcgtctccttctctcagcagctcactgtcctttccaattt

SEQ ID NO: 520887 - DNA, 642 bp, Homo sapiens
ctctttgtacataaacatcgatgtacctctctacccatgtgaggtgggtgcttctactatcatccccctttcacagataatraaactttagatatgagctaagaggaatgaaaaaattaaaaataaaaaaaaagcagataaggaaactaaagtgcaaagaagcaaaatgttttgccaaggtcacaaggacctcagggtccgtatggttgtaagaagcagactaggccctaaggtttcttccatgtctggcatcctagggggttaggactgccactgagatgctgaacaaatgataaggcaggcacttccccgacaaagaatttgtgttggtggcaggaggagagaagaaagctgcgaccaggagagctgagccaggagcttttgcccacctcatcatctaaatgagcatcagactctcaggtgttgcagataaaatcccctggcatgtgatcataggtgacatctacccagcgctcatgatggtaatgccaggcactactccaagctccttacatgatcaatcatttaaccctcacaaccttggggtctaaacagtactgttagtcccattttacagatgggtaaattgaggtatggagctgttaagtcactggcccaggatcacacaaccaataagtgacc

SEQ ID NO: 520888 - DNA, 618 bp, Homo sapiens
gcctgattcaaatcagagtttaattgcaatgagtgggttctgaccctggttgtgtatcagaattacytggggaggcttagaaaatactaatgctcaggccttacttctagagactctgattcaattatctggtctgagatgtagttcaggtaatactgctttgcttttttttttttttttttttaaatgcttcctaggtgattctaatgtgcagcccaataggagaacacttctgtaaactgtattgtttgaaggctggataaaatgacttttggtaagacccattgcatgcaggaaggataatagaagaccagggcaaggagatcagacaggaatgacttgattcccttgtgagagttgaatcccggtgagggggtgggaaagggccagtaggaacacccagaaaggttgggggattcctggtgtgggtcttaggcatggcttctcaggtgtttcacaggagactcccaagccacagagggaagccatgaattcaatatggtgctgagtatagggctgccgggaatgtctggggaatgtctgaggaatgtgactaagtagatggaccagaaggcagcccgacagagcgcatcattcttcagtttggtgcagcaaagg

SEQ ID NO: 520889 - DNA, 536 bp, Homo sapiens
actaatgctcaggccttacttctagagactctgattcaattatctggtctgagatgtagttcaggtaatactgctttgcttttttttttttttttttttaaatgcttcctaggtgattctaatgtgcagcccaataggagaacacttctgtaaactgtattgtttgaaggctggataaaatgacttttggtaagacccattgcatgcaggaaggataatagaagaccagggcaaggagatcagacaggaatgacttgattcccttgtgagagttgaatccyggtgagggggtgggaaagggccagtaggaacacccagaaaggttgggggattcctggtgtgggtcttaggcatggcttctcaggtgtttcacaggagactcccaagccacagagggaagccatgaattcaatatggtgctgagtatagggctgccgggaatgtctggggaatgtctgaggaatgtgactaagtagatggaccagaaggcagcccgacagagcgcatcattcttcagtttggtgcagcaaaggcag

SEQ ID NO: 520890 - DNA, 546 bp, Homo sapiens
gactccaacatgccatatattgtacttatacatcttacattttttctttcttccctactagaatatatgcttcatgaaagcaaagactttttaactttgttttctttcactgatgtttctccatcacctataacagtgccgggcatacccttggcattcaataaatattaactgaatgaatcatttaaaggttctgtcagacccatcttaggtgtctcctcatatttccttcacasttcccaatttccagactcttagcagcttcctccactcagaccctgcaattcaaatcatgcctgggccttccggatagcagttttgggtgtgccaggctctatccattagctgtcactgtagatccatgcctataagtcattcccggacttggctgaatcaccacatccacacaagatgtgagatctggcatcttgagtgaccacccaacaggccagattacgcaactcaaaaagaccaagaagttaactcctctctgtgagaagaactttgaacaacaggaaatgagggaagaaggggagatgcaggcag

SEQ ID NO: 520891 - DNA, 546 bp, Homo sapiens
gactccaacatgccatatattgtacttatacatcttacattttttctttcttccctactagaatatatgcttcatgaaagcaaagactttttaactttgttttctttcactgatgtttctccatcacctataacagtgccgggcatacccttggcattcaataaatattaactgaatgaatcatttaaaggttctgtcagacccatcttaggtgtctcctcatatttccttcacagttcccaatttccagactcttagcagcttcctccactcagaccctgcaattcaaatcatgcctgggccttccggatagcagttttgggtgtgccaggctctatccattagctgtcactgtagatccatgcctataagtcattcccggacttggctgaatcaccacatccacacaagatgtgagatctggcatcttgagtgaccacccaacaggccagattaygcaactcaaaaagaccaagaagttaactcctctctgtgagaagaactttgaacaacaggaaatgagggaagaaggggagatgcaggcag

SEQ ID NO: 520892 - DNA, 302 bp, Homo sapiens
gactaaggagctcaacaagtggtttacttaagattttggagtartttattataatgtagagatagctagctgatatattgaattacttcattttgtgtttgtctttaattgatttctactcttcatttatttccttccttctacttccttcgtttaatctgctgttctttttcccttccttcgtttaatctgctgttctttttccaattttttgaaatgaatattttgcttattgtattccttcttttctaacatatacatctaaagctttacatatacctctaagctggttttagttgtat

SEQ ID NO: 520893 - DNA, 409 bp, Homo sapiens
ttcccattgctgcatgacactgatgctgggtaccatcactgcctaggtgagccccggctgctctgctgctgctcctgctgccgtgtgtccctgggatgggtcctcagctatcagtcctctctttgtcycaggcctcagattcagggcctgggtaggaacattcagttggccaaatgttggccatatggttgtgtcgtggctgtcagaggtgggggagggaatatctgcctcctgtcgggctgcagcccaccaggatccacaaataatacatgcaaataagaactccagaaaacaggaagcttccaattctgcctctgcaactttttgaccatatgatctcagccaccatccttacttgtctgcatattaaagtaacatcctcttaactggtgcacctatggcttcatct

SEQ ID NO: 520894 - DNA, 608 bp, Homo sapiens
atagattaactaaaagtattccttacaggaaataaagggatgggctgaagtaaagggatgggtttggctagttatctgcagcaggagcatgtccttaaggcacagatcgttcatgctattgtttgtggtttaagaacacctttaagtggttttctgccctgagtgggccaggtgttccttgccctcattctggtaaacccacaaccttccagcgtgggcatcgtggccatcacaaacatgtcacagtgctgcagagattttgtttatggccagttttggggccagtttatggccagattttggggggcctgttcccaacatgtctgtctgtctgtctgtctgtctgtctatctatctatctatctatctatctatctatstatgtatgtatgtatgtatgtatgtatctagctagctagctatctacctacctactatcaattacatatatgacatatgtattacatatatttacatacatataatacatattattacacacacagacacacacacacagacacacacacacagtctcctactggtttgttctggtgaaatcctaattgataacagtccaccaaagtctcatcccattacaacatcag

SEQ ID NO: 520895 - DNA, 574 bp, Homo sapiens
caacaggaagagcagggctgcaggaaaggcgggggctcggctgggcccggtccgtgctgggcccgaacacctcacactccccagcttatctggcaaagataagctcctggctgcttctggtgacttttaaagttcaacaagcaaacaaacaaacaaaatggagtgcagtcatatgcactctaggtctgacctcaacagagaaccatttacgtgttttcaaggggttttatttcaagtattcaaagatattcatgggaccttgtttgagcaaacaattgcccttctagatgtggcaaagacagcccaccactaccagaaggaaaattcttggcccctttgtgactacaccgtaatattggcaaaatacatraaagaaataatgtcccaatacatgaagtatacagtcatcaaagaggctactcacaccccactttgatggggtgcttctcagcttcaaatgtatccatgtatcttgctagtaaaaagcaagtcacagcttcagaatctaaacccctggttctaaaatcctgccatgacataggaatcacccaacaggctgccccaacgccacaag

SEQ ID NO: 520896 - DNA, 625 bp, Homo sapiens
acccgctgcccagaaaattcatgagtaattgaatgaataactgttgataaccttcaagtcatgttcaacagtaagcaggcttccaaagcaatccaccttgggagctgtaacccagcctatgctataacaaccataagatgttggttacttattttcttctctgttcttttcttcctccacatgtggtcattgaagtagagggtgttcaccaattcactagtaattgattaacgtcacattctgccccctggaggctgcctgcaagattcatgaacttgttttgcttctgaagaatgaagatcctgaggtcatgcgacctccttggcgatgtccagaagtttgattgacgaagggacgcaaacagctttgatcatgggggaatctcacctcccgccctacccaccttacaaaggaaggtcagattcgagagtttgggtctcccatcctcaggccgtggccaaattgaataaacctttctctgctcctaagcgcccacrtgtcagtgcttggcttacagcgtgtcaggtactcaaacctaccctttggggttctgcaacagtcttttgactcgatggtaacattgcgtctccaactaaagaatcttatcataaatttctcaaatgat

SEQ ID NO: 520897 - DNA, 625 bp, Homo sapiens
acccgctgcccagaaaattcatgagtaattgaatgaataactgttgataaccttcaagtcatgttcaacagtaagcaggcttccaaagcaatccaccttgggagctgtaacccagcctatgctataacaaccataagatgttggttacttattttcttctctgttcttttcttcctccacatgtggtcattgaagtagagggtgttcaccaattcactagtaattgattaacgtcacattctgccccctggaggctgcctgcaagattcatgaacttgttttgcttctgaagaatgaagatcctgaggtcatgcgacctccttggcgatgtccagaagtttgattgacgaagggacgcaaacagctttgatcatgggggaatctcacctcccgccctacccaccttacaaaggaaggtcagattcgagagtttgggtctcccatcctcaggccgtggccaaattgaataaacctttctctgctcctaagcgcccacatgtcagtgcttggcttacagmgtgtcaggtactcaaacctaccctttggggttctgcaacagtcttttgactcgatggtaacattgcgtctccaactaaagaatcttatcataaatttctcaaatgat

SEQ ID NO: 520898 - DNA, 526 bp, Homo sapiens
ctcctagctccatgtccgtgtgtgtggtgtggccagaggacggcctggggagaggctgcctctgtggggtgtgcatccctgcctccaggccccccttccttcttgggtcattactccccaggtagctaattgccctgtggccagctccataaaaacagcctcagccctgctggcccttgctggggttgactggcagaggtggggcagtcttgggtgggaccagcattgcctggctggcaggtgggaaaaggccttttggctccaagacatcctttgggggctcaggcatggaccacaggtgggcggctgtgccttyagtggccctgctggctgtgggggatggctagtgcctcctttcagtggttggagacggtataggggatcctcccaaaagggccacatttctgtgggtcatggacaaggggcagcaaggcggtcagggcagcctccagtcagagccgtcatctggtttttgcctcacttgctgtgtgattttaagcaaggggtttacctctccaagcctcag

SEQ ID NO: 520899 - DNA, 526 bp, Homo sapiens
ctcctagctccatgtccgtgtgtgtggtgtggccagaggacggcctggggagaggctgcctctgtggggtgtgcatccctgcctccaggccccccttccttcttgggtcattactccccaggtagctaattgccctgtggccagctccataaaaacagcctcagccctgctggcccttgctggggttgactggcagaggtggggcagtcttgggtgggaccagcattgcctggctggcaggtgggaaaaggccttttggctccaagacatcctttgggggctcaggcatggaccacaggtgggcggctgtgccttcagtggccctgctggctgtgggggatggctagtgcctcctttcagtggttggagacggtataggggatcctyccaaaagggccacatttctgtgggtcatggacaaggggcagcaaggcggtcagggcagcctccagtcagagccgtcatctggtttttgcctcacttgctgtgtgattttaagcaaggggtttacctctccaagcctcag

SEQ ID NO: 520900 - DNA, 550 bp, Homo sapiens
tctccaagcctcaggcatctcatctgaaacggggtgatggtagaaatgaccctttccttattgggtaaccgagagctcagtgagatgatggcaggaagcaggccgtcagtggtggcagtggttggctatcatcactgctgtttttcagggcctggagtgaggaagaagatcaaaggctccaaagatgggaagaaaaagggcaaagggaaaaagacggccgggctcaagttccgcttcggggggatcagcaacaagaggaagaaaggctcctcggtgagtgtgtgcgtgtgtgcgcgtgtgtgtgcatttgcatgcatgtgtgtctgcacatgagcacgcaagggccaggcgagggccttcagttcattacaaactagctggggcaggtygcacccctccactattctccttccatcctacatgcaggtgtgctgggcctcagtttctccatttgtgtgatgaggagtttagattgaatccttccaagggcccttctagcctggactctgggcagggagtgctcccctggctcaccctcctgagtgggagc

SEQ ID NO: 520901 - DNA, 555 bp, Homo sapiens
tgtcagggcccctgcagtgtgtctgtgggctgccagagatggggcctcattgtcccagcctagacgcacggtgcctgggtgcagccctgccccgggtgagggatggtggatggggctgccgtgtccctgggctccagcacagggctcatgctccctgagtgcttggggatcacacagtgatgtgacctcttttcagggggcaatgggaagacctaaggtaggggaagtccagaatctcatgttctgctccctgctctgctgtcccttgccgagtgggcctcagtttccccctctgtcctatgcacrtggcagtctcacctacgctggctcagatattctgggtgccgataagttcaccattgagtgaaagggccacgtggtctcacagacccccactgcccatctcctgtgtgcatgacccatgcggctcctggggacggggtggatgtcatggcgtcaccgtggtactgttctgacttgggggcagtggcactgatgggagggagcctgcatggcagcctgctgtcatgggagcctcagggtggggccctgcag

SEQ ID NO: 520902 - DNA, 646 bp, Homo sapiens
ctgctccttcctctgttcctggtgctctcaatgtgacccttccctgcagcccaggaaactggtcatcaaaatccgagttgctccctctcccaccgaaatgcacggtggctcctccatgccctgggtgtgggtgcagcaagctcactcctgcccggcgcctgtgcacctgctgctcccatctggaccaccctccccagagcctcctggagctacagcacttctcagacgttttttccttagaagggcacccacaaccgctctagagaagcgtcgcctccgccaccccagaccccctcccaaccaccccccsccactgcagacgctgcgtggactgtcaggctcacatatccaggagcaggcgcctggctgcccgggtcagccagagctctaaacttactagctgtgtggccttaggcacgcactttctatgtgcctcggtttcctcatctgtacggtggtgatggacacggtgcccaccatgtggggtgggtgaagatggggggccttcatcatctgctgctgttcacctgctctccctggggcctcacaccctctcagagggaggagtaaacaaacagtgaagatagaggaagttgaatggtgtccagggtcacgaagaagacagcagggaatgaggggatcggag

SEQ ID NO: 520903 - DNA, 578 bp, Homo sapiens
ctgccagcacttcccggtctcggtctcgtattagaagaggccaactcagcgcgtagaggcaggcctccccgtggcagtgccctctgaccttgggccgaagggggctggagaagtggcttgtggggagggacagcaggacgcaggcggcagcagacagatgtgggaaggcttttcagcctgcaggagggtcagagccgtgtgtctgctgaagcggaggacgtccctggcacctcaggtgggggctgtacttgcctctgattcttgcaggcgtgggcattgtagcctctacaggcccagggagttggggctgagaacttgtgggtcccagcctgggcctgaggaggaggtgtagacagggcggggtgaggggctcgcygaggcccctgaccagggagaagcctgtagcctgttccatggctgtcagggctgagtgagcgccgtgaccccactgcttcctgggcacactggggaggggatgtgtccccagattagccgaggctccaactgtgcaaccacattatgcagggcagggtctttgcaaagcaggcttccaaactggagggagcccatcccagagg

SEQ ID NO: 520904 - DNA, 440 bp, Homo sapiens
ccgcccgcccgggcccttccccgctgcgcccgccgcccccgacggcgcagatcccggagaggccccgacgcccccaagcagcgcccagcggagcccagggccacgcccctctgcgcactcgcacgccggctctctgcgccccggcctgagcgcgtcgtggggcgagcccggggggctgcgcgcggcgggcggcggcggcagcaccagcagcttcctgagttccccctccgagtcctcgggctacgccacgctgcactcggactcgctgggctccgcgtcctaggaccgccggcgcctccccacggacgccaggcaggccaggccgctctccggggccgcagcaccaaagacgcccgcctccsccccgcgcgcagacatgcgccacccctcccaggggtgagggggcgttggcctcagcgtttgtcttccggctcctccca

SEQ ID NO: 520905 - DNA, 600 bp, Homo sapiens
agcaatcataaccaggcttataagctgcaatcatttaaaaaaattcccatggtgatacggtttgactgtgtccccacccaaatctcattttggattgtagttcctataatccccgcatgtcatgggagggaggcagtgggaagtaattggatcttgggggcagttacccccatgctgctctcatgatagtgagtgaattctcatgagatctgatggttttataaagggattttcccctttgttcagccttctgtctcctgctgccatgtgaagaaggatgtgtttgcttccctttctgccatgattataagtttcctgaggcctccccagccctgtggaactgtgaatgaattacayctctttcctttataaattacccaacctcggatatttcttcatagcagcatgagaactgactaatacacatggccagaatcccttgctttgcaaagggtactctatcgtgactgtgttgcaattgttctcagccatttgatagcctcagataagatggctaggtatttttttctaggaaggagtaagaactgtgctaggcactgtggcagacactgatcaagaacaaaccaagcattagttttt

SEQ ID NO: 520906 - DNA, 609 bp, Homo sapiens
tatggtgtgactgtttttcgttaatgtccccaaaccatttatatcaatatctaacctataattacaattggggacattaataaaatttttaaattcttgtaccttttatggcctcggtgtcaatttctaatttttataaaactgaagggaagatttgtacatactagttttagacaaaccaaataaaacagtggaaggcaattttacccacagagtaacaactataacaaatcacacctcagtgtaaaagaagtaggttcaattagatgtcctcctcccaccactcctcccaggtcccatgggaatcacaaaatgcacataattcaccatctcctgggccatcagtgccacatgtgccaacaatgaaaccaatgtctttgggccttgaatgagagaatttttagatgcacctcagctcactcataaaccaaaatctaaagtgattaaaatttaagtatcaccccaattcctggaagataatatctttgtacaaactgctagtttattctcttgccatgtggagtcacattcattattaaaagaygttaagcctaatcgcagtatgatgaggaacactaatttgtcacatcctcaggctatttctgcagc

SEQ ID NO: 520907 - DNA, 520 bp, Homo sapiens
ttaagctggataatatgcagactgcttgatttgtattgaatatgtgtctggtggttggggcccactgtaatgaactagcccacaaatcacagcttaatgggaatctacttttacatattgcttaattaaaagttgtgagcttattaacatgtgtctttggcactgagctttggggatgtaatctctgtgcaaataagactaggttgtaaaagttttatagattggcgatgatattatagtccataccttaataacccatcatttccccaaagaattttttatatcttacattcttctacccagttgtaacagattmttttctttttgttttcaatgtgaatgagtcctataacatatactggtatcaaaaaagggttatatcttaaattgttcatctgaattttttatcatttaatcttactaccaaaggtatgcagaagaaaatttcagagctcctttcattaaaggggctccaggtagtatagatctattagatatggttttctagaatttccattat

SEQ ID NO: 520908 - DNA, 626 bp, Homo sapiens
aattctccttcactcttgttcagttcaaaatatattgttttccttgagattaacccataagttgattagaagtccttttgaaagttttcaaatgtcatcgacatttaaattatttttaaacttttgtgtttaaaattaatcatatattgtatgatagttacttgaaatgtattgagactccactgtgtcctaatacatgattaatttcataaatggtttatgtgtactagaaaaagataaatatttatatgttttatatatatcatatgattaaatgtactgattacattgctcaaatttgytttttatcaattttttaatgtatttgaactgtaatttctgagaaatgtgtgttaaaatttctcactatgattgagagttattttgtcacttttgctttatattttgaagctatgcttttatgttactagactatgactatccctagatgataaccattataatttttagatagattagttctttatttataattattatctatattctattacaatcaattcattttctataaattcctttgtcctgttataatttttccatatcatatggaaattttgtttggaatttatctgttttttctctttttattcttttattttcag

SEQ ID NO: 520909 - DNA, 702 bp, Homo sapiens
ttttttctctttttattcttttattttcagactttgtgtaggtttattttrggtatatttttcctaagaggcatagtgagctaggatttaaaatttattacaagcctttgtcatttgatacattactttaacacatttacttttattgtatgataaacatatctggacttatttttaccattatttattcaattgctcactaacattttcttttctcattgctcgttctcttccctttttaaaattaacaacttttaattattttttcatttgccatttccaaagctgtagattgtatttccttgattttaagggttcgcttattttaatattcatgcttaactatcaattttttataaaacctttgggttttcagctttttaattttgttattaaaatcagaagtaccttgatactctttaatcatatgttgaaaagtctccaaatcaaaaataatattgctattttaaacatttttaattgattttctgtagatttatcaatttattctattcatttctgtattcagtgtttcttttatcccacacttaaatattcccttttatcccgatcacattcttttttaagaatatgattgtggtaattcctcttagtcattttatatggaaactatcagtagtctgtgatgacaaattgagctcagatctgtctccataattactagctatatgatactgggat

SEQ ID NO: 520910 - DNA, 660 bp, Homo sapiens
tcccccaaattttgtgaaatatcctgccccagagaggtcacttttatagaccaagtaatgcatgatacacagcaactccagaacccagtgagggattttcaggtcagcaatggctggggaagagatctcagctctgcaaaattagaattggcccctacagggcagtcttagcctcctgattcacataaagggggatctctcttcttgatttcctatatcctccctaactcagtcaccctccctttctccactccctctttttctttgcagcctaaatagagcccataggagaaggctgctgaataaatagtgtattaaataaggtaactgaagtgtgaacctgtgcaaatattttagtattttatttttaaatcatctagtagtaagatgtcttcactaattgaaaacccatcacaatctaattgcatgtttctttctgtctgaaggtcactgcrcaaatatgggtgaagcatcttccacgtggcaggcatagttctgggcactcatacatcagtgaacagaacgtggactcctgtcagcctcatttcagcagtgaggagtgaggtgatcaacaacacacttaataaataaggaagtttttcaggtcagaaatgctaaaaaaagggaaaaagtagaacagagaagagggattggaaaggc

SEQ ID NO: 520911 - DNA, 585 bp, Homo sapiens
gttccagcctgccctccacacaggcacattgcacagataatctgtctccatcattactctagtaaaattaacaacctgcatgggctcaggtaattttcttgattcctatttttggcatgttcagccaatattggctgaagggtagatttacatgcttaatgttttataatactaggtgagggaagcagtccccagtcagactcaatatccatccccttaataaactcaggtaaaggagataccaccacttcacataaagtccattcagacattccaaatttcatccaaactttcacttaatttcttcaatatttcattcccatatcytctcaatctaactatagccccttagaacttcaacagcttttggaatcacagtgcatgggcctcgtgtgtcaaggagtcctagaaatgtctcctcttcacctgctgaccatttacccacgtgcatgcatacaccctcagttccccagctgaagatggggccaagggactcaggcccttttgtcaatcttcatcctgattagattgtgagaccattgcctcagtgattcaaaatcagatttctcattgtcatccttgctt

SEQ ID NO: 520912 - DNA, 553 bp, Homo sapiens
agatcggtggcttaaacctgcactgttgcaggagtgcctgggatctgtgccaagagagcttgatccctggaggcagccacagagtgggtccccctgtccttggtcctgccacgacccatcaatcatcccggatgcaatggcattcagccctgcctggggtgacacagcctccctgtaccccttctccacttctctactctccccaccctctccctagaagggcatctgctgtgtcccctcctcctccagggcccctcccagcctttcagtctatccccataatatggccgatgctctgcggattttcaagcccctcagcagcggctgctgcaggaaatagggggtgcagctctttgctctctgtctagcacttactaactgtctgaccacaaaagcccctgttccaaggacatgggaggaggacaaggccatccttagtgacatkcaggatgcagagccatggtgtggttcttttttcatttcagttttgggaggtcatcagcgatgagcatgggatcgaccccacaggcagttaccatggagacagtgactt

SEQ ID NO: 520913 - DNA, 591 bp, Homo sapiens
gactatggtgactaataaatcttcttgtgcctcagtttcctcatctgtacgatggggataataatggtacttggctaacaaacttgccaagattcggggaattaatacatataaagcatttagaacagtgagagataaacagtatgtgctaatacatgttagctatttaaaagcaaagttatcctaattagcaattagttttaaagcttaactggaagacttttctttgtgccaacttcaatcacttggtagtagcttcctagagtcttgagaagaatatgattttgagaccaaatgtggacacagcaaaaaataacttacacttaggtctgcaagggtgggaagagtgggtttatgtggaggtatttatcaacctctttctatcacaggcagttttcataaattatggaactttgtaactaaactaatctactttatctctttcttttactgaagagagacttgaktccagagaagtcaagtaatttgctaaaaattatacatttggcaattaaatggtccccagaacccagatctcaaggttccagtaagacaagtgatgtgtctcatatctcagcattgcatctgtgg

SEQ ID NO: 520914 - DNA, 500 bp, Homo sapiens
ctcttttggcacagtccagtcaaatgcctgctattctcccatgtgtgggttcctgtgttctgcctctttccgcatggtccacatcagaaggaagcagtgaacaagaagcagaaaatctcaaagacttcactagtctggaasattctacctaaaaatactcaccagtaagctggagctggccacaaagcagctggtggtctcattcttcgaaaagtagtggctgtcttggggcactgatgggcaggcaccaccagttggcactgtctggcagctgggaacaccccggctaggtgatagggaaggacaatgaggcccactgtggcagccatggggcttaggaggctgctgatcaggctgttccaggcctgcaggggatctggtcagggtctgctcctgagcagttcatgctcctggggcaccacgatcccaccaggccagcagcaggttctcacatccaggatcctcggcaggatgggacttcctcttctgttatacgattt

SEQ ID NO: 520915 - DNA, 595 bp, Homo sapiens
cctctgtcacccaggctggagtgcagtgacacaatctcggctcactgcagcctccacctcctgggttcaagcaagtctcctgcttcagctcccacatagctgggactacaggcatgtgccatcacgccccgctaatttttgtattttttagtagagacggggtttcacaatgttggccagactggtctcaaattcctggcctcaagtgatccacctgcctcagcctcccaaagtgctgggcttacaggcataagcctccacgcccagccaaaagtgtcattttctttattgcccactttcaaaaaacaaaaaacaaaacaaaacaaaaaaaccctctagtaatattgtatcatatagggaatgaaattcaaactcctaaacccagcattgaccactcacaacacgctccattttacacgtccgtcactctctcttaccttatggtaacgtgccacgagttttccttctgtattatacaccacattggtattgtattgaaagtagccattaggaggacaygtggagtcacgggaattacatggctttttgtcccccaaatttgccaagacatagatagagttgtccttggccaggc

SEQ ID NO: 520916 - DNA, 582 bp, Homo sapiens
gaatattttgcaggaccgggggtttagggccagtgagagcatccttcactacaccagcagactccggcaactggaaccctctccaaggactgagtgctctaggaacctcaaagttctgtgttgtttttatttttttaaatttttatacagatgtatttgtagagatataagagacttttcctctcccttgttttctccattaacttgaaagtgaaaactttcagcaaaagaaggatgaaaacaccacagcaatttttggggaggtttggcattttttaagagaaataaacaaaaaagagtgaattgagatggagaaaatgtcctgagctgatgcccacattatcttctttccctcgcctctgctggctccctaagtctctgttggawaatgctttgaagctctcctgtcatcacaaagatgaatttagtaaagaaaaaagaaaaggaccaaaagctggatgaagacagtcagtctaacagtaccccactgagcattctctggtcccaccttctgggacaaaaccattccccatgacagttagcattgtgttatcatgatcatagaccacattcctgagctcc

SEQ ID NO: 520917 - DNA, 582 bp, Homo sapiens
gaatattttgcaggaccgggggtttagggccagtgagagcatccttcactacaccagcagactccggcaactggaaccctctccaaggactgagtgctctaggaacctcaaagttctgtgttgtttttatttttttaaatttttatacagatgtatttgtagagatataagagacttttcctctcccttgttttctccattaacttgaaagtgaaaactttcagcaaaagaaggatgaaaacaccacagcaatttttggggaggtttggcattttttaagagaaataaacaaaaaagagtgaattgagatggagaaaatgtcctgagctgatgcccacattatcttctttccctcgcctctgctggctccctaagtctctgttggataatgctttgaagctctcctgtcatcacaaagatgaatttagtaaagaaaaaagaaaaggaccaaaagctggatgaagacagtcagtctaacagtaccccactgarcattctctggtcccaccttctgggacaaaaccattccccatgacagttagcattgtgttatcatgatcatagaccacattcctgagctcc

SEQ ID NO: 520918 - DNA, 577 bp, Homo sapiens
taatttatttttcaaaaaatttctgttttggctggccctgtggctcacacctgtaatctcagcactttgggaggccaaggatagcaaatcacttgaggtcaggagttcaagaccagcctggcctggccaacatgatgaaaccccatctctaccaaaaatataaaaaattagccagatgtggtggcgtgtgcctgaagtcccagctacttgggaggatgaggcaggagaatcacttgaaccagggatgaaggggaccagcccctccatgcctatgggtatttctcgtcagatgggataagagactgagaaaagaaataagacacagagacaaagtatagagaaagaatagtgggcccaggggaccggcrctcagcatacagaggacccgcatgggtaccggtctctgagttccctcagtatttattgattactattttcattatctcagcaaggggaatgcggcaggagaacagggtgatagtggggagaaggtcagcaagaaaacatgtgagcaaaggaatccgtgtcacaaataagttcaagggaaggtactatgcctggatgtgcatgtaggcca

SEQ ID NO: 520919 - DNA, 553 bp, Homo sapiens
ttgggtaggcaagcgaggataggggatgtgaatccacctctgaaaggagaagttttcccaactctgtcttcatgtcataatgatacactttgggaccatttggtgcataaatrccacttcctgtgaatgaaagacaagtcttctaaaaacaacaccacacacaaaaaaaccaaaactgccaatttccccatcagaattgggcatgtgatcacgccaccatattagtcacgatgagagaggatacatgcttctaattgcactgaacacctaactacttctattctctaatggaagagattaaaataaacattccttggtctcatttcaattaaaccttaaatataatagcattatttattagcattatggaaaattaaaccaactacaaaaatctttgtagtcaggagttcctgaaaggtggggaaagggaataaaaattctcccctattcctcattgtggtggttttcaaatatatccaaaaattccttaaaattcttctttctggtgggaggatctaattcctttccccttgaagaggggctggacttagtg

SEQ ID NO: 520920 - DNA, 559 bp, Homo sapiens
tgttttcctgcaacctaagcttagagggagaatactcagaatttcttgtagcataaatgcaaacactgatcagactgggagaccacaagagtcctggtttcaggacaagaagtggacatcaaatctttggtagtaaggccctcaagttgctgtcaaacactttattgggaccatttatttcagcagtacactgaacagaatccattgagatctcagaggacagactttggactagaaatgacttccttgcatccatggcatgaaatcagtttttccctttattccatatcaatccaagtagagaggaaggagaagatgcttgagacttgaagaaagcccttgttaagatgattacattttgagttgactgagtttaactccttaacatactgaataatttcccaaaagattactttcaactgaacattacttagttaccttgaattggcaagattaagtattttctgctacttagaggaaaaagaggcttgtgagcaagttragttcaatacagactaacatttctgtacaactgagttgtaaaaacacatgttagtgc

SEQ ID NO: 520921 - DNA, 629 bp, Homo sapiens
tgttttcctgcaacctaagcttagagggagaatactcagaatttcttgtagcataaatgcaaacactgatcagactgggagaccacaagagtcctggtttcaggacaagaagtggacatcaaatctttggtagtaaggccctcaagttgctgtcaaacactttattgggaccatttatttcagcagtacactgaacagaatccattgagatctcagaggacagactttggactagaaatgacttccttgcatccatggcatgaaatcagtttttccctttattccatatcaatccaagtagagaggaaggagaagatgcttgagacttgaagaaagcccttgttaagatgattacattttgagttgactgagtttaactccttaacatactgaataatttcccaaaagattactttcaactgaacattacttagttaccttgaattggcaagattaagtattttctgctacttagaggaaaaagaggcttgtgagcaagttgagttcaatacagactaacatttctgtacaactgagttgtaaaaacacatgttagtgcagctacatacacagatctttctttttcattaygtttttaactttccattgttgtattttgactctcccta

SEQ ID NO: 520922 - DNA, 353 bp, Homo sapiens
gatagtagcaggatgtggtaaaaatttggtcttggcaaactttgcatactttgtgtgattgacctttctcaccaccagaagtttacatatttcctttaattatgttgaatttcagtgtcytggacaatctagatataagaagtctgaagatctatatttttgggggattagagtccttctttgtccctagggaaccctcaggttgtctgtgaaccggtatggggtcaagactggttttatttctaaaccagaagaatcagcacactatggtggaaatagttggtctacaaattaggagactttgattctagggttggttctgcttatatccttgggcaaatcacttctgccct

SEQ ID NO: 520923 - DNA, 563 bp, Homo sapiens
ctgcccttctgccttcagcttccttacagcttctctgtgccactttctttatccttccatcccttcctagggactgttgtcactaatatctttagagatgtggcttccatcatgtcactcttctttctaaaaacttctggcaacccttgaatacccatagcttgattggtctcaaaaagcatttctccacctgccttctaattyttccccaatgtgaaccgtgtctccttctcagactctgtaaataaacacactctcaggaaatactgattccttgacaacctttagtgttatgtatttctgattcctaagcctctttgtcaagtaatgaataatttaaaacaaacaaacagaaaaacccttaaagcccctaggagttgactatttgaagaaatccagtaacttatctgtatatgttttcctaagtctgtcattctcaaagcatcacagctccaaatttgctgtatatttaccaagggtgtctctggccaccagagtagtgaagttatagttacaagataattccatagtggaaaaaaaaacaaatgtgtggttcaggctca

SEQ ID NO: 520924 - DNA, 642 bp, Homo sapiens
tcctggttctaccacttattagattggtgatcttgggaaagttatttcaccttgtacgtcaaacttgaggttggttcatatcctctgcttggtagatcatcatagttggtattcctagacatttctccagagagaccaaatatttttgtttttaataatgtggagaaaaaaaattcaaccaagacatcagatgattcctgagacctacagaaaaattttgtgatgtaggtgtgtccttatgtgggcaagtctmtttttttgtgtgtgatacataattattgaaatcataggatatactttgggtctgtttcttcatgaaataaacatgatggttttattttcactaatagtatttagcagttttaagtacaggatatcacaaagggtaataatatcttggttagagaatacacttttttaaaaaacaacattatgtgatcatagattttgtgcattaggaaaattaggattgatgaaggagggatttaacttcagtcactgtgatggatttgacagcctttttcccctccacctccccaatgcaattctctctcagatttatcctcccacttgtcgagctcacccaagcctattgactgagccaagaaaacatactccactctcctcctctttttctgactc

SEQ ID NO: 520925 - DNA, 601 bp, Homo sapiens
tattatcttttgtgtctttgctactctcttgtttggacttacttaggatttttaattgtttataataatattgtggtatattcaaattgtaatacttgctaaaaatgcaagttgtcaattccttttgagacacagctagtaattcaggaaatttctgaagcacaaaaagttcacctatgacctttccatgattatgcaattacagcctcaatatgtgctaaatatgggttgtcaagaagccaggaaatccaggtagcagcaaagattgaaatgagctaaaatgtagctgcgactttttttttttttttgacatgacatctcttactcaaataagggggaagatttttataagttaatgataattgaaataaaaattgagagtcagaaccaaactagtcaagttcatggttcatgcaggctgcatcagccagacagcagagaagaaagagaaggccataccccgaaagggactggagcctggaacgccccgccccctgcaccccctacaagtatggccaaaaaaamcacaaaaaacaaaaaacaaaaaaaacccaggacttaaagtaatttaactctcagttaactgtcagtaattgctgaa

SEQ ID NO: 520926 - DNA, 601 bp, Homo sapiens
tattatcttttgtgtctttgctactctcttgtttggacttacttaggatttttaattgtttataataatattgtggtatattcaaattgtaatacttgctaaaaatgcaagttgtcaattccttttgagacacagctagtaattcaggaaatttctgaagcacaaaaagttcacctatgacctttccatgattatgcaattacagcctcaatatgtgctaaatatgggttgtcaagaagccaggaaatccaggtagcagcaaagattgaaatgagctaaaatgtagctgcgactttttttttttttttgacatgacatctcttactcaaataagggggaagatttttataagttaatgataattgaaataaaaattgagagtcagaaccaaactagtcaagttcatggttcatgcaggctgcatcagccagacagcagagaagaaagagaaggccataccccgaaagggactggagcctggaacgccccgccccctgcaccccctacaagtatggccaaaaaaacyacaaaaaacaaaaaacaaaaaaaacccaggacttaaagtaatttaactctcagttaactgtcagtaattgctgaa

SEQ ID NO: 520927 - DNA, 436 bp, Homo sapiens
ctgggcatggtggctcacacctgtaatcccagcactttgggaggctaaggcaggtgaatcacgaggtcaggagttcaagatcagcctggccaacatggtgaaaccccatctctactaaaaatacaaaaaatagctgggtgtgatggtgaattcctgtaatcccagctactggggaggctgaggcaggagaatggcttcaacccacgaggcagaggttgcagtgagccragatcctgccactgaactccagcctgggtgatagagcaagactgtctcaaaaataaaataaaataaaacaaaatggaattaagttatcaaaacttaacattccaaaggaaaaaagaaaaagtctccaaataaatagggcaattatcaaaacatgaagggtaaattacttcattctagttgaaaaagaattattggccgggcatggtgg

SEQ ID NO: 520928 - DNA, 325 bp, Homo sapiens
gtcaggatgactaccacattctcagtacagccttaatgaaaagtagtggaagaaaccagcattcatagagtgtctgccttgtgccaggcagtgcgctagaaggcttcaaatatgatataagtattattttaataatgaagaatctaaagctcagagagtgtaagtactttacctgagatcacacagcaagtaagtggcagaaccaggatttgcatctagatttctgtgatttcaaaaatgtaggcattttccttctaggatgtttctactttatcaattcagttaattwtatatatatatatatatatatattttttttaatgaa

SEQ ID NO: 520929 - DNA, 481 bp, Homo sapiens
ctatttgtggtgtagttgaaataattgtggctaagaccaaaggggggaaatatactgcaagacgaggccaaattaggcatactagttaaacaaacatcaaagtaaacacaagaatgcatgttctgccttcctttttgatgtttccgtttctcctcttaacctcactgcaccgtttcttgctactaggaaatttgcatttcttttaaacaactttataggcatctcccattctttcactaactgaaagaaaaaactgtccttttgtgaaatcaaagtattcctaccagctttgaattacaaggaagaggctacttttgttattaatgatgaatttattgcttgtgctttttgttctttttttttttttttttttttttttttaaggaaaaggagactggaagaagaaaaataagtatttctggcagaacttccgaaagaaccagaaaggrataatgagacagacttcaaaaggtactgcaat

SEQ ID NO: 520930 - DNA, 543 bp, Homo sapiens
ctttggcctggctgcggccaygttggctgcctctgcgtggttgcagaagcagctacaaagctcattgagagcacaactattgtctgtaaggcaacccagaaacacagaaaccagaagaaaaaatccaaggcattctccaaactttactggatactacagacaagggtgagcacctgttggcagatgaggaagtcacagggctgcttattagactgttctcagggcagcatacatcctcaactactggtgcctaaatgagctgctttgtagccagagatgaaacacttcatgaaaaatgttatttgaagcagaaaactgtccgtggagaggatctaccttctttaacttatgacctgctcaagattgaaactccccagcaatttaggaggccgaggcaggcagatcacctgatgaggttagaagttcaagaccagtctggccaacatgatgaaaccccgtctctaataaaaatacaaaattagccagacgtggtggcacgcacgtgtaatcccagctacatgggaagctgaggcaggagaatcg

SEQ ID NO: 520931 - DNA, 543 bp, Homo sapiens
ctttggcctggctgcggccacgttggctgcctctgcgtggttgcagaagcagctacaaagctcattgagagcacaactattgtctgtaaggcaacccagaaacacagaaaccagaagaaaaaatccaaggcattctccaaactttactggatactacagacaagggtgagcacctgttggcagatgaggaagtcacagggctgcttattagactgttctcagggcagcatacatcctcaactactggtgcctaaatgagctgctttgtagccagagatgaaacacttcatgaaaaatgttatttgaagcagaaaactgtccgtggagaggatctaccttctttaacttatgacctgctcaagattgaaactccccagcaatttaggaggccgaggcaggcagatcacctgatgaggtyagaagttcaagaccagtctggccaacatgatgaaaccccgtctctaataaaaatacaaaattagccagacgtggtggcacgcacgtgtaatcccagctacatgggaagctgaggcaggagaatcg

SEQ ID NO: 520932 - DNA, 601 bp, Homo sapiens
cctcctgggttcaagcgattctcctgccttggcctcccaagtagctgggattataggcrcatgccaccatgcctggctaatatttgtatttttagtggagatgaggtttcaccctgttggccaggctggtctcaaactcctgacctcaagcgatccacccgccttggcctcccagagtgttaggattacaggcttgagccactgcaccctgcctccaggaaagattttggaagagagaagtgacacagaagcagtgagtttctcaaacaatacacatcactggggaattttggcaaattgcagattttgattcaggaggtctgggatgggaccatgactggatgtatagcaggttcccaggtgatgctgatgcagatggtccacaaatcacattttgaatagcagagacacagagtactatttccagaagatggagttgacaatagtgattagaggggcatgacaccacttatagcccttttagagtaaaaaaggaccctaaagattatcaagtggtccatttgccgtttgttgccattggaaaaaccaaaccaaacaaaacaggttctaaaggttacactacagcagggagcagaactgg

SEQ ID NO: 520933 - DNA, 559 bp, Homo sapiens
ctgctccggcagaaaggcaaagggggcgggagctgcggcttccccggcaggagggtgcgcgggcgcacctcggtcagcgagttcaatatcacctacgtggtggagcggagcctgtacagccacctgaacctgacccagctagtgcggcctgcctcagacaggaccctgagcaaggctgagagacaggacctgaggcggtgcctgctggaggaggatgaggaggcaaagaggaagtgggccgccacggtcgaccgctgtactaaaagggttctcttgagaatccaccagaagtctgtgagtcacaaagatggtcctgaggacggccttgtcatttctgtgatgtgcagtcaagcattatggcctttcttctgcggggaccggcttcctcccctctctcctgctcatgacgtcagggcacatcccaccatcaccttcaatttcaaatcctgctttcacttccaggcagctttcaccttctcttccatttctcctcttgtcagatgaagctgtttgagtgcccattaaaayaagcattgaagctaatccagagaggggcttc

SEQ ID NO: 520934 - DNA, 581 bp, Homo sapiens
gcccaaggcagacacccaaagttcatctttgagatctccttcacattcacagctcccccagtgggatcaaggtgtcatctaatcaccaagtcctgttgattttaccacctaagaagstccagcacctgcacacttctatccatccccaccactataatctaaattaccatgatctctctcctgaactactccactgctctcttaatacacccactctcaccatcctccaatcagttttccacaatgtaattagagtgatcttttcaaaatgtaaatctgggttcctttcccttaaattataatccttcagtgcctctccattgctcatagtaaaaatgcttcttaacagcccatgatgccctacctacctccccagcattgcccacaccatgaccacaatacccatctccaccatcagtgtgatcatatcctccaaccccaaaatccccccagcctcctccaccaccatcacaggagtctgcataaagcagcccctccacctgtgtaatggagtcagactgctctgtaccaaagctctgaccatttgagacaaagactcagaaacacaccatcaggacgcc

SEQ ID NO: 520935 - DNA, 581 bp, Homo sapiens
gcccaaggcagacacccaaagttcatctttgagatctccttcacattcacagctcccccagtgggatcaaggtgtcatctaatcaccaagtcctgttgattttaccacctaagaaggtccagcacctgcacacttctatccatccccaccactataatctaaattaccatgatctctctcctgaactactccactgctctcttaatacacccactctcaccatcctccaatcagttttccacaatgtaattagagtgatcttttcaaaatgtaaatctgggttcctttcccttaaattataatccttcagtgcctctccattgctcatagtaaaaatgcttcttaacagcccatgatgccctacctacctccccagcattscccacaccatgaccacaatacccatctccaccatcagtgtgatcatatcctccaaccccaaaatccccccagcctcctccaccaccatcacaggagtctgcataaagcagcccctccacctgtgtaatggagtcagactgctctgtaccaaagctctgaccatttgagacaaagactcagaaacacaccatcaggacgcc

SEQ ID NO: 520936 - DNA, 338 bp, Homo sapiens
cagctgtctgactcccaggcctgactcactgtgctagaattcctctcacatatcaactgctcatcaagtagyagctgttaataagaaaagcaacagaaacatcagcctcggagttatgctcccagtttgtgtccatcacggggtggggggtggcggggagtgctggatgattctgagcccacaggaaaaagtataagcttcactttacctttatacttcacactttccataaatgtgtggcctgttccataaatctcaggctatgtaaatttggtgcataattgggaggcactgcaggtacctgcggctccagaataaaatccaggcagctccggaga

SEQ ID NO: 520937 - DNA, 668 bp, Homo sapiens
tctgactcccaggcctgactcactgtgctagaattcctctcacatatcaactgctcatcaagtagcagctrttaataagaaaagcaacagaaacatcagcctcggagttatgctcccagtttgtgtccatcacggggtggggggtggcggggagtgctggatgattctgagcccacaggaaaaagtataagcttcactttacctttatacttcacactttccataaatgtgtggcctgttccataaatctcaggctatgtaaatttggtgcataattgggaggcactgcaggtacctgcggctccagaataaaatccaggcagctccggagagagagcagggccccattagcaaggacagagtgagaagtgggcagagagcaagcttcacttcacagcagggccacggaagtgaagatgtgcagggctgcactctgccaaggatggctccttggagtcatgggactcacaacatcctcaggctcaggacccttttcccccacctaccccaataaggggcatgcagacagcacaggggatccctgcttctcccaaaacacacttcgccatgagtgtgacctgggagacagggagataagtgtctgggccatggcaagtagcatattgtggcctgactccagccatggcaatgggtccttaggatgatgg

SEQ ID NO: 520938 - DNA, 616 bp, Homo sapiens
ttttagcaggttttttgtgtttttttgtttgtttgtttgtttgtttgtttgttttctagatggatgtgaacaagattcccagggtactcagagggcaggtgaatgacgaatttaatatatgccccatctctaacgtaagatagagacaaagtttgtcaagttttataatgacttatttggagyagtgattgatgaaaaattattgtaaagtagaaatacagtatcacagaagattataggaccaatcatgagaccatataattatatatcctcatatatcttatgtatgaaactttgtgttttacaagcttaccatattagaacgggccccctgttccctgttctgaaggcatataaattcaccatgggcttttgaacgtcctttgtcccaacttcacaatcagaatttgtaaaagcaacaaaaggtcagagttcggagggcaatttctatctcaagcatggaactaacaggtaaagcaatgatgatggcccctgggagtcactgggctgtcacaaaccctgccaggggaagttggctttcagtgtcttccctctagacttcaatgtttttgtgggtgcagctctgcagacatttacatggttttaaaaaatggaa

SEQ ID NO: 520939 - DNA, 628 bp, Homo sapiens
tggtatgggaggagaggttaaacctagagagttcacttcctacgtggctggggcctaggactagttaacatttgcatctcagctgtggggcattgatggggtgtggcaggaaaaagattcaaggagggagacatatttccacaagaaaagatgttcttctccatcccttttgggaaagatatgatatttccgatggggatacagagaaggagatgcttggggtgatggggccaacctgcaaataggatagctaggttraaagtccagggatcccacttctgaagggtggatatcttgtgagacacaaggaaaagtccaaattcactagaaatatgccactttgccaactagagacttccttttgaaatcggcctattccaagagtaaagaaatttacatacactataccaatactgggagaacaaaagaactggatgacctcaagggcggggctaattctagtacctctcctccagcagatgagaggcatcaaatatttaaggaactatgccttagagttctaagccacgacaggtagtcaccacagggccaaccacactgaaagaggggaattagaaaatgactcttgatgctgggggaacttgttagagagacagtgaagccatca

SEQ ID NO: 520940 - DNA, 563 bp, Homo sapiens
atgtatgggctttttgaagatatccacatgtcccagacaaacaggaaaggtaagaacaggcattaaagaaacctccatcttgttgtttttcaaaaaagacacagaaatctgccaggagaggtttaatactcttgttatcaggactagcactttctgattgcaartggcagatgagctttatcataaacctagcatttagagtgcttccaaaagcaatcttaatctcttcttatcttctccaggaagacgaggctgccggcacagccagcagggactcgtttttatggttctcaggtgtctagatgctggaacctgctgtctggtttctatacattttacttgcctcctggggatgatgggagcatatgccaggctgagatgggtggcaacctacattttaattctttaaattgctaactccacccttgagcctacaacaagtaggtctgcactgcagaaagaaatcacgtcgccatggggtcgctgcgagtagttccttactgggtgggatgtggaaggggagcgctgagggacagcattgggtggaagcaagatagcaacag

SEQ ID NO: 520941 - DNA, 602 bp, Homo sapiens
tgcaggaacgctgggagaagacactactggctcacatattgatgtcgtccttgaggatagatcttggtaaggggtcaccctcaaaagctcttcctgcagggaccttgttgtgggctgaattctgttctccttaaaattcatacattgagtcctgacccccaggacctcagaatgtgctgtcttggagatagggtcttaatgaggtaattaaggtaaaatgaggtcataggggtgggccctaatstgatggctgatggcctcatagaaagagattaggactaagacaacacacagactgaggggtgaccatgtgaagacacagggagaagacagccattgacaagccaaggagagaggcctcaggagacaactatcctgcccacatcttgctctggaacttccagccttcagaactgtgcagaaatgaatgactgttgttttagccccctcatttgtggatttcgttatggcagatccaacagacgaatgcagacctcagtaagaagaaaatgggttagaagagcactaggggcccttcatggctattgatgaggccctcttggacaggctaaaatcactgggtattttcaagggcaagcatt

SEQ ID NO: 520942 - DNA, 575 bp, Homo sapiens
ttgagttttctccactcatacactcttacccagaagtcttttcccagttcctccatactttgtcccctctctgtgcccactgtctcatttgtcactgtcacctaagacttgctggaccagttctttatctggccttggaacaagtcaggccgtgttcmtgcatcgtgaccattcatgctgcttctcttgctgaaacgtgccatgtgggtattagggaaaccctttctgtggattagagaaatctcacctatttctcaaactccagcctaaagacccatatcctccagaaatccttcgctgacaactttatcacaccctgaactttttttcccttttcaaattttacatcacacttttgggccactgggcatataatttagtatttcatcaatttctgtagctgtatgttagagttttctttaaggagctcgtctcatttaactggtcccttcccctgctgtcctcccatcagcattattcttgtctgcacacgtcagttgggatgctcatcagatcacagtgctcctttgctcaagagcccccacgtcttgtcatctcactggaataaaacccag

SEQ ID NO: 520943 - DNA, 542 bp, Homo sapiens
acgtacatgtagtatgaagagtgtgaaatctggaaagggagggcctaggtttgaacccctttgctaccagtgagtgagcaaaatggaaatgataatacctaccttggaggtagtctgagaagcaagagaatttatatgaatatgctttgcaaaatgttaaacactaagttatcgttacttttattctttttatttgttgatggtatattgaggagaaaaatctttcattgataccaaacttccatctctgcaacattattaaacctacccaatattaatagcaaatgcctgccaaacacattgttctgtttagtcctcacagcctcatgagataggcacttttattttccaccttttgcagataagggaacgggggtgtagagtggctgagggcacacatctaggaagtgggagagctggaactgcacgtggtggactccyatgccccaggtcctaaccgctgcattctaccgcctccatttgtttgctcctctgctactgtcataaaattcagttcacttcatttgaccacttaccttgaa

SEQ ID NO: 520944 - DNA, 380 bp, Homo sapiens
tgcacactacaatgtgcactacagatgtgttagtcactccagtcatcttcaatctggttatttcctgagcatgtattacatttcaaataatttttcttctaagacttggttttttaaaaaaactcactttttgggcctggcgcagtggctcaggcctgtaatcccagcactttgggaggccgaggygggcagatcacgaggtcaagagatccagaccatcctggccaacgtggtgaaaccccgtctctactaaaagtacaaaaattagctgggcgtggtggcgggcacctgtaatcccagctactcgggaggctgaggcaggagaatcacctgaacccggggggtggaggttgcggtgagccaagatcataccactgcac

SEQ ID NO: 520945 - DNA, 608 bp, Homo sapiens
agttatagcctcagggaatgctcacctttttagagttaatgctttcaggacatcttgatagattcttaagaccactaactggttgccggaaacccaggattaaattgagttgaacctcggatttctgctgaactaagcagaactaaggcatgagcctttacagcttgagaagggtacttctttcctgatctttatcctctagcaatagcaactcaatgagtcaacatttgctggttcttgccacactactgagcatgaatttgcctcaattcttgagccgaaagatggctgtgatgccgaaaaactgtttttacrtgaatgaaggcccatttctccagttctcagaaaaagagaaagttaaatttttattatgcttgggctgggatggagaaaacccaattaaaaagtcgagttacatagctgtcatttgagtcagttaagtgtgtcatttagtccatgcatacatatatagattcataaccaaatgttaagcctattaaaatatttaatcactacttattaaaagtatcagtatagaaactaatcttttaaaaagggctaccttgtcagccttttagcttgcagaaacgtcataccatgggaaatca

SEQ ID NO: 520946 - DNA, 609 bp, Homo sapiens
gtcaaggaaaggtaggccagtgagttcctcatcagatagttgctatgaaggctcatttggtgtcggcagctctgccctggcacagccaaactgtcatccttcagaggagtgttctgccaaggggatgggcaccagacaagtaggtttccctgtttgtctttgatctggagaagaaaggggaatcaagacattattcaatatctattatgatcagaaargcttatatttattccgccccacaaactgagtaaagcagagcttcccaaaaagtgtgcccagaacattaatgtgccctgtatagttaccaagtgccaaaatgccaattgccctcagcccttgtgaaagcaaagcaggacttcattcaggtgatcagagctccctgatctggtcacctctcactgcaggtggcaacatcctttgcagtaaaatattctcattttcaaagtgtacaatattatgaaaaagtttgggaaagactactataaggtattaccttggtttacagaggaggaagttgaagctcacagattaggaagcatacccaaagatcacacttgcaaacagcagagccagtatttgattccaggttagtttgccttcaaagtccaa

SEQ ID NO: 520947 - DNA, 624 bp, Homo sapiens
catttcacatatacattatagctatccttttataaaggattttgaaagtttagagttgtaagaagctttagcatcttgctactcaaaatgtggtccaccagtcagcatctgtatcacctgaaagcttgggagagacgcagaatctctggccygacaccaggcctactaagtcagaatgcatattaaaaactccccgcccccaaccgataatctgcaggcacatgaaaatttgagaagcactgatgtagttattgtctgacttaatcacttacctggggcttgcacagcaaccctgcagagctctcccacagcaaccccgcagagttgaagtatggttagtttattgtatttttgtaccttacaatactatattatacagtatttgtataatacagtgcttgtacagtataacatgaatattgaaaagataatacatggaaccttttggttatcatatttatcatataaataaatgtgtttagctgaaatttgataagcacacaaaacattcctagggaactgttaaatatcatttgcattgcaaagctgagaaaagtatctgcttagatattttcaggcagaggatcatctcagagtaacaaacaagagcaaagatgttttgtg

SEQ ID NO: 520948 - DNA, 637 bp, Homo sapiens
gtgtgctcagaagtgctcactaatactggttgattgagagtgatatttacaataccaaacagtcatgtcattaatagtataacaactttttcttaccaggggcttttttgagccagtaaaggagaggatcttccctaggatttttgtttgtttttaagactagcaatgtgctaactgcatcccttctacatccatgaaagagaatgcaccctaggctctctagaccaaactcaggcatgctttacttgtggcrtgcattcaaaaggaggagaacatggtgaaaatgtcttgaacatcattctagtaaccatagtgataccaaagcaaacctggatccttatctcatatcttgtttatttttcagaaagaatttatttacacatagacctttaattttgaaaaagatgcccctctttgttatttgattgtgtaagtgatgttttgttggccttgcttcacagcaagtctctgtaatacctcggtatgttgccagtggctgtctctgtcctcacaaacaaatgttccatacttgtctgacctgggcagccaggctatggggtccaaggaaggatagaacacctggaaagtgacagcaatgtttttggggtcagaactctcaaagtggaaaagttattca

SEQ ID NO: 520949 - DNA, 617 bp, Homo sapiens
gtaagtatcattgggttgtcaataacttccccaaacaatactgttctctttttaataacaaactaatattaggacaaaatggggattttgtttataggagagaataaagtaattttgaaagacggaacaggacagataaggaaaggattcagctataggtggctttgaacacccaggtagggtggagctagggagtggaggaggaacacagaaaggaaggtggggacatgctaaacacaaaagttacccatttttaaattgcattgaggaaaaggaggaaactctttcctccctgtctctcctgtagcataaggctcctttctaacaagaccaagaactccacccagtgtcactcgaaagagagtgcttatgaggaggctgggacactccttatcatttcaaactgtgctcttcaggacgctagggagcccccttggggaatacctaggatcgtagtgagaagaaagggaggaatcaaagctctgaattmcctcaccttcacttcaagcagagaagttatgattcatctgacttctacataagacttaagattttttaaaaaaaacaaagatgtgcagcgaaagtataaaacctactcatttgaaacaaaaaaaatg

SEQ ID NO: 520950 - DNA, 611 bp, Homo sapiens
gggtttaaatgccaggaacagaacctgcggtctcgtacctggatacctaccttttagaagataattacagcaaaccagcatggcatatctatacctatgtaacaaacctgcacattctgcacatgtatcctggaacttaaagtaaaataaaataagataacttaaaaagtaccaaaaaaaagagaagataattaggcacaagaactgaacgggaggctaaggagaaacagatgtaagctaaatctaaatgctattttatctcttctttttccaccatgagcatttaagtatttcttagcttatttaatttttagaaacttttaataaaacagtaatgccgacaacattaacttacatttatatatttagaggtaaatagaattccagkgtatactttttacatacctcatctcatttaattctcatcaaacctgtctgcattgagagttactatttccatttgaaaattatgaatttccatttgaattatggagttatgaaattatgaaagagtttaggctcagaaaggactctgacttacccaaggcctctcagcaaagcagagatggaggaaaatgcagaccatcccctgagccaaatggatttcctca

SEQ ID NO: 520951 - DNA, 611 bp, Homo sapiens
gggtttaaatgccaggaacagaacctgcggtctcgtacctggatacctaccttttagaagataattacagcaaaccagcatggcatatctatacctatgtaacaaacctgcacattctgcacatgtatcctggaacttaaagtaaaataaaataagataacttaaaaagtaccaaaaaaaagagaagataattaggcacaagaactgaacgggaggctaaggagaaacagatgtaagctaaatctaaatgctattttatctcttctttttccaccatgagcatttaagtatttcttagcttatttaatttttagaaacttttaataaaacagtaatgccgacaacattaacttacatttatatatttagaggtaaatagaattccagtgtatactttttacatacctcatctcatttaattctcatcaaacctgtctgcattgagagttactatttccatttgaaaattatgaatttccatttgaattatggarttatgaaattatgaaagagtttaggctcagaaaggactctgacttacccaaggcctctcagcaaagcagagatggaggaaaatgcagaccatcccctgagccaaatggatttcctca

SEQ ID NO: 520952 - DNA, 621 bp, Homo sapiens
cccactatatcttcacatttttaagaagcaaatatggcctgagctgatctctgtttaagaggaaaaacctgcgaagtggaggatgaattagagtgtgagaactttgaaattagcagagktttgcatcattcaggtgagagatgatgacagattatgattgtcccaaactgacttgctctattgtaccttggatcaccaaataaacatcatcgcttcctgtactcgatttttaaatgttatcaacaatgctgtaaatatcatgttaattctgtgcccagaagataaaaatatttggtaaaaccacaattacttttgaaccaacctaataatattcttgatccacaaggatttcaacaactaattccttggtactaaagaagcagaaaagaattaaaacataacaaagatagcatttaataccaagtgtccttttaaaaaaatctagtatttactcaacagatttgaataaatgaactaatcagtagttgtacctactcacttattactcctatagtagacactatagagaatgtacagggagtgtactactgggttggaggaacaaaattagcctaactgaaataacagtgcacagttttgtactaatgctgtgatgcagat

SEQ ID NO: 520953 - DNA, 606 bp, Homo sapiens
gtggaaaagcagccagttgtttcttttcatcatttcactttgatttctttccactttttttttttttttttttttttgagacagagtcttgctctgttgcccaggctggagtccagtggcacaagcttggctcaccacaacctctgcctgccaggtgcaagtgaatctcctgcctcagcgtcccgagtagctgggattacaggcacgcaccaccagacctggctaatttttgtatttttagtagagacggggtttcaccatgttggccaggctggtctcaaactcctgacctcatgatcaacccacttcrgtctcccaaagtgctgggattacaagcatgagccaccacgtccagctggagaggtttgccaccaaacagcataaacatcatcttcacctatgtgtgtggagtaacttgaattttcccgccctagaaaatgttctgtttgtgttttatgctgagggacctggctaaaaatgtcggtttcactgttcgagaattcttaagagaaagtgtcagcctctaagtgtacttaaagtggatataatttggtttcacaaatcttctcctgttttcctttaaaaatattctgaacataaagaaat

SEQ ID NO: 520954 - DNA, 513 bp, Homo sapiens
tgaattaatcactttacaatagaagggaagggtataagatagattttaaaaaactttcaaccttcttatgtttattgtcttcatgatataggtggctttgtttggctaatcttattttaatttaattattttatattagatgtgctaattatacaaacactaattacctgaatccatttaattctgtggcattcatggttacctgacaaatactgaattgaatgacarcacctaaatataactgcatgacttagctgtctggcgcaatatttgcattattagggagttgtcatcttgtaaagaaatagaaatcatgaactatttaccatagcttcacttaataatagaagatattgctatctcagacagtgtagcttccaatgttgctttagaaccaggatagcatccttaagatttaaaaaactttgaatagccttttaaaaaaagtttttaaaatcatatgctgtgccaattaattttataagtctaattatctatatactgcttcctaaa

SEQ ID NO: 520955 - DNA, 586 bp, Homo sapiens
ggagagtctatttttaaagtttttactgaatatctccccactgtcaggtgctgaacgaatttggcttgtcattagatctaaaatacccacaggggtttagtgtaacttttargtatgaaattgatcaggtttgattctgagaccgtctggtgatccttctggaaggccacttgcttgcttagctgtgtgtgagatcataggtcagggctgggctttgttttgcatgggcttttgacattaatttccacaaaagcagccttaaaaaaaaaaaaacacctgaaattcaggggccagttagtcctctttgtattctaaatccctttggtatttaaaacattaggaaatgaaattgccaaattcttaacatttgaaaattggctcctgcccatgcctagtcttcacatttccagggtgcttctgggagggaatgcgctgctgggggagaagggggtggtattggacagccacacggagccaggaggaggaggccgtctccttggaggtagcaggcttttcagagctcacctgccctcctcacaggctgaaaggagctgctgacgtcattaaatcaataactttgtttagc

SEQ ID NO: 520956 - DNA, 330 bp, Homo sapiens
tttctttcttgagtttccttgtcgcctgctcacgttcatggattagagtgagtccactcaagatcacctccaagaagccttcctgaccccccatctgatttagatgtctcagctctgagtttccatgacaccttgctcttaccattcctcccactgcactgtaattggcaaaagagagacccgaaacagcaccaggcatttcttactgggcccaaacaagggcaggagatgctgcctctgggggatttgtgtgtttattccaggcatrggaaggacaactgtggggcccacaggctgagtgaaccctcaagactgagcctcccatgactg

SEQ ID NO: 520957 - DNA, 496 bp, Homo sapiens
agtgatactactattagcagtagcagtagctgtattcattgagagcttgctgggttccaggcactgctctaagtgctttatctgctgtattagctcgtttaatactcaacaattaggccctgcagggtggctcacgcctgtaatcccagcactttgggaggctgaggcaagagaactgcttgaggccrggagttcaaggctgcagtgagctacgatcacaccactgcactccagtctagtcaataaagcaagaccctgactcaaacaaaaaaagaaaaaaaaaactcgacaattttacatgatttacagttttcacacctgttttacattggaggaaacttcacggaaatgtgcagtcacttgctgaaggtcagtacccagcaaagcctccctccagagccgctctggagccaccccaccccacgctaggggcaggaggatcagagcccctgctgcaggctggaggctgtcccgaggtgcacgccctctgctgcag

SEQ ID NO: 520958 - DNA, 496 bp, Homo sapiens
agtgatactactattagcagtagcagtagctgtattcattgagagcttgctgggttccaggcactgctctaagtgctttatctgctgtattagctcgtttaatactcaacaattaggccctgcagggtggctcacgcctgtaatcccagcactttgggaggctgaggcaagagaactgcttgaggccgggagttcaaggctgcagtgagctacgatcacaccactgcactccagtctagtcaataaagcaagaccctgactcaaacraaaaaagaaaaaaaaaactcgacaattttacatgatttacagttttcacacctgttttacattggaggaaacttcacggaaatgtgcagtcacttgctgaaggtcagtacccagcaaagcctccctccagagccgctctggagccaccccaccccacgctaggggcaggaggatcagagcccctgctgcaggctggaggctgtcccgaggtgcacgccctctgctgcag

SEQ ID NO: 520959 - DNA, 285 bp, Homo sapiens
acctgctggtattaggtggctcctaggtcactccccttgtgataggacaaaaatggtcaaggagaagctgggcagatttctcccaccctggcccactagagccccataatttctcygccatctcacctccttcttaagactgattcagggccaggcaccatggctcatgcctgtaactccagcactttggaaggccaaggcgagtggattccttgagctcaggagttcgagaccaacctgggtaacatggagaaacaaacctcgtctctacaaaaaatacaaaaa

SEQ ID NO: 520960 - DNA, 502 bp, Homo sapiens
ttctgagccctatttctcattcatggaatgagatggggcctgataatttgctttttttttttattgagatgaagtctcactctgtcgcccaggctggagtgcagtggtgtgatctyggctcactgctgcctcgacctcccaggctcaggtgatcctctcatctcagcccccagtagctggactacaggcgcgcaccatcatgcctggctaatctttgtatttttttgtagagaccaggttttgccatgttgcccaggctggtctcgaactcctggattcaagccatctgcctgccttggcctcccaaagtgctgggaatataggcgtgagtcactgcgcccggcctgagtttttcttaattctacctttaactgtaaccttgggacagtttcttcatctgtaaaatgggagggtggtatttaaaggtccttaaaggtttcttttcactgtgttaatgcctttttaactttatcttccattgctctccctgacaaaacctatg

SEQ ID NO: 520961 - DNA, 599 bp, Homo sapiens
tgaatattcaaattgcacctcaaaatcaacaagaaacatacatgttgttgaatttgaggactcatagtaattctgaggccccttacatctcctgggtccttctgactgggaagtaatatactgatttatggttgctaaatactacttatattcagaaagtaacctttgtgcaagcccaggactttttaatggttaacttaaggctttactggttctttttcatagaccaaatgtttagaagagggccattaataatacaaatgcatggagcaatatgctccaagcagaataaaataaaaacagctttatggcccagcatggtggctaatacctataatcccagcactttgggaggctgaggccagargatcacttgagcctaggagtttgagagcagcctgggcaacatagtgagacccagtttctattaaaaaaaaaagtaattaaaaaacaaaaaaaatagctgttattttgtaaagtagagatgaggtcttgctatgttgcccagtctggacgcaaatttattttttcttttaaattatagttgagacctatttacaaaaagactgatggccagaaaagattacaaaacaaatcag

SEQ ID NO: 520962 - DNA, 461 bp, Homo sapiens
tggtactctttgttcccatcttctcagagaaagtatttggtttcaggtcagagctgttttccttttagccacctaaaagcctctgaagaattyggaggtaaagaggcttcatgtctggatctttttttttttttttttttttttggagatggagtcttgctctgttgcccaggctggagtgcagtggtgcaatctcggctcactgcaacctccacctcccgggtacaagcagttcttctgtctcagcctcccgagtagctgagactacaggtgcatgccactaggcctggctaatttttatatttttagtagagatgaggcttcaccatattggtcagggtggtctcgaactcttggccgcaggtgatccatctgcctcggcctcctaaagtgctgggattacaggcatgagccactgcgcccagcccatgtctgcatcttacttgttaacacgctgagga

SEQ ID NO: 520963 - DNA, 461 bp, Homo sapiens
tggtactctttgttcccatcttctcagagaaagtatttggtttcaggtcagagctgttttccttttagccacctaaaagcctctgaagaatttggaggtaaagaggcttcatgtctggatctttttttttttttttttttttttggagatggagtcttgctctgttgcccaggctggagtgcagtggtgcaatctcggctcactgcaacctccacctcccgggtacaagcagttcttctgtctcagcctccygagtagctgagactacaggtgcatgccactaggcctggctaatttttatatttttagtagagatgaggcttcaccatattggtcagggtggtctcgaactcttggccgcaggtgatccatctgcctcggcctcctaaagtgctgggattacaggcatgagccactgcgcccagcccatgtctgcatcttacttgttaacacgctgagga

SEQ ID NO: 520964 - DNA, 552 bp, Homo sapiens
gaacacatgttttagatttagttgatgatctgagcaactagccattatacatacacatctgtaccaatcaatatcccttttcatgagaaaatattcatgtgcttaattcactcttgaaagatgataaacaatatacatgaaattttctatgtagaacattaggtgaatttagtagaatgagagttaaaacagatttttatatttatatatatataagctacatataagcaaagtgaaaagtatgactattaagtgctcttaatttttttttttacaggagcatgccaccgtgcccagccaatttttgtaatttcagtagggacggggtttcrccatgttggccaggctggtctcgaactcctgacctcaggtgatccgcctatcttggcctcccaaagtgctgggattacaggactgaaccactgtgcctggccaactaaacagtttttcaggaaagttttgcaggtgttggatgaacccaagaagaaagatggtaacagcagaggaatagaggggggcaaaaagagaaatactagatctatgagaaacgaa

SEQ ID NO: 520965 - DNA, 552 bp, Homo sapiens
gaacacatgttttagatttagttgatgatctgagcaactagccattatacatacacatctgtaccaatcaatatcccttttcatgagaaaatattcatgtgcttaattcactcttgaaagatgataaacaatatacatgaaattttctatgtagaacattaggtgaatttagtagaatgagagttaaaacagatttttatatttatatatatataagctacatataagcaaagtgaaaagtatgactattaagtgctcttaatttttttttttacaggagcatgccaccgtgcccagccaatttttgtaatttcagtagggacggggtttcaccatgttggccaggctggtctcgaactcctgacctcaggtgatccgcctaycttggcctcccaaagtgctgggattacaggactgaaccactgtgcctggccaactaaacagtttttcaggaaagttttgcaggtgttggatgaacccaagaagaaagatggtaacagcagaggaatagaggggggcaaaaagagaaatactagatctatgagaaacgaa

SEQ ID NO: 520966 - DNA, 548 bp, Homo sapiens
aatctggaaatcatatcatgaagggttgatttcccaaatagagagtacctacaaatcagtaagcgtcacccaacagaaaaatgataaagggatacagacaggtcacagaaaatgaaacaaaaaatcacccttgtaagaaatgcaaactaaaagacactgagatcccatttttcattcatcagatgggcaaagatcaaaaaaaactcatgatacatagaactatgttggcaaggttctggggaaaccagcaagcatatatgttgttgatgggagcataaattaatataatctctacacaaggcaattaggtaatatctatcaaaattagaaatgtacacaacttttaacccagtaattacacttccagatagtctaaaaatatatttatgcatatgcaaaatgatacataaatacaaagacatgggtatcactgtagcagttttgttattagcaaaagccaagaaaagaaacaacaaaaatgtctagaataaaaggaatggytaaataatatatattatatataaatatataaatatttactgtatata

SEQ ID NO: 520967 - DNA, 611 bp, Homo sapiens
tagcaaattacttcacctatttaagacttggtttytgcatctacaaaatagtattataatactgctatctacctcagagaactctgtggagattacatgtaagtacccatgaagctctttgcacagtgtcccttacacagcaagttctcaatgttatattagctactattattaactgtcagcagaccaagtcttcagcagaatcgtgaaataaacttttcattaggtcttcctacctcctttctcaatcatacataaccatctagcaagccaataacaactactgtatgtataacaaataaacatggaaagagaataatgcagaagaaggcattaggttgaataaatatgatctggattctaggctgccagtaactcattcaatggcttcacacacatctcccaatctctgcgggcctcggttattttagctataaaacaaatttgagttaaatattgcaaattcttttctcatctgcaattctacaatgcaatgaaataatcatacacggatttttaaagttctgtgtaattagtatacctatgcttggtccttccagattcttgctcatctcatcaacttcatcctcatcaactaccagcacgctaac

SEQ ID NO: 520968 - DNA, 611 bp, Homo sapiens
tagcaaattacttcacctatttaagacttggtttttgcatctacaaaatagtattataatactgctatctacctcagagaactctgtggagattacatgtaagtacccatgaagctctttgcacagtgtcccttacacagcaagttctcaatgttatattagctactattattaactgtcagcagaccaagtcttcagcagaatcgtgaaataaacttttcattaggtcttcctacctcctttctcaatcatacataaccatctagcaagccaataacaactactgtatgtataacaaataaacatggaaagagaataatgcagaagaaggcattaggttgaataaatatgatctggattctaggctgccagtaactcattcaatggcttcacacacatctcccaatctctgcgggcctcggttattttagctataaaacaaatttgagttaaatattgcaaattcttttctyatctgcaattctacaatgcaatgaaataatcatacacggatttttaaagttctgtgtaattagtatacctatgcttggtccttccagattcttgctcatctcatcaacttcatcctcatcaactaccagcacgctaac

SEQ ID NO: 520969 - DNA, 471 bp, Homo sapiens
aaccttagtagtcacacttagtaatgaggactctgtcctgtaactcctggacccagccatacctggtttctcttttaacaaagtcagggtacactcattaattcatctcctccaagrctgttacattaatagtcgtgacttactttttatttgcttatttagatatccaacctcaggagaattagaaacctattctatcagttgtattattttgcttagagaaaatttagacaaataaaaaccaaaatgaaaacacactagtcagcccagagctttttattgttttcattgtttttatgtattgttaggaggttatgattcaaacaagacttatgcgaagacagaacttcctacctagttgtataaagcagccatgggcagtagtgttctctctcacttggtgtggctgtctggcttactgactcctgtcgtctgctactgttaactacccaaaatcagcctcatggcagc

SEQ ID NO: 520970 - DNA, 608 bp, Homo sapiens
gctgtctgtgttttcaggagttctgctttaggtgagtctaatgcatgctcaagtgtgagaaccactgacagacagtgcggacctggctcatctttcagcacattctgactttgtttgaatggttgtttacattatcagtccatcttacatacaatttaaatgmcctgctgggagcacagatcgttcgtgtactgttcctgactcctagtacagggcctggccctgattaagccccgatatggaataggtgtttgtttaaatggttgcctttcagtagagtcacactttgctagaatggaactccagccctgaaactgctcctttggctggcctgacaatctaacactagctctccaccagcaattgtgctgcccgtcacacaccatgaggggaacctcagggggaaaaatcccgagtcaggggtttatagcactgatgttaccagcacagagttgggaacaaaagactgactgagatcactttgctgctctgctagttatctggcaattctttaagcttcctgtccattagtgtcttgacctaaaaggaagggaataataataatgataataataataataataataataataataatatttgcctct

SEQ ID NO: 520971 - DNA, 608 bp, Homo sapiens
gctgtctgtgttttcaggagttctgctttaggtgagtctaatgcatgctcaagtgtgagaaccactgacagacagtgcggacctggctcatctttcagcacattctgactttgtttgaatggttgtttacattatcagtccatcttacatacaatttaaatgccctgctgggagcacagatcgttcgtgtactgttcctgactcctagtacagggcctggccctgattaagccccgatatggaataggtgtttgtttaaatggttgcctttcagtagagtcacactttgctagaatggaactccagccctgaaactgctcctttggctggcctgacaatctaacactagctctccaccagcaattgtgctgcccgtcacacaccatgaggggaacctcagggggaaaaatcccgagtcaggggtttatagcactgatgttaccagcacagagttgggaacaaaagactgactgagatcactttgctgctctgctagttatctggcaattcyttaagcttcctgtccattagtgtcttgacctaaaaggaagggaataataataatgataataataataataataataataataataatatttgcctct

SEQ ID NO: 520972 - DNA, 617 bp, Homo sapiens
tttgctcattttccatgactggagacatttccggtgtttgaacactgagactctgtgcccctagagtcagggcttatgtttggggagccaccctaagccacagcytctgtggctcctgtgcccctggactctccagggtgtggggttgtgatgctaattaactataaacagtgggcttgaaattggaatttttctgggctccaggtccctggtcatagcatcggatgctcattaaaccacaggtagatgaattggctctgtggatgctgactgtgcaaccttggggaggtggcagcagcagctgggattccagctccatgaggtgctgacaacacagtggacagagtcgctggcacaggtgttggcatggtttcgtggtctcatgcaatgggcccagatcccaacctctctctgtttctcctcccctgccacccccagcccccaacacacacacacacaatcctgggaactgggcatgagggatcctggctctcactcctctctagctaactagctgtgtgaccttgggcagcctaaactctcggggcttcagtttctacaagatgaggggttggatgggaagattccagagccttcttagcatagggtttcccatg

SEQ ID NO: 520973 - DNA, 520 bp, Homo sapiens
ccagccccgcccagtgaagccccgctctggtcttatgaaaatgagaactgggatctgaactaggatcttaaggcttggcgggctgggtgagccacatttcactcccctgccccagtctccacccatggaaygtatgaaggcacttctcctactctgtcacagccaatcccaacaaccagcccagaggcaacgcactatcattggctccattcagatggggagaatgagtctgggggagtgaagtgcagtggtcaccagtcctcagtggtgaacgcaggacttgactgggacagtctgacccccaggcctctgtatttccccccaggccacactgtctccatgcctacactgctggatgctggccaccactgattcccaaagggtcgcctcaatgtattattgggtgcacttggggaagggtggggagattccaaaggctccctgaggtaatccttctcaatcagtccttcagtttccagctctggaagacttgcattccttgcagggtaggtgagagtgg

SEQ ID NO: 520974 - DNA, 497 bp, Homo sapiens
aagggaaggagcagcaaaggcttaggagagctcaggcccacctcggtgttacgggtctgatgagaaagaaggacttggagagccgcctggactgtgctgctccctctccctgctttttgctgtcctctgcctccccctcctgggctccatctccaataaccatgtaaatcagggaggacccagcccttcttgcaggaggacgttcagcttggcaggaaaccagctggaatcatgaactctggagggctcatgagagcttcctaattcagaggaaaacattttacattcaggtgatgacatggaaacratgtaattcaatcagatagacccaccggttatgagaagacactagactttgccccgtggaaatagagataattaagacgcagctccagccctccttgacttcacagcagaagtcgctgcggagtgaattcattccattcacctgtgcattgggcatgatgctgagagttgggactatcgggctgcagatg

SEQ ID NO: 520975 - DNA, 568 bp, Homo sapiens
atgaactctggagggctcatgagagcttcctaattcagaggaaaacattttacattcaggtgatgacatggaaacaatgtaattcaatcagatagacccaccggttatgagaagacactagactttgccccgtggaaatagagataattaagacgcagctccagccctccttgacttcacagcagaagtcgctgcggagtgaattcattccattcacctgtgcattgggcatgatgctgagagttgggactatcgggctgcagatgtattccctgacttcaggaagctcccagtcttgctgggaaatagcaatgcgaataaatactcaagttgcaaggtggtaagtgccacacttaccaaataacaggtccaaaatatcaggaagtgattccttctgatgtaataattattaaaagcacccaccttaacaaaacaccaccacccactttccattgttgaacatctgtcatatcctgagcaccgagctatacacttggcatcagcatcttattcaagcctcaaaacagccctagaatgtgaygtcccacagcgtctaggggcaggtgct

SEQ ID NO: 520976 - DNA, 629 bp, Homo sapiens
cacctgtccaatgacaaccctactattattaatcccattttacagatgaggaaactaaggctcagtaataagcaacttgcaacttgcctgaggaaatgcaaactaggaagtaacaaagtctctaacttcacacatatacacaccccaccatgggctggctccctgagaatccatcaaattggaaacagggaacatggattctgattcagaatctgctgtcagttatcattgataataataattgtagatatttactatggaccagtcactgctctaagtgacttgcaaatataatattcatttgatccttacaatygggttatggaatttaaggttagaaatctttctccattagcaaatgacagagcttggatttgagcaaagtcaattgagttcagagtccctagttttaactctcacaccacactgtccttgatggatgatgctggtgagttgcctctttttgctagaccaatgcctctccaggtatatactgaagccactggatacatttcctgttccatgcctgtgttgcaaattaccccaacacttagtggctgaaagcaacactttcatttgggtcctgattttgtgagtctggaattcaggaagggctcttctgggcagtt

SEQ ID NO: 520977 - DNA, 611 bp, Homo sapiens
tcacccttttctgtcattttgacaggggactctgtcttctctgcttggaaagaggacatttccatgycattgcccaagcaccctggtctaggcgacttagatgcttctctgagagactctgcctctggctgttttgggttgttcaggaaattccagattcggcagaacaattacaacagacacagttgcaacatggcaccaagccttcctcccggatacaatgttattgatatattgtggtatagcgaaaaaaaatcatcaatggtgggtggtggcatatagagtcctcatgagaaagaaatagaaaaattacaaaaagccggtatgaaacgcttttcaatggagcagcctaaagctatttaatgcaaggacaagcaacacccgttcctcctgaggacctaagggagacctgttgggaatattgttgctgagttaaagggtcacattcaaatcagatttcactggaccaatcccagtttggcaaaaggccctgaaaattccagagccatcatcgtcatgatctggaggcttccaaggaatctgttccctggtcaaatcagaatcttgtctctctagagaggactctatacagaatgagaaacccacatcta

SEQ ID NO: 520978 - DNA, 544 bp, Homo sapiens
acggtaacctccaactcctgggcgcgagcgatcctcccaccttagcctctgtactatctttacaaagttttatgtaactatcaactgttgtaaaattaaaacttaatrtatgcataaaataaagaaccccctgacttcagtggagagagcagactgagatggacaagagtgaagtcagagagacgtgtgggggccccacagtggtccaggtgggcgctgtgagtgacttgttggtagcagtggagatggagaaagatgagtcgatttcagtgtcaggacatgcttatagctggcgaggaggtgagggaacaggaggaagcctgaatgatgtgtggttggagccagtggatttttttcaatagatttttctttttggggaaaagatagatgaagggcaggtttgaggtgggtggccaagggttctcttttggctggaatattactgacccccctgggatgttactgagatcactggtcctcatggaaatgccattacagggaccggtgagcgtgaagacccaggcgagggaggtgctggcatgta

SEQ ID NO: 520979 - DNA, 522 bp, Homo sapiens
ccggctggggaggggacacaaagtgaagatgggggttgttgggcctgagctcctgcccagccttttccgccgggggttcctgggtggattcaagcctcttgggggagacggccctgcagggctggaggatgggtttgggccctgaggctcagggaggagcacatggatgggactcaccttctcccttgccccccaggactgggtcatcgccccccaaggctactcagcctattactgtgagggggagtgctccttcccgctggactcctgcatgaacgccaccaaccacgccatcctgcagtccctggtcagtaccgtgcccatcctgcccagccccctggggtgggaggccctgcagagaggggtctggtccagccagccgggagggcagtgaggccacctgctccatgtctsgggggctttgtctgcacagagtcagtaacgtcgctaacttcccacagctctgcaggaactggtcctcatacagccacactactacacatagacccacacccaaacacg

SEQ ID NO: 520980 - DNA, 524 bp, Homo sapiens
actatgtcctggtaacattaaaaataccctgtttcttatgaaatacatgctgaagtatttagtggtagaggaacatgaactctccaacttactttcaaatggctctaaaaaaatacgcactgtctataaaaatacacagaaggagaataaataggaaatgatgttcaccaatataaacaactggtgaacttgagtaaatgccagcaaaggtgtatggggttcatcgcactattcttgtaactcttccgtgagcttgacaytacataaaataaaaagttacaaaaacaataacaagacacccctgtaggagcagacccaggcgtctatgcttcttcctcttttaatgaaaggagacaaatgggaactgaaataacccaaaataaaaaacagaaaagcttttcaaagcccaaagctaactccaccctagcaaggctgaacggttctcctgtgtctggtagctgggtctcctccagattccctgtttctcagccagaaccacggctcatccttccaccctgcacgga

SEQ ID NO: 520981 - DNA, 521 bp, Homo sapiens
atgtaaaatattgctttcatcacaattcatgattaatgcaaagaaaaaactttgtggccaagataacttcattgaagtagatacttgacagatatgaaaggttatgcacttggaggtgtagaacaactctgcctgctgagaggggcagwtgcccaggaagggaggtggcggcagcagccatcagagtgaggaggccccttggagaaggcagcgtagtgtagcagtgaagtgtgaggtcgtcggaagccaggagagctgggttcaaatcctggctctgctacttaactagctgcctgattgtggacaagtctctttatctctctgtgcctcaatttccttagctgtaaaatggggatatagcagtgcctaccgtatagagttatgagggtgaaattaaaatagtgcacagaaaatgctgaataaatgaaaagttagctatcacttatattactggcttggccttgttggcatctgagtttgtcccttggctcaaaaggcaatctggaaagcaagaccccact

SEQ ID NO: 520982 - DNA, 647 bp, Homo sapiens
ctctataaaaaaatgtttaaaaattatctgggcatggtggtaggcacctgtacttcccagctacttgggaggctgaggtgggaggatcacttgagtctgggaggttgaggctgcagcaagctgtgatcgcgccactgcackccagcctgggtgacacagcgagaccccatctccagccgggagccatgcctcctctcctttggccttgtttgtctcccagaaaacgagagaaggatcttgtcggtcttctgaactgttgaaccctcacacccatgtttgccaggtgggtgaatggacatttcttccatttggggatcatttatattgagttgtctttgggcttctctttctcagtaaatgagcagactttgggttgggctggggctatacttttattagcccccaagataaacaggaagaggaacagcacacagtaggtttgcagcagtgcttgctaaggagtgttcatagactgctcttaaagccctgaatgagtcaactttctccacacccaggtcttgcagccatcaacttccccagaaccctgatgtgtgcagggtccaggactgttcagaaggaacggctgctactcaagatagagccagcagttaaaggaaatcaccaacttttgcttctggtcttgccac

SEQ ID NO: 520983 - DNA, 647 bp, Homo sapiens
ctctataaaaaaatgtttaaaaattatctgggcatggtggtaggcacctgtacttcccagctacttgggaggctgaggtgggaggatcacttgagtctgggaggttgaggctgcagcaagctgtgatcgcgccactgcactccagcctgggtgayacagcgagaccccatctccagccgggagccatgcctcctctcctttggccttgtttgtctcccagaaaacgagagaaggatcttgtcggtcttctgaactgttgaaccctcacacccatgtttgccaggtgggtgaatggacatttcttccatttggggatcatttatattgagttgtctttgggcttctctttctcagtaaatgagcagactttgggttgggctggggctatacttttattagcccccaagataaacaggaagaggaacagcacacagtaggtttgcagcagtgcttgctaaggagtgttcatagactgctcttaaagccctgaatgagtcaactttctccacacccaggtcttgcagccatcaacttccccagaaccctgatgtgtgcagggtccaggactgttcagaaggaacggctgctactcaagatagagccagcagttaaaggaaatcaccaacttttgcttctggtcttgccac

SEQ ID NO: 520984 - DNA, 570 bp, Homo sapiens
acaggcgtgcaccaccatgcctggctaatttttgtatttttagtatacacagggttttgccatgttggacaggctagtcttgaactsctgggctcaggtgatctgcccaccccagcttcccaaagtgctgggattacaggcgtctagagatggaatatttgaatcaaagagcatatacactttttatggtttttgatacatattatctgttgccccaatagcacgagggtgcttattttctatcacccttaccaacactagatataactgttaaatacataaataaatcaatctctgctggtttgatagatgaaaacctctctgctgttgtaacttgcatgtggagggttactacacactgctctcttgtttttgaaaccctgtcctcccctggcttcaaggacgcctgctcccttgctgaccactcctccctgcccacttctaaaacatggatgtctgctgggtctgtccacagtcctgttctccccttagacttgacctggtgatgagctcatccactgaggcttcagtgccgccatacagtcacacccaactccaaatatattagta

SEQ ID NO: 520985 - DNA, 570 bp, Homo sapiens
acaggcgtgcaccaccatgcctggctaatttttgtatttttagtatacacagggttttgccatgttggacaggctagtcttgaactcctgggctcaggtgatctgcccaccccagcttcccaaagtgctgggattacaggcgtctagagatggaatatttgaatcaaagagcatatacactttttatggtttttgatacatattatctgttgccccaatagcacgagggtgcttattttctatcacccttaccaacactagatataactgttaaatacataaataaatcaatctctgctggtttgatagatgaaaacctctctgctgttgtaacttgcatgtggagggttactacacactgctctcttgtttttgaaaccctgtcctcccctggcttcaaggacgcctgcycccttgctgaccactcctccctgcccacttctaaaacatggatgtctgctgggtctgtccacagtcctgttctccccttagacttgacctggtgatgagctcatccactgaggcttcagtgccgccatacagtcacacccaactccaaatatattagta

SEQ ID NO: 520986 - DNA, 570 bp, Homo sapiens
acaggcgtgcaccaccatgcctggctaatttttgtatttttagtatacacagggttttgccatgttggacaggctagtcttgaactcctgggctcaggtgatctgcccaccccagcttcccaaagtgctgggattacaggcgtctagagatggaatatttgaatcaaagagcatatacactttttatggtttttgatacatattatctgttgccccaatagcacgagggtgcttattttctatcacccttaccaacactagatataactgttaaatacataaataaatcaatctctgctggtttgatagatgaaaacctctctgctgttgtaacttgcatgtggagggttactacacactgctctcttgtttttgaaaccctgtcctcccctggcttcaaggacgcctgctcccttgctgaccactcctccctgcccacttctaaaacatggatgtctgctgggtctgtccacagtcctgttctccccttagactygacctggtgatgagctcatccactgaggcttcagtgccgccatacagtcacacccaactccaaatatattagta

SEQ ID NO: 520987 - DNA, 524 bp, Homo sapiens
aacattgatattatgaatttttccaattatttccacttgaattataagctctgttagcaaatggtttgtattcaaattttgtgacagttttaccaaaactttttaaaaatataaaacaagcattcctaagttttaattctaaaatatctgtccttttgataccaatcacccagccaccaagctaatactacacatttttagttttgttataacaatgcyctgaatctaggaataaaattatcaaattatctacctgtttcagaaacagaaatccttctaattacttcaggcagaaaaggattgaaacccaaagaggtagatgcttaataaagtttttgatgagcaggagaaatagaatttaggcagaactgacctctatggaagttctcacctctgacagaaagaaattataaggcttccactagagatactgaatccaagaacatacccctgtacctgcgatccagaaatcaggaaaccaaattaagaagttacccttgctgctgccataatactttataaca

SEQ ID NO: 520988 - DNA, 648 bp, Homo sapiens
agattggatggtgaggcatgagatggagagaaaatcactgctgatttctatttttttcacacatgaaaatagaaaaggtcctttgttatatcgaagagacatgtagtgagttgtatgatccttgaaaagttgagaatatttgagtctatacttatatcgcagatcaataaccttctggtgaagaggagctgcttgatattgattaaagtctttcattcactagytgagtgggagagaggagatgctgagagtgtgtgtcagtttcctagggctgccatcataaagtgccaactggatggcttagaataacagaaattcattgtcttacatttccggaggccagaagtccaaaatcaagatgttggcaaaactatgcttcctcttgaaactgccattgcaaaattataactgagtcagtgaaagagatctgacctaaccaactccttgcttctaacctccaggctgtccttgttcattcctgggcataggctgaactaacttctggaggaacttagttttagtttaaaacaaagacaatagataacagccctttcctaaaacaaacctccttctttcctggggactagactgcctttgtaggactaatgaattaggcacaagattagcaattatgggttaggaatgcag

SEQ ID NO: 520989 - DNA, 564 bp, Homo sapiens
gttatatcgaagagacatgtagtgagttgtatgatccttgaaaagttgagaatatttgagtctatacttatatcgcagatcaataaccttctggtgaagaggagctgcttgatattgattaaagtctttcattcactagttgagtgggagagaggagatgctgagagtgtgtgtcagtttcctagggctgccatcataaagtgccaactggatggcttagaataacagaaattcattgtcttacatttccggaggccagaagtccaaaatcaagatgttggcaaaactatgcttcctcttgaaactgccattgcaaaattataactgagtcagtgaaagagatctgacctaaccaactccttgcttctaacctccaggctgtccttgttcattcctgggcataggctgaactaacttctggaggaacttagttttagtttaaaacaaagacaatagataacagccctttcctaaaacaaamctccttctttcctggggactagactgcctttgtaggactaatgaattaggcacaagattagcaattatgggttaggaatgcag

SEQ ID NO: 520990 - DNA, 632 bp, Homo sapiens
aacaccacattaaccattatatataaaaacatgtcattaggctttaaggaagaaggaatgctgctggtgttggatttgaagtgccattttgatgccataaaaactaggaacctcyctacaggtgtatgatcaattgagtggtgtaagatggggctcgaggaagactttcctgatggttgtttgatggtcagcagaatctaggagggtaagaaataagaatctccaattgagaagtttacacaagtaatagagtcttattttctgacattatggacctaattttcctttagactggccagtgtaggtccttagagatattgacttacagagataatggccctcttctagatgccatgtattaacaatgtgaatcctttgggattcttctgcataccatgtatggtctcagagaaagtcatgaactatcaacaattttataattttcttgtgtatttctttccttttctattatactttaagttctgggctacacgtgcagaacatgcaggtttgttacataggtatacacgtgccatggtggtttgctgcacccatcaacccatcatctacattaggtattcctcctaatgctatccctcccctagccccccaccccatggcaggccccagtg

SEQ ID NO: 520991 - DNA, 632 bp, Homo sapiens
aacaccacattaaccattatatataaaaacatgtcattaggctttaaggaagaaggaatgctgctggtgttggatttgaagtgccattttgatgccataaaaactaggaacctccctacaggtgtatgatcaattgagtggtgtaagatggggctcgaggaagactttcctgatggttgtttgatggtcagcagaatctaggagggtaagaaataagaatctccaattgagaagtttacacaagtaatagagtcttattttctgacattatggacctaattttcctttagactggccagtgtaggtccttagagatattgacttacagagataatggccctcttctagatgccatgtattaacaatgtgaatcctttgggattcttctgcataccatgtatggtctcagagaaagtcatgaactatcaacaattttataattttcttgtgtatttctttccttttctattatactttaagttctgggctacamgtgcagaacatgcaggtttgttacataggtatacacgtgccatggtggtttgctgcacccatcaacccatcatctacattaggtattcctcctaatgctatccctcccctagccccccaccccatggcaggccccagtg

SEQ ID NO: 520992 - DNA, 632 bp, Homo sapiens
caaaagagatatacaataagatgccaaacgcatataatgatcaacactyagaatcatgtggctagataaatagatgatagattgactgaataaaagataagagtctgagcacagaaaaatggataggaatgatacacagcaacttcaaaatagtagtttgtctagggaacaagagattagaaaaatagggagtaaggctgtagctaattctataatgttttatgtcttttaagaaagatctaaagcaaataattcaaaccatgttaacatctgcttaatctcagtggtaggtacatagatatctgttactttgtttttatgtattgaaaatatttaacaattttaaaagaaagaaaaaggaggcaagcaggaaagaaagaggcaatttgctggaagaaattttataagtaataaacctgtaccttccccatggcagttttattttatccttctatctcctaaagcagtaatctggagaataaaatgtttccctgtgagatttcaatgaaggagggggaaggcgacacgtcttcaaagtgacaggttggggtggggtagggggaggtgacatctctcaagcctccttcgttgtggctgcacccctaggtcaggacagctgggatattgctggc

SEQ ID NO: 520993 - DNA, 664 bp, Homo sapiens
tgaatgccaagggcagaacagaggcatgctaatggycagctttcatttttctgtttttaataccatctgcatctcttttgatatttgagttactacttcatgttacgtagctatatttttacaaaggattttttcttcccctttggagtttcagctttttattaagaaaatctttcaagggaggatgttccagtagtattaggtgggtgcaaaagtcattgtggtttttgcctctcctttcaatggcaaaaaccataatgatttttgcaccaactttaataacttgtggacagggtttgtgtgaggagtcagcagcagactggacactaggacatgacctaggtttggtcaattagatgtttcagcctgggaatttttatctggagccagtgatgcaaagagaaagagagagatatttaaaatgtgtttatagctctcaaggtgtccagtgagggtgcagcatcaagcagcatcagtgttccatggctgcagaagtgacagctcagcagggtatctctgctaaaaagcagttgtttttctcgcttcttttgctaccaagttctcattctttccatctatttcctaagtctgattgtccagccggctgtagattctgtgagccccgttatctttccagtaaatatttttctatttaaattagcca

SEQ ID NO: 520994 - DNA, 664 bp, Homo sapiens
tgaatgccaagggcagaacagaggcatgctaatggccagctttcatttttctgtttttaataccatctgcatctcttttgatatttgagttactacttcatgttacgtagctatatttttacaaaggattttttcttcccctttggagtttcagctttttattaagaaaatctttyaagggaggatgttccagtagtattaggtgggtgcaaaagtcattgtggtttttgcctctcctttcaatggcaaaaaccataatgatttttgcaccaactttaataacttgtggacagggtttgtgtgaggagtcagcagcagactggacactaggacatgacctaggtttggtcaattagatgtttcagcctgggaatttttatctggagccagtgatgcaaagagaaagagagagatatttaaaatgtgtttatagctctcaaggtgtccagtgagggtgcagcatcaagcagcatcagtgttccatggctgcagaagtgacagctcagcagggtatctctgctaaaaagcagttgtttttctcgcttcttttgctaccaagttctcattctttccatctatttcctaagtctgattgtccagccggctgtagattctgtgagccccgttatctttccagtaaatatttttctatttaaattagcca

SEQ ID NO: 520995 - DNA, 554 bp, Homo sapiens
ggtctgaggactgggtctgggctgtcagccattagtggtcaggaagaggaagttctggcaaaggtcagtcacaagggagggggagccagaggagtgttgcattcagsaagggtaaaggaggtgtttctaggaggtgagaggaggaaagagaacagacttctggtttggccatgtggaaattgcccagagtgaaccagcaggacccctgaggagtccctcttctttttttttttttctcttgagatagtgtctcactctgttgcccaggctggagtgcagtggcgtgatcacagctcactgcagccttgacccctaggcttggatgatcttcccacctcagcttccccgggaagctgggatcacagatgcataccaccatgcccagataatttttgtattttctgtagtgctgaggttttgccatgttgcccaggctagtcttgaactgggctcaaacgatcctcccaccttggcctcccaaagtgcagggatcacagggatgagccactacacccagccgaatccctcttcttgagagaagattctggaagcag

SEQ ID NO: 520996 - DNA, 379 bp, Homo sapiens
tgttcttaagaagctaaaagaaatgaaaaatcacaatttttaaaaatcgctgtctttctgtccctgtagccaccgaaagacgaggtacttcctcagggacagaatgctgacgccgcgcagagtcggccgaatccagcttctccaagggcgggcgggtgggatgatttgttgatttgcttgttttccaccaaaccgcagggcacctccaggagctccgggacaacttacaaatgaagacacagagcccccgtcccttgcttcagagaaccaaataacggaactgaatgrtcgtttcttcagcaaagcctaaagacgcttgcgtcccgcggagaggtgcccacgcgcgactcggctgccccctcttcttgcgggtccgggt

SEQ ID NO: 520997 - DNA, 480 bp, Homo sapiens
gttctttcgcatatccatcagaagcttttaaaattgtactgaggctacactctactgactaaatatatgcactttttagtcttgactttggaatattaaaacaattccacttatacgattttttattacagtggctatatctaacaaccctggaaaaagagatcagactttcagaattcaaatggctcaatttgatgaaaatctatcgtaacagtttccataagcactaatgctagcactttcaggacttgaaaaactgacaaatcaagtcaagcacagttcttttttaaagacttaattgtatttttaattgacaaataataattgtaaaattccacttctggatatatgtccaaagaaattgaaatcagtatgccaagatatatctgtactcccacattcrctgtagcattatttacaatggcaaacagttctcttatggcctgatttctttgcggttgtatagatatggacaaacat

SEQ ID NO: 520998 - DNA, 215 bp, Homo sapiens
gtggagtctaacactagggcttgcccacaaatgcyctctagcctaggctctgccccatgtcattgtgggaggcttattagaagtcttaagaaagcagattacctggaagccaacactctcctatgtaaggataaaaaaatatttttcctccaactttcttaggttcatgactgaggcccctataacaaaaggcacattaacaagagaagagcata

SEQ ID NO: 520999 - DNA, 560 bp, Homo sapiens
ttacctgcgcctgatgagctcagcctgtcagtcaattgctaatgatgtgggttctcccgtcagaggcacagtgagaacccggctctgtggttagcaacagcacccaccctcaaccctacaccaggccagtcttctcaaaaagttcacacgggggtattttttggttctgagggcagagaacacaatgtctcaggtggtagtgaggccacagttggcrttcatgaaaggaggcaactgtctgacccgtgacatccaatccaatcataacaaatgcacagccaaagctgaaagccatgattcagccttccctccaggggcactggctcctgatgaagtctcaccaaaacccaaagagagagccttatccagggaaagggtgtttaactgagccaaggaactcagtggaaagttttatttcttaccatggcaaaaaaaaaaaaaaaaaaaaaaaaaaaaaaaaaaagatagatcatgcttttgaaaataaaaataacctgtcacctctccatgggaggaggtggaatgagccaaggaagagacgagattagatagtagataaa

SEQ ID NO: 521000 - DNA, 560 bp, Homo sapiens
ttacctgcgcctgatgagctcagcctgtcagtcaattgctaatgatgtgggttctcccgtcagaggcacagtgagaacccggctctgtggttagcaacagcacccaccctcaaccctacaccaggccagtcttctcaaaaagttcacacgggggtattttttggttctgagggcagagaacacaatgtctcaggtggtagtgaggccacagttggcgttcatgaaaggaggcaactgtmtgacccgtgacatccaatccaatcataacaaatgcacagccaaagctgaaagccatgattcagccttccctccaggggcactggctcctgatgaagtctcaccaaaacccaaagagagagccttatccagggaaagggtgtttaactgagccaaggaactcagtggaaagttttatttcttaccatggcaaaaaaaaaaaaaaaaaaaaaaaaaaaaaaaaaaagatagatcatgcttttgaaaataaaaataacctgtcacctctccatgggaggaggtggaatgagccaaggaagagacgagattagatagtagataaa

SEQ ID NO: 521001 - DNA, 499 bp, Homo sapiens
ctggactctgtgccaggcctggcagattcctcctttgtcttgagagcccaactgagtgcctggaacacatgaggcatccagcagatatttattgaacaagagtgtaaggagcagttttgggattgtgcttttaaaagaaaaatggccaaactagtgtgtttccagaggaggctggtcaggagtagttartggggaaaaaatttcatgtgaggaatttgaggatactgggcatggatagtatggagaagtaaagctatcaggtaatatactaacttttttcaaatacttaaaagtggctaatgacttagttgtcactgtagatgacaggcataagagggaggggagaagagacagagaggaaggtgagatgtatatttggagaaataatagctttcaactcagggtaaggcagaattttaagacagagctgtccacaattgggaggacttgtggtgtggcctgagctgctattctccagatgaggttggatgaccactgt

SEQ ID NO: 521002 - DNA, 499 bp, Homo sapiens
ctggactctgtgccaggcctggcagattcctcctttgtcttgagagcccaactgagtgcctggaacacatgaggcatccagcagatatttattgaacaagagtgtaaggagcagttttgggattgtgcttttaaaagaaaaatggccaaactagtgtgtttccagaggaggctggtcaggagtagttagtggggaaaaaatttcatgtgaggaatttgaggatactgggcatggatagtatggagaartaaagctatcaggtaatatactaacttttttcaaatacttaaaagtggctaatgacttagttgtcactgtagatgacaggcataagagggaggggagaagagacagagaggaaggtgagatgtatatttggagaaataatagctttcaactcagggtaaggcagaattttaagacagagctgtccacaattgggaggacttgtggtgtggcctgagctgctattctccagatgaggttggatgaccactgt

SEQ ID NO: 521003 - DNA, 569 bp, Homo sapiens
gtttttggtcatccttgggtgccccagtggttccttcatctacaatatggccttcctcacagagaggagctgcctaaaccacccaggagaggtcatatgaaattttacagatatccagggccaactgtcattttccagccccacagtagaaccagcccctgctactccccctatgggctctccttctccagatccacttggctcctccctctggctgcatggtcactgtccttgtattttatccctggtctgtgctctctgattgccacttgaagaccaagccatgaggtctgtygggtcactgcgggaacctgaagtcactttgctactatcaggatgtggactcaccctcatcgtcaggagggctctgcacccttggggaggtgttctgggtgcttagaagctggcctcaggtggagcatactttagaaggtctgatgtaccctaggtcccttcacacccggggctttgatgttttcaaccttcattttccctcactgatggttcacagttcacattctgagctcggaggctggcaggggagttacaggtgcccacatatccctcag

SEQ ID NO: 521004 - DNA, 398 bp, Homo sapiens
tctgtccatcctatggaagtcaccggatggttcacctgccaaaaatgaagctcacagtgcctcaccacccaagtctcctccctcagtgcccttcacaagtgtcctgagtgttctgcttttgccaaaaccccctggtcgtgagatccagggccactttgcaaaccccaagagtgctgcagtcygaagcctttaacttggcctctttgtctctaagcagagtcaactcttatttgatttccttttaaaaatgttttttttgccaagctcccaaaggccaaagctggaacaatttgagcaacaaaataatgagagtattggattataacctatagaataaaataaatatccattagtgcatacttacataaataaataattgaatacattaggaaatggga

SEQ ID NO: 521005 - DNA, 559 bp, Homo sapiens
accagtaagctgaaataagaacaaaatacaaaatgagattcttcttagccacctgatctgttctgttatacttactgtagacaactaggttaagctttggttttcaacttaattttctctccaaaacgtctggtttctctctgcagcaattttgtatgtcgttatttgtcattgcctagtattgatccactacttccttcctggatctcaaataattcagctaatcccatgcccctgccatgaatccagcattttctggaactcatgttgtcaagttcccttatacaagggaaatacactagagcytcctctgtctcccatattcattagttggctgcacactgatgcatgaatggaaaagatatgttttctctgactggactgttagctttttgcactaccagtcaagtatctatcagaacaactgtaatgaaaactataaatctcaacctgagggaacagttaatgtgaagggttttcttgtttgtttattttgttctgtttttatggtctcccaagccctggtgtggcattaagattcaggatatgagctattgtg

SEQ ID NO: 521006 - DNA, 596 bp, Homo sapiens
ccagcccccagtggctgaactgtctactcctcaaggagattgtgccttgaggacgcagtctgtgtctcatccacctgtgtagccccaagccagtaccgaaygtagctcaaaacacctttgcagacaattttcttaagccactgaatgaggaagaaggaatgagttcgtatattggaaataggaaaactgagactcagacagattaagtagtctgtctactagaagactcaagacctccagaatcacgtgggttgtcagtgaaggggctggatctcaaattaagattctctaatccccagagttctttttccactacattaagttatgagtcctagccttttatcttcagacatttcaacttagaggacaaatgcttaaactacgaggcagatcagagatggttctgaggggtgatacctccagagtggagggggcaaatgggatggtgaggtaattgtacatgtggtttagatggaaatgtcagggagtaagtatttcttatttcaacttagaggaggaatatttatatataaggcaaattagggatggttctgaggggtgaaaccaccacagtggagggggcaaatgggatggcg

SEQ ID NO: 521007 - DNA, 585 bp, Homo sapiens
atgaaaccatcacaatatttatcacattctcctagaaacatgaggtcctgggataatgtctttatgggtctctctggagaagctcaaagggcacctgtttcaaagggcaacttccttcttggatgaagcatcttgtagagaagacaatcaatggccaaggtaggtaacagacaccaagatactacacacgcctctaatggttcccttaaagcctgagcttaagcagtctgggctctacttcaatcatattctaaacatctaaaccaaaagactgcaattgcaaataacagggagacaaatattcaaaaggcttttaagcaacattttctgctacaggcaactgctgatgrttcttatctgagtgcagtctcttaactgatgtgattacttgaatattcaaaataaattatcatttgaggaaattatcaattgagttctccaacctaatttgtgcaaagtatacaaaggcagtgataccttaagctgaaattaaaagacggtggagaaacataataaagattagttatgcaaccccccaaacgaaaatgtcttaaaagattttaattcaagcctgtgtaacataaa

SEQ ID NO: 521008 - DNA, 591 bp, Homo sapiens
aaagccagtccacgcctcagcatcctgaggaaatgttcttccttgatgctctgagctctctaagaagttaccacaaaaccaaacccatcaraagtttgcaggacgtccttgtttagagctgggaaataaaccacgaaacagcgcaaaggagagtccaggcctgccaatgcttccgcgaactcctcgccccgacctcatccttctccagctcctacctgcaggcctcaggtgagctccggagtctagtcattcctgttgggaggcaagtgtgtgactggtgtgcaagtcaggtcaggaggctgccttggtgtccagcaagtcttgtttgcggaggcagggactgctgggttggggcacttcccgaccctgtttctgctcttctcccctctgcaggcctcctgacctccaggctccttaccctcccgctggcctctgctctacactcatctttgtgccctgcttccaatcatgccaggcctcggggtccctgtctctaacttcaccatgagactcaggtgcttctctacactccaccctctccaacactgtttggaatctcaggcttggtcccaatcctatgggctaactttg

SEQ ID NO: 521009 - DNA, 477 bp, Homo sapiens
cctggcgggcggcgggaaactcgccgcgcgcgttccgccgctcactttcccattggccagtcaggcccccggggcggtaccctggggcagctccctcctgtgattgggcggtattggcctcgggccccgcctccagtccagggctgcgaaggcgggacggagcaaggcggctgcaggttccggcgtgttgctggctgcagagagctcaggcagcgggctcggtaggcacagctcccagcggcccttcccacccagctcgtccttcctccccttcagcccgtttccttttgtctccatctccgaactctgtgggacgtgaccctctcctaagatctaggcttttwtggcggcgctataccccttcctcagatcgtactcccctccgctgagatctgagcccttgatgaaactgtgacccgcctgcaaatcgggtgctcagtgccgctcactactgcggcgctgtccttagatctcacg

SEQ ID NO: 521010 - DNA, 573 bp, Homo sapiens
ttcttttcctcagatctaataatctgaaaaaaagaagattgaaagaattgggaaatagcatgtacaaagaacttgtaatgtggtaaccatttcaaaaaaccyatttcaggggctggccatggtggctcgcacttgtaattccagcactttgacaggtggaggtgggaggattgcttgaggtcaggagttacagaccagcccaggaaacaatagcaagaccccgtctctacaaaaaattacaacattagctgggcattgtggagtatgcctgtggtcccagctattcggggcactgaggcaaaaggatcgtttgagcccaggagttcaaggctgcagtgagctgtgattgcaccgctgtactccagcctaggcaacagagtgagacccctgtctcttaaaaaacgatgtcccagggatgaagccaacttgatcgtggtggataagctttttgatgtgctgccagatttagtttgccagtattttattgaggattttcacattgatgttcatcagggatattggcctgaaattttcttttttgttgtgtctctgccaggttttggtatcaggatg

SEQ ID NO: 521011 - DNA, 513 bp, Homo sapiens
gaatatctttgcacttcatctctgcagtcacgtcccattaatataattcgtgtgtttgacctacgcrtcttctttgagacaggctgtaactctcaaattcgagcaactgagttttaattacgacctttattgtttccttgcacttctggagcgactcagcacccaggcaattaactccgcctgtttttatcagggtcgttcctaccactgagactcttggcagcttccagttcctgggaaggcactgagggtcagagtctaaatggctttcagctcacatttcccatcccatcacgctgtcagcaggcgcctcctctcatatctgatagggaactcgcactatgtcagatatgacaaataaggctttaaaacagccaagggaaatataaacaaagagatctacttttcagactctggtaggaactgaagctcttgaaaaagaaaaggagagaggatttttaacagacttcctgggaaaccagttcaaatgggagagaagagctgccagtggca

SEQ ID NO: 521012 - DNA, 541 bp, Homo sapiens
taccattgtcatgcacatctgtgaaggctcctgtatttgtcacttcattgtctatttttccattacacccatctagacctttattagaaaattatgttttcatgtcagttatacctatgaggctgtgagtccaagataactcagtccccatcttattaaatctgtggtctctgggcctatgtgcccaatctctcacaatagatggagacagagagaagcgaggaagaagaaaggaagaaaaaaagaggaagggaaggcgttaagcaaaatagcaaaaccgtcctactggcatgtctttgggctacctgawagtgacatctggatattctcgtcttaacgaagcgagcagatttcagggtcagtcaaacgtgtgaacctgtgttctaatcccctgtttttctgttcactagtggactactttccagagcttggaaaagcaacttaacccttctaagcttcaatgtcttcatctgtggaatggagaggataacaatatctaactctctgtaatatgaaggtaaattgaggaaatgtttgttga

SEQ ID NO: 521013 - DNA, 581 bp, Homo sapiens
tttgaaaattctctttctcaaaaaagataaaagtctacttaggaaaacaagagcagaggcagaatgaattgagaaggggatgccaaaagacagaacttactttgcaaagcgacagtgtctagcgtctccacagactactcacacattcaattcactccaaaggtaatttatacttcacgaaagagtttccagtgttgtagtaatggtagatgagagctgtcaggccttaagtaacagcctattttaatgcctggagagaaaaatacaacttgcacgcatttatggaaatgtacaaaggtacaggaaaccgacccttgcctccatcccmttctaacaaatgcagtaggcaggaagtcctccacaccaaagaaagatgctatcagcacgtccacttgcataggaatacaaatacaattatttctttaacaaagaaaactaatgacagtaggcatacatcctactgggcattaagtattttgttatatacagttaacacctatttgaattgggtaccatagcacttaattgttttgttctatgcatagcaaagcaaccaactgaatctaatattagtcattcat

SEQ ID NO: 521014 - DNA, 628 bp, Homo sapiens
ctcccaaatgcatttttgagggtaatttcttagaacctgcataattagaggatgtagcagcacgagtggcagtgtgatgtaaataaaggtagtctgggttctagtcctacctctgccactgatcttcactgtgtatcattaaacacattctattccatcactaagcttcatgtttttcccctgtgaagtcaaggcgaaggaggaggactcattgtggtctcaaagggtcctgtaggctctgactttctgtgattttaagtatggatctagaattggtggtgaaggagagagttgagtgccacatagaactctcagctctccatccttagatacctgcttctttctgcactttcctatactgagggatatgacaatctcccatggcttcaccatcacatgtctttgaatgattgtcaaagttctccctctaggcatgatctcccctgaactccagtcctaccttcttcaccctatgaggacatctcactgcaggagtcccatcayctctgtttccacatggctaatcccaaactgtcttctgctaaaaataacccctccccttgaacactttctgagctctgtttatggccttattgttgcccaggacagccatatctacaacatgagt

SEQ ID NO: 521015 - DNA, 495 bp, Homo sapiens
accacagttcggggtgagctggagccctcttcattagaatcaaatacatgttccatgtcaataaaatsatcttgttgaggaattccatatggtgtctcttctgatataccatggtcttttacaagaagcagtcgtgactctatatgcttgccatgctgataacatttatcaactcctatctttaggtatttttcttttagatgttttctgaatacttcctggtaatctaacatggtgacagcaagagttagtaattatagaatcctagacaacaactctaactagtacctccatcaccaccatctccacttagatgtctcaaaggatcctcaactttacatgtctaaacccgagttcttgatttttatactcttctgtccccgccaaaaaaccctccccaggcatctcatctcagttaagtggtgctatccagttgctcagaaaaatgttatgagtatttttccttcaatcctctacatccaatcaattagcaag

SEQ ID NO: 521016 - DNA, 625 bp, Homo sapiens
tgactttacttccttttgctttgccctgaggaakttacctggaccttcagctagtctctgcatgagaatggctctaccctggcaccctagtcacctggcaatatctacaatggtccctcgagcaaagacttgaaccacagctaatctgagtcttggtagaatgcctgtgatccttccagagcacaaaggatgggaggcctgagaggagctgcttcaagatcatctcccacttgcctccttatgtcccttggcaagtttcatgagacagattttcatagcctcccacctcccaggttctgatgaggtacaagacttcctgaaccacttccctcagaatagagctacagactataaagccacttaagtgcagtctataattggcttcttagcagtgaggtatcccacaactcacttggaagtcttctggtcctttttgtttcagtgtcatcctttttgttgtttgggacaaggaccatttggggctggaatctttgactgctttttctttcactgtgtaaataataaactgtttgaatttaaaagtgattccttgtatctttacctactaaatcagtcaggccttggacttggacttggacttggacttgccatatgtgcttgacag

SEQ ID NO: 521017 - DNA, 550 bp, Homo sapiens
taattctttcacatccccaatcctcctttctattcccatgacatttacttctacaatgaggaatgaagcataaattagccattcagatcctggtccacagccatcaatagcaacttcagtaatcgctgcaatgttcatctccatttttttttcaatcattctcagaactcagaatcagggtcagatcttaactgctgaagaagagctgtacaggccctagacacctagcaatcattgctcataatcattatgcctgaaactaattacaatacacttggtgactaagagagaaccagccaagagcaatgtaaaccaggattccacaacgatcaaaagccaagcaaattggaagttagatctgtgcagcaattgcttgtattcatgtaaaaatgctgctcagggaatctgttttaagtaaagctactggtgtctgaaagaaagtttgasaggtggtggtttgcaaggatttgaaatatagtgtctgtgatcagcgtttatttccccttcaattttcagtttgaaggcttaagtatatacattctaaagataa

SEQ ID NO: 521018 - DNA, 364 bp, Homo sapiens
agtaagttagaactttgtaactgtctcttgcaaacggtgccccatgccacccattagcatgtgcaagaagtgatacatttggcttyagcctgcctgggttttactttgctgatttgtttatttttaaaatagttacccatagtatacttccatttggggtgtcctcatagaaggatagcactcaggcagagaaatagcccaaaaaaacaataacagcaccaaaaacttggtagcaagaatttaataaaaccaagggaggccaatgtttctataggtaaccatttaacatttgtcattatgtgtctagctctagccaaggcattgcaaagaatgcaaaaagacatgatcaaaggcctcaagatgt

SEQ ID NO: 521019 - DNA, 582 bp, Homo sapiens
gctggggatcaacaaaggctttaaaaagatgaaactttatttttcgcttgtgtaaaagaagttaaaggtttgtatgcagactcagcaataatgaggtaccgaggcttcttccggctcctagttccactatccctagactgtggccctcatcttcacagtctaagatagctgctggagtgccagtcatcacattattggcctaagcatcaggatgaaagaaggaacatgccccttgttttctggggagtctttctagaaatcctgtaccacagttgctttgaccacattgaccaggtagcaatccctagctaaaagggagacctggatatgtagaattttggttgtatggcatgggtacagttttttaaatgagattttataaatttgaaagagaaggagaatgtggaaggttcactaagaaattgacaacttatgccacagtaggtaatattcttatccccatgttgcagataaggaaaataaggcactaagagactgaatgagtyggtgaagttcacacactttataggtggcagtcacagtaggacgcaattctctatgatcatccctctcctgactgct

SEQ ID NO: 521020 - DNA, 648 bp, Homo sapiens
atagaaatttttatcagagtgttttaattaaatatatctctcttaacttactttagtcaaaataaccacatgaaagtagatccatttctctttagcataaaatggtttctgtgtatttgtgtatttggcaggacataaataagcatgtgatctaatttcgccttttaaaaagttgtataaaattgtttgtgacaattccaagtttcttttttaaaaggttgcatatgaaatagactaataagccctaaacaaaatttcagttatattgtcataatgggtaaaaaataaaacaatatttggattaagaagataattatcttttccatttccaggaccacaattatgaaccacatttccatgtgcctcttgactcaaattattcacaaagctaactgaagtctcaaacattcaaacaaaatatagctaattaaatatggtatttatgaaaacaaaccaatgtacttttaagagtcatatgcatgcctctattaagagtactcttccatcattccaaagccagtatracaataccattactttgaagtgcttttgtttgtctgtttgttttagagaaggagtctcacaatgttgctcaggctgatcttgaacccctggtttcaagtgatcttcctctccttaggcgcctaa

SEQ ID NO: 521021 - DNA, 492 bp, Homo sapiens
agtaaaaacactgttaaagatgaacgattcaggaatatcacttaaacaccaatgactctctctgcagaaaaattatcctagcaggcctgattgctacctgtgttagagttctctagagggacagaactaataggatatatgtatataggaaagggagtttattaaggagaattgactcatacaatcaaaaggtaaagtcccacagtaggccgtctgcaagttgaggagcaagaaagccagtagtggatcattccgagtcccaaaacctctaaagtagggaagccaacagagcagccttcagtttgtggctgaaggcccragagcccctggcaaaccactagtgtaagtccaagaatccaaaagctgaagtacttgaagtctgatgttcgagggcaggaagcatttagcatgggagaaagatgaagactggaagattcagcaagtctgctcattccaccttcttctgcctgctttttctagctgcactggcag

SEQ ID NO: 521022 - DNA, 619 bp, Homo sapiens
tgccagtaagtttaaataattaactaatgcatcatatcccaagtgctttctgttaattttatgtcaccaccctcagatcaaaacgtgtagactgagagtgtgactcaattatttcataactaagaaacasttaatctgatcctaattagtcatctctaaactgggacttcaccctagctttttagccttggatgacaagttaaaaagtcacacagagaagatatttacattggcattttgatgaccatggaaaataaatgatctcattaataatgtagatctttttttcccccagggcagttttcaagtatagaaagtattctatttttttatgaattaaggttaaagggaagattctgacatagaaaagaagaaatttctttctgagcctctttaatgaaaaactagcaaactctttctagactttctttttaaaaacagcctcttgactcatgagaaactgaagcaaattatcacttattacatgctcactttgtaaaagatgcggtagtaggagctgctcgttttaacctctcaacaatcctctaatattcatatatttctattgtattggtgaagaaacagggttacagcaagaactaatttgcctaagattaca

SEQ ID NO: 521023 - DNA, 543 bp, Homo sapiens
cctttctccccattccgtttgacatccatactccaaaagaccttcccttatttgctatgcatgggtagcagggagattatagagaaactgttctttttcctgctttctttttttactgctgggggagtgatcactttcctacagctcttgtccacctggcccttgaggcgtttggagttttggtaaggtgttaacaaaaattgtctcaggtgccaactaaatttcataagcttatagcagcacaacagactaagacaccacatgggaaatgtacattttacaaaaatatattatacatctaccatgtctaccatgtgccttagaragttctgggtctggtaatacagcagtgaataaagtccccgctcacatggagggggtaggctgatggtgatggaactcataagtatacggcaggtgttagtaaacactgcggagaaaaataaagctgtgtcagagagagagtacctggggatcaggggtagagcgacgttaaccagggctaataggaaggcctctttgatgttattaggccagtgagga

SEQ ID NO: 521024 - DNA, 372 bp, Homo sapiens
tgcttttgacttggaaaaaattgcttggagcagttacagcccttggggactctaggaacatgtgtatatattggaaaaagagaaagaggactgtatgtttcacaatggagaaatttaggaggtatacagccacatgcatgtgtgcgcrcacacacacacacacacacatacacacaatgtgtggcatgaggccctgaggtccatttgggatagcaaaggatggccagaagtctagacttgatagtagcagaaacctgtccttctgaccttttatatgtaggttatgaagaaacattattaatatcaggacttatacaactttttttaaaagtctctctctgagtcaggcttaaactgggccaggacctgccc

SEQ ID NO: 521025 - DNA, 372 bp, Homo sapiens
tgcttttgacttggaaaaaattgcttggagcagttacagcccttggggactctaggaacatgtgtatatattggaaaaagagaaagaggactgtatgtttcacaatggagaaatttaggaggtatacagccacatgcatgtgtgcgcacrcacacacacacacacacatacacacaatgtgtggcatgaggccctgaggtccatttgggatagcaaaggatggccagaagtctagacttgatagtagcagaaacctgtccttctgaccttttatatgtaggttatgaagaaacattattaatatcaggacttatacaactttttttaaaagtctctctctgagtcaggcttaaactgggccaggacctgccc

SEQ ID NO: 521026 - DNA, 372 bp, Homo sapiens
tgcttttgacttggaaaaaattgcttggagcagttacagcccttggggactctaggaacatgtgtatatattggaaaaagagaaagaggactgtatgtttcacaatggagaaatttaggaggtatacagccacatgcatgtgtgcgcacacacacacacacacacacatacacacaatgtgtggcatgaggccctgaggtccatttgggatagcaaaggatggccagaagtctagacttgatagtagcagaaacctgtccttctgaccttttatatgtaggttatgaagaaacattattaatatcaggmcttatacaactttttttaaaagtctctctctgagtcaggcttaaactgggccaggacctgccc

SEQ ID NO: 521027 - DNA, 588 bp, Homo sapiens
catatatacataactctattataatatgttctactatataattattctattcactcatctgtttccttgtactagagaaccaggttactctggcaccacatttctctctaattgatctttaactctatagagatcttctccattctacctcaggggagttaggagaggaaactctgggtatctagagtttccttaggcacattcttcttatgttgttaattagaaggtaggattttaattttgttcattctttttccattttgtttgcttttaytttatgttccccatcataaaatcagaaaaactacagcataatggatatacagggatggatatgtgagggtgtgtgcctgtttggggttatgtatttccctttcttctttgtgactcctgaggtcagaagctgaggctccaaaaaattactgtagcagaaactctatgtatatgtgggaatagggagaggtagaaaaggataggaccagctttattcctcactgctgaagcccaactgttaagccagagctggtgcatttgctaatgtctttgatgataatctttatcaggcaaaatggccagggtcaggactag

SEQ ID NO: 521028 - DNA, 588 bp, Homo sapiens
catatatacataactctattataatatgttctactatataattattctattcactcatctgtttccttgtactagagaaccaggttactctggcaccacatttctctctaattgatctttaactctatagagatcttctccattctacctcaggggagttaggagaggaaactctgggtatctagagtttccttaggcacattcttcttatgttgttaattagaaggtaggattttaattttgttcattctttttccattttgtttgcttttattttatgttccccatcataaaatcagaaaaactacagcataatggatatacagggatggatatgtgagggtgtgtgcctgtttggggttatgtatttccctttcttctttgtgactcctgaggtcagaagctgaggctcyaaaaaattactgtagcagaaactctatgtatatgtgggaatagggagaggtagaaaaggataggaccagctttattcctcactgctgaagcccaactgttaagccagagctggtgcatttgctaatgtctttgatgataatctttatcaggcaaaatggccagggtcaggactag

SEQ ID NO: 521029 - DNA, 588 bp, Homo sapiens
catatatacataactctattataatatgttctactatataattattctattcactcatctgtttccttgtactagagaaccaggttactctggcaccacatttctctctaattgatctttaactctatagagatcttctccattctacctcaggggagttaggagaggaaactctgggtatctagagtttccttaggcacattcttcttatgttgttaattagaaggtaggattttaattttgttcattctttttccattttgtttgcttttattttatgttccccatcataaaatcagaaaaactacagcataatggatatacagggatggatatgtgagggtgtgtgcctgtttggggttatgtatttccctttcttctttgtgactcctgaggtcagaagctgaggctccaaaaaattactstagcagaaactctatgtatatgtgggaatagggagaggtagaaaaggataggaccagctttattcctcactgctgaagcccaactgttaagccagagctggtgcatttgctaatgtctttgatgataatctttatcaggcaaaatggccagggtcaggactag

SEQ ID NO: 521030 - DNA, 588 bp, Homo sapiens
catatatacataactctattataatatgttctactatataattattctattcactcatctgtttccttgtactagagaaccaggttactctggcaccacatttctctctaattgatctttaactctatagagatcttctccattctacctcaggggagttaggagaggaaactctgggtatctagagtttccttaggcacattcttcttatgttgttaattagaaggtaggattttaattttgttcattctttttccattttgtttgcttttattttatgttccccatcataaaatcagaaaaactacagcataatggatatacagggatggatatgtgagggtgtgtgcctgtttggggttatgtatttccctttcttctttgtgactcctgaggtcagaagctgaggctccaaaaaattactgtagcagaaactytatgtatatgtgggaatagggagaggtagaaaaggataggaccagctttattcctcactgctgaagcccaactgttaagccagagctggtgcatttgctaatgtctttgatgataatctttatcaggcaaaatggccagggtcaggactag

SEQ ID NO: 521031 - DNA, 605 bp, Homo sapiens
tacagcaagcataccatatatacataactctattataatatgttctactatataattattctattcactcatctgtttccttgtactagagaaccaggttactctggcaccacatttctctctaattgatctttaactctatagagatcttctccattctacctcaggggagttaggagaggaaactctgggtatctagagtttccttaggcacattcttcttatgttgttaattagaaggtaggattttaattttgttcattctttttccattttgtttgcttttattttatgttccccatcataaaatcagaaaaactacagcataatggatatacagggatggatatgtgagggtgtgtgcctgtttggggttatgtatttccctttcttctttgtgactcctgaggtcagaagctgaggctccaaaaaattactgtagcagaaactctatgtatatgtgggaatagggagaggtagwaaaggataggaccagctttattcctcactgctgaagcccaactgttaagccagagctggtgcatttgctaatgtctttgatgataatctttatcaggcaaaatggccagggtcaggactagcag

SEQ ID NO: 521032 - DNA, 605 bp, Homo sapiens
tacagcaagcataccatatatacataactctattataatatgttctactatataattattctattcactcatctgtttccttgtactagagaaccaggttactctggcaccacatttctctctaattgatctttaactctatagagatcttctccattctacctcaggggagttaggagaggaaactctgggtatctagagtttccttaggcacattcttcttatgttgttaattagaaggtaggattttaattttgttcattctttttccattttgtttgcttttattttatgttccccatcataaaatcagaaaaactacagcataatggatatacagggatggatatgtgagggtgtgtgcctgtttggggttatgtatttccctttcttctttgtgactcctgaggtcagaagctgaggctccaaaaaattactgtagcagaaactctatgtatatgtgggaatagggagaggtagaaaaggataggaccagctttattcctcactgctgaagcccaactgttaagccagagctggtgcatttgctaatgtmtttgatgataatctttatcaggcaaaatggccagggtcaggactagcag

SEQ ID NO: 521033 - DNA, 530 bp, Homo sapiens
aagaatatgaaactgcccatctccttgtactcttaccaatacatgtcattattttttaatctctgctattttaatatgtagaaaatatttcacttctgccaatttttttcttctttgagtttagctaaacattttagtctcatttaaatgtgaattatgtgaaactaggaaggagttcaaaataatatctgtttgcgctttatatgttgataacaagcaatatgtgaaaagaggggggaaagtactattatctctattgctatttttgcaaatagtgaagttgatgctcaggatatcaaagaaattttcccaaagtcagtgaaagatcaaatcttctagcgctcttcctagttctctcccaatctgaagtaaacacagggctgataggcaatccaagattttctaagtgcaagtaaaagtgtaacatatataatttagtgatggwgttgtcccagcactctcctctcctctcgccttttccttctagcataatcttggcaaaataaagcaaagggaggaggaaagtaagg

SEQ ID NO: 521034 - DNA, 474 bp, Homo sapiens
tttcattctgccacagtaggtgggtttcttttattattattattattttctttgtagagacaggggtcttgctttgttgctcaggctggtctcaaactcctggcttcagacaatcctacctcaacctcccrgagtgttgggattacaagtgtgagaccctgcctctggtcgaggagatgggtttctattccgtgcagttatacacaatttctaattaatacagcttaattgagaaggtgagatttgatcagggctttgaaggatgtgagtagcaactaactgcgagaagggggccaatgaaacagtaattcctagaggctctgttcagacttagggcttttgaatatcaggggttcatcatctgagctgctgaattagactaggacttcttaaatacttctaaaattggtcttgggaatgaacctgcaagaagaaaaaagcctaataaaaatagtaatagtagcagtagtagca

SEQ ID NO: 521035 - DNA, 453 bp, Homo sapiens
tctcattctattcctgagcttttattatgatgtctatgtaaattacaccaaaatctaattgtagtcccattttctctcctggcctgtagtccctttkttttttttctcctggcctttaatcccatatttttaatttcttaccagtgcatctctcctggatatttgttgcagactggcttcttggcaagcagtctttgagatggagatgaacatggaggacatttattagagtgttgaaggaagggtgaggaaaaagaattgggcagagggagaagttaagttgtgatccatgtacgacataggccttagctaactacatgcaaagctctggaacaggattgaccctttggagttgtcctaacttgggcaagagagctggaccttttttcctctaactcttattggtcagtcattgatatggcttgcctttggaaggaagagtaagcttggaaa

SEQ ID NO: 521036 - DNA, 647 bp, Homo sapiens
acattgttcatgtcctttacttccctaagaattacacaaccttcccaggctttctcatctccagcagttttgtcacattgctgagtaacgtccacccttggtaatctcttaacattatttccattctgtatgtagacaacaaattagcatttatgacctaggttttctgtttttcatgaaggtatcagacaatctcaaatgtctgtggaatgttacgcttgactaggaaggtgtaaattgtttcttttgatagttcttaatttcaaatgattatgaattcattatttttaatgagagaaaggtgattgtatacctgcaaaacttttaaacatcgacctttggtaaaacacaattccaattgtgtttaatcatgactacttagatacaactgaacaagccccaggcacagaagttacgactaaaacattcagcccttccaggaacagaaccagaaatttctccatatgtctgtagacgctgaacttcaggatgtctgtgaatattttctgtgttccactgtcccctcragtttgtttcccagccatggaaaatgcccatgagaaagagttgtgcaattgctaactgttagtcactttatatttcctgtatcccctatttaatttccctggtagctggcaataacatct

SEQ ID NO: 521037 - DNA, 473 bp, Homo sapiens
agccaagccacaaggtcccagcagggcttgaaayggcaagtgtgaagctaagggagaaggttcccaagcattgaagggaaatgggaaagctgaccctatcagaagcaaactcctaggtcccagagctgcctggggaggccctgccacaaagccaaagcctccaaggtccacagaaatgaagggaggacagcagcagttccctctggctcagcttggatgccacgtccttccccaggcttggaggggcctggaagccctttctctccattctcctggaggcaggaaaccatagcctttggccctcaccccacccacaggaagcacaagggcccagagacctagtgtggtacaaaacatctttaagtgaggtacatccaagtagccatcttctaccaagtaagccaaaggggcttataactgcacccaggctgtacccagttggagccccagacttgcccctctcttgccgggaa

SEQ ID NO: 521038 - DNA, 130 bp, Homo sapiens
ggcctaggatcattcacatggtgatggacacagggtgcaagagagggtacaccccaatgtgcagtacttttcaaacctctgcacgcatcctatttgcccyagcccattggccaaagcctgtcatgtggca

SEQ ID NO: 521039 - DNA, 607 bp, Homo sapiens
caggtttgtggcttgggtgacagcaagaacagcagtgccattttactattttggtaaaactggaggaggaacagttttcaggagagggaagagctccatttgcagcatgtgaagttttatatgcttgcggggcatccgagggaagatgtcactcagggamttggatgtgggagtctggagcccaggttggggatgaggggatgaggctgaccctgtttcagacatttcagggtgcctaatgtggccaattaagttatgtaggtaccagccatttcccctcattccagacttcccagaactcatcacatttaagtttaacactctgcttggaagagcccatattgttgttgctgctgctttggatctgcttttgaagaaataaatattgcaggtacaagttaaggtccctttgtacctctctgttctcagaaagaaataaccactattctgcagtgagtgtttttatgcttttactacattttcatatatccttgaacacctgacagtgatgttttatattttaaacgtgttcataaaggcattatactgtatgtgtccttctgaaactatcttcactggttattgtctttgagttcatctgcattgg

SEQ ID NO: 521040 - DNA, 644 bp, Homo sapiens
ccataacagagtgccatgggccaggtggctcacagcaacacaaacttactgctcagttgtggaggctgggaggtctaagatcaaggcgctggcagcttcagtgtcaggtgagggttcacttgctggttcgtaaacgtccatcctctcgctgtgtccgacagggcaggaggggagggtgctctccagaattcaacagcactcaccccaatcctgagggctccgctcagtcaccttccaaaggccccgcctccaaatactggcccrttgagggttaggattccaataatcaaattccgggaggacacaaccattcagtctgtagtgccgactgcagtagttggcactggtgtccccctctcgcctgtcctcttctgttgccagagcccatccccaggtcctgagtgccatcccagtcattgccccccagagctgccacagctaatgaccaaataatggagacgccaactctctggtcccattcacaacccgagtccatgggagcagcctgaagctgcctccagcggcaacaccatccttgctaagctccctccccccaccccgccctgctctgaggatgtgactccctcctgggagcacccactcagtaaatcgcttgaaccagaatccccatctcaggcccgtat

SEQ ID NO: 521041 - DNA, 650 bp, Homo sapiens
ctaagccttcacttctcaggaacagtgcggagagtactcacgtgtggagtggtggtgcctcctggtggtcataattaggaactgcagagcagtgtagcaggcctaacagaatgattaggagccaagagggctaatttacggtcagacaatgggtttgactccagttctgccatctgcgagtaggtgacacaggtcattcacctccatgcttagcctccatattcaactgccctacacctacaaccccacggagtggctctgacaacttaacaagacaatatgatatcacttttaagggctttactgcatactaagtgctacgatcctaggatgatcctggcatgatgtcagaactcagaacaccgcagcaccacactgccaacatccttctctcttgtgagaaggtgaaacaggtgggtccccrgttgttacttattttttcttttattgggtggcaatgagaaggggttactctggaccggagcccctgaccagaaaaatagatctgctgtatcacctgaaattcactggagcaaaatattcctttgagttatgcattgctctatccagacttctcttttaaaccggaagttcccccagaagggtgactgtattagttccaaatacccacatgagcatgagtttatcag

SEQ ID NO: 521042 - DNA, 624 bp, Homo sapiens
gctcccctccctgacaggaggaggggactgggggacactttgtgctgtcattacctccgtttgggacccctgccccagtcacagccttctgcccacttgccattgctggcctacagagctggcttcctgcctgcctgtgatgggagaccctgccttcaagctggctgagttgtccccaggaggtagagaaccagaggccaggcctgacctcagactgcagggtcccctctcccacggccctctggggaagctccccgcacccaggcctcctcagccctgcccctcctccccaggtcctgagctcttcttccagcaaacagcggcagcatctgyctggaaacacaggaaaggtgcctccacttgtatcctttcctgccgccagatggagaaataaaaacaggaataacagatcccactgccagagcacgtgtgctggggcctctgctgggcactgcagacccattggctcatttcatcatctcgccaaccccatgtgatagatgcaatgattgttcacatttcacagatgagaaaactgaggctcagaagggtgagtgagttgccgaaggtcacagagcttgacagcgggggagcctgggtgggaaccaggcagaccaatgcctg

SEQ ID NO: 521043 - DNA, 624 bp, Homo sapiens
gctcccctccctgacaggaggaggggactgggggacactttgtgctgtcattacctccgtttgggacccctgccccagtcacagccttctgcccacttgccattgctggcctacagagctggcttcctgcctgcctgtgatgggagaccctgccttcaagctggctgagttgtccccaggaggtagagaaccagaggccaggcctgacctcagactgcagggtcccctctcccacggccctctggggaagctccccgcacccaggcctcctcagccctgcccctcctccccaggtcctgagctcttcttccagcaaacagcggcagcatctgcctggaaacacaggaaaggtgcctccacttgtatcctttcctgccgccagatggagaaataaaaacaggaataacagatcccactgccagagcacgtgtgctggggcctctgctgggcactgcagacccattggctcatttcatcatctcgccaaccccatgtgatagatgcaatgattgttcacatttcacagatgagaaaactgaggctcagwagggtgagtgagttgccgaaggtcacagagcttgacagcgggggagcctgggtgggaaccaggcagaccaatgcctg

SEQ ID NO: 521044 - DNA, 567 bp, Homo sapiens
aataatggcaccgctgaagatgtccattctttatctggatgaaggatttggcccatggctaattaaagctgaagtgaattggtccgcagtcatctggagacggagtggatcggcaccctacgcagatgrggggatggctagcacttggcccacagccaatccaaggcactttcctttccatctgagacatggtggaaggttgtatggagagtaacctttgattctttgttatcccagcatggcaagatggagtttttccttttggcttagcttttggaagtgggtgttaattggtcttagagtccctgcccccagacccaagtgtttcccttttgatccagccttaggaagtcagcacacattggccttaagttgcctggtccaaaccctattctcctgcctcagttcaatctgtcaatatgaaggttgaaaatacatcattaaatgagcatagctgtgggccaatagaactttattcataacactgaaatgtgaattttacatgatttttcacatcatgaactagtcttcctttgtttcccaccctaaccatttaaaacagtaaaa

SEQ ID NO: 521045 - DNA, 633 bp, Homo sapiens
agacctcatcatttcctttaagagtcgagttctctgattcagtgaatacctagtgaaacagtgcttacttcctggggtttagaaagcgttactaggatttggctcaatgttacactgcatctgcaaaatgcttggataggccgggagcggtggctcrtgccctgcaatcccagcactttgggaggccgaggcgggtggatcacttgagatcaggagttcaagaccaacctggccaacatggcaaaacctcgtctctactaaaaatacaaaaattagcagggtgtggtggcgcgtgcctgtaatcccagctactagggaggctgaggcaggagaatcgcttgaacccaggaggcagaggttgcagtgagccgagatcacaccactacactccagcctgggcaacaggtgagactctgtcttaaaacaaacaaacaaaaaaaagaatacttggctaacctcggtgaaggatgccatgtgttgatgatgcaggttcatgctacaaaatcacccagcgttgctcttggctgacgccccagaggaaatctgaaacgcagcactacgtgagctctctggaaatggatggtagacggagagcacgtggaaactgcacagagccgtccacagatggagcca

SEQ ID NO: 521046 - DNA, 485 bp, Homo sapiens
gaagatgtggctttggcttctgtcatttctgttaaatcctctccagccagctctgacccttgccgagctacattccttttttttttttttttttttttttgagatggagtttcgctcttgtcccccaggctggagtacagtggcgtgatcttgggtcactgcaacctctgcctcctgggtttaagtgattctcctgcctcagcctcctgagtagctggaattacaggcatgcaccaccacccccagctaatttttgcatttttagtagtgatagggtttcatcgtgttggccaggctggtcaagaactcctgacctcaagtgatctgcctgccccagcctcccgaagtgctaggattacaggcgtgagccaccgtgcctggcccsgaactacatccttgactggcagccacctctcctctggctcggtggcacctgttggccatcacacccagttaactggccccatgagagagttctggcaaag

SEQ ID NO: 521047 - DNA, 450 bp, Homo sapiens
ttgtggctcttgttttttagagagggaatctctctctgttgcccaggctggagtgtagtagctatttacagacacagtcatagcgcactacagcctcaaattcttgggctttagtgatcctcctgtctcaacctctcgagtagctgggaggacaagcatgtgccaccacgcccarctgttgttattattggcagctatgcttaaggcataatttaggccagggtatgtatattcggttttaagtctgttcatatcctctgtgatcatggaaaagtgaggcctggttttaagtgctgtattttcatgggaataaacaagaatgaagttctcatggttactgggagaccttggctgttctttcatttcattcattcattcactcattcattgattcagcaacagttgaagctatcccaaagtgctcatgggctaataggggagactaacatg

SEQ ID NO: 521048 - DNA, 450 bp, Homo sapiens
ttgtggctcttgttttttagagagggaatctctctctgttgcccaggctggagtgtagtagctatttacagacacagtcatagcgcactacagcctcaaattcttgggctttagtgatcctcctgtctcaacctctcgagtagctgggaggacaagcatgtgccaccacgcccagctgttgttattattggcagctatgcttaaggcataatttaggccagggtatgtatattcggttttaagtctgttcatatcctctgtgatcatggaaaagtgaggcctggttttaagtgctgtattttcatgggaataaacaagaatgaagttctcatggttactgggagaccttggctgttctttcatttcattcattcattcactcattcaytgattcagcaacagttgaagctatcccaaagtgctcatgggctaataggggagactaacatg

SEQ ID NO: 521049 - DNA, 550 bp, Homo sapiens
ctgggcaatccaccacttcctcttccttctgcttctgtgacggtttagagtcaagggggctgaaacacactgtgagcatagactgtattaggtttgttcagaagccgggtcagctcacagagtcacattttcttgcttagtcatgtgtccctccttgagttgccccctccttgtgggtttacactacatttkggagtcattgtctaatgctgacaagcacaccctctcccattatttgtgcactacagatctcctcctgatcagtcacctttgttgctgctgtgtagacagagccaggcctcacctgtttgtttaggccaagatgccatggacatgcagcgttagtgatcccactagctgtgacagccaggcccagaaaatgcctggcgtgagagccagcagacagccaggccagggtaggcagtgcctgcttctgctccatcaggtgcaggggatttggctgaaggcgtgcatatttcctgggcacaaacttcctgagcctctgaaatgggaggctcgtcaatttcagaccaacctcttttcaacccat

SEQ ID NO: 521050 - DNA, 627 bp, Homo sapiens
gcatcaagtgacaatatggaagacataaaaatggactcttacaggccaggcgcagtggctcacacctgtaatctcagyactttgagaggccgaggtgggagtttgagaccagcctggccaacatggtgaaaccccatctctattaaaaatacaaaaattagccagttgtggtggcacatgcctgcaatcccagctaattgggaggctgaggcatgacaatcacttgaacccgggaggtggaggtttcagtgagctgcgatcatgccactgcagcccagcctgggcaacagagactcgtcaaaaaaaacaaaaaacaaaaaaacaaaaaaacaaaaaacaaacaaacaaaaggactcttataatcttgcaaaaccaagagaactacaggctctataatagctaggaagtacactaggaaaatctatagctaatgataagtataatcaaatagactatgactattaaaaagtgaattatgaaaatgctaaaaaaaaaaacttcatcaaggtgctaaaatatcacagtaatccaagactttttgaagaaaatatttgttcctattatttcagaattattctttccagaaggctttttcctggacctgtgtcagtatcaaaagtcagccgg

SEQ ID NO: 521051 - DNA, 627 bp, Homo sapiens
gcatcaagtgacaatatggaagacataaaaatggactcttacaggccaggcgcagtggctcacacctgtaatctcagtactttgagaggccgaggtgggagtttgagaccagcctggccaacatggtgaaaccccatctctattaaaaatacaaaaattagccagttgtggtggcacatgcctgcaatcccagctaattgggaggctgaggcatgacaatcayttgaacccgggaggtggaggtttcagtgagctgcgatcatgccactgcagcccagcctgggcaacagagactcgtcaaaaaaaacaaaaaacaaaaaaacaaaaaaacaaaaaacaaacaaacaaaaggactcttataatcttgcaaaaccaagagaactacaggctctataatagctaggaagtacactaggaaaatctatagctaatgataagtataatcaaatagactatgactattaaaaagtgaattatgaaaatgctaaaaaaaaaaacttcatcaaggtgctaaaatatcacagtaatccaagactttttgaagaaaatatttgttcctattatttcagaattattctttccagaaggctttttcctggacctgtgtcagtatcaaaagtcagccgg

SEQ ID NO: 521052 - DNA, 501 bp, Homo sapiens
cttgttttatcggattttggggaagattaaaatggttaatagaactagagaatttagaagagggcttggcactaagtgcaatataagtattagctgctattattacctaatcctcaatgaaccttgcaaagtagctgttaccatttccatttgtgagatgagaaaactgagacttagaggagttagatggcttttccaaggtcacacaacaaggaaggagtaaaatcagttttggaatccagttctctttaccctgtgtcacccgctggctctcccgtgatgagggaggtggagcctgggaggttttgagctaaatgtgggcaggtttgcctttttacaaagtgcatcgtgctgccatgaggagacagggcgaggacacccaattgggcagcagcaatattggtagcagggaacccagagagaaggtgtattgggcatgtttaccgccattccagtcgccatgkccccacatggcaaggtgggtgtttggaaactttccct

SEQ ID NO: 521053 - DNA, 534 bp, Homo sapiens
ctaggggcaacccaggaggtcttaagcaatctctgtgtggaacttcccggcacatcacatccaatgtcacatgatatcttcccaagaaatggttctaaaatcaaataagtttttcaggaactgttctccctaccgctccgctaaaaattcataattggtacactgaaagtgctaacaaatcatgtagyacatatatttatttgaccttatctaacccaaagtttccaaaatacgtttgaccacggattgaaatatttcttaaaatcctccacaacttatgctccatggaaaatagggtggtaaatggtgccaaattgtaacctgcaaaggttcatccattcaaaatgatttactgactctgtctcctcgactactaagaaagttccctgagaagacggaccccattgcttttatcttgttcacgtctgtgtccccagaacttggcacagtccccaacacattgatggagttggtttcagggagtgtggaatgagtgaaagaataaatagattgtgaccctgactctttgctggc

SEQ ID NO: 521054 - DNA, 579 bp, Homo sapiens
ctgctaggggcaacccaggaggtcttaagcaatctctgtgtggaacttcccggcacatcacatccaatgtcacatgatatcttcccaagaaatggttctaaaatcaaataagtttttcaggaactgttctccctaccgctccgctaaaaattcataattggtacactgaaagtgctaacaaatcatgtagtacatatatttatttkaccttatctaacccaaagtttccaaaatacgtttgaccacggattgaaatatttcttaaaatcctccacaacttatgctccatggaaaatagggtggtaaatggtgccaaattgtaacctgcaaaggttcatccattcaaaatgatttactgactctgtctcctcgactactaagaaagttccctgagaagacggaccccattgcttttatcttgttcacgtctgtgtccccagaacttggcacagtccccaacacattgatggagttggtttcagggagtgtggaatgagtgaaagaataaatagattgtgaccctgactctttgctggccaccatgctggaagttcaggaggtagagatgagtaagtgaac

SEQ ID NO: 521055 - DNA, 633 bp, Homo sapiens
ccattctacttgcaaatgcttagcttgrgaatgggcatgaaatatgagggttaggtattgggggacactaaaagtctgccttgctgataaaaaaagacatagaacaagagacagggagggaagggagcgggaaggagttctgagagtgacactatcacctagactctgtctataattctcagtggctgagaatgtgtattctcagccatatctgatcatactaacactgatgaaaactagaaaatacaagcaatttctagaggaactgctctttagacagagttcacccttcctgcacttacattgttggttctgggaacttacatgagggactttgcatttaacctgattacatttcatctcattcatctgcaggttgtgcagatagcctaaaatcccggttcttcattatactttgtggttacccctacaacccttgggtcttttgcaaatgtgataattacaccttttatgtcttcagtgaagttctttatggcttaacttttctaagtctctatcatttgtaaaaatgtcaaacttgttaggatcaagttcagacatggcattatagagagtccccccaagcctgggccatgaatcacatttttgaagtggtttccaaccaattgctaa

SEQ ID NO: 521056 - DNA, 633 bp, Homo sapiens
ccattctacttgcaaatgcttagcttgggaatgggcatgaaatatgagggttaggtattgggggacactaaaagtctgccttgctgataaaaaaagacatagaacaagagacagggagggaagggagcgggaaggagttctgagagtgacactatcacctagactctgtctataattctcagtggctgagaatgtgtattctcagccatatctgatcatactaacactgatgaaaactagaaaatacaagcaatttctagaggaactgctctttagacagagttcacccwtcctgcacttacattgttggttctgggaacttacatgagggactttgcatttaacctgattacatttcatctcattcatctgcaggttgtgcagatagcctaaaatcccggttcttcattatactttgtggttacccctacaacccttgggtcttttgcaaatgtgataattacaccttttatgtcttcagtgaagttctttatggcttaacttttctaagtctctatcatttgtaaaaatgtcaaacttgttaggatcaagttcagacatggcattatagagagtccccccaagcctgggccatgaatcacatttttgaagtggtttccaaccaattgctaa

SEQ ID NO: 521057 - DNA, 633 bp, Homo sapiens
ccattctacttgcaaatgcttagcttgggaatgggcatgaaatatgagggttaggtattgggggacactaaaagtctgccttgctgataaaaaaagacatagaacaagagacagggagggaagggagcgggaaggagttctgagagtgacactatcacctagactctgtctataattctcagtggctgagaatgtgtattctcagccatatctgatcatactaacactgatgaaaactagaaaatacaagcaatttctagaggaactgctctttagacagagttcacccttcctgcacttacattgttggttctgggaacttacatgagggactttgcatttaacctgattacatttcatctcattcatctgcaggttgtgcagatagcctaaaatcccggttcttcattatactttgtggttacccctacaacccttgggtcttttgcaaatgtgataattacaccttttatgtcttcastgaagttctttatggcttaacttttctaagtctctatcatttgtaaaaatgtcaaacttgttaggatcaagttcagacatggcattatagagagtccccccaagcctgggccatgaatcacatttttgaagtggtttccaaccaattgctaa

SEQ ID NO: 521058 - DNA, 526 bp, Homo sapiens
agggagggaagggagcgggaaggagttctgagagtgacactatcacctagactctgtctataattctcagtggctgagaatgtgtattctcagccatatctgatcatactaacactgatgaaaactagaaaatacaagcaatttctagaggaactgctctttagacagagttcacccttcctgcacttacattgttggttctgggaacttacatgagggactttgcatttaacctgattacatttcatctcattcatctgcaggttgtgcagatagcctaaaatcccggttcttcattatactttgtggttacccctacaacccttgggtcttttgcaaatgtgataattacaccttttatgtcttcagtgaagttctttatggcttaacttttctaagtctctatcatttgtaaaaatgtcaaacttgttaggatcaagttcagacatggcattatagagagtccccccaagcctgggccrtgaatcacatttttgaagtggtttccaaccaattgctaacatag

SEQ ID NO: 521059 - DNA, 577 bp, Homo sapiens
gtgacctttctgatgaccttgagaatcttccagtcctacctgcctttgcagccaacattcaaaacatcttcatgacagggagctgccagtcaacctttcattcattcactcttgcaaaaacagaggactagttcaagtaacaaaactcatgagttggcacaagtcatctctgcactgtgccacatagcagacttatcgtcagcaatgaaggagataaagattggctcygctcaaagggctacagaggctcaacatgatgacgaatggaccaagtggatagcgactgataagaaagcccaccggggccaaggactgttacagaaacccccaaccccagagacgtaagatgttgattcaggcgagaatagtcatacacagttgtgtaggatgtgcaatgcccaaggacctttgactgaagaggcaactgggtgctgatatcctgccactagctcctcttgccaagccaagctggaggaaggaatattttaaaatatgtgttttcttttacctttgatctttctgtaaatttcactgaagtattacatacatacaagaaaaatacataaatcataagttc

SEQ ID NO: 521060 - DNA, 645 bp, Homo sapiens
tctattgaacaacactttgcctcccataactgcacctgttcaggccctagtcgtactgcttggggctctgcaaacctgtccattcagtattcccttccttccagtagacggactagccacctaaaatgctcattctccagagcaaacaacactaggcacccttctttccctccagaacaggaatttgacaccacgcccgtccctcaccactgagcctgctcccttccccgtttgccagaggagggcattgagaactgactacattggycattttcttgcatttggattcattatctcatttcatttttacacccaccctcctaggtaagtattcccagatttcacagataaagaatctgaggctcaaggagatcaaatgaatttggtcaaggtcacagggctggtgtggggcagatgatactcaaatctatcttgggtttgtccaggttccatttctttctaaacaaggtactttctgctcattgctccagctttgtgggatccataaagtggatgtgtatgcttttagtgccctcatccaagtcatatgagagatgctggggaccacagtgaagtgttaggcctaatgccaaggggaaatccatttaatgacacaaagtgggataatctggtggcagacatggg

SEQ ID NO: 521061 - DNA, 608 bp, Homo sapiens
ggccctagtcgtactgcttggggctctgcaaacctgtccattcagtattcccttccttccagtagacggactagccacctaaaatgctcattctccagagcaaacaacactaggcacccttctttccctccagaacaggaatttgacaccacgcccgtccctcaccactgagcctgctcccttccccgtttgccagaggagggcattgagaactgactacattggccattttcttgcatttggattcattatctcattycatttttacacccaccctcctaggtaagtattcccagatttcacagataaagaatctgaggctcaaggagatcaaatgaatttggtcaaggtcacagggctggtgtggggcagatgatactcaaatctatcttgggtttgtccaggttccatttctttctaaacaaggtactttctgctcattgctccagctttgtgggatccataaagtggatgtgtatgcttttagtgccctcatccaagtcatatgagagatgctggggaccacagtgaagtgttaggcctaatgccaaggggaaatccatttaatgacacaaagtgggataatctggtggcagacatgggctgca

SEQ ID NO: 521062 - DNA, 547 bp, Homo sapiens
ttccagtagacggactagccacctaaaatgctcattctccagagcaaacaacactaggcacccttctttccctccagaacaggaatttgacaccacgcccgtccctcaccactgagcctgctcccttccccgtttgccagaggagggcattgagaactgactacattggccattttcttgcatttggattcattatctcatttcatttttacacccaccctcctaggtaagtattcccagatttcacagataaasaatctgaggctcaaggagatcaaatgaatttggtcaaggtcacagggctggtgtggggcagatgatactcaaatctatcttgggtttgtccaggttccatttctttctaaacaaggtactttctgctcattgctccagctttgtgggatccataaagtggatgtgtatgcttttagtgccctcatccaagtcatatgagagatgctggggaccacagtgaagtgttaggcctaatgccaaggggaaatccatttaatgacacaaagtgggataatctggtggcagacatggg

SEQ ID NO: 521063 - DNA, 575 bp, Homo sapiens
caaacctgtccattcagtattcccttccttccagtagacggactagccacctaaaatgctcattctccagagcaaacaacactaggcacccttctttccctccagaacaggaatttgacaccacgcccgtccctcaccactgagcctgctcccttccccgtttgccagaggagggcattgagaactgactacattggccattttcttgcatttggattcattatctcatttcatttttacacccaccctcctaggtaagtattcccagatttcacagataaagaatctgaggctcaaggakatcaaatgaatttggtcaaggtcacagggctggtgtggggcagatgatactcaaatctatcttgggtttgtccaggttccatttctttctaaacaaggtactttctgctcattgctccagctttgtgggatccataaagtggatgtgtatgcttttagtgccctcatccaagtcatatgagagatgctggggaccacagtgaagtgttaggcctaatgccaaggggaaatccatttaatgacacaaagtgggataatctggtggcagacatggg

SEQ ID NO: 521064 - DNA, 541 bp, Homo sapiens
ttttctgtttcaactcagtatgaagttgactggggctactgcttctgactccaggctgagttttcaatctacctcctccaaytgctcagtagtagtttggaaggcagctgggaggggaggctctgggtgcttatctggctggcgacaggcacctcaccactgaccaaagggtgactgagacccacggccccatggagcggctgctcccagcctgtgactgagcacagcaggaacaccaaggactcagtgatgctctgctggtcttgctgaaccttgtctgtactgcacagccatccacacgtggatgctttcacacaaccttgcttccctctctccctccttcacttgggtcagaaggtgcaggggtccactgcccctcccaaccctcccccagctcccttgccctctttataggcatttctcttataaaacccttgcatccttcattctgtcttggcatctgtttctcggaggacccaggcttcccctagggatgaccttgggatgtcacatggggctgggttgagggcagaaccagagt

SEQ ID NO: 521065 - DNA, 408 bp, Homo sapiens
cacatccccatccatctgatcggctcaccgggtccaagcctgggagatgcctgccagggaactgtcatctgttcacttttacacacagtccacagatggagccctccaaggtcagtggatgagggacaggctgtgacaggaggaaaactgggagtcagggggcctggatgcagagagcatttcttccagtttccaaatgtgactttgggtgcctggctctcagttccaaaggttgtggtgagccctgagtgctgcccccttctcctgcttawacttagcagggttctattctcaactgagagggggctgttcaaagcaggacagtgaggatcatgctccagactgttgttgagagacactgaggtctgatacagaagaatgatgtcaagtccaaagaccaaggaaggg

SEQ ID NO: 521066 - DNA, 584 bp, Homo sapiens
cactgactttcttgaaagtctttatttcaatgctatatcacagcataccagataatatttcaagccacaacaagggaatcacaggtaagagaaactgcccatcgtgtgctgggcaactgagcttcccaccaggagcccttaatgagctgctgcatctgccaggagtgggtgacatctgtttctttacatacacrtcctggccctgtgagtttcttttgaaatgaagtgtaaggcccctttgaattacagaaagatgtgtgtgtgtgtgtgtgtgtgtgtgtgtgtgtgtcatgggggaagagtccaccttctgtttctttcttttttttttttttttttgagacggagtctcactctgtcgcccaggctggaatgcagtggcgcgattaaattcaaacagcacccaggagacaaaggcgagtcctggctgcagcccaggcaggtgttctctcgtcaaaacaaaatctgcctcaaaagtcaatccagaggctgggcaagtgaaagagcagtgacttagaggcagggaacccgagcttcaggctactcctgcacattgggtggctacacaatctcaattacccttt

SEQ ID NO: 521067 - DNA, 586 bp, Homo sapiens
gaagccagaaatttgggagttatctgacacctccctccctgaactcatmacaatcatgtccagcaatcgctctcatggctgttcatccccctaaatgtctctcaagttcttttactcctctccgccttcactattgctctcacggttgaagccctcttcctctctgtcatcaagaccagatctgcagccctctgtgcagaaatctgctagacctttgctatgtgcttatgccaagggggcaagcatgtatcatcttttgccctttggcccctagttgggtttggccaatgggatctttcctactgggaccctgacttgttcatctcccaccttccctctgattctacctttatcctcttccaacagaaccttcatgctagagccagagggatctttacaaaattaaaacctatcgtgccacctcatgcccctgtaataactttcagcatccaccagctagagacccaagtcctctggaagagctgagattttgacccagtctcattctcttaccattccatgcccctcagatgaaatggaagtttcatttccttaaaagttactaatcaaattgtattagtggttt

SEQ ID NO: 521068 - DNA, 606 bp, Homo sapiens
ataataatactttctccttttggtctaagatggagataaattgcagtataagagcatatctcttaattttgtcattgttgtgttgttattgctattctttttacttctcgtgtagcaagaagagtggaaaatgaattacagaccttcttaacttccaaggatgtagttttgtctacaaatggaaaattacctaacatctgagaaagtgaaaagaaaaagagcttttaactctctctagtggattgaggagtaaagagtcttcttccttatatgtaagcacacccaatgccaactaatagaaagttttattatatctatatgtgaagttaaatgagtcacctcaggaagcaatgggtgaaatgaatgatggtgaggctggcaatctgtttctgtatatctcttcctattttyctattaaatgagtcacagaaaggaaatatgaaactgactcctcaaagaccagcctgttaaataaaaaacctaacccaaagcttaataacagagaaaaaagtccctcgtattactctcccaaatgggagctcgatgacatagttggggctaatgttcattgtctttgaaagcaagaaaaattgaactacaacctct

SEQ ID NO: 521069 - DNA, 499 bp, Homo sapiens
gcttccaactgtccaacttccaaagtactgagaaaatattttttgaaatgtagccaagtatagaatatagactgtgtcctacattcaaaagttgtctttctagaaagcatgttttaatggcaaaggatacaaagcaagctgtaaaaagagactaaaattagctcaaaccacaaataacctaacatacttatcacttccttatgatcaacctacaaaaatcaaactttaaaggcacttacaaaactaaaggtgggaggccaactgcaccctttaacttcgctatacctttcctccttctaacatggaccctggcacataaacactgccaaacgatgacactgtgttaacgtgaaggcaagcaccagggaaactacgggagcacagttttgccctgtaaataaaacagcatgtaccatgcagttcttaagtggttagaagggtwactacctcctcaaactgaagatgggaaatgcagatgaaggcccacacccatcttcag

SEQ ID NO: 521070 - DNA, 645 bp, Homo sapiens
tctagatatttcaactcaaagaaattcttcatattccaagatcactttgtactctgaaagataccagccttcctcatctcaaaatcttttatggaatcataatttctgtagaaatctgcgtatgccttctttcttggttcgkccatagcaatcttgtagaaagctgcaaccaccagggataccatgaatgctccaataatatgaaatcacagacgcttaaccagaaggctatgcattggaggttttgtcaaagcaccagaagccatggtagttactgtccttgataggtgtgtaaacttcaacaccaacatccttcccagctgttggagaaatggacggtccccacctacattttatagacagtccattcataaaactctcctcctgccagggcacggactgatgtgaatccacctaatggccctaggcaataggtgcctttattgtcatccttgttttacgcatcagaaactgagagacagagaagctaagtgagctgcataaagccacagagctagtaattggtggtactgatacgggagtgggggcagggaagtgctgggaagggaagggcgtggtccctgggtagggcttcacccctgggcctgtgcccacggacctacgtgaggacaggcatttctgttt

SEQ ID NO: 521071 - DNA, 645 bp, Homo sapiens
tctagatatttcaactcaaagaaattcttcatattccaagatcactttgtactctgaaagataccagccttcctcatctcaaaatcttttatggaatcataatttctgtagaaatctgcgtatgccttctttcttggttcggccatagcaatcttgtagaaagctgcaaccaccagggataccatgaatgctccaataatatgaaatcacagacgcttaaccagaaggctatgcattggaggttttgtcaaagcaccagaagccatggtagttactgtccttgataggtgtgtaaacttcaacaccaacatccttcccagctgttggagaaatggacggtccccacctacattttatagacagtccattcataaaactctcctcctgccagggcacggactgatgtgaatccacctaatggccctaggcaataggtgcctttattgtcatccttgttttacgcatcagaaactgagagacagagaagctaagtgagctgcataaagccacagagctagtaattggtggtactgatacgggagtgggggcagggaagtgctgggaagggaagggcgtggtccctgggtagggcttcacccctgggcctgtgcccayggacctacgtgaggacaggcatttctgttt

SEQ ID NO: 521072 - DNA, 546 bp, Homo sapiens
gctggggagtgagtcagcaatgggaacctgcatgaggcacccacgttccagtctgggtccaaaatggagtatccagtatgttgtgcatttaattatctgacaaataytttttgaacatcttctgtgtgctgggggaatgtttaaggctctagggatatagcagtgaacaaaacgggaaaatcctcatcttgccttttttgagacagggcttcactatgttccctgagcttgtcttagatccctgggcttaagtggtcctcccacctcagcttcccacgtagctgggactgctgctactactactgccactgcatccagttcctggtcttgttttagtgagggagacagaaaataaatgagagaaatcagtaaaatatatagaatgttggacagtgatcatgctaagcaaggaagggcatataagattttggggcagggcaatagtttagacagggctgggaatcatccaggagccacacaggagaacagaaatcactctagggatttcaaacactttggttcaaaagcgctgaggaatttaaaaca

SEQ ID NO: 521073 - DNA, 559 bp, Homo sapiens
ggctctggcctgcaggttgggtccagcttaacgctatatgtttcccatccttgttggatcaatggctacctaaggcattctctactyctggtgaaaaaagaggaacattagaaggaaagcccatttgtgcaagaacattccgagcctcagctcccaacacatccaccaccatccctttcctcaaagcaagtcatgcggccaagatcaaagtcatagagaaaggaagtacacttcatcaccatgaggccatagcaaatgtgtggagagataatttataatagtgggataaagaattgggaccaggctgggcatggtggctcatctctgtaatcccagcactttgggaggccaaggagggagaataacttgcagccaggagtttgagaccagcctgggcaacatagcaagatttttgtttctaaaaaacaaacaaacaaacaaacaaaaaccaacaacaaaaaaaccaattagccaggtgtggtggtgcacatctgtagtcctagctacaaggggaggaaggttaaggtgggaggatcacttgtacctaggagtttgaggt

SEQ ID NO: 521074 - DNA, 545 bp, Homo sapiens
ctaggtagggtttggctctggcctgcaggttgggtccagcttaacgctatatgtttcccatccttgttggatcaatggctacctaaggcattctctactcctggtgaaaaaagaggaacattagarggaaagcccatttgtgcaagaacattccgagcctcagctcccaacacatccaccaccatccctttcctcaaagcaagtcatgcggccaagatcaaagtcatagagaaaggaagtacacttcatcaccatgaggccatagcaaatgtgtggagagataatttataatagtgggataaagaattgggaccaggctgggcatggtggctcatctctgtaatcccagcactttgggaggccaaggagggagaataacttgcagccaggagtttgagaccagcctgggcaacatagcaagatttttgtttctaaaaaacaaacaaacaaacaaacaaaaaccaacaacaaaaaaaccaattagccaggtgtggtggtgcacatctgtagtcctagctacaaggggaggaaggttaaggtgggag

SEQ ID NO: 521075 - DNA, 596 bp, Homo sapiens
tagggtttggctctggcctgcaggttgggtccagcttaacgctatatgtttcccatccttgttggatcaatggctacctaaggcattctctactcctggtgaaaaaagaggaacattagaaggaaagcccatttgtgcaagaacattccgagcctcagctcccaacacatccaccaccatcccwttcctcaaagcaagtcatgcggccaagatcaaagtcatagagaaaggaagtacacttcatcaccatgaggccatagcaaatgtgtggagagataatttataatagtgggataaagaattgggaccaggctgggcatggtggctcatctctgtaatcccagcactttgggaggccaaggagggagaataacttgcagccaggagtttgagaccagcctgggcaacatagcaagatttttgtttctaaaaaacaaacaaacaaacaaacaaaaaccaacaacaaaaaaaccaattagccaggtgtggtggtgcacatctgtagtcctagctacaaggggaggaaggttaaggtgggaggatcacttgtacctaggagtttgaggtcacagtgagtgagctatgatcacatcact

SEQ ID NO: 521076 - DNA, 538 bp, Homo sapiens
ctaggtatcagatgaaagaaatgggtaagagtgtacagataacttgaatatcgcattgataggtctttttctgtgctattattgcctctgtttcatatcttgatggaaatgttgcaatctttactgtgttatagaacaaatagaagtgtgacttgtggttcacaatccatgaagctgattttatataattttgacagttctatcacatttctcacagttctgattcttttcccctccagggatggtatgacattatgttgggatagtgtgttgggtactgttcccctctgctcctttctggtgggctaccttcttttttctgggtttacacttgcctaagttcaaagctctgacatacgcaccttataaattttccctgcccccatcctgatatgcctggaggaggggaggtggggactctgtggttctaaatctctccttggcacatgttctcaggcatgagtgaagaatcagtgattcagtttgaacagagaaactgcagacrgatgtactgttttcacatctggctacttggagg

SEQ ID NO: 521077 - DNA, 637 bp, Homo sapiens
aacaaagttgaaaagtaacaaagtaaaggaggaagcatataatgtaaatctaaattaatattatctatataaaacaaccacaaaacaatatatacaaatttgtaaagccaaaacaacgtcttctaaaattatataatatttgaaaaattaactgttaccacaaatgtaaaactgtattttattgtagacaacaatgcattaaatgagcagatccaggcccaaagctaactctcatgaatacttaccttttggcccattaatcctcggtttccaggaaatcctgggattccctaaaaacaaataaaatagatttttaacttataaaaaattgaagactttatcattaaagaagaaacagtcacaattggaattttaactggtaaataacatattttcaaatgtatacatattataatattgctatttgtaataatccaatatggaaaagacaacttakgagatatagcattatatgaatattactgatatttagagctttaaataaaggctttttgaaaaagaaactatgaggaaattcatctcagttcttgcaccccaacacatgagtgataaaattaaaatgatgtttcatttgaacacattcttgtattctaatgaatcatgcaagaaaatctgt

SEQ ID NO: 521078 - DNA, 643 bp, Homo sapiens
tggtatgtttgaataaaggtccaaacaaggtttttttttttaagtgataaagaattaactttttactttttattctaaccttcaagtctatttatagtatcttttaattttgtttcaaagaccagaggaattatatacatttcagaggaattggaaatgcatgttctgaaaagcagtagctaaagtaaaattagttccaaatatgatcttccttcaatgtcatggttattcagactgtttattggaagacagagctgaagaagctgtgccaagactctcatatcttgaaaatccaagtaaaaaaaaatacttgtaatcccctgagtgaacagcttcaaagttcatacaaatgtgctacattgtctaaaatatatcaattaaaaaaatcaactgtgctctaatcctgatattttaaaaaattatataatgaagttcacaattggaaaaaatgtttacttcaagaattcaacaggcataccagtctattaaaataaatatgttaaattcttattgttcaaatgcagggtctgtaatatgtgctgtacctgttcaaaggctagcaaaactacgttgtttattaawcttaagttgaactccagtgacttcatagatttcactagaatttttaagagctattttgata

SEQ ID NO: 521079 - DNA, 460 bp, Homo sapiens
tggcacctgtgttggcacctggagtttcctgacctgctgcagcagcctgtatatgtaactgtgcacagtggccagaccccatgctcactcacacacccctcgccattccatgcctgactcacccttggcaggcatgggacccaggctggtagcgtgagccaagagcagcctgagwgagcaaaacgagtgggcctgagcaaaacttgagcaaaggcacacaggccacacatgtttctggccagaaaaactacaccccaaagatcctgtaacactactgccccagaatcgttttctggcaatttttagctgaaagggtgagaacatgctgtctagaaaaacatcaaatgatcacctgtgggcagcgagtattttaaattactcatggttccttttcccagatttagttgaactatcaagcaccagttctcaaactaaagcttgagaattaccttgctgggcc

SEQ ID NO: 521080 - DNA, 474 bp, Homo sapiens
taagttttaattttgctattgcttttgcttttttaacagaaaaggtacaaaaaagaaaaaatgggagagatgttgcygaactccgtcccgcctgtgggctgtgggccgttagcaaagctgctagcatgaaatcgtcgagcaccgcttgcgaaacgccaaatcctcgagagcgaggccggaggctgccaaacccgcgctggggaaagggccgcctccgggcgccccatcccgctgcggacggaggtgaggttggagcgagcgctggcggaagagaggctcagcgcagggggcgcagagccggcgctggccaatatgcgccgcatgtgatacctttgagggcgcggcgggggagggtagcgtcaaatttcaaaaaaaaaaaaaaaccaaacccacacagccccggcgggcgggcgcgcgcgatgggcgccctttggctgcgggagcgagtggaggatgctgggaaggaggtaaaat

SEQ ID NO: 521081 - DNA, 642 bp, Homo sapiens
tgggagcttaagagaagcagaaggccataaatcggtctttctggcaatggtgacagtgaattttccaccatttttcctggggcttgagacaatctcagcactgagttccctgtgcaagcgccgaccaggaagccccagtgcggggcgagggggaaagaggaaaaattgagggaaaggcctaggcrcgaaggctcccccaacccaggcgcaggcacacgacgaccctcccgctggttgggagccagtgagcgcctcttgcctagatttctgatgggagaagctgtttctcctcatccttaaagttttgagtggatgacctagataaatgagcaatgaaactatgaagactaagttcaaaggagtgacatttagcattgtgatcatctaaaatctgtacaagttaggcgatgcatttaataagtgattataaatatttaacgtatacatatacagcaagtgacaagcgttttatcatgagcattagcattcttagggagaggtggcagtggagtggactgtgatgttcggcacaggcaaccctcctcccccactgaggaatgaaggatttattccacctgctactgggaaaagtgttggcagatgatccttggctctaagccctctttgggaatttccttggca

SEQ ID NO: 521082 - DNA, 642 bp, Homo sapiens
tgggagcttaagagaagcagaaggccataaatcggtctttctggcaatggtgacagtgaattttccaccatttttcctggggcttgagacaatctcagcactgagttccctgtgcaagcgccgaccaggaagccccagtgcggggcgagggggaaagaggaaaaattgagggaaaggcctaggcgygaaggctcccccaacccaggcgcaggcacacgacgaccctcccgctggttgggagccagtgagcgcctcttgcctagatttctgatgggagaagctgtttctcctcatccttaaagttttgagtggatgacctagataaatgagcaatgaaactatgaagactaagttcaaaggagtgacatttagcattgtgatcatctaaaatctgtacaagttaggcgatgcatttaataagtgattataaatatttaacgtatacatatacagcaagtgacaagcgttttatcatgagcattagcattcttagggagaggtggcagtggagtggactgtgatgttcggcacaggcaaccctcctcccccactgaggaatgaaggatttattccacctgctactgggaaaagtgttggcagatgatccttggctctaagccctctttgggaatttccttggca

SEQ ID NO: 521083 - DNA, 642 bp, Homo sapiens
tgggagcttaagagaagcagaaggccataaatcggtctttctggcaatggtgacagtgaattttccaccatttttcctggggcttgagacaatctcagcactgagttccctgtgcaagcgccgaccaggaagccccagtgcggggcgagggggaaagaggaaaaattgagggaaaggcctaggcgcgaaggctcccccaacccaggcgcaggcacacgacgaccctcccgctggttgggagccagtgagcgcctcttgcctagatttctgatgggagaagctgtttctcctcatccttaaagttttgagtggatgacctagataaatgagcaatgaaactatgaagactaagttcaaaggagtgacatttagcattgtgatcatctaaaatctgtacaagttaggcgatgcatttaataagtgattataaatatttaacgtatacatatacagcaagtgacaagcgttttatcatragcattagcattcttagggagaggtggcagtggagtggactgtgatgttcggcacaggcaaccctcctcccccactgaggaatgaaggatttattccacctgctactgggaaaagtgttggcagatgatccttggctctaagccctctttgggaatttccttggca

SEQ ID NO: 521084 - DNA, 592 bp, Homo sapiens
tttcgtacagcagcgcagtttgtgcactgcacaacaccaggaagctcatttcacatagaccatgatgtagatgtgttgcctggagttgtgtaacagggcggccttgtggccctccacataggccactaactcttggtctccatgagagtggcacctggctgctgtcgcttctccaggaggcagagcccagtctcaaactggatggaacactccatgcatcagtggagtgataaatactcaacatgacaatctctcccactccatgcttcccacagcaccgcttatatcctgggagtawaacgttgacctatggctctgctataaaactcttgctgacaatattcattatgcagtcatccctcagtagatgtgggaaattggttccaggatactttccctcccttgcgcacaccaaaatccacacaaactcatgtcctgaagtcaaccctgaggaacccgcataggaaaagtcagccctgcatatatgcatacttggcatcctgtgaatattgtattttcaatctgcatttggtagaaaaaaaatccacatataagagggcccatgcagttcaaacctgtgttgtgcaagagt

SEQ ID NO: 521085 - DNA, 592 bp, Homo sapiens
tttcgtacagcagcgcagtttgtgcactgcacaacaccaggaagctcatttcacatagaccatgatgtagatgtgttgcctggagttgtgtaacagggcggccttgtggccctccacataggccactaactcttggtctccatgagagtggcacctggctgctgtcgcttctccaggaggcagagcccagtctcaaactggatggaacactccatgcatcagtggagtgataaatactcaacatgacaatctctcccactccatgcttcccacagcaccgcttatatcctgggagtaaaacgttgacctatggctctgctataaaactcttgctgacaatattcattatgcagtcatccctcagtagatgtgggaaattggttccaggatacyttccctcccttgcgcacaccaaaatccacacaaactcatgtcctgaagtcaaccctgaggaacccgcataggaaaagtcagccctgcatatatgcatacttggcatcctgtgaatattgtattttcaatctgcatttggtagaaaaaaaatccacatataagagggcccatgcagttcaaacctgtgttgtgcaagagt

SEQ ID NO: 521086 - DNA, 551 bp, Homo sapiens
ggaattcttcctcccacaacccttaaaaaaaaaatggatttaggccaggcgcagtggctcacgcctgtaatcccagcactttgggaggtagaggcaggcagatcatgaggtcaagagatcgagatcatcctggccaacatggtgaaaccccatcactactaaacatacaaaaattagctgggcgtggtggtgcacgcctgtagtcccagctactcaggaggctgaggcaggagaatcgcttgaacccgggaggtggaggttgcagtgagacaagatcgcgccattggacttcagcctggcgacaaagcgagactctgtcttaaaaaaaaaaaaaaaaaaaactgatttaaaagagacatcgacaggcgcacaaacccttgctgtgatggaatgcagtggggcccgggcagggatggtgckggtgtagggtcctgcagtctgggcgaccttgggcactgccacctcctgggcctcctcttatctacagtcctgggagttgccgctgacgccctcctgggctctggcactttatgactctgtgaagaaaccca

SEQ ID NO: 521087 - DNA, 683 bp, Homo sapiens
ggcgccagtgccccgcagcccgcacaagcccagctctgtgcgaaccaccaatcgccacaccgcgctctggggcccacagccagtggcaccctctcccggtgggcgactcccaccagctcccaggctaggctcggagaacgggaaggcccaccatccctgggaccayaggccaggtacacggccactggaggccagcaggccctgcgtgcagactgccttccgtgtccagaggtgtggctgctggaggcagtgccgcctccatgagactctgtcacagcagcagccaggcgggggatgggaggggcatcaataattcacacacaacagggcgacgggggaggagggggtgggagactgctggagccacggcccaccatggccagggaggcgtggacagtagggctatgggctgtggtctgggggtgctgaccctgctctgaatttgaggcgtgcacctccccaggactggccccctgcctgctttgacaaaggccagcgcccaggctgtgtttacacgatgcgtagttccaaggagcaccaggctcagggcaggctgcccagctcttcctccagaaaggcaggaggggtgcaggggtcaaatgggggacactaggaccctaccatccgggtgatggggccacacggggcacctgcattctccacgtggccctcaggccccagct

SEQ ID NO: 521088 - DNA, 427 bp, Homo sapiens
tagggtcagggcaatggacacagccataatgagcaggtgttggggagaaggcttggcttaaaagcccactgcaagagaagcctttcacaggccagcccagggaggctggtgcaggggccacacctcctgccatgcaatactgaccagagcagacgtctggccatgagtgttgggtccasggggaggcagcagcaggccggagttctgtgcctcctggtgggagagggctgctgtgacccagggatgggcccaggggagggtgggcatcacctgaggaggacactagaaagagccgcggcacaggggtaatgcgggtaatggtctctgagcccgggtggcctggtcgttactcccaccagctccttccccatcagccttatggcttcctgcctgatccctcacttgaacggcttcacgctgtgctggg

SEQ ID NO: 521089 - DNA, 554 bp, Homo sapiens
gctgcctgaagcactgtggggttgccgcaattccacctttaggtgtgaaggcttttgcttttccacccccatcccctccatcagactttcctcttctggtgtctcattggtctggacagtagstggagcagaccatggacattgggaaggggcagggttcagggcaaaggcagggcataaatgggggaaaggagaagagctgaaccagactgggaacagggacacaagaggacaccactgccagctacatctgcttccaagagctgagattccacagccaaaggtcttaaactccatgatatgaatttcccttcctgttgtgcaatgaccaccctggcattgcaccagagggctgcggtccaggggtcaggcccctttaggactgtaccctggcctcatgctcatggccatgtgttctctgggcagcagtgctgagcctggaaggagggaacctcctactggagacacctgtagggcactaaggagaaagggagagaaggaggtatggcctcagcttctgcctccacagcccaagcgtcagcccgcaaagaagc

SEQ ID NO: 521090 - DNA, 472 bp, Homo sapiens
ctgctgcctgaagcactgtggggttgccgcaattccacctttaggtgtgaaggcttttgcttttccacccccatcccctccatcagactttcctcttctggtgtctcattggtctggacagtaggtggagcagaccatggacattgggaaggggcagggttcagggcaaaggcagggcataaatgggggaaaggagaagagctgaaccagactgggaacagggacacaagaggacaccactgccagctacatctgcttccaagagctgagattccacagcyaaaggtcttaaactccatgatatgaatttcccttcctgttgtgcaatgaccaccctggcattgcaccagagggctgcggtccaggggtcaggcccctttaggactgtaccctggcctcatgctcatggccatgtgttctctgggcagcagtgctgagcctggaaggagggaacctcctactggagacacct

SEQ ID NO: 521091 - DNA, 523 bp, Homo sapiens
ccatcacagctccagacatggtaccacaatttcataataacttgtcagcctctccctctggaatgtgagtcctttggaaccaggrcttgtggcttattcacctccataaccccaaacaagcccagtacctgacacctaataataataccaaacatttattgagcgctcactgtatgcccagctaaattttcttttcaaactttatctcactgaagcctccaattaagcatcattaaacccactttactgatgacaaaattgaggctcagaaagattacacaagctaatatgtggcagaagtggaactttaacccaggcagcatggctccaaagttctagctctgtgtagtaagcacttgttgaatggctacccaactgaggatgtgctatgtggccacaggattgaccacagacccgatatgactgggcatctatgtatctgccccacagaggagtgagagccccacaaagtttcagagataagttaggagccagtgagcttctaacttaggagctatttcca

SEQ ID NO: 521092 - DNA, 466 bp, Homo sapiens
tctggaatgtgagtcctttggaaccagggcttgtggcttattcacctccataaccccaaacaagcccagtacctgacacctaataataataccaaacatttattgagcrctcactgtatgcccagctaaattttcttttcaaactttatctcactgaagcctccaattaagcatcattaaacccactttactgatgacaaaattgaggctcagaaagattacacaagctaatatgtggcagaagtggaactttaacccaggcagcatggctccaaagttctagctctgtgtagtaagcacttgttgaatggctacccaactgaggatgtgctatgtggccacaggattgaccacagacccgatatgactgggcatctatgtatctgccccacagaggagtgagagccccacaaagtttcagagataagttaggagccagtgagcttctaacttaggagctatttcc

SEQ ID NO: 521093 - DNA, 523 bp, Homo sapiens
ccatcacagctccagacatggtaccacaatttcataataacttgtcagcctctccctctggaatgtgagtcctttggaaccagggcttgtggcttattcacctccataaccccaaacaagcccagtacctgacacctaataataataccaaacatttattgagcgctcactgtatgcccagctaaattttcttttcaaactttatctcactgaagcctccaattaagcatcattaaacccactttactgatgacaaaattgaggctcagaaagattacacaagctaatatgtggcagaagtggaactttaacccaggcagcatggctccaaagttctagctctgtgtagtaagcacttgttgaatggctacccaactgaggatgtgctatgtggccayaggattgaccacagacccgatatgactgggcatctatgtatctgccccacagaggagtgagagccccacaaagtttcagagataagttaggagccagtgagcttctaacttaggagctatttcca

SEQ ID NO: 521094 - DNA, 555 bp, Homo sapiens
ctgcgtagttcttgccttgactgctttcactcatttgtctgtggtcaactactcagttggttggaaactggctagtttaggatgccctcagctacaaaaacttatctctgctgaatgtggtctctcatcttccacaagcctagtttagacttgtttaacagtggttgggtagggttctgccacgtggtataaaaatgcacaaggccctttgaagcctaggcttggaattggcacacggtcacttctcctgtattctyctcttggccaaacaagtcacaaggtcaatccagattcaagggctggggagatagacttccctcttgatgggcagagctaaaagtttacattgcaaagagatcagatatagagaggggcaaagaatcaggatatttttgtgaccaatctaatgtatttattatataaccattaccaaaaaagaaaaaaatctgcatgttaccaataaatgtcttcatcttcattagttgggcttttagcctcatttcttaagtccatgaggactcaccttctattttaacactggtgtatgtatggtcg

SEQ ID NO: 521095 - DNA, 673 bp, Homo sapiens
caataccctgagacctagacaggtgaaatgactttctcaaggccgtctagctgattagagacagatgggggaataaaaattacctttcccaattctaccactartagtttttttgctataatcagctatttaatatagtctactctttcctcaaatgccaaaattttgtatcaagggtctgaggaccagcaaatattaaatactgtggccatcagccaacgatgactcaagaagaatcaaacttccaggtgcattatagatcatgtggggatcttggaaaatacagattctcattcaggaggtggagggcagggcctgagactctgcttgtctaacaagcttccaggagatgatatcaatgccaccggtttacaaacacgctttgattagcaaggagccagttgacctcaagtttggttcctaataagttttccgtaagaaattatttgtattgttggtgtttcatacaaagagaaccccatcctgcttctctctaaggtcatccctgctacatatctttccctgcctcccctcatacccaggggaatccactcaatagaaggactatttgggagcaacttccaacccccttcgaccttgttactgaaatgccttaggtgtaaaagcaagatagaaatcagtcagattcagagatagaaggtcaccaccaaaa

SEQ ID NO: 521096 - DNA, 673 bp, Homo sapiens
caataccctgagacctagacaggtgaaatgactttctcaaggccgtctagctgattagagacagatgggggaataaaaattacctttcccaattctaccactaatagtttttttgctataatcagctatttaatatagtctactctttcctcaaatgccaaaattttgtatcaagggtctgaggaccagcaaatattaaatactgtggccatcagccaacgatgactcaagaagaatcaaacttccaggtgcattatagatcatgtggggatcttggaaaatacagattctcattcaggaggtggagggcagggcctgagactctgcttgtctaacaagcttccaggagatgatatcaatgccaccggtttacaaacacgctttgattagcaaggagccagttgacctcaagtttggttcctaataagttttccgtaagaaattatttgtattgttggtgtttcatacaaagagaaccccatcctgcttctctctaaggtcatccctgctacatatctttccctgcctcccctcatacccaggggaatccactcaayagaaggactatttgggagcaacttccaacccccttcgaccttgttactgaaatgccttaggtgtaaaagcaagatagaaatcagtcagattcagagatagaaggtcaccaccaaaa

SEQ ID NO: 521097 - DNA, 583 bp, Homo sapiens
tggaaatgggcaggcccttagggcaaaagagaaagaaaggaaggtgatcttctcacttacttaatgcttaaaagaaaaaaaataccctatgcctgtcaaagagaagcatcctagtattagtggtgctatgatcagagatcccctctcccttacmcattgtgtggttactaaatcaacacaggaagcctgtccacaagacttcaatgtcaacattgcccgcccctacctgaccaccaattttgcattgattagcttccatgattccctgtcaggcaatttagttgtttagttgctggttagttgtttctattttcctgagcattcttctcaaacctgttcccaatgtttatactctggagctactgaccaccctttcctttcccgaactcttccactgtcatcaattcctcgagaggtcaacattactgcgggcagaaggaaagatggctgaccctggccctggacttccttccctctgacacactgaatacccttcgtcaaaaaaccataatccaaactgcaatgttggtgcctataagagagctagtcccgctctcctcagagagcccagcttggagatttc

SEQ ID NO: 521098 - DNA, 583 bp, Homo sapiens
tggaaatgggcaggcccttagggcaaaagagaaagaaaggaaggtgatcttctcacttacttaatgcttaaaagaaaaaaaataccctatgcctgtcaaagagaagcatcctagtattagtggtgctatgatcagagatcccctctcccttacccattgtgtggttactaaatcaacacaggaagcctgtccacaagacttcaawgtcaacattgcccgcccctacctgaccaccaattttgcattgattagcttccatgattccctgtcaggcaatttagttgtttagttgctggttagttgtttctattttcctgagcattcttctcaaacctgttcccaatgtttatactctggagctactgaccaccctttcctttcccgaactcttccactgtcatcaattcctcgagaggtcaacattactgcgggcagaaggaaagatggctgaccctggccctggacttccttccctctgacacactgaatacccttcgtcaaaaaaccataatccaaactgcaatgttggtgcctataagagagctagtcccgctctcctcagagagcccagcttggagatttc

SEQ ID NO: 521099 - DNA, 470 bp, Homo sapiens
tcagcaggaaagtcaatatggtcccacttccctcagtgaagaacaggagatggagtaagagaggaagagaactcgctgcaatacttccatcttttggaataggtatgatcccagcaagacatttcttctcttgctgggaggtttaagagtattcttctcaatttcccctcattttctaggcccaaatccctcacccattaaagaaccaaatagaggcatgagatctctcttgctaagatgaaataaaaatgactgtagttcttggaagcattaatttttactaagccctcatcatacacagagaagtgacctgaagggttaggtagcttcttccttggctctggacctcaatcagtttatgaaggtggcccttaagctgcagagaaggaaggcatccaggagctgactgaagtatggakgcctgcataggccagtggcctgaggagaaggagatggcactatgtctgcag

SEQ ID NO: 521100 - DNA, 544 bp, Homo sapiens
gtctccctcaagataaacctttatgaaaaaaatgcttttcaacaagccttattaaattgaaagttgttatatgtaataagatgaaagtcaaaggacaaagtctagagaactaaagggatacaattttccctctgaccttttttaaatgaagagaatttgaaataaatccatctttttgctttccaaaatgtcatcatggaagatagtccatggattcaaacattatttctgttacattgtgttgtttttccagttccaaagtacatactcttggcaaatyataaatgttttggattcactaccaaaaagaaaaacaaaatggaaagaaaaaagatcacacctacaaagcatgaaaacctgttgtttctctcctgctttcactcattttgattagattccctagttttgaaaactgcatttcagtttaaatagaagctgccataaagttagatggactttaaagatgtcaaaagcgctaaagccaagaaatgacccttactgagtatcagctcacccaagctccacttaattatcatgtagaata

SEQ ID NO: 521101 - DNA, 640 bp, Homo sapiens
agctggttttctgagcctgttgttaggactctggtggtgtgtacatgcacctgggcaatccccaggtgcccaattggcatgttttggcactgagcaccgtgtcagcaagcaggcctatttttagattctcttgatggtgtacataggcgtaggctgtgatggagagggcggggcaaacttcaggcctctggaaggcttgccagccatggtaggctgttataaggacatctgatgttttgtgtgtgtgtctgtgtgtgtgtgtgtgtgtgtctggactacatgatgttgcagaacaatctcagagcccctacgcagcatgctcaggcactgggaagggtggtcggacaggactgttctcatgtcctctggtggtgtgcatasggacaggaagtggtgtgagggcgggactatccccaggctctagctagggtgcttgggtagtggtggcagttgtttcagtgggtagggaaaggctgtcctcaggatgcgtgtttgcgcatggcagtcttgctgctgggagttgaggcagtgttgcaatctgtggtagcatccccaggcagatgggtttcaggctctggggtgtgcacactttggtcactggtgggagcagtggctgtagtggctggtaaagagaaccagt

SEQ ID NO: 521102 - DNA, 453 bp, Homo sapiens
acaattaataaatcagtgtagcaaattctctagcaataaaatcattatgcataattatatcatgatttgtataatgcagttgttgcatataattgtgcaaaattgcatttttattcaacagcaataaaaaattggaaatcataatttaaaaawgattcaatttacaattgttagaaaacataaagtacctgggaataaatctaacaaaatatattaaagccctttatggaggaaaactataaatctttattttgaagtatttaagtggaaccaacaaatgagacttatattctggatgtgaaagttcaaaattataaaagtgtaattattccccccaaatgacatgtatcaagtgtcagcaaactttataaaaggcaagatagtaaatagtatattatctgcagtccacagaattgctttcacacctactaaacacttcttttgtaacttgaa

SEQ ID NO: 521103 - DNA, 607 bp, Homo sapiens
tgagaaaggagaggtaggacctcaaattctttcctgaccccgaagcaggatcaccaagtggtcagtaaagtgggctcaggtctcagcccaccacttaccaccactttaggaaaatgacttagctttactgtgcctcagttttctcagctacaaaatggggctaataataatgcttcagagggtggacataggaactaaataaatgatcacatttgaagcacctagcttgtgcttgaagcacctggcacatagtaggtgctttggagaggggagtatgaagactccagtctagtcttacttgagctgtaggggataggaaaagaagagggcaaaaaggagagatcataaagagcttggcacactgcagaaacaaaaaatgctgctgcatgactcactgccgtggacggagggcctgctgggtgttggtctgggctgaatgcccttcatccatgatcctgtcaacccagcaacagccaccgattctcaggagcctactgggtgccaggctgtgcattactgctttgtacatattagctccaatcctcacagcagccccagaggtgcatgtttttcttttaayatccattttacagagggccagactgag

SEQ ID NO: 521104 - DNA, 657 bp, Homo sapiens
accacctgtttaagccaggactgtgcagaaagggagagtccaaagagcagtctctcactggtctggcttttgtgaactagcctcctaactgtaaccacctttgctagataatcagacccaaacctaaaatccccagcccgagctcccaccatctctaggtccagaggaccaggaataagcaaataaaaccaagcgatagaattccagtgccccctctggatgttacctgcactctgctttgtccctgggcagcttctggccgagcaggtcggaggtggcagtggctggtccaaggctcaggggcctccttgactccggcttgggaggaggtgccaaagaggcagctgtgaacaccaccaaagccccttcaaatggcagttctggtgcctcttccccccttttatggacgagagcctcccctgtcgctcagcccttgctgagcacaggctgctgggagccaatggggaagtggctgagagcagtcagagcacagacccccaggcccttcaactcgaactccctgggccygacacaataggcttctcttcgtgacagggatgtggaggaggaaggcagccgtgttggggagggggcggattctgggtgtagtgctgtttgtcacttgaaatccggccacttcagtttttgatgcgtttc

SEQ ID NO: 521105 - DNA, 565 bp, Homo sapiens
gcgatattccagcttcagcctccggagtagctgggattataggcgtgtgccaccacacctggctaatttttaaattttttgtagaaatgaggtttcactttgttatccaggctagtcttgaacttctgggcccacgtgatcctcccgccttggcctcccaaagtgctggaattacaggcaygagctactgtgcttggccagggcttaacctctttaagcttccattttcctatccgaggcttccaactcaggcagctctgagccagctctgaaccagtcacgacttgctgcctcttaaaggtgcagagctcagcacagtgcctggcacatagtaagtgcttagtaaaagccatcatggacatttaattcacaaacaggtggaggatgcagcagagtgtcctgggtcttcctgaaagaagtgaagtgatggcattttgtacttttcatcattcattcattcaatcttcattcaactctcctacaaacctggcctaaaatgcaggcagagttggtgttggggaaggagatggctgtgggtccattatactccatgaagcctgtttga

SEQ ID NO: 521106 - DNA, 565 bp, Homo sapiens
gcgatattccagcttcagcctccggagtagctgggattataggcgtgtgccaccacacctggctaatttttaaattttttgtagaaatgaggtttcactttgttatccaggctagtcttgaacttctgggcccacgtgatcctcccgccttggcctcccaaagtgctggaattacaggcacgagctactgtgcttggccagggcttaacctctttaagcttccattttcctatccgaggcttccaactcaggcagctctgagccagctctgaaccagtcacgacttgctgcctcttaaaggtgcagagctcagcacagtgcctggcacatagtaagtgcttagtaaaagccatcatggacatttaattcacaaacaggtggaggatgcagcagagtgtcctgggtcttcctgaaagaagtgaagtgatggcattttgtacttttcatcattcattcattcaatcttcattcarctctcctacaaacctggcctaaaatgcaggcagagttggtgttggggaaggagatggctgtgggtccattatactccatgaagcctgtttga

SEQ ID NO: 521107 - DNA, 507 bp, Homo sapiens
gtgagcatgtgtggatggggttcatggtatccatttccctaaaatccagttccctaaaattgcttggcaattgctgcttaggagcattttgtttttctgagtccctgtctttcttcagactctcacagaggcttgaggtcctggaaagattaaggcctatagaagcagggtgtcaatgcacatttcttgaatttaagaaattcacaaactgggttgtggcccactaaaaggattttcattttcagctttatggcaaattgtagcttccctggaggaattggaagcattctcggygttttgcaggagagctgctgttttgacatctgcaaaagcgcagtcacgtaggcagccccaggctccaaccagggatacagatggtccagcctggggaaagagtgggcagggtggagcaggggtgcagggaagcccggactctgctgcaggaagagtgaactgagtgcagagtggggatgacgggcgcaggcagggcccagggggttggctaat

SEQ ID NO: 521108 - DNA, 594 bp, Homo sapiens
aaattgtagcttccctggaggaattggaagcattctcggcgttttgcaggagagctgctgttttgacatctgcaaaagcgcagtcacgtaggcagccccaggctccaaccagggatacagatggtccagcctggggaaagagtgggcagggtggagcaggggtgcagggaagcccggactctgctgcaggaagagygaactgagtgcagagtggggatgacgggcgcaggcagggcccagggggttggctaatcctgcgatgctcctttaatagtgccaggtgctaggatagctattccccactgccaactcccctgggctctcaaggactgcctttggctgtgccagtgtatttttagccctccagcaagtggaacaaagtgctcggagaggcgctgtttccctctcggctgcaggcaacgctccgcacctttctgagccggtgcaagggccccctccagcagcagagaggatgtgggtctggctcgcaccttcctcccacgccctccctcaggagcctgggcgcgggacgtcctcatcggttggagagaggcgagttacctgtgctcccggttgtttaggggagagcgagtg

SEQ ID NO: 521109 - DNA, 505 bp, Homo sapiens
gttgccagtgggtaacactcctgctctgccaggtctgaggctcagagttcccaaaggagcaagcaagttcctaggagaggaagaggagaaccagactaggtatcyggtcaggaacaagggacccaacaaaatgaggtgggagacttggggctgaggtgcgggcggttgctccggataatgacagaatggatgtgcagaggcctggccatcagccagggtcctgcactggagatgtcccatggagaaggcagggccgaggcccagcaaggctaatacaattctctctccaatgtctggagccagcttaggccacagaaggtatagaccatgacattgacccagctaagtcctacagtgtccgttgggccaggaaaggttgtttaagggatgaacaggacaatctctgcaaacaaaaaagtctcacatttttggcctaaggccagagggaaaagcaaagttcaccaacaacagccccatgatccctctccaccttccacctgaagtg

SEQ ID NO: 521110 - DNA, 397 bp, Homo sapiens
agagggagggaggaaaatatgcagtccaaggaagtcggtgagaagcccgctcagatgcactagactgtcttgcatgaattgggtttttctttttgcttctcccacccctttcattgatccactacrtgaacacttataggcagccaataatatcaggagaaatatagccattttgatactaatatttctgttacccaggaatttgctttatttgcaatatgagcctccaatgcctgattaaaggaaactgaggactaacctgggtgatccaagaattcctagactgttaaatagtgtagtttctttagaaagggactctggacctcctcctgggaggagccttagaagggcagtgaggctagggtgagtaagcaggctccccacgtgagggtgagtc

SEQ ID NO: 521111 - DNA, 642 bp, Homo sapiens
ttgtaaatactattcttcacatttcggtttctagttgcttgttactggcattaaaatgaaatgacttttgtgtattgacatgcacgtagcagtgatgctgaattctcttaataattcaatagtttgtgaattcttttggattttctacatagtattagataggagagtcttatctttttcttttcatgttttattatattgattgattgcttrcttattgtcctggttaggagctccagtacaattttgaataatggctgtgcccaggctggttttgaactcctggctttgaacaatcctcctgtgtcagcctcctacagtgctgggatgacaggcgtgagccaccgtacccagccttgttttctatttgaatatatcctgtatcttcctttatattcctttcattctacttcaggttttttggtttttccaaatgtaatttcttgagattggtagtcagacaattgatctttcagctttcttctctcctacataggcatttaagaccatgaattttcctctaagcatggcttagctgcataccacacattttgatatgttgatatatcattgagatgttgatatgtgtgtgtaagtatgtaaaacgttttacatgtattttaaatgtatgcaaattctaca

SEQ ID NO: 521112 - DNA, 612 bp, Homo sapiens
caggtcagcaaagcaggaaggaatgggccggggaggacccaggtaacaagaacttggtggaagcttagtgagaaagcaagtggggtggagagggagggattcatatcgcaggcatcatttcacggtcatgtgccatgtggcatggggtgcgtgggaggcctcacgtgggtttctcctgctggcaggaagggctccatcctgtgctcaaccctggggatgctggacagctttgaggaggtcacagaaccaggccagtgttcgaactcaggagccgaatgtggagcctgtgctcgtaggtgtcgctaattccactcctgcttcctgtgtcctgtaagcttaagtgacatgctccaggcagcgcktaatctagggcgtctggattcccacccaggcgtttcagacgcccaagcccagcctcctcgactcagccatgctgctatgcctctgactgtggatcccaggccaaagacagaggttctaacccccttctcccccaaggtggctaccttagttaacagctttcttgccatctgcccttcccatctccacccaccccaagtcccttcctttctacctgtggaatgtctactggtctcagcctcctcccccgag

SEQ ID NO: 521113 - DNA, 612 bp, Homo sapiens
caggtcagcaaagcaggaaggaatgggccggggaggacccaggtaacaagaacttggtggaagcttagtgagaaagcaagtggggtggagagggagggattcatatcgcaggcatcatttcacggtcatgtgccatgtggcatggggtgcgtgggaggcctcacgtgggtttctcctgctggcaggaagggctccatcctgtgctcaaccctggggatgctggacagctttgaggaggtcacagaaccaggccagtgttcgaactcaggagccgaatgtggagcctgtgctcgtaggtgtcgctaattccactcctgcttcctgtgtcctgtaagcttaagtgacatgctccaggcagcgctkaatctagggcgtctggattcccacccaggcgtttcagacgcccaagcccagcctcctcgactcagccatgctgctatgcctctgactgtggatcccaggccaaagacagaggttctaacccccttctcccccaaggtggctaccttagttaacagctttcttgccatctgcccttcccatctccacccaccccaagtcccttcctttctacctgtggaatgtctactggtctcagcctcctcccccgag

SEQ ID NO: 521114 - DNA, 520 bp, Homo sapiens
tgtggaggtggaatttttatttattttttctttaaatcaatactctccactgaatgtaggattttagtttttaattttttactgcaccccaggggttggggcagataccaaagtgaccccccttcctgcattgtgaggtttaattaatgcaattaacatttacgaagtgctctgaaacagctctgctgctggtatcagcctggaggaartgagtgacatcagttctcagcattactgctgggttggggcgagtccctgagcctcctctgagtctaattgggggttgccacctacccctctgtctgccacattgcatttgagtacatctgacctggttcagtcggggcacaggcaccctgctgcactaatgaggaaggcccctcggggagaagcttgtgggtgggcccacccagcactgctgcccactctgaatcacacgctggaccccagcctctgggaaagggtcagagttcacctctcatcacaaggttaggcagccacctcctgtgaagggaaacgc

SEQ ID NO: 521115 - DNA, 645 bp, Homo sapiens
gattctctcctcagcctcccaagtagctgggattacaggtgctcaccaccacgcccagctaatttttatatttttcgtagagacggggtttctccaygttggtcaggttggtctcgaattcctgacctcaagtgatctgcccaccttggcatcccaaaccgctgggattagagacatgaaccaccgtgcctgggcagtcttggtcattttaaaaggacatacatcttagctgttacactttattttttatgtgcagttatcttgaacttgattttcattccacatgcataagtataattggagataaactagttaacaactactgctacctctggttttggttcccttcttttcctcctatatggagtttacacagccaatatgtgtggtgcgtgtacagcctttgctggattgaacgcatgtgatacagtcatgaggaactgttcattttaccatagcagggagtggaggaaatgagctgctgtgtgctcagcatcatttatgcttctgtgtctctctggcccccacaggctacctagtcctcaaagagttgggcataaaggtaggaaagtacgtcgcttctgaagtgtgtgaggagtccattgctgttggaaccgtgaagcacgaggggaatatcaaatacgt

SEQ ID NO: 521116 - DNA, 645 bp, Homo sapiens
gattctctcctcagcctcccaagtagctgggattacaggtgctcaccaccacgcccagctaatttttatatttttcgtagagacggggtttctccacgttggtcaggttggtctcgaattcctgacctcaagtgatctgcccaccttggcatcccaaaccgctgggattagagacatgaaccaccgtgcctgggcagtcttggtcattttaaaaggacatacatcttagctgttacactttattttttatgtgcagttatcttgaacttgattttcattccacatgcataagtataattggagataaactagttaacaactactgctacctctggttttggttcccttcttttcctcctatatggagtttacacagccaatatgtgtggtgcgtgtacagcctttgctggattgaacgcatgtgatacagtcatgaggaactgttcattttaccatagcagggagtggaggaaatgagctgctgtgtgctcagcatcatttatgcttctgtgtctctctggccccsacaggctacctagtcctcaaagagttgggcataaaggtaggaaagtacgtcgcttctgaagtgtgtgaggagtccattgctgttggaaccgtgaagcacgaggggaatatcaaatacgt

SEQ ID NO: 521117 - DNA, 499 bp, Homo sapiens
ccctaaattccctgacttgattattacacattctatgaaagcaacaaaatatcacatataccccataactatgtacaaatattatgtatcaatatatttttttaatatcacaaggacggatgaattttcaaggtaagcagaaactaaaccattacccatgaaccatctctctgaaaacacccagaaattagcatttctgcctgaacaggcacctggtgcagttccctgatgaggctccgggtccaggccctgcccgccttccaacccacawcccctacatcccaaagaggagacatccaagtcctctaaattagcctccaaatctcaaatctcatttttggcttcaatgataaaatgctacctaaacatcgtccaaaaatgctgcataatattctatggagcaagaattaaatgctcataactaatccttgtggttgcctatttagaactctctgacttttctttctcattaagaactttgtaactaacaaaggcaata

SEQ ID NO: 521118 - DNA, 545 bp, Homo sapiens
gcacaaagagccttttcaattcaaatcctcacccaccttctccctagtcttttcactggatgtctgggggctcacacctgctctctgacactcccataataaagttactmccaaggccaactatggatcagactcacctggtgaattttcagaaaacagatatttgcttccaatttacatacaggctcagatcctgaaggtctagtaattagactcattgcaaaagtgccctccgctgattctcaaaatcagaaataactatgaatgcataggaacacatacaaatttaaagttatgagaatcactaatacatagaaaacaatttcagatttgattactggccaggtccacagctcagcgtaaatgtcacctgtttaaagagatcttcaccatcatcttccaaattctagcccttttaatagcatagagtggatatcatttatctgtgcattcatcatttgcttctccccaacagaatgttagctgcctaagagccagagtcttttccaccctcttctcggtcaagttcaaagtgtctaggttag

SEQ ID NO: 521119 - DNA, 545 bp, Homo sapiens
gcacaaagagccttttcaattcaaatcctcacccaccttctccctagtcttttcactggatgtctgggggctcacacctgctctctgacactcccataataaagttactaccaaggccaactatggatcagactcacctggtgaattttcagaaaacagatatttgcttccaatttacatacaggctcagatcctgaaggtctagtaattagactcattgcaaaagtgccctccgctgattctcaaaatcagaaataactatgaatgcataggaacacatacaaatttaaagttatgagaatcactaatacatagaaaacaatttcagatttgattactggccaggtccacagctcagcgtaaatgtcacctgtttaaagagatcttcaccatcatcttccaaattctagcccttttratagcatagagtggatatcatttatctgtgcattcatcatttgcttctccccaacagaatgttagctgcctaagagccagagtcttttccaccctcttctcggtcaagttcaaagtgtctaggttag

SEQ ID NO: 521120 - DNA, 302 bp, Homo sapiens
agaccataaacctctccctggttttcttggcagtttccctcttagaactcagacaccatgctgtgagaatctcagtcccaaagagaggcaacaggtaggtgttctgatccagagtcagggcagagmgggtatcctagccatcctagctgaggtgccagacatgtgaatgaaggagcttccagctgattccagtccccaagcacccaatcacaggcatttggatcttcccacctaaagccccagacattgtgggacagggaagagtcatccccactgtgctctttcataattcactgaattca

SEQ ID NO: 521121 - DNA, 302 bp, Homo sapiens
agaccataaacctctccctggttttcttggcagtttccctcttagaactcagacaccatgctgtgagaatctcagtcccaaagagaggcaacaggtaggtgttctgatccagagtcagggcagagcgggtrtcctagccatcctagctgaggtgccagacatgtgaatgaaggagcttccagctgattccagtccccaagcacccaatcacaggcatttggatcttcccacctaaagccccagacattgtgggacagggaagagtcatccccactgtgctctttcataattcactgaattca

SEQ ID NO: 521122 - DNA, 611 bp, Homo sapiens
ctcatggaggtattttctacagtagatggtagaattcagtattagattggtcagttttggattcttccaaaagaggatttaaataatgaagtatcaacatattcatcagaaaaataatctcctttgatatagggcagtaktattgccagcatcctggctaataatccttctagttcttagaagtccaacagaattagaaaaaaaaaaattgccctactaagtacaggtaactttgcaaaatgagatggagctgaaacagtgaatttaactgatttactctgatctctccttctattgaaaaataactattactgtttctactactaattttaaccacttatttgcatactacagaagttccaaagacatgaagcatacagattttcaaagagaactccttccattttgttttgttttggttttactttcaaaaaaattatgcaaagggatgtgttctgaagttccaaatgatttcaaaaatcaaaccaatccaatcaatttttcagtaattggctttgaagaaactgagacaagagcaatgcaaacaaagtgcttttaaataaatcataattacccatgcaaatgtctccaataatttgagggtttaatca

SEQ ID NO: 521123 - DNA, 594 bp, Homo sapiens
gtgaggatgtgaaactgctatttctaagtgtcaatttggtacaacctccttgggaaacagctgggcgttgtctagcaaaactgaagatgtctatgccctgggaattcyactcataagcatctacattagtaaaactttgcacatattctctaacagacatgtcccaaaccattcatagccccattaccagttaagagccctaaactgaaattatccttaatgactattaagagaaagttgaatatataaattatggcaaattcattcaatggaataccatagagtattaaagacaaattaattaaagttgcatgcaacaacctgaatacatttcacaaatgtagttttaagcaacaggagaaatttggtaaagaatacatataatatgatttcatttatataagattcaaaaacaataaaaacatgctgtatttttagggacacctagtagaatataaaagtcaggacagtagttatttttagagaagaaaaatgtgacgcaatcaggggctcctgttttgctaattattgttggcaaggatgatggttatcaggaatatttatttgataattattctgtaaactattcagata

SEQ ID NO: 521124 - DNA, 594 bp, Homo sapiens
gtgaggatgtgaaactgctatttctaagtgtcaatttggtacaacctccttgggaaacagctgggcgttgtctagcaaaactgaagatgtctatgccctgggaattctactcataagcatctacattagtaaaactttgcacatattctctaacagacatgtcccaaaccattcatagccccattaccagttaagagccctaaactgaaattatccttaatgactattaagagaaagttgaatatataaattatggcaaattcattcaatggaataccatagagtattaaagacaaattaattaaagttgcatgcaacaacctgaatacatttcacaaatgtagttttaagcaacaggagaaatttggtaaagaatacatataatatgatttcatttatataagattcaaaaacaataaaaacatgctgtatttttagggacacctagtagaatataaaagtcaggacagtagttatttttagagaagaaaaatgtgacgcaatcaggggctyctgttttgctaattattgttggcaaggatgatggttatcaggaatatttatttgataattattctgtaaactattcagata

SEQ ID NO: 521125 - DNA, 581 bp, Homo sapiens
tgtttctaaatttaccaaatggaacattcccttcttctcagagtggaggctttaattaacttggagttctgtgtggcttcccagagggggaagggagtgggtgaggacccttccttcacaccgggctggtgccgctctccttccactgggcaccgatgggagggagctctgagcttccctctaagccagtcctcatggcagagagggcaggtgagggrcacttttgccagaggactccagacggggaatgcctaggagatgccaggggctcctcctcttggcatctcagatgggagagttatggatgctgcaattttgtcctgttctgaaacttcctcccttcactcaagtgctcacctggggacccagactgaggctgaggccacagggccgccctggggcttattcattccttcacaggctgatggattcatttctttgtgcatcctttcatttctgagttcattttgattcattcattcattagtccattagataatttatccatccctatgttcatccaaacatttactgaaaccctcagtgggatcagaacttgtgcccacccgtacagctccttg

SEQ ID NO: 521126 - DNA, 581 bp, Homo sapiens
tgtttctaaatttaccaaatggaacattcccttcttctcagagtggaggctttaattaacttggagttctgtgtggcttcccagagggggaagggagtgggtgaggacccttccttcacaccgggctggtgccgctctccttccactgggcaccgatgggagggagctctgagcttccctctaagccagtcctcatggcagagagggcaggtgagggacacttttgccagaggactccagacggggaatgcctaggagatgccaggggctcctcctcttggcatctcagatgggagagttatggatgctgcaattttgtcctgttctgaaacttcctcccttcactcaagtgctcacctggggacccagactgaggctgaggccacagggccgccctggrgcttattcattccttcacaggctgatggattcatttctttgtgcatcctttcatttctgagttcattttgattcattcattcattagtccattagataatttatccatccctatgttcatccaaacatttactgaaaccctcagtgggatcagaacttgtgcccacccgtacagctccttg

SEQ ID NO: 521127 - DNA, 434 bp, Homo sapiens
agacagacttgactcagaaacaggagtaaagtgatgaggaccatgaagtgacagagcctgggggtcttaaggccatcttagtgtgttggtgcaaccctcttggaggacaatttgctactttttggcattcaaatttgtcacaccacaggttgtacaattttagcctcccagaaaatgaccattttgctcaaaaaaaaaaaaagtctatgtggaaagaaaaaaattataccctttggcccagcgatttgacttctaacaatttgtcctacgataaatactcagaacacatttacctatgtaaaaaacgctgcaagtcctgcacttgtacccctgaacttaaagtaaaagttaaagaaaaartaaaataaaataaatactcagaaaaatgcacaaagatatatatgtccaaggaggttgattaaaaccaagtaaca

SEQ ID NO: 521128 - DNA, 528 bp, Homo sapiens
ctaaagagttttgaccagcaagtcatggatgggtgaattgttctgttgacttccagtctgttacccattaattctctatcctgaatattacctatagctggctttaaagatacatctattggctgggtgcagtggctcacgcctgtaattccagcactttgggaggccgaggtgggtggatcaccaggtcaggagatcgagaccatcctggctaacatggtgaaaccccgtctgtactaaaaatacaaaaattagccaggcgtggtggtgggtgcctgtagtcccagctcctcggtaggctgaggcaggagaatggtgtgaacccgggaagtggagcttgcagtgagcagagatcgcaccattgcactccagcatgggtgacagagsgagactccatctcaaaaaaaaaaaaaaaaaagatacatctatgacttctgttagcatacatggtaggctgctataatagagaaacgcccaaatacaatggcttaaacaatattgaagtttatttctctcttacctgaagtt

SEQ ID NO: 521129 - DNA, 520 bp, Homo sapiens
actctgtgcaggtcaaaagagagacttagtgggctgtgcctggtggctcaacacctgggaggcataatcccagcactttgggaggccaaggcaggcaggtcacttgacrtcaggagttcaagagcatcctggccaacatggtgaaaccccatctctactaaaactccaaaaattagctgggtgtggtggcaggtacctgtaatcctagctactcaggagactgaggcaggagaatcgctagaacccaggagacagaggctgcagtgagcagagatcatgccactgcactccagcttgggcaatagaatgagactccatctcacaaaaaaaaaaaaaaaaaaaaaaaaaagagggagagatttagtggaagtggcctgagggcagcacagaaaacagctagatgctgtggcttcaatttgtccccagggattttctggagttatggggggtaggaagggcaacagcctcaggctagaggaaataggagcctcgggctttgaggacagggaagagcactgtg

SEQ ID NO: 521130 - DNA, 372 bp, Homo sapiens
ctcaacatctcacttagagctgagaaagaaaagggctgcatgtagagcagggacgaaacctcttctggttgtgggatttatttagtgatgagattgtaggatgaatttctactgagagaagcaactgaagcagcaagggttgattgagcttgtcaggtggtgtttaatcagtttccacacctgggtagtctgaaggatgagggctgcttcctatctctttaaccattttattaaagccaagagagttggtaaaactgaaacagagcaagctttggaaatgaaaaatttttttttctcgcacgcctgagaaaggcaaccctagccttaagtartaagaggaacaaggtagagttgttccacttcctcctactg

SEQ ID NO: 521131 - DNA, 635 bp, Homo sapiens
agctttcagttagggcaaagaggtaaaaggagacattttgaaaatgatttggcattcagggcaacctgtttttgttgttgttgttatagatgagcatattgttcttatgaaaagtgggcattcataacattttaagtgttacaggcatgttccttccatggattaaaatagtaaccagaactctctatttgtatctctgatgtcttggtagtctggcttaggggagtcaggtgggagacagagagccagtcctggacacagttccctgtttctcctgaagcaacgacattttgtgcaggygccattgtgagcgtttctgtactaagccttgggctcatggccacctgatggcaagacaagcctccaacagcatggcggtgacatgggctccaggttttattgcggctgcaacaaccaggttgctaattaggcccaattgttagagtagtttttgtgcttcggacacctgtccactaggaactggactgagaccaccaactcatttcccacaggtcacggaacagctgtcagatggtataatttggtcgagttcatttggagctgtttgcagaagctctctgaagcattatgctctacataatgtgcatgattaatgcttgtttatttggataatc

SEQ ID NO: 521132 - DNA, 635 bp, Homo sapiens
agctttcagttagggcaaagaggtaaaaggagacattttgaaaatgatttggcattcagggcaacctgtttttgttgttgttgttatagatgagcatattgttcttatgaaaagtgggcattcataacattttaagtgttacaggcatgttccttccatggattaaaatagtaaccagaactctctatttgtatctctgatgtcttggtagtctggcttaggggagtcaggtgggagacagagagccagtcctggacacagttccctgtttctcctgaagcaacgacattttgtgcaggtgccattgtgagcgtttctgtactaagccttgggctcatggccacctgatggcaagacaagcctccaacagcatggcggtgacatgggctccaggttttattgcggctgcaacaaccaggttgctaattaggcccaattgtkagagtagtttttgtgcttcggacacctgtccactaggaactggactgagaccaccaactcatttcccacaggtcacggaacagctgtcagatggtataatttggtcgagttcatttggagctgtttgcagaagctctctgaagcattatgctctacataatgtgcatgattaatgcttgtttatttggataatc

SEQ ID NO: 521133 - DNA, 632 bp, Homo sapiens
tcgcttgattacagctggtttgtcttgacatatgctacttctattggggttttctgggaagctggaagcagaccatgcccagggttattatgtgttgtaaggggatggatagctgtgaagctagcctatggtttcagggtctagagtatctacctcttctaacacgagctgctatctacctaccaactggttcaggaatatttagtcacccttcagggcatgtagcctaggctttccaaagtatgtgccatgaaaaagggtttatagtcaaatatgctggtaaaatgttgcataatatattatccttttagagatttataatgcatattaacataacaaaggttctsagaagtcctgcagcaaagaagcctgcttgtctacagataattcagtatttccaaaatttattttaccctggaaccctacaatcagccttatttattaacattttctggaatttgtattaaaaatgctctttttttggaattctgatttagcctgtttattttaatcacatttaaaaatggcttaatttaaaatgcattttacaaagcaaatattctctctactcttatgatgaatctcatactgggtactaattagtcagcaaaaagagttcattgtcatagaga

SEQ ID NO: 521134 - DNA, 621 bp, Homo sapiens
ctagggctttattgtggtccatacggtccagggtctttcttggcaagagtatgtgtcctttctgacaagttagttatgtaatctaagtgaccattttgtcccatactgacctcttgtttatctctattatttatgaatttttgtgaactggttttattttcagtctgtttagtttcttaatgtactggattgaattgatgccatcaattggatgaaagggttgggcccattgtcctcaatccctccttcttcactcccttccttcccagctgcctacatgaggccttsagagtctttttggccttgctctgtttcaccacagtctcactctcactcacgccttgctgcttctccaggtgagtatatagtccatggatgtgtcctgcctcaccatctctgtcccttctcaaggaaaggctattggcccattatatttatggaacaactactctttgtccagcattgtgttaggagctgaggaaattaagaagatgacacaattcctgcacattcagagctagaaatctagaatgacacaggcaaataaatggatcctgttaatataatgtgatgtatgatgacagaggtagcacagtgttctatggcaggtatggagaccaa

SEQ ID NO: 521135 - DNA, 627 bp, Homo sapiens
ctatccactactgggcctcattagaggcctgctgctctgctgagaaccacaccacatgctacaccctctcttgtctgcatattagcctgttgctgctccttaaattacctggtacaaaggcttgctctatttctccacagagagctaccactcctatccagtctgaagaggctttatatcatgatctctcaaactaattaaggttcgtgggcaggccacaggttgctgtagagggaccttcctgaaggctgatatctttcagaattcttttttttttttggcaaaagattattgctgctgtaccttatgttcaaaagtctgtttttaaaatttaaaaaacttccttgttttaatctagatgatgtatttaattttacattkcaaaagttatttcctgaggaaagtataacatacttttaattaaaaactttcaaaataaaaggtttaaagtattttcagggaatggagttagtaaatatactagaaatgtatttccatgaaggtttattggaaatcatagattgtaaccagtatttatgttaattgggaagtatctttacttttaaataaaaacatcacagctttctaatttttaagaggatttgtttgcaatttcatggtttaaaa

SEQ ID NO: 521136 - DNA, 591 bp, Homo sapiens
tttgtggtcctccctgggcagttctgaagaggtctctggaaactgcttgatagcaaagctgaagattatcttgtggtcagaacaagagagcctggggcatggagcagaggaattgggctgtcatatcttctagagccacttccataagaaccttgggtatgctggggtgaatggtatgggcagacctgtttgcttcctgattaaatgaggaaaggtgatctgtgaggccactccctcctggccatagcctcacacatgatccctgaagagtcatagacagggagatttcaaggttcagacaaccccattggaccccttgggctgtctagggcttcctggagagaacattcttcttttttaaaaaattwttattattattattatactttaagttctagggtgcatgtgcacaatgtgcaggtttattacctatgtatacatgcaccatgttggtgtgctgcacccattaactcgtcatttacattaggtaactctcctaatgctatccctcccccctccccccaccccatgacagaccccagtgtgtgatgttccccttcctgtgtccaagtgtgagagaacattcttcca

SEQ ID NO: 521137 - DNA, 567 bp, Homo sapiens
tcgagaccagcctggccaacatgaggaaacccctgtctctactaagaatacaacataaattagccgggcatggtggcgcatgcctgtaatcccaggctgaggcaggagaatcacttgaacctgggggttgkgggcgcggaggttgcagtgagccaagattgtaccactgcattccagtctggatggcagagtgagactccatctcaaaacaaaaccaaacaaaacaagagatctgagagaagagaaagaaccagtaaaagacaccaaaaagaagtgacctgggaggtaggaggaaaacaggaacgtgtggtattctggaaggcaaataaaagcgtgcctggaggaagattcctagaaataagatcagtaacaggtctactagcagaaaaaaagcaatgaatctccactgaaggatatgaaataggacttcaataaaagaagacacatctttgataggaagttttagtatagtaaggatgtctgttcttcttagatgagtgtttaactcaatgtaattccagtaaaaacaccctactcaaactgataggaacttaacgaagttattat

SEQ ID NO: 521138 - DNA, 567 bp, Homo sapiens
tcgagaccagcctggccaacatgaggaaacccctgtctctactaagaatacaacataaattagccgggcatggtggcgcatgcctgtaatcccaggctgaggcaggagaatcacttgaacctgggggttgggggsgcggaggttgcagtgagccaagattgtaccactgcattccagtctggatggcagagtgagactccatctcaaaacaaaaccaaacaaaacaagagatctgagagaagagaaagaaccagtaaaagacaccaaaaagaagtgacctgggaggtaggaggaaaacaggaacgtgtggtattctggaaggcaaataaaagcgtgcctggaggaagattcctagaaataagatcagtaacaggtctactagcagaaaaaaagcaatgaatctccactgaaggatatgaaataggacttcaataaaagaagacacatctttgataggaagttttagtatagtaaggatgtctgttcttcttagatgagtgtttaactcaatgtaattccagtaaaaacaccctactcaaactgataggaacttaacgaagttattat

SEQ ID NO: 521139 - DNA, 554 bp, Homo sapiens
attttatttaaattagctagtcatttagattaaaaaaaaaaaaagctagaaactgtccctgagtcttattcyaaaagagacttcagaaaaatggaagataaaaagaaaaaaaaaaatccatacagtataaaagagaacacaactgaatagtttagtaatctttagaaaaataaagaaaagattgaacgatttaattgcataaaataaaaaatttctatagagcaaaataaatcataaaactaaaagataaatactactgtgaaataaaaaaacttttaaacatatgagagaaatggttaatatcattaatgttaactctagggtgggagtaaagttgggagctaaataaatactttggtaaggagaggaagagccttaaactctgtccatcaactccttcctgcagatatcggctccctgcacccgcaccaggtcaggctacttccaggtgggcaggctgggccaggttcctaagtacctagagctgaaagccccacgtacaccactcctccatcctggtggcccacctggaccctcctgcccctcctctgcac

SEQ ID NO: 521140 - DNA, 612 bp, Homo sapiens
tttcgtttaccaccccaccccaacataagctgtcctcagactttacaaagacttagggattgcacagtccacaagactttcaatgcctttgccctgtatctcaactaactttcaaatagagggaccttcttataggaagaagaaggaaaaatcaagtggaaaaacaccttgatcaggtaattgaaggagaactggggctcaggctgccacttggtttggaaagggtgtggaggtggctaatctggccctggcctaagagcaattccaggctggcrggctggaccgcctgtctccatagcaactgttgttattggtaactgaataaccatttcctagaacagcggctggagctgctgatggttttcccttctacttggaagcgagaggagccaggctctttgctgattgatcctaagtgctgagctctttgctgattgggatcttcacttgatattgggcaagctgaagccacccttctgttttatctctgacctctgccagcagagagggtgggacaaactgacttaatgtctattttccggcttcctctgagaggttgagaaaggtgctcaagggcatttagctagcaagatctagaacttgaactttgcc

SEQ ID NO: 521141 - DNA, 593 bp, Homo sapiens
tgacgtttagctgactcttgagtagatgcaacaaggaggttaggctgggtctaaactgccaaaaaatcggaatttattccccacatctctgtagagaaaaggatgggctcccatctggcttaaacaggaggtgggttgatcaaaataaattgatgcagaagccaatccaggcttctttcctgtttagatgggaccctctcaccactctgactttaaggtcagattcatctgaattcatccaagggggcagtattcagacactgaattaaaggatcrccttctcaagacaccattccaagactcctcttcttgcctgctctcttcctcttcgcccccagcatactgattactggggaccccatctggtccaccctggcccagcccttttctctctccagaggaagctgggcctgactgagatgatgtcatgcttttgaatcccctcccccgaagggcctccttcacctagacaaacacttttgaacttttccagatgtggagtgagacctgctgctagttctgaggacagaggtgcctgttccagaagagcaaagcaactctggacccaagccagctactgacccactggggcc

SEQ ID NO: 521142 - DNA, 447 bp, Homo sapiens
tgtgcagggcaggccagaggtgcggaagaagtaagactgcctgggagcagccctcagtgatggccagcaggacctggcatgaaaagacagatgaggaaactgaggcactcgatggacactatctccccgagtgccttgatggattcagctccggtggcccccatggtaacccgcttgatgacacacctttcttggctgccttctcctccctgcctcactcccccactctcctattgatgcttcctggggtgacctcccargtatgctacttgcccttgaatcagtctcgggtcatgttctttggggaatccacaataagacagacctcaagttgttcatttcattgcttactagtcaaaatcacagcatgaagtaaccactgccatgctgcagacacttgtttcaaacatccttactgtaaacaatggcactcaggtgtaagttctt

SEQ ID NO: 521143 - DNA, 447 bp, Homo sapiens
tgtgcagggcaggccagaggtgcggaagaagtaagactgcctgggagcagccctcagtgatggccagcaggacctggcatgaaaagacagatgaggaaactgaggcactcgatggacactatctccccgagtgccttgatggattcagctccggtggcccccatggtaacccgcttgatgacacacctttcttggctgccttctcctccctgcctcactcccccactctcctattgatgcttcctggggtgacctcccaagtatgctacttgcccttgaatcagtctcgggtcatgttctttggggaatccacaataagacagacctcaagttgttcatttcattgcttactagtcaaaatcacagcatgaagtaaccactgccatgctgcagacacttgtttcaaacrtccttactgtaaacaatggcactcaggtgtaagttctt

SEQ ID NO: 521144 - DNA, 603 bp, Homo sapiens
gagaccaagcaagttaccaccatgaggccccagacagaccgtgtggaacgcacacctcacagccaccctcagggagtgaggaggccagggagtctgtacaycagccctgtctgtcactagtttaagggcagtgggggtgatcctggcactccccatcttccctgaaagtgacagagcagctcagagcagacaaagccatcaggcagaggagcgcaggtgctggcagtggagcgtccctctggtgtgccctggagtggttgaggtgtcgcaatgcagcctcaaaaagaaagagggtgtagggcccccccgagcttgggggggtgaaagacagggctttgcagcaccgcagccacacaggccaggcacttcagcagatgttctcctaatacacaccaggacggcctcgctgcctgttaaaacaccaaaatacttctgagctgatggggaaaatctctacatgtgcagggctgaaggtcagaggaggtggctgcggaaccacaggcagtccccggtcagacgtggaggcaggtttcacgtggagcagacacagggagcaaacagcattgcgtgtatctgaggatacagcatcacgggcagggtcaa

SEQ ID NO: 521145 - DNA, 603 bp, Homo sapiens
gagaccaagcaagttaccaccatgaggccccagacagaccgtgtggaacgcacacctcacagccaccctcagggagtgaggaggccagggagtctgtacatcagccctgtctgtcactagttkaagggcagtgggggtgatcctggcactccccatcttccctgaaagtgacagagcagctcagagcagacaaagccatcaggcagaggagcgcaggtgctggcagtggagcgtccctctggtgtgccctggagtggttgaggtgtcgcaatgcagcctcaaaaagaaagagggtgtagggcccccccgagcttgggggggtgaaagacagggctttgcagcaccgcagccacacaggccaggcacttcagcagatgttctcctaatacacaccaggacggcctcgctgcctgttaaaacaccaaaatacttctgagctgatggggaaaatctctacatgtgcagggctgaaggtcagaggaggtggctgcggaaccacaggcagtccccggtcagacgtggaggcaggtttcacgtggagcagacacagggagcaaacagcattgcgtgtatctgaggatacagcatcacgggcagggtcaa

SEQ ID NO: 521146 - DNA, 476 bp, Homo sapiens
tccctaaccatttccctatccgacctttaggttgttgccgattttgagcgctcacagtggtgtttcaatgagtaacctggtacataaaagtatctggggattttccccccatgcttaggatttttttcagcagtgggatcccctgcaattccaggggaatcactgtttgggagtctcttgytgtctccgctaagtgttttgccaaagggtttgcaccaatttattgctctaaaatgatgccaaaggcaacaagttctagccgggcgtggtggctcacgcctgtaatcccaacactttgggaggccgaggcaggtgaatggcttgaacccaggaggcagaagttacagtgagctgagactgtgccattacactccagcctgggcgacaggagcaaaactccatctcaaaataaaaaaaggcaacaaaagttcaagccttatcagccgtgcagccccatcaccatgcggaggaggaac

SEQ ID NO: 521147 - DNA, 581 bp, Homo sapiens
caggacaggctccggccaatagccattttgttcagccatttccaagggctgaaaccctgggctgagagcagtggaaggyggaagagccgtcccctgggctcaggatctgtccagcagccaggctgaagcctagaatcaagacttctccatccccacagaagcagcaaaccttccctgctttgcccagccaagacaaagccagggctggcggcagggaaggaaacagcaggtgtatggaaggctgcatttgcccagccaacacctatgcctgccctcaccctgccttccacaaacagctcagactttggtcacgtggggttcatctgtcctcactcatggcctgtgggacctagtgattggttcaaggttggagcacatgacccaagtctgagccaattagaattcccttgctcaaaatgattggttcaggagtgcagcacctgacccaggtctcagccaatcagaacacaacactgccctgctcactgtcattggatcagagtggagtgagaccatgtctcagctaatcagagcacagcaatagtgattggttcaggggtaaagcacgggtctaagctgac

SEQ ID NO: 521148 - DNA, 572 bp, Homo sapiens
tggccttgatggcactaaagcaagtcccccagaaaggtcctctggttacttaaatcccatttgccrtagtttccttctccatggaagaaaaacatgcctaagttcatgtcaggacattcctgatttatccaagagcccaggatcaaataaacaaagggctctgagctctgccagggagcctcctccttcaggaggcagaactagagggaagtaggcttggtacagagctggcccatcaccccatgaacttggtgagtgacgtggctgctcactgccatggcgatggggatgttacgggtgggtggaagtgagagaagaggcaaataagtcatgagagacgaagcgaaagcgaggcagggtcacaggaggaacctacaaagccacagaatttgtacagaggccgactgtagtctatgaccgcagcaaaactaagctgagtccctgcaaagataagtccccatctcaggggtgcggcatgaaccaactatgactcgcaaaaacctatgacaacactacgttcagcaaggctttgtttcctttcattttccctctaaatcttttccttcccatga

SEQ ID NO: 521149 - DNA, 285 bp, Homo sapiens
gagacgaagcgaaagcgaggcagggtcacaggaggaaccyacaaagccacagaatttgtacagaggccgactgtagtctatgaccgcagcaaaactaagctgagtccctgcaaagataagtccccatctcaggggtgcggcatgaaccaactatgactcgcaaaaacctatgacaacactacgttcagcaaggctttgtttcctttcattttccctctaaatcttttccttcccatgaccccgttggtacggctttgatgactggaagaacactagggttttcgg

SEQ ID NO: 521150 - DNA, 608 bp, Homo sapiens
cagcccagtgaatactggttaaattgactagaggctcttgatttttcagcatgtgactgagaaatcgccacactcatatttgagcaagtgcatctgtcacatgcaaccaggtctttacaactaccactgtccatgttacaatattctaccatacatacagggcaataagcttgcctggggattttttggtgtccagtaattttaagtaggagttacattagatgtagtgtttagatgtagattacttaagcttcccaactgccaactcttgatcaactttaaagggaaagaaataaaagaagtgccgaccctgcctcccacgtcccccgcaagtccactgcctcatcattctggtctccttttgtgccctgtaccctcccattctttccaccaagctccttttctcaacgctttctcacwtgtggtgtccttctctctcctcttcatagtgcagagtccaactgtatttcaagtccacactcaagttcaagacttccacttccacgaggccttagaatgatttgtgctgatgaatctttacgtctgcctcacacgtgttgctagtcctagtgccttgcctactgcctagcacttaatggctctggctg

SEQ ID NO: 521151 - DNA, 614 bp, Homo sapiens
tgtggaggggctgtcttgatgcgagctgtgggcctgctggagggatgccgccagcccaggaagggatccaaggatgtaaatagtccaaccttgcctcctccctccttccacctcctgccaggcctcctcttggctcccaacccgaagctggagggcaagggcagccatcagccatagtccacgtagtccgcctcccaagggcagagcagggtggagacggggagagcagatatagaccagaggtcaagtggaagagctctgcacagtgccctatggcayccccagtctgcagcccccacccagcctggagtcatgggcccccgcagtctggcccacctgccttcacccacaggccccccatctctgtccccataccctcctcccctgccattctgccagtctgcagcctgctcaccaaatacacaatgacctttgcacttcttttcaacttttcacacctcttccctttcccaggagtgcctttccctcctaggcctggagaaatgctatatagtcttaggatccagcctgaatccccttgctctctgcagatttcccttgcctccagttagcttcccttacggctgattcgacacgtacttcattacagtgcg

SEQ ID NO: 521152 - DNA, 301 bp, Homo sapiens
gactcattggtgcttcatgccatctctcaccagaaagccaggcttgctcacatgaaggctgggcagagttccaagagaacaaactaaagcatkcagtggaagtggcacaacattacttcctctgaattccactggtcaaagcaaatcaccaggccagcccagatttaaagtgtggggaaatctctgtctcttgataggagggtctgcaaaggcaaattgcaaagggatgtggatatgagaagtgaataattacaaccaattttttttttttttgcaaaatctagcataacaacttttcaac

SEQ ID NO: 521153 - DNA, 636 bp, Homo sapiens
ctgcttcctgaacttcaggccttgaggcaggagacagcgtgtaccatctcctgccattctgtyggtaagtagagacctgtgatggtacccaggattcaaaagtcatcttccccggcgggaggcaagggaggcttatggagaacctcttaaagatattgtgagcattctactcattacttagggaaagacagcgggtgttggtccaactctggcttttgtgccaggtaggagttggtcctgaggccgcccatctgaccatactggacctgttttaaggtttttctctaaaaaaattttagatttgtcaatctgtgctcctgcaggggatgctatgtccaaatgtcccaggatttgtttttttctgtctttcctgagacattccctgcccagctacccaaggaatccttcaaacgagcaaatctgaccatatcttctatggtcagattaaaatcttccatggctccctattgcttatgggacaaaatcaaaattcctgagtctggtctaaaaggtgtttgatgatcttgacctgctgactttgccagccttcttgtcagactctcgtgtcatgctccgcctagactatgagcctgctatttcatactatgtagctttgtaagtcccagaaaatgctgg

SEQ ID NO: 521154 - DNA, 529 bp, Homo sapiens
gttgggggccctagagtcggcccrcacttcttgtcctttgaagcctcaggttcccacatgctgcctcgcactggagcagccaatgaaacttgaacaaatgctttcattttgggtatatcgaaccaaaaacaatggcacccagtgaatttattttgctactctagtagaatttttgtaggctttggaagtacacagacattattttctccttggcaggaatgggctatgtgaatgaaaaaaggtatccgttatgaaacttccagaaaaacgagctacatttttcaggtttgtctggggctctcagtagttgcccaagggacggagtttaaacctttcgaaaagtaaattgcctgaatagaagtataactgaggattgaaagactgaatcagatacgcgcttctgttcccatgaacagtttgggaacaccatttacatgtggcttcttttacataaatcgccatgtgtcccaagctggtgggaccctcccttagaggagccagccactgtggtctgtgcaccaggtcagca

SEQ ID NO: 521155 - DNA, 522 bp, Homo sapiens
cctaatcttggacttttcagccaccagaaccatgagccaaatatacctcttttctttatatattacccagcttcaggtattctgttgtagcaatacaaaatagactgaracagtgtgtgaatgtggaaaagtctgggaatgtgcaagtaggcagtaagatgctgtctaaccaaagcctgaactgaaagggcagtgatgggtatttctgttttcccaaagatttttcatatcatagtgtaattatatcaacaagcacccaaagttttcagaagtttcacaatatgcctacattaaggcataccagattatatagattcatttttaacaataaataaccccttaaataatattattttcctgaatctaatagagcaggttgttgatagaaaccttaatttttagttttattttaagatgaatgttcagattttcctcttttaaaaaagtcgaaatttgcatattctcagaagaagaatgattttttttcttttcttttcttttcttttttaactatagagtaat

SEQ ID NO: 521156 - DNA, 539 bp, Homo sapiens
ctggtttgcaaagttgcttggggtaaacctgtcagagctcatgagtaaacacaatctgaaaacagaggctgctcgtggggaaatcagttgctttttcmacaaaataaaaggaagagttttgctcagggcaatgtgacgatgacgtgcaactgttctgcattaactacaacttttttttttgctttctcattgcccagttcccctttattctacagcaagaaattgaggttgtatattgcacactgggaatatctaaactggaaataattaaaatatatatttcatttatagtgggtcttatgtgaggagaagtaaagattgccacagcttcctgagtatatgagttaatgatgtgttctgcattttcttgattttccacattttaactgcctctgttcctcatttgggggtagggaactttgagaggcatggaatacagacttgcatgagcagaaacgtacagcttttgagcatgtgaggggatggcgtggagaaggttgggttcatcatgtggtttcttggcactatttttctccagt

SEQ ID NO: 521157 - DNA, 634 bp, Homo sapiens
ggacataccatggttataagactgaggaatgttatttggtttaattcctgatattatttgtgattcagcaatggggctggtcacactgtatatagatttcagattatttggctttccacattcagcagcactaggctagtcggtacccacattctggctttttattaggttctatctccctggggggtagggtatatacaaaatccattttgtctcttctgctattttggagactgctctgaaaatgtttttcatggttttgcatgactcttgggatcacgatttgcatcttaaaaaaaggagtcatggaaaatattgcaagatatgcatttggtggagagagaatgcttttcagcttgaagctatttgggggtctgatgatctgatgatctttctgttgtcggagctttgagcaggcacatgctgtagagatgctcatgtgtcactggggagctggtttctgatgcgactggracttatagatatttgataagtcatcttttccttctgatactgccgtcaattcagtgaattgaatacatacagagtctatggtaggagagcaaaagatcaaaaggcccactatgttacctccccacactgtctattttttagatatgttggggccagacca

SEQ ID NO: 521158 - DNA, 507 bp, Homo sapiens
gtgggaggggtggcatcaaacggggcctaggatttacgatgtgacttgcagaacaataggaagcaccaaagattgaaagcctagtagtgacatgagtttatgatgtttaaggattcttccayctgcaattcaaggtggattggggggtcagatggggcaatagtgggtgagattttaattaggaagctcctgtaacccagccaataaggatggcagcattagctatgggatgaccatggagagggaagacgatgaaagatttgaatgttgaactaacgtgactggtcagtgaagtcaacattggagatgagagaataaagggttttggccttagcaacctggtcagcaaagagaccatgagtaagatgggaaaggaattttatggaggaagttcaggagatttatttttagatatgttcattttgaaaatcatttggacaaccaggctgaggtttcaagcaggcagattaaatacaggtctatgattccttattcacaattcaagaa

SEQ ID NO: 521159 - DNA, 507 bp, Homo sapiens
gtgggaggggtggcatcaaacggggcctaggatttacgatgtgacttgcagaacaataggaagcaccaaagattgaaagcctagtagtgacatgagtttatgatgtttaaggattcttccacctgcaattcaaggtggattggggggtcagatggggcaatagtgggtgagattttaattaggaagctcctgtaacccagccaataaggatggcagcattagctatgggatgaccatggagagggaagacgatgaaagatttgaatgttgaactaacgtgactggtcagtgaagtcaacattrgagatgagagaataaagggttttggccttagcaacctggtcagcaaagagaccatgagtaagatgggaaaggaattttatggaggaagttcaggagatttatttttagatatgttcattttgaaaatcatttggacaaccaggctgaggtttcaagcaggcagattaaatacaggtctatgattccttattcacaattcaagaa

SEQ ID NO: 521160 - DNA, 586 bp, Homo sapiens
tgcccctgagtcttgctttgctgggacagccttgccctgccggaggagatggcaggtgggtgggatgaggcttggctccaggaaggaggccacttgtcatgcggggacagccaggaagttaattccctgtgtgcctgaactgcttgtcccaaggattgctgcctcagggtcacattcaaccagccacacctcaaacagaggggacagaaatacaacacaaattaagaagctctgctgtggtagacagggmgctttgtaattgcacagggctaggtcaaaaatcgtagccttacaaaagaatcgggtagtgtcagagaattttgaaatgaaaattctaagaagtactccttgatgtagagaaaacagcaaaggagcggcaacagagtgaaagaaataaataacttcataacagagtgccacactccgctagagaaacagaaacgttattttccaacagcttcacttccttcctattttgccgtacagaaaagaacaacatgtaacttaggataagtgtgtaggggcctggacaaatcactttggtaagactgttttatcatttataaaaccagcttcacgagaatct

SEQ ID NO: 521161 - DNA, 586 bp, Homo sapiens
tgcccctgagtcttgctttgctgggacagccttgccctgccggaggagatggcaggtgggtgggatgaggcttggctccaggaaggaggccacttgtcatgcggggacagccaggaagttaattccctgtgtgcctgaactgcttgtcccaaggattgctgcctcagggtcacattcaaccagccacacctcaaacagaggggacagaaatacaacacaaattaagaagctctgctgtggtagacagggcgctttgtaattgcacagggctaggtcaaaaatcgtagccttacaaaagaatcgggtagtgtcagagaattttgaaatgaaaattctaagaagtactccttgatgtagagaaaacagcaaaggagcggcaacagagtgaaagaaataartaacttcataacagagtgccacactccgctagagaaacagaaacgttattttccaacagcttcacttccttcctattttgccgtacagaaaagaacaacatgtaacttaggataagtgtgtaggggcctggacaaatcactttggtaagactgttttatcatttataaaaccagcttcacgagaatct

SEQ ID NO: 521162 - DNA, 586 bp, Homo sapiens
tgcccctgagtcttgctttgctgggacagccttgccctgccggaggagatggcaggtgggtgggatgaggcttggctccaggaaggaggccacttgtcatgcggggacagccaggaagttaattccctgtgtgcctgaactgcttgtcccaaggattgctgcctcagggtcacattcaaccagccacacctcaaacagaggggacagaaatacaacacaaattaagaagctctgctgtggtagacagggcgctttgtaattgcacagggctaggtcaaaaatcgtagccttacaaaagaatcgggtagtgtcagagaattttgaaatgaaaattctaagaagtactccttgatgtagagaaaacagcaaaggagcggcaacagagtgaaagaaataaataacttcataasagagtgccacactccgctagagaaacagaaacgttattttccaacagcttcacttccttcctattttgccgtacagaaaagaacaacatgtaacttaggataagtgtgtaggggcctggacaaatcactttggtaagactgttttatcatttataaaaccagcttcacgagaatct

SEQ ID NO: 521163 - DNA, 379 bp, Homo sapiens
ctcagtcttccaaaactatacatgctccacatccaagttctactcaggggcaaggactactcagtttatgcagttaaatcactgcatgcaggagtgaatggttggcatctatatatagaagaaagaaaaaaataaagggaataacacagaggaaagaaaatagagaaaagaaaaggggaaagagcaaaagaaaggaaggaaaaagacaaagaaggtagcaaagaaaagaaggaggccagaygtggtggctcacgcctgtaatcccagcactttgggaggctgaggtgggtggatcacttgaggtcaggggttcgagatcagcctaggcaacaaggtgaaaccccctctctactaaaatacaaaaattagctgtagtccc

SEQ ID NO: 521164 - DNA, 604 bp, Homo sapiens
gtgtcctgaatgtatgaaatcaattttgtgtgtgaggggaaaataatgtaacaaatatacacacaaggaaaccccctcccccaaacccaccagaatattgtttttacctctgggtgttgagactatagagttttaatttctttatatattcttctgtttttctagaataaatgcatattattttataattacaaagkctactttttaactcttcataatcataacttataatggtaaaatttatataaaatttcaatctgtgcatatgtaaataaattaactttcttgttatgcatttaagttagttataggtttccactgttttcttcagacaatgattatcattgtgtgtaatttcaacctagtaactcaattgtttctgtagaattgatagtagaattaattactcaatagttatggatattttaggactacataaatgctattcaacactctttttaatggttgtatcaattacacttttatcagtaggagcactcattcttccacaaaaaatgatagtattgaattttttttcttttgttaaatttataatttgacaagaaaaatcttctaaatatattttttaaatgtaatgtgtctt

SEQ ID NO: 521165 - DNA, 604 bp, Homo sapiens
gtgtcctgaatgtatgaaatcaattttgtgtgtgaggggaaaataatgtaacaaatatacacacaaggaaaccccctcccccaaacccaccagaatattgtttttacctctgggtgttgagactatagagttttaatttctttatatattcttctgtttttctagaataaatgcatattattttataattacaaagtctactttttaactcttcataatcataacttataatggtaaaatttatataaaatttcartctgtgcatatgtaaataaattaactttcttgttatgcatttaagttagttataggtttccactgttttcttcagacaatgattatcattgtgtgtaatttcaacctagtaactcaattgtttctgtagaattgatagtagaattaattactcaatagttatggatattttaggactacataaatgctattcaacactctttttaatggttgtatcaattacacttttatcagtaggagcactcattcttccacaaaaaatgatagtattgaattttttttcttttgttaaatttataatttgacaagaaaaatcttctaaatatattttttaaatgtaatgtgtctt

SEQ ID NO: 521166 - DNA, 604 bp, Homo sapiens
gtgtcctgaatgtatgaaatcaattttgtgtgtgaggggaaaataatgtaacaaatatacacacaaggaaaccccctcccccaaacccaccagaatattgtttttacctctgggtgttgagactatagagttttaatttctttatatattcttctgtttttctagaataaatgcatattattttataattacaaagtctactttttaactcttcataatcataacttataatggtaaaatttatataaaatttcaatctgtgcatatgtaaataaattaactttcttgttatgcatttaagttagttataggtttccactgttttcttcagacaatgattatcattgtgtgtaatttcaacctagtaactcaattgtttctgtagaattgatagtagaattaattactcaatagttatggatattttaggactacataaatgctattcaacactctttttaatggttgtatcaattacacttttatcagtaggagcactcattcttccacaaaaaatgatagtattgaattttttttcttttgttaaatttataatttgacaagaaaaatcttctaaayatattttttaaatgtaatgtgtctt

SEQ ID NO: 521167 - DNA, 557 bp, Homo sapiens
tggaggaacctttaccctggatgctgggctgtcagatgctctgctctgagaggctcccscaacccaccctgggtcctttcctgacccaggattctgctctgcaggcaggggcaggttagacccctgcctgagccccatcccctaaaatcataaccagatgggctcttgagtgttgcctgccccagccctcacctgctgaggtggggaggaactggccaggaggggacagggctgtgtcgccccatgtgggtggggctgggctgtgcccttccgtggccgtggccctgggactgcatctctactcccattagtatgcactccctcactctgggccacgtaatctgtttatgcacgtatgatatcaaaaacaggaggcaggtgctgccgtcttgcgttcctgggagtcagaggaggggacattttatgtctacagtggcttggcagcccctaatcgatgtctgctagaaggaacagacagattccagatggcgtggcagtgatagaggaggtgtgtgtgtgcatgcgtgtgtgtgtgtgtgcgcgcgtgtgtgtgtgag

SEQ ID NO: 521168 - DNA, 427 bp, Homo sapiens
ggtggctcatgcctataatcccagcactttgggaggccaaggtgggatgatcacttgaggccaggatggccaacatggtggaactccatctgtataaaaatacaaaaattaactgggcatggtgatacacacctgtaatcccagctactcargaggctgaggcacaagaatcgctggaactcaggaggtggaggctgcagtaagctgagatcgcgccactggactccagcctgggcaacagagtgagactttgtctcaaaaaaaaaagtgtgtacaaaacatttgtataaaaaggaaattgcatttgaatttttctaccatgagcatgtgataactcctaaaagatttaaaaacttctatgaatggctaggcaaggtgactgaaaaaataacctggtttcaggctcaaatctggcactgccactttc

SEQ ID NO: 521169 - DNA, 599 bp, Homo sapiens
caggtgctcagtccagtcgctctctgttcactttccctcctcaccttccttctttttttgctaccctttccttctctacggacaaggggaaaacaccagcttgaggtgagataaacagtagttttaggagacattccctctgcagtgtgggtcggaaggatctcagacttaggtcactgttctgggcaagctctaggggcaaagcagacacaggagccgagaagccaggctctcttagcctttgcacaggcccctctgcctggcatgcctttccttttcagtctgacagactcccaccttagccttcaaagcccgaccaaatgtcacctcctcgggaagcstgggctacctgccttgatgaggctccacttcctggagctactcttccatacagaccccatcctagcactggccacacacccctccctcccgctttcctgcatggagggctgctaaggggcagaaaggccaacatgccagcacttgtcaatcataaagagccagaaagacaaaaccggaagtcgacggctaatggttactagccacatgtgtacccatcttcctcctctgtggaaggcggaaggaaacagatgccctcc

SEQ ID NO: 521170 - DNA, 638 bp, Homo sapiens
ggactacacaccgatgtagttggctttgggctccatctcgactttggtggggagagggtgccaccttctggacaaggaacagtatgagcaaaggtctggaggctgcttttgagaagtagcctcacggagtctttccaggatggtggggccgtaggggagacagaagcacctagtgccagggctgggaaccttkgctcaattatctagattcttgtgaacaggaaagggacacgttaattagaaatggcatgaagggcctggagagggcaggcagggaaaactccatttaaaagcccttctgaaaggatatccctaaaaagaccttgaaggggagggggaaacagaagcagtcagtgagccacgctgcagggcagggctggttccagagcagagggctgtgtgggtgaggttcctgtctccagatcccttccctgccatgctcatccttcctgccaggtgggcctgggcttgggctacctggagctgccacagatcaactacaagctctccgtggaacataagcagcgtcccaaggtggagctgatgccaagaatgcggctggtaagagatgcaggaggagggcgtggggccagatccctccccgttggctgggctttgacctccagactcccggtccg

SEQ ID NO: 521171 - DNA, 306 bp, Homo sapiens
tgctaatacttagtgggacttagaatatatcgctcttgttcatgctgttgggctctcctgatgatatcagaaggatgctcattcaatctggagggagaatgaacctacctgaattgtcttcttttgcgaagttaggggctgaaagtgtcagtgggtgggctttctctgttgagtggttttccaaaccagctcccttcttcttagcacctttcctggttctctcttggctgattcttgtgtgatttacagrgtttatagtaatgtttaatgggaaggagcaaggaaatgaattcttgtcatcttgtc

SEQ ID NO: 521172 - DNA, 618 bp, Homo sapiens
tagtaaagatgcccactgtaacactgtaaacttaatatattaggcacattccagcaattctctgcaaagtttatctcgttaaacaaatgccactgacatgtttatgtgtgttctaattaaaagccattattaatgggttataacttgctttaaaaatatctctggcatacatttcasaagtttcgtttcattttaatccaatgacatgctttccatattattttccatgtaattaaagagatgttactctcatttcctctccagtgcaccgatgttttaactattgaaattctaactgacattgttcatttgttagattgtaactattaattttatgtggctggcattttcctaatttaagtaccttgtgcttaatcttcactgaggtcacacaactttttatggagatattagaaagtatgagttgttctcattttttttcctaggggcttaagttagtgcaatgctcttagttagcatcctataaatgattgttggattagtgagtgatggttacagggattaagactatcaaacctttcccatcttttggttcttcattctgctttccattagattatcagaaatgctgtgtttcttctctgcttgaaaatgcag

SEQ ID NO: 521173 - DNA, 565 bp, Homo sapiens
ctactttgtgcccacttcttctttggtgggaaaataaactatggtcaacaaactactttatctacttccactttctcggcatggcatctaaattccaggggctttcatggtgccatgcttgggggttagaggcatctgattcttggtgatcatcattgcaggctgtcttttcagccgtatttcatctcatctcctccctagactacaaccatgcagggacctgaggatatatcccttgcttcgggctatagcagttctccagttccagctctctgacaactgctaccatccacctatcaggcattgggaacgcttagctgctttcatttagtagactgggacctgcgaaacactgtgagctctcagggccatcaaaggttctttaacaatttkttgctcttctagggtgaacaggaaatccttcagataacatatggaacttgccagtttcttagaatgttctgtgtggctggtagacacactttgtgtgtgcttttatttccataccaatccaagaattctaatctttggggagagtgagcttggggagagaggtaaggtacag

SEQ ID NO: 521174 - DNA, 533 bp, Homo sapiens
caatggtctaaccctgctcagcagactctctactttggggagaagagaggtagtatctcatgagttatctttctccgtgaaaaccatgggctagagaaggggactgcagacaccgaggggaactgttcctgtcatccagaggctgagaaacatggtggtctgctgtttgaggatgtaacaagccatgagttccccaactggttccagtattgcagctctgatttacagcatgcataatcttacagggttctggagtgacttcaccccacaggaggaactctaacaggaagctgaagtcagtgttgccctaggtatctgacaatgaagctcacgaaatccaaactattttctgagtakctcttaggctactatgtctaatgacccagaaaagtgattgaataacttaaagactgcttaaactcaggagcagttattttttccccacccaccatactagaccccttcccccaaagaagctggcctgggattggaaggtaaacatgaaaggtgccagtaaaatcctagctttccat

SEQ ID NO: 521175 - DNA, 628 bp, Homo sapiens
tcccagctccccaggcatttgtttttagtctaattccatctctgtagacaccaacctgccttctcaaaatagacacactcgccctcatcccaggctttaaagcccggcattgccccacgcagagaagtcctaacacgaccctttccacggggactagaatctgaggattgttgtaggacttctctgctcgtagccctagagaaaaatctaggscttttacagtgatcactatgggcagaacgtactcttggagggtaactactatttaaaatacattatgcatgtcttgacttccactaggactccgcttgaagaagaagatggttagaaacatgggccacagataaaatctctcaagtcctcacgcacagcctccaagaaactagcttgatccatacaatctgaaggtttagaaagaataactacaaacaaggaggttagcatttgtgtttgcacctcctatgtatctacctcgacaattttacagcttaccctatttaattctaggtattagttagatcatttactagatgagaaaatcaagggacttagacttagtgcatgtctacattcatacaagtaaatagcgagacctcagattcagactcagatctgtgtcattaccatg

SEQ ID NO: 521176 - DNA, 524 bp, Homo sapiens
agcaaccaccaggttagctcctgattggttcgtcctcaattgaaaggcgggatttagggaccgattgagacgcgggagacattctgaaacagaaaggaagggagagaaaatgaagagaaaggaaataatttacaaacctaaattatgctctggtttccaaccacagttcatgaatgtgttctagtattttttcccccgcttttttttttccaggcttctctcaatatccccctcccgtccttgaccactcttgcaattctaccagatgttgctgtcctcccttacaaggtactgatttggaagctgacctagttgagggggaggagagggcgtttttgactccctgaatcttccagtgtcaacctgatgcaagggaggcttaatttaagaccagtaggcttgtcttatctgcccccaaccctgtgcctctggatagaaatccctggtcagtcagtccagttagagagaaccccagactcctgggtaatagcttggsagctctcatggctttcacaagggaaagg

SEQ ID NO: 521177 - DNA, 521 bp, Homo sapiens
tgctaagaggttagggtgggctggagacagtgccctacccccgccccctgctacatcctcctcatccccacccccaccgggattgctccaggccttttgggctgccctttccctgccattacctaggcagcacttggagagctcctccttaagtctaacccggacctcagtcatttctttaaagytttcttggggacctgccaccccatgcatttaacccactgcatgccatcaaccactctaaaattggtctgagtctggcatcttttctgcaacccttcaggaatacaaatcctgtctccttaaagcccttaagaatttaatcttagggttggcagggactttagctgtgtatgagatattgggcatcctagctaaagaaaaaaatcctctcagaaagatgagagccagggaagcaagctcttgggaaaacacaggaccctgaggaaggtcagtttgctttgctttctaaaggagagagatctattattcaagggaagtttgaacatcacattgacgct

SEQ ID NO: 521178 - DNA, 355 bp, Homo sapiens
gccagtcaacatctcaagctctgaccattcctgttctctagggacacagttatcrcatgcagtccgatctctgcctcagatacgtatcaattcttcagtcaatgcaatgggtccagttatatcatggattctctgatttgactcactcaagtaatgctcctggacatactaagattttagaaaatccctggtcacctaatagggtagtggaaaaattgttttgagttcttttctatcaccatctagtgaataaagagctaaaaaaacctcttctcaggagccagactgaagcaacatagagacagagggaagtggatacctctgttaccaaaggacaaataggacctaggcaggt

SEQ ID NO: 521179 - DNA, 477 bp, Homo sapiens
cttgggctggcagaaggaattccactcccatagcccgatgtctgccagtgggcttctaattcttacaactgggaaaacactaaayagcaaatctgaggttggtccattccttcccactcccctttgctgggctgacctcaggctagttacagatcctctctgggcctcagattcctccactgggccataaggaagaccaaggagcagtgcaggtagcaacatccttccccactcccagaggatgaggaattgtatgccctcaggaaaagccagggagggggagcatgccatcttcaggaacctgaggctgggcggaaaatggctacactgaggccagagcaaggatgcctctggaacacccataggcaaaaggaggcaggcctcacccctctcccaaatccaaaggactctcaaggctcagggtatagtcaaggaagctggagaagtcaggcagagatgtctgatggggggaggcac

SEQ ID NO: 521180 - DNA, 562 bp, Homo sapiens
tcattactttatttcatggcacaggatggagcctcagaaaggttagacaacttgtccattgtaacacagctcgttagtcaaagagctgggattcccacctaggtctgacttcagagcccacactcttaaccactggctgacttgtgttcctgagaaggggtagcatccagaattgagttgggatttccactattwtgagccagaggaatgtggcttaagttttggggctttgtcatggccttactgttctcaggcttggagtcttggcaaacacctgttccacgttgttgaaggagcaggctctgcagaatgaggaggcaaaatcaagctgcactgaaggacagggtggctgtacaggaggccccacaaaggggcatggaggggagtgagcccagcagggtttgggtgaggacagaggtctgcagacagtggccacttcaatttgtttcatctaagtgctagcattcctctcctccttggtcctgaacagtgcctttatgatggatagtgccttcctgattccctgggttttctctgccttggctagtgcagcctcctgaca

SEQ ID NO: 521181 - DNA, 531 bp, Homo sapiens
tgacccacacaatgcatcagtctgcctctgtactgcaatggcaagggtgggatgaggtgggaagaagcactgaagagagaaggtgtggtggaaatgccagttggagcgggtaaggactgggcccttaagtggtcagttcctgagatttatggaaggtagatcctataacctggtggtgaccggtggaactttttgcaatgatggaagaatttggtactcaacctatctagtatggtagttactagtcacatggggctattgagcatttgaagtgtaactagagcaaatgagaaactaagtttaatttttttttttttttgagacrgagtctcactttgtcacccaggctggagtgcagtggcacaatctcggctcactgcaacctctgcctcctgggttcaagcaattctcctgcctcagcctcctgagtagctgggactacaggcgcgtgccaccacacctggctaattttttgtctttttagtagagacagggttttaccatgttagccaggatggtctttatctcctg

SEQ ID NO: 521182 - DNA, 364 bp, Homo sapiens
ggctggccctgctgtcttgaagcttatgcactcccacccctatgttcaggcagtacaaatcccgcaggagccacacaggggcggaatggcagactgggtgttcagagcttccctagctttcccaggccctggagggtggcccaccatggaggaagccagaagcttcggacacattccagagcccccttggcagcacccagaggctctggaggcgtggcagcctgggggcagggccagcagcatctgtcctggttcccacactctggcctctctggaatctcrcatatttctcttccgtgtgtgcgtgatatcagcaggacaaggacactgggggtggtggcaggggagggactgagctccttga

SEQ ID NO: 521183 - DNA, 509 bp, Homo sapiens
tttggcccgtgggcccagagtttgccaaactctgcattagcccaaaacaggggccttcacactgggtttctcaaaacttgggattgtttggaagtgcttctgggggttcacaaacgtttggctctaatttaaattatttgtaggtgtttaggaagctataataaaagcatgcactcaaatgtattccagcatttcaccatgcaggaaatcaacatattaactgtcaggtaagtaaactcctttagtgaagacctcagaatggagcttctctggctatctccatgcatatgtatgagcagtatgacaaaatggttgaaaacctgggtcctagaatcagatggacatgagtttgagtcccagcactgccacttactagctctatggctttggacaagttactttrcctccctaaaccagcatggccaggacaccacaaaacagagtagacactggccatagtgccgctgcagcctcctagaggctgcattgtgggaaaatggagcgctcac

SEQ ID NO: 521184 - DNA, 496 bp, Homo sapiens
gggcccggcgctcctggagggccttgtggggagacagtgggtcattcggagggacaaggggacacgcagaggccacgtgtggagtgggggtgccccgcatctctttttccccccgagacagagtctctctctgctgcccaggcatgagtgcagtggtgctatctgtgctcactgcaacctccgcctcccaggttcaagcaattctcctgcctcagcttcccgagyagctgggattacaggcacctgccaccacaccgggctgctttctttttgtatttttagtagagatggggtttcaccatgttggccaggctggtctcgaactcctgaccttgtttgtgatccacccaccctggcctcccagagtgctgggattacaggcgtgagccaccaggcctggcccctgcacctctttttacatgtaactgctgtgatctcccacacgtgcctccttggcagactggggactggggccagggtctgtgtccttgtcact

SEQ ID NO: 521185 - DNA, 518 bp, Homo sapiens
tcacatcccacacagggcccgtgggtgaggctgtccactgcagcagtctgggtgtctctgggtgggggatggatgggtggatgagctaggcgcacaccatgcagtgccrtgcaattgtcagatgcagtgagtgagatgcacacacagcaaagtcgcaggaataaaaactcagggctgaggactgcctccatcttttaagtgatggggagggaactttttgccttgagtaagccacggagttgcaggtctctgaggacccacacataattgatactctcaacacatctcagaaaaagaagttcagccaggactgcttgggcttctttcccacaagccacgtctcctgggaatcctgctgggtcaaggccgagggcagtcggttgggcaggagatgctcgttaggagctgggctctgtgctcaggctgctggagtctggaatcaggctcagtacccactaggtgtgcaaccctgggccagctcttccctcagtctcagaatgggggtgatgtgaggacaa

SEQ ID NO: 521186 - DNA, 518 bp, Homo sapiens
tcacatcccacacagggcccgtgggtgaggctgtccactgcagcagtctgggtgtctctgggtgggggatggatgggtggatgagctaggcgcacaccatgcagtgccatgcaattgtcagatgcagtgagtgagatgcacacacagcaaagtcgcaggaataaaaactcagggctgaggactgcctccatcttttaagtgatggggagggaactttttgccttgagtaagccacggagttgcaggtctctgaggacccacacataattgatactctcaacacatctcagaaaaagaagttcagccaggactgcttgggcttctttcccacaagccacgtctcctgggaatcctgctgggtcaaggccgagggcagtcggttgggcaggagatgctcrttaggagctgggctctgtgctcaggctgctggagtctggaatcaggctcagtacccactaggtgtgcaaccctgggccagctcttccctcagtctcagaatgggggtgatgtgaggacaa

SEQ ID NO: 521187 - DNA, 521 bp, Homo sapiens
cttgctcgggatgagctgttctcagtctgtgtcctcttttgtcaaatgaccatccccattgctgcagcatcttccactccctgcccatcctccccggcccctggttcctcccgacttccctattccagtgcaaggacatatcactttcctggtggcctgggcttgaaatctcagtgaccttgggcattctctcccttccctgactccacccctctaacatacacacactctctggtttcaaactggcagctccaggactatatctggcccatggaagtgtcttctttggcctgtgaagtgtttgttatttattttatgtaatatggagtaattgccaatattgagaacatgggtgatcttgcatgtaaaacttgaaaatctggcrtctctggcctaaattctcacatggtgctgagtcatggctctgtcctagggaaggggcttggcaccccactttgccacaatccccactactccctgctgcctcccatctggccagactctctccttaatatccccca

SEQ ID NO: 521188 - DNA, 613 bp, Homo sapiens
tcccagctcctaatctgaagacaaagagctgctgtrcttttccatgccagggtcatcccagacccgccccactctgctgcagactcaactgggcaggtcttgtttatcacaggatatcatcttcagagtgttccatttaagcaggctcaccctggctgatctggggagagactgacgaaattctcaggcaaagctgaggcccaggcaaaactgaagaagctaccaaaggaagcatgcctctccttatcctcctctcctccacagccctctccctctacatggttagtttctctgaatcttccctaccatttattgaaccctgtgtttcacgtgcactgcatacattgtgttctttggttttcaaaacagccctagaaggaagattctattattctagtttttcagatgaggctgttaagactcagagaagttaggtacctggatctgctagcaagtgacaaagtatttgaatctggggtctttgcagggcccttgctctaaatcactaagctaggaacccccttctgtgataggcagaataatggctgcccaaagatgttcacaacctgatccccagaactggttactttacgtggcaaaagggactttgcag

SEQ ID NO: 521189 - DNA, 613 bp, Homo sapiens
tcccagctcctaatctgaagacaaagagctgctgtacttttccatgccagggtcatcccagacccgccccactctgctgcagacycaactgggcaggtcttgtttatcacaggatatcatcttcagagtgttccatttaagcaggctcaccctggctgatctggggagagactgacgaaattctcaggcaaagctgaggcccaggcaaaactgaagaagctaccaaaggaagcatgcctctccttatcctcctctcctccacagccctctccctctacatggttagtttctctgaatcttccctaccatttattgaaccctgtgtttcacgtgcactgcatacattgtgttctttggttttcaaaacagccctagaaggaagattctattattctagtttttcagatgaggctgttaagactcagagaagttaggtacctggatctgctagcaagtgacaaagtatttgaatctggggtctttgcagggcccttgctctaaatcactaagctaggaacccccttctgtgataggcagaataatggctgcccaaagatgttcacaacctgatccccagaactggttactttacgtggcaaaagggactttgcag

SEQ ID NO: 521190 - DNA, 613 bp, Homo sapiens
tcccagctcctaatctgaagacaaagagctgctgtacttttccatgccagggtcatcccagacccgccccactctgctgcagactcaactgggcaggtcttgtttatcacaggatatcatcttcagagtgttccatttaagcaggctcaccctggctgatctggggagagactgacgaaattctcaggcaaagctgaggcccaggcaaaactgaagaagctaccaaaggaagcatgyctctccttatcctcctctcctccacagccctctccctctacatggttagtttctctgaatcttccctaccatttattgaaccctgtgtttcacgtgcactgcatacattgtgttctttggttttcaaaacagccctagaaggaagattctattattctagtttttcagatgaggctgttaagactcagagaagttaggtacctggatctgctagcaagtgacaaagtatttgaatctggggtctttgcagggcccttgctctaaatcactaagctaggaacccccttctgtgataggcagaataatggctgcccaaagatgttcacaacctgatccccagaactggttactttacgtggcaaaagggactttgcag

SEQ ID NO: 521191 - DNA, 545 bp, Homo sapiens
ggtgcagtggcttacacctgtaatctcagcactttgggaggccaaagcagtggatcatctgaggtcaggagtttgaaaccagcctggccaacatggtgaaaccctgtcgctactaaaaatacaaaaattagctggacgtggtggcatgtgcctgtaatcccagttactcaggaggctgaggcaggagaatcgcttgaacccgggaggcagaggttgcagtgagcgaaatctcatcactgctctccagcctgggtgacagagcaagactctgtcttgaaaaaaaaaaaaaagtactatcacaacatgagtaagttttcacttatgtaactcatctaagattttagatgggaaaatgtaaaaactgattccagagttaatagaacttgtgttgttggaaaaatgttcacatctccctcttaacccaaatgttggcccggagtgtctgtgtctgggtgctgtgctrtgagggccgggggtcaccatcctgggcaacggcttcgtgcagacacctgctcagtcaggctggaggccccagcagccaacca

SEQ ID NO: 521192 - DNA, 545 bp, Homo sapiens
ggtgcagtggcttacacctgtaatctcagcactttgggaggccaaagcagtggatcatctgaggtcaggagtttgaaaccagcctggccaacatggtgaaaccctgtcgctactaaaaatacaaaaattagctggacgtggtggcatgtgcctgtaatcccagttactcaggaggctgaggcaggagaatcgcttgaacccgggaggcagaggttgcagtgagcgaaatctcatcactgctctccagcctgggtgacagagcaagactctgtcttgaaaaaaaaaaaaaagtactatcacaacatgagtaagttttcacttatgtaactcatctaagattttagatgggaaaatgtaaaaactgattccagagttaatagaacttgtgttgttggaaaaatgttcacatctccctcttaacccaaatgttggcccggagtgtctgtgtctgggtgctgtgctgtgagggccgggggtcaccatcctgggcaacggcttcrtgcagacacctgctcagtcaggctggaggccccagcagccaacca

SEQ ID NO: 521193 - DNA, 333 bp, Homo sapiens
gtcgacggccatgtggcgtcatggtgataggagggtgtccattctttttcttccttatctaggacttgaggtgggacatggaagaacagggacccctcctggtttgtccacccagcccacacctccattcctcacccaacctaccacttcagagccgggaaaagacctcagagaacatccgctccgactctaccgaggctcagacagggtaaggagttggccccacgtcacacagcctggtgtatgtggcagagcctgggtgacagacagtcagccccaccaggtctttcagctccaaccttggttagarggggaggaaggctggcacaccca

SEQ ID NO: 521194 - DNA, 687 bp, Homo sapiens
ttaaaaaagatcaaccaggtttggccgggagactctgggatcacaaaggctgaggaggctgtctgggttcagggcatcggggagcccctcagcagagagacagacagacagacgacagacagacacacggcaggcaggcaggtccacgggctcaggaggggctggagagcaggtgacaactgtgagaagggtttccacactccatcactccacactcccaccytatatgtcgtggaggtccttccacaccaccccaactgttgttctgaaaccgtaggtgtagtttctgctgcccacatggtgcagaagagaccgcccagggggcatctgtgtactttctgagctcctgactgcactgctgtcccccagggtcatcgctgacactgtcccttgccctgactccagcccagtgcagcttcctggtgctgccattgagctcctaagtcaggcagcttctcagatgccactgatgtccgcagctcctgggattcctgcccttgggcagcccctgtcctggagtgtgggctgcacctagcaagtcgcttctaaccagcagaacacggcaaaggtaatggcaagactgtcacttctgtcttgctagagactgtccctcctggctctgatgaagcaagctgtggtgttggagaggcccttggggcaggaactgagggcagcctcgggccgaca

SEQ ID NO: 521195 - DNA, 570 bp, Homo sapiens
gagccctcccatggatgctgcataagcaaacayggcccacgggaggcaggatgtcctcacacagccttgcagaaggggatgggggctgggatgcctgtgcctttaacagggcatgtagcccaccccacacttcactctctcttgggtctaggtgctgagctaacttccagaattccggaatcacaaactcaacttgggttggaaaacagtgcagggactgagtcactggctccatgaacatagggtgggggtccaagaatctgcatttcccacaagttccaggtaacgctgatgctgcaggcccagggaccatgctttgaagacccctggcctagaggcgaggttgagggccaggagtctaagcaggccagagccagcctgctgcctatttttgtaaataaagtttcattagaacacctccatgcctgtttacgaatcctctcaggctgcttctgggctccaagggcagggctgaggagctgcaacagagactggctggctggcaaagcctaaattatttactatctggtcctttacagaaagagtctatgggcacctgctctacggcat

SEQ ID NO: 521196 - DNA, 570 bp, Homo sapiens
gagccctcccatggatgctgcataagcaaacacggcccacgggaggcaggatgtcctcacacagccttgcagaaggggatgggggctgggatgcctgtgcctttaacagggcatgtagcccaccccacacttcactctctcttgggtctaggtgctgagctaacttccagaattccggaatcacaaactcaacttgggttggaaaacagtgcagggactgagtcactggytccatgaacatagggtgggggtccaagaatctgcatttcccacaagttccaggtaacgctgatgctgcaggcccagggaccatgctttgaagacccctggcctagaggcgaggttgagggccaggagtctaagcaggccagagccagcctgctgcctatttttgtaaataaagtttcattagaacacctccatgcctgtttacgaatcctctcaggctgcttctgggctccaagggcagggctgaggagctgcaacagagactggctggctggcaaagcctaaattatttactatctggtcctttacagaaagagtctatgggcacctgctctacggcat

SEQ ID NO: 521197 - DNA, 545 bp, Homo sapiens
tgtttccctggggcgtcagcccttaggggctggggccacgctctccaaacgcccaaagcagtgattcctctcaaacacttgtgccagagagccaggaggaatagcaagttcagagtttcagggtctagacgtggcccagccacatgtggaagcaggagtggctgaagccctgggtgtgccaggggcctgtttgcagctccagtgggggctgtggtcagtcccaggtcactgaagggccctgagaggctgagaaccagccatcctgtgacagggttgcccagtggggtgggaccccaggtcccggagctgcgcccctgagttttcccgggctgccctggcagcatcggtgggctaagggaagccaggggtgggaagctgcggggacatgaaggactctgagctctctagggctctgcttgtacttgctggcggcttgcactttgttttttgctcatctggggtttgaaaattgacctcctcgttccagtgccctcccactgcacyagggctcagagctcgctgggggctaagtgggcttgggcagg

SEQ ID NO: 521198 - DNA, 609 bp, Homo sapiens
gaaaactgaggcttggagaggtaaagctggcctgccttggtcacctggtgagtggcagttctgggagtccaccctctaaagcacagtcttgttctatggccagcagagaagtccagagacaaatacgggaacagccaaaggcctcctcgtagggtgagctgagtggtgcttctcaagatcactgagaaccgactgctgggggggcccgggcagcagcagggggtgggtgtcgtcaggagtctccgaggcaatgcaggtgtgagctggggccacctgggcaagggcggggagacagaggtgaccagtggctggcaatccaagaggctgagaccgcagggtcttcggacagatgcggggtgtagggggaagacaggggtgcaggtggctcctgggtttccagaggtgagtggtcagtttctgaaacaggggagttgtgggtgcagtggtgtgggggagccctggagccagtggcggctgtgtctgrcctcagatgctggtcgggcatccacgtggggaggctggtgctgtcctctgacagggctcctccccagccctggattgcgtggttgtttcttttgtgcccagggcctttgcagactcagatccctc

SEQ ID NO: 521199 - DNA, 619 bp, Homo sapiens
actgaggcttggagaggtaaagctggcctgccttggtcacctggtgagtggcagttctgggagtccaccctctaaagcacagtcttgttctatggccagcagagaagtccagagacaaatacgggaacagccaaaggcctcctcgtagggtgagctgagtggtgcttctcaagatcactgagaaccgactgctgggggggcccgggcagcagcagggggtgggtgtcgtcaggagtctccgaggcaatgcaggtgtgagctggggccacctgggcaagggcggggagacagaggtgaccagtggctggcaatccaagaggctgagaccgcagggtcttcggacagatgcggggtgtagggggaagacaggggtgcaggtggctcctgggtttccagaggtgagtggtcagtttctgaaacaggggagttgtgggtgcagtggtgtgggggagccctggagccagtggcggctgtgtctgacctcagatgctggtcgggcatccacgtggggaggctggtgctgtcctctgacagggctcctccccagccctggattgsgtggttgtttcttttgtgcccagggcctttgcagactcagatccctctacctgggatgctg

SEQ ID NO: 521200 - DNA, 463 bp, Homo sapiens
gggtggcccggctgagacacccatccagggcttgcttgggtccctgcccgctccaacwcacagcctctcttctgcaccccccacctgtatctcctggctaggacagcccagggtggtgtctctgggcactgcccgccaaccctgcagccctctgtggtcctgcaccagtgctttccttctctgtctgacaggcatgatgtctcagggccagaggccggtcacacccatccctgatgtccagtcctccaaaggggggaacttggccgccagtgcaaagaagaagcacggtagcaccccgccaggtaggggccaacccagcccagcctcagctcctcctccgaccaggtggctgctcctgcagaggaggggttccctgacctgccctcacttgggcgtcctgggactgccaggtgggcggcgagtggggctgttacagcgcagtttcctctgtctggtcaccatg

SEQ ID NO: 521201 - DNA, 623 bp, Homo sapiens
agcctcaggacttccgtgtgggtggcaggtgctttcggaatggatgcccttccgcctagtgtctgccctcctagtacagcagggggccggcatgcttcatgctccctgtgagggtcgactggcgtatgcacgtccttcagcagtgtccttgggccaagtgtggcactgagtcctgcagacacccagggagagggcaggaggcaccgggtcagaaatctgggrcaggtgaggagcatgggcatctgcgtcaggagagacttcctctctgaaatccccacctggggccatcacggcctgcattgtgtgtgaatacatttctgaatgttataaaacatcagtgggaaagaaaagcttgagggtagctttgctaaagcttctgtttggttccgtgaccatttactgagttgtgacggtaccaagaacacaggaggaatgaggcttctttcttcaagaacttggccagcgagcaattcaacacaagataggtgacgaatgatgtgaccaagggaagcacaggggccatgtgagcctggggcctggaccctgggagcacctgggaagccctcctgggggagatggcccttgagctggtattggtcaggtgtcttctgcttataagtcgt

SEQ ID NO: 521202 - DNA, 571 bp, Homo sapiens
aaacatcccttcatgtccccatccggaaccagccacagaggtcaggagagtcgtgccctgagtctggcccacgggggtaggggtggggcggagggttctctggaggtagattttatttctccattttatttttatttctgaaaaggtaattcgcatagttcaaagttgacaaggatacacaggaaaagtgaatcatcccatgttgaccccaggtacctggtgtatcaccctagatacagtgtgttattgtacagctttcataaattctaagcaaatacaaataaatatatctacgtttatttttcctttttgaaatgcaaatggtacttcctagaggaggcagcatgggtgccagccagcaacaaagtccactcttctggggtttgcagagtgtgggtttgggggatggaggttcctctgggatttagtgggaggcagaagccttcaggattgctgtgaccactstagccctcacagctcttctctttatttgaatacgactggcacagatcatccgggaagcccacgggaccctcaggcgggcaggatgaacgactggcacaggatcttc

SEQ ID NO: 521203 - DNA, 444 bp, Homo sapiens
gggtccgttttcagcacctggaagccaccacattcctgccatgtagcctcgtgtgtcttcaagccagcagtggtgaacagaaaccctcccgtgcttcgcatccttgacttccttttctgtgaccagccagagaaaagggctcgtgtggtcaggttaggcctactcaggtcatctccctgttttaaggtcaccygtgccgcaaaacggaacctgctctggggagtcgagtttgtcctcttcaccttccaggggatcttgcagggcgtggacaccaagggccggaagtcttggagcccatgttggaattctgcaattaaattctgcaattaaaatgttaatgattgtgtgtttcctttcttttttttttttttgagacagagtctctctcccacctcagcctcccaagtagctgggactacaggcacccgccaccacgcccggcta

SEQ ID NO: 521204 - DNA, 542 bp, Homo sapiens
caccctcacttcctgcccaggaccaggagggtggctgagggttttgtgggggctattggccaggagagggggcttatttcagagaaactgccagttcattctggtcttctctggggccaccagcctccactacgctgtgtctgtccctgtgggaaccgtgtcttgctggaggaggctccagaggggcttcctggctggctgcccctgcccactgctgcttcctgggtgctctcggcactctgggtgtagctcatggcctggcccggcagcctgtggctgggaggtcatggctggggggcaccccgatcatagttggttgtgataggtggagaagcagctacaggctgttgggtgccaccctgatgccccctataactgcccacctgcttaacccactgatttgcgttttgcagccacgcctgccgggccacctgcccgacccacatgggagagaaaagctgccacctttttaggagccagcrccaccttgggacaaaaagggaaacctagtaatgccatcacatggaggacgaggcccagct

SEQ ID NO: 521205 - DNA, 672 bp, Homo sapiens
cacttcccaccagggctctctgcttcgacttttgcttcccaaagcctccccgrtggagcagccggagagcagcctccctttccaggctgagctgcagctcgccctcctctgcccacaattttgccacggctcccgtctcactcagaagtccctggaggtgtttcgtgcctctcaggatctgcccctctgctccaggcctttttgggcctttgcatcaactcttcctgctggtggaaggttcttcccgcaggcatttgcgtgacttactccgcatctctcaagactgctcaagcaccaccttctcaacaagcccacctgacaggcccccttgaacctgagtctgcagcgccaccgtccctggccccagctccctccctttatctctggcttctctcctacagcgctcgtccaccctgacacacattctaacctccttgtttcgtgcagttagtgttcatgtctgttcctgctggaaagcaagctctccaggagcacaactctgatggttcacgggcgcatcctgagtgcctagaacagagcctggcacgcaggacgagcctgggaggatgcactggacggggctcgggctgggatgggccctctgcccagcagggcctctcactcttacctgtattgccccaatgttctccatgagctggtccgcattggagg

SEQ ID NO: 521206 - DNA, 623 bp, Homo sapiens
tgctttggggtcataacccctttgcaaaaacagataaagcctggaaatatgcctagatacgaatgccctcagaacgaaccttgcttgcaatgtctgggtgttcacagagccctggaccccactggtctagatatgtctgggcatcgagaagggaggcctggcccccacctctgcaaaaccacctccacgagtgactgtggggaacagttgcttgaaaaggctctgctgaaggccaggtcagggctgaagagaagaggcaccccttggtcaccagtttggggagggctggcaaaaggtgcccctgcccctgattccatatctgttcctggtctgagtgttgggaaatgggcccacttccccgagtgggctctgggttcagccgctcttccacccaccacccacaggactaatttaacaaaactagggcaccacgtgatgccrcaattaccctgctcaacttgtttccctgtgaaaatgatggtattggttctgccatccgctgccaggcctcgggagaagggatgcgaagggacagggcgcctccaggctgaacgctttgtaagcatggctgctgcgtgtggggtggggagcacacgtctcagccgggtctggatggggctgct

SEQ ID NO: 521207 - DNA, 623 bp, Homo sapiens
tgctttggggtcataacccctttgcaaaaacagataaagcctggaaatatgcctagatacgaatgccctcagaacgaaccttgcttgcaatgtctgggtgttcacagagccctggaccccactggtctagatatgtctgggcatcgagaagggaggcctggcccccacctctgcaaaaccacctccacgagtgactgtggggaacagttgcttgaaaaggctctgctgaaggccaggtcagggctgaagagaagaggcaccccttggtcaccagtttggggagggctggcaaaaggtgcccctgcccctgattccatatctgttcctggtctgagtgttgggaaatgggcccacttccccgagtgggctctgggttcagccgctcttccacccaccacccacaggactaatttaacaaaactagggcaccacgtgatgccgcaattaccctgctcaacttgtttccctgygaaaatgatggtattggttctgccatccgctgccaggcctcgggagaagggatgcgaagggacagggcgcctccaggctgaacgctttgtaagcatggctgctgcgtgtggggtggggagcacacgtctcagccgggtctggatggggctgct

SEQ ID NO: 521208 - DNA, 601 bp, Homo sapiens
aggtttgagtgagaggagtgagccacacagacaccaaatctccctagaaaatgcttaagggaagagaacacagatgtgaataatcgcccccttcacaacaagatggtggaaggcygagtttggggatgtgagtgggagaggggagagagggcaggacagaatgggttttgtggccaggatttagagggcgtccctccctgtgggggcccgcttgcaatctttccttagagctcatgttgcagccctgggagcagacctgcaggtgggagccctgcggcacggagggagcccagagcctcttgctacgagcttgtccccatggtgccagggcagggcttgggccagggaacttgcgggcacagaaatggcagcctttggcatggggtggtggggtgaggagcagggctggtgccatgaggagcccatggccgctggactcccctgaaggttgggtccaggagggcaaggactcttctgcctgctgccactgccccctgaccagtgcccacgggagtgtcccgtgcacagaggaggggctcagatatttgtagaacagtaaccaaggcccaggctccaaaaggccaaccagggctatacctgg

SEQ ID NO: 521209 - DNA, 620 bp, Homo sapiens
tttcacaattatagggatcagaagtcttcactgaagagtaatttagaaaatatccagtacaatccctttattttacagatgaaggaactggaatctgtgatttgtccacagtcacattctagtcaatagcacagttatataaccatggccgatattctttccattctctatctagtaatatttccataacacacaagtactccatcccctctgggcacagtactccagaggcagattccatttgcccttgtgctaggtggcctaaaaccacatggggaaagcaaaactaaattaaaacctaggtagtcaaccagggcccacactggctttgaagcaatacagataacaactaaataaataatcctaatgttacaggatctttggggtgttgcttttctcaccggaaacctmtgcagccagtggcatctttgcccaagttcatgtcctgtgtccaggaagaatgaggtatgcagacaagtggagggtgagcaagacaaagaggagctttattgagtattagaacagctcagaggagacccacggtgggtaactcctctctgcaggcaggtcattctgtccagtgttcagctctcagcagagaggaggccctggatttggtg

SEQ ID NO: 521210 - DNA, 479 bp, Homo sapiens
agtcacaaatgaaaacataccatatgatatacatgacattgaaaacagacaaaactatactatgctgtttagagatgcataatargtagtaaagctattttgtaaaaaaaaaaaaaaaaaaaaaaaaaacagatcatcacaaaagtctgaagagtggtcatctccaagaggagggaatggaagtgatgggttaagggcatctgaaagggttggggacttctaagatactggcaaattctcagtattaaacctgtatggggactagaaggagatccatttttaaaatatttattaaattgtacatagtaaaatgcatatttgttatataacatggtcttttgcatgtatgatatattatatatgaatatactcttgcatatgttaatacatatcaagaaagtatgcagccttactcaatctgaggcacagagtaagcctctgttttcatgtggagttacagacgttctgaaatcattggg

SEQ ID NO: 521211 - DNA, 620 bp, Homo sapiens
catctctagagcttttcatcttcccaacctgaaactctatacccattaaataacagcttcccattgtcctctccccaagtccctggcaaccaccattctcctttctgtctctatgaatttgactactctagcacgcatgtaagtggaatcattatgatacttgtccttttgtgactggcttattttacttagcacaatattttcaaggttcatctgcattgtagtatgtgtcagaatttccttccttttgaagrcctaataatatttcattgcatgtatgtaacacattttgctcatccactcatttgtggatggatggttgggttgctatgaccttttggctattgtgaataatgctgctataaataggcatgtaagcccatttcttcttgactgctagttagtttttccttatactcaattaaaatttgcctccttgtaacttctgccggttggtcttcattctactaccttaacttcttgcaaggcaaaccctctccattttccttacaggaaacctcaaatattggaagacaaccttgacattttagtcatctcttttatagcccagatacgacaagttcttttagtcgttcaatcattcctcatgtaacatattt

SEQ ID NO: 521212 - DNA, 620 bp, Homo sapiens
catctctagagcttttcatcttcccaacctgaaactctatacccattaaataacagcttcccattgtcctctccccaagtccctggcaaccaccattctcctttctgtctctatgaatttgactactctagcacgcatgtaagtggaatcattatgatacttgtccttttgtgactggcttattttacttagcacaatattttcaaggttcatctgcattgtagtatgtgtcagaatttccttccttttgaaggcctaataatatttcattgcatgtatgtaacacattttgctcatccactcatttgtggatggatggttgggttgctatgaccttttggctattgtgaataatgctgctataaataggcatgtaagcccatttcttcttgactgctagttagtttttccttatactcaattaaaatttgcctmcttgtaacttctgccggttggtcttcattctactaccttaacttcttgcaaggcaaaccctctccattttccttacaggaaacctcaaatattggaagacaaccttgacattttagtcatctcttttatagcccagatacgacaagttcttttagtcgttcaatcattcctcatgtaacatattt

SEQ ID NO: 521213 - DNA, 606 bp, Homo sapiens
gtaactatcatttaaatctttacctcattgaactcaattccttcttgcaccacctgccacggaaattttggcgtttctacctaacttagtgtaccctcttcccacgaagaaatttcctttcctgccttgctcttctatttwtgtttattcattaaatacttactgagttcttaatacgtgccaggcactgtgctaggtgtttcaggttcaaagaatagggcccagtacctactgtcaatagcttacaaactagttgaaaatgtgtgtgtttaatctagataagatacattcaatgtgtcacttaacaacaggaacatattctgagaaatgcatctttaggtgattttgtcattgtgcaaacaccatagagcatacatctgcaaaccttgatggtatagcctactacacgcctaagctatatggtatggcctattactcccaggctacaaacctgtactgcatgttactgtactgaatactgcagacatctgtaacacaatggtaagtatttgtgtatttaaatgtatctaaacttggaaaaagttatgtgttgagccatgatgttatgaaagctatgtcactaggcaacaggaatttttcagctcc

SEQ ID NO: 521214 - DNA, 618 bp, Homo sapiens
ttggtgagtcatccactccagagtggtaggcatttgtagcctgaacactgtcacatgtcccccaagggagaggtataatcagaagagcaataatgactttctgcgagctgggatgaatgaccttatccccyaggtcaccaggcaatcatcttctgaaatctgccacagatttatcacaatcctttctctttctttccacactgacattattccctcttcctttgccccacacactccagcttgcatccaagggttctctgattgaattgtctgaggatgtaaacagaactttcatatatcccatccttctcctgggtcaggagggaaagaagttgttcttgccaaaatataggcttagttacctattggtttgaacattctcaacaccctcacctccccaacacatacacaagcatgcccacatgcacacacaaagggccaactgcacacgttaatgccacatcttgctaattgtgttacccttgctggttattattaaggtctttctttcaggatggagaaacccagccacataatgatcaaggagacaagtggagcatatcactgcagcgactgtgcaatgataatgagttacataaatcaaagttgggtaattta

SEQ ID NO: 521215 - DNA, 618 bp, Homo sapiens
ttggtgagtcatccactccagagtggtaggcatttgtagcctgaacactgtcacatgtcccccaagggagaggtataatcagaagagcaataatgactttctgcgagctgggatgaatgaccttatcccccaggtcaccaggcaatcatcttctgaaatctgccacagatttatcacaatcctttctctttctttccacactgacattattccctcttcctttgccccacacactccagcttgcatccaagggttctctgattgaattgtctgaggatgtaaacagaactttcatatatcccatccttctcctgggtcaggagggaaagaagttgttcttgccaaaatataggcttagttacctattggkttgaacattctcaacaccctcacctccccaacacatacacaagcatgcccacatgcacacacaaagggccaactgcacacgttaatgccacatcttgctaattgtgttacccttgctggttattattaaggtctttctttcaggatggagaaacccagccacataatgatcaaggagacaagtggagcatatcactgcagcgactgtgcaatgataatgagttacataaatcaaagttgggtaattta

SEQ ID NO: 521216 - DNA, 643 bp, Homo sapiens
ctttcttataattccttactgctcaggagtcatgtagcaaaagatcatgagatctgaaacttccctacttgcttctatagattacatcactaatgtaaagcctaagattgatctttgagatatttttcagatgtttgcactctgatgaccaactgacatcaccccaacccatgacttataccaaggaactgactcaatggttttatgacctctacctagaaactgatgataatttcatccccaaccwatcagcagcacacattcctgagccccctacctggcaaattatccttaaaaatcctagtctctgagatctcagggaggcagagttgagaaatatctctcatcctttccagttggctgctttgcaataagaaaacactttctttactacaacaccactgtctcagggtattggcttttctgtgccacaggtaagaagaacctttccactggggagtcacacacatgcaaaagaatgtaagtatttcacaaataaaccagtggcttccaaaagcatttaaattacccaactctagatattacaagaatctgtgattattcaaaacttgcagaaactataatgtcacattattataaaataaaaggaatcagtgtatttggagagtacctttaaacaacc

SEQ ID NO: 521217 - DNA, 512 bp, Homo sapiens
gccttcagtagaagtgagtggagggaaagttctagaaagagrataatgggacaaaacagttcctccactgacaggagtgacagacatcacacaacaagtcaaaataggaacaaagtaaatattgggccatgagtgagacaaagaaacaatgaaagtgtaggcttcccacaggagggaatgagctaggggaggagggaagttggaaatggttactcagctttctgtagtattacaaagtttgttagcctgtggactctggagccagtcttactgggcctgaattcaggttctacctcttactgcttttgtgactatagaaaaatgagggtaataatagagtgtggttgtaagaaacatatttgcaatgtatttagaatagttcctgtaacacagcattatatggctcttacctatgctttcttttctttttttttttctggatcttgggcctcacttaggtatatggcttcctctattggtcttaaagtgctgtagaggcataagtagagact

SEQ ID NO: 521218 - DNA, 570 bp, Homo sapiens
gctggccttcagtagaagtgagtggagggaaagttctagaaagagaataatgggacaaaacagttcctccactgacaggagtgacagacatcacacaacaagtcaaaataggaacaaagtaaatattgggccatgagtgagacaaagaaacaatgaaagtgtaggcttcccacaggagggaatgagctaggggaggagggaagttggaaatggttactcagctttctgtagtattacaaagtttgttagcctgtggactctggagccagtcttactgggcctgaattcaggttctacctcttactgcttttgtgactatagaaaaatgagggtaataatagagtgtggttgtaagaaacatatttgcaatgtatttagaatagttcctgtaacacagcattatatggctcttacctatgctttcttttctttttttttttctggatcttgggcctcacttaggtatatggcttcctctattggtcttaaagtgctgtagaggcataagtagagaytttaatagagtctaaccctgaaattatggaattatcatatccggtttcaaagtat

SEQ ID NO: 521219 - DNA, 588 bp, Homo sapiens
gaggttggagtggccttgagagatgggctggcttacagatcttttgctgcactggagcgtacagcttctacctgctctctgcttgcagtgactctgtccttttggagttgaatcagacaacttgggatcccttttttgtccgttgctatgtcacttctttatttgtgtgccagcataagcccaacagttttgacacctgttcaatgaagaagacttttatagacagaataaacggtacacacacatacacacacacacacacacacaygcaagaataatgggtaatctatggtgaaagacatctggtgttacaggtttattattactaaaatacaagcaagattcgtttctctcctacattagagacacttatactgagaacaaggagtaatttaaggaaattgaaacatctatacttgaagtcatttttaatgtctttctttaaaataacagttttttaatattcctagaatcccataaagcattgttttattcatgtgactgccatacttaatgatcttcagagatatcctgctaatgtcaccaagtccacaccctttagcttggagttcaatgtctgcaataatg

SEQ ID NO: 521220 - DNA, 647 bp, Homo sapiens
tgcagggtgttggaataaagctgtggtcctggcttctgggaagctcccaagcttccaggcccacactgaccaagcagccctttcctctgctgcctggggcctggttgcagcttgttatctgggctctctcagatctgtctccttaacagtgacccttttattcatgtgtatattctccagtagatataactgaggctgaattttgaagttaaaatgtgaagcaaacccatgcgggcttaatctgccagcatcagcacaggacacctgctcatggcaccccaatgactacccccatccggcccctttgagaaactgttcttcctgctttgtagctcacactcttctagttggcgctacaatgacccagttctaccaggcccctgtgctcagcctcacccttccctgtggtgctggatatgataataatttwaaaaaacaatataataaagtgcaacagatagagaaaaaactgcccactctcaatctaactgtgaaggctcctgcctccttcagtgccaagatttctgagctgtccgagatttcacctctgctctgacacagttccttcttgacttgtgccatcctgcagttctgagtggctctggacattatagctccatgccgctttgtcagcacaaacctccagt

SEQ ID NO: 521221 - DNA, 571 bp, Homo sapiens
gtctctgtgaaatatgaccttgcaagagtggctgatttgcctgttgccttctctgataagaaaaatatatttataatgacattgtagttgtttggatatttcacagtgtgtgttactttataacaaatttgtttaatcacaaagaaatcccctctaatattaggtgaaagagaaaacctttaaaaataggcccttttttttctttttttccttttcaaccaaagtttctatagaagttcaaatagattctaagtcagaaagctccagaggaaataaattcayaattgaaaacagaaggaatatggctttacagggcaagcttaatgaaagaaagaggagagagttggataaatctgcacaaaggaggcattcaaagagtgtttccagagccgaaagctaaacgtaacgtagtagagaattaactgcttagatatgaggaatagagccctggcagagtcgggctttgcaaatttctccaacaataacaatttccttaaaaagaaatttcagagatttgccagataagtagttacagtcattatttctagtaatacaagaaaagtataaatag

SEQ ID NO: 521222 - DNA, 620 bp, Homo sapiens
atttctgaaacatgtgtatcttggaatgctttattttcatgtaaatctagcattccatgaatcacactttggggaatgctgtggtagatgaggttacactgatgcatgggatgagtgataagatgttagatcatactgtagagacttcagggattcttctgccctgccccaaattttcattaagggaggtgttattatctccatttctgtagttaaatgacacatcttaaaaatatgtatttaaaagacacatgtatttaaaagacasgtttttagatatgtattaaaaagacacatataagaactgaaagaccaaattaagatcttggtcttctatcatgtagggcagtgttgtatgacatggtgatattttctctaaatgctttaatgagcattgtgaaaacagtattaacaccactctattaactctagtatataatctgtagcattgcctttcatggtatatttgtggcaaaagtttctgaagttttgataaaataaataccagctggttagcttatatggttgggagttagtctgtttttatataaatttctcaaactacaagctctatcaaagttaaatatttcctttttggatgctttggtctgttatttctc

SEQ ID NO: 521223 - DNA, 583 bp, Homo sapiens
tttgttactcttagataatgccaataaagcgaataaagtctcactaattatagcacttctaatagtaattccttagtcaactgttccacaaaaatcatgttctgggcattgataagakcttgcagttctaaaagagacaattacattttaaattaaaacgtattaacatttgaatctcacataaaatactaagtagttctttatgagattgaaaaataatgtgacatcactcaaaaggatggtgcagtagcacttgggttaggtggcagagctggggtctttctaggggcgatcttgctacaaacttggctgtgactttgggcaacttgcttcattttggggaacctgtttcctattaaaatatagaactgtaagcctgaacaatcctttttccagctttaaaattctctgaattaagggagataggttatccattttaatatagagctctggtttcaaagaaatttgatgtcaacttttcttcatgaacatggggtctcaagtacagtagtttaaaggccatgcaaagacaaatttatactattttagaaaatcaatccaagccatctgtagcagagatagc

SEQ ID NO: 521224 - DNA, 583 bp, Homo sapiens
tttgttactcttagataatgccaataaagcgaataaagtctcactaattatagcacttctaatagtaattccttagtcaactgttccacaaaaatcatgttctgggcattgataagatcttgcagttctaaaagagacaattacattttaaattaaaacgtattaacatttgaatctcacataaaatactaagtagttctttatgagattgaaaaataatgtgacatcactcaaaaggatggtgcagtagcacttgggttaggtggcagagctggggtctttctaggggcgatcttgctacaaacttggctgtgactttgggcaacttgcttcattttggggaacctgtttcctattaaaatatagaactgtaagcctgaacaatcctttttccagctttaaaattctctgaattaagggrgataggttatccattttaatatagagctctggtttcaaagaaatttgatgtcaacttttcttcatgaacatggggtctcaagtacagtagtttaaaggccatgcaaagacaaatttatactattttagaaaatcaatccaagccatctgtagcagagatagc

SEQ ID NO: 521225 - DNA, 583 bp, Homo sapiens
tttgttactcttagataatgccaataaagcgaataaagtctcactaattatagcacttctaatagtaattccttagtcaactgttccacaaaaatcatgttctgggcattgataagatcttgcagttctaaaagagacaattacattttaaattaaaacgtattaacatttgaatctcacataaaatactaagtagttctttatgagattgaaaaataatgtgacatcactcaaaaggatggtgcagtagcacttgggttaggtggcagagctggggtctttctaggggcgatcttgctacaaacttggctgtgactttgggcaacttgcttcattttggggaacctgtttcctattaaaatatagaactgtaagcctgaacaatcctttttccagctttaaaattctctgaattaagggagataggttatccattttaatatagagctctggtttcaaagaaatttgatgtcaacttttcttcatgaacatggggtctcaagtacagtagtttaaaggccatgcaaagacaartttatactattttagaaaatcaatccaagccatctgtagcagagatagc

SEQ ID NO: 521226 - DNA, 605 bp, Homo sapiens
ctgttcccagcccacttcctcagtcacaggcagcaccagtcttcttgctacccacaatccacccattcttgyctactctcaggtcctcagataatccacacttcctgctgcttcaggacctttgcacatgctgttcttccttactgaaatgcttctcttcatgcataaataacatctgctcatgccttacatctcaaatcaagcatcaattccttaagggtccgacttcccccaagactaggtcagaacattcatatttgcttttttttctttagagcacgtatctcatttttaaattgcaccttagttacatgattgtgttgttaatgactctctatgctgtagtctttatgttcattaaaggcagagactctaccagtcaggattcttggctgtaagcaacagaaaaggattctggctaaacttaagcataaaaggaatttattggaggatttggattaagttcacagaatcagtgggaaggctggtgaatcagacccagaaaatgaacaggacctaaggttgcctaggcagcaggggatgtggccaatgtcaagctgtggggcaatccgattgggatattctaccaacgctgctgccactgg

SEQ ID NO: 521227 - DNA, 605 bp, Homo sapiens
ctgttcccagcccacttcctcagtcacaggcagcaccagtcttcttgctacccacaatccacccattcttgtctactctcaggtcctcagataatccacacttcctsctgcttcaggacctttgcacatgctgttcttccttactgaaatgcttctcttcatgcataaataacatctgctcatgccttacatctcaaatcaagcatcaattccttaagggtccgacttcccccaagactaggtcagaacattcatatttgcttttttttctttagagcacgtatctcatttttaaattgcaccttagttacatgattgtgttgttaatgactctctatgctgtagtctttatgttcattaaaggcagagactctaccagtcaggattcttggctgtaagcaacagaaaaggattctggctaaacttaagcataaaaggaatttattggaggatttggattaagttcacagaatcagtgggaaggctggtgaatcagacccagaaaatgaacaggacctaaggttgcctaggcagcaggggatgtggccaatgtcaagctgtggggcaatccgattgggatattctaccaacgctgctgccactgg

SEQ ID NO: 521228 - DNA, 605 bp, Homo sapiens
ctgttcccagcccacttcctcagtcacaggcagcaccagtcttcttgctacccacaatccacccattcttgtctactctcaggtcctcagataatccacacttcctgctgcttcaggacctttgcacatgctgttcttccttactgaaatgcttctcttcatgcataaataacatctgctcatgccttacatctcaaatcaagcatcaattccttaagggtccgacttcccccaagactaggtcagaacattcatatttgcttttttttctttagagcacgtatctcatttttaaattgcaccttagttacatgattgtgttgttaatgactctctatgctgtagtctttaygttcattaaaggcagagactctaccagtcaggattcttggctgtaagcaacagaaaaggattctggctaaacttaagcataaaaggaatttattggaggatttggattaagttcacagaatcagtgggaaggctggtgaatcagacccagaaaatgaacaggacctaaggttgcctaggcagcaggggatgtggccaatgtcaagctgtggggcaatccgattgggatattctaccaacgctgctgccactgg

SEQ ID NO: 521229 - DNA, 600 bp, Homo sapiens
aaatacatcatcaggagactaaccagggaggcaagtggaacaccagacaggatagagtcagggtgttagagctctagggtggctctgcccctctctgtctgacttgggtaaatccattctcctctatgagcttcagtgtcttcatctatagaatcagaatgttgaactaaatgactctctaagctttttccagctctgacataacattctgtgattccacttggaaaatggtaagcaaaaaatttgtaagcagagggaggaatgggtgatctttaaaaaaatgcttcaataaaagaaacagaatggataaagccctggtgacctacacaaggaaatcagtcaagtgtcctcaggaggctcagaaggcaggctgcaacttgctgggcaarccacacctgctcctcacattccttccaagggcagccccaggtctgagctctcggcagtgaaccagtgaactgtaaggtatttttttgtttgtttgtttgtttgtttttggtggggaggtgggtggaatcttggaggcagctgctcaatccctgaagatagctggttcttaagacccgaccccagcagaggaaagctgattttcagaacaga

SEQ ID NO: 521230 - DNA, 521 bp, Homo sapiens
agtgttgcttaatataaagagtcaatgttttaacatatgaagatctgggtctaggtttcacttaatattcactggttgtgtgaccatgggtaatcacgtgtggttctgtttttatatctgtaatatgtgcctaagaaaagcaggctcagtggccagtgtgaaaattaaatgggaaagtccatcacaaatgataaggaactaagcaaagccagattatcattaggtcgaaagacacaccagctacttcagggcttctgatggttaattttatgwgtcagcttgactgagctaagggatgctgagatagttggtaaaatattatttgtggcacatttgtgagggtgtttctggaagaggttagcatttgaatctgtaaactgagtaaagaaggtctaccttcagcagggtggatggacatcatccaattttttgagggcctaaatagaacaaaaacatggaggaaggaggaatttgctccctctgcttgagctaaggcttccattttctcctgcccctgggca

SEQ ID NO: 521231 - DNA, 654 bp, Homo sapiens
ctgacagtgacacaggggaacaatgctgcgtgggaggaggcgcrcgcgtgtgtgtgtgctcgcgcgtgtgtgtgcgtgcatgtttgcttactcccctcctgacccgagtgccagcagtgacacactttacttgtcccctctggtcccctgtgggcactgaatctgactctctgatgcgcttgacgccctctcagggcccttgttgagtggcagctttggctgtgggacaagggagcaagtccgttttttttatctttctccctaagccagggcagacagagggatgccttaggcttatgtggcctttttggagctcttgtcaaggacccctgggagcgtgtcacttccttggctctggttagggagtggaggcacaggaaggtgaagtgacttcttagaggccacatagctagcaaatgtgggccaaagctatagtcaggccctagtgactggggccaggggggtttggaaagatgatctcttctgcccagccctttcatttacagatgaaacaatgcagccagatgggcagcttgacctggctgaggcattcaaggtggctgggactagactcaggtctcctggctccagatcccacatcatcctctccacactcccacccctcccagcagctccctgctccacttttagttt

SEQ ID NO: 521232 - DNA, 633 bp, Homo sapiens
ctgggacaacaggtgcactccgccactcctggctagtttttctgtatttttagtagagacggggtttcactgtgttagccaggatggtctcaatctcctgacctcgtgatccacctgcctccrcctctcaaagtgctgggattacaggcatgagccactgtgcctggcccagaaaattatttatttatttatttattattttcttgttctgtcttccaggctagagtgcaatggtgtgatcatagttcactgcagccttgaactcctgggctcaagtgatcccctcacttcagcctccttagtagctgggactacaggtgcacaccattatgtgcgcctgtagtcctgtattcaaattttaagagcatgaaggagcatgttgtgggagagtttggggaagagttcacacaaaaggacctggaaaataggcaggagtttgcagagaaaggggaaaggacagcacatgcaatttcataacagcacattcaaaggctggagatgggcaacaacacagcctgttgggcaggggtaagcagctttgaggggctggagaatactggaaagatttcagaaacctgtggaggggaggctggagagggagctcagaagtgttactgttggaacaagctaaag

SEQ ID NO: 521233 - DNA, 633 bp, Homo sapiens
ctgggacaacaggtgcactccgccactcctggctagtttttctgtatttttagtagagacggggtttcactgtgttagccaggatggtctcaatctcctgacctcgtgatccacctgcctccacctctcaaagtgctgggattacaggcatgagccactgtgcctggcccagaaaattatttatttatttatttattattttcttgttctgtcttccaggctagagtgcaatggtrtgatcatagttcactgcagccttgaactcctgggctcaagtgatcccctcacttcagcctccttagtagctgggactacaggtgcacaccattatgtgcgcctgtagtcctgtattcaaattttaagagcatgaaggagcatgttgtgggagagtttggggaagagttcacacaaaaggacctggaaaataggcaggagtttgcagagaaaggggaaaggacagcacatgcaatttcataacagcacattcaaaggctggagatgggcaacaacacagcctgttgggcaggggtaagcagctttgaggggctggagaatactggaaagatttcagaaacctgtggaggggaggctggagagggagctcagaagtgttactgttggaacaagctaaag

SEQ ID NO: 521234 - DNA, 633 bp, Homo sapiens
ctgggacaacaggtgcactccgccactcctggctagtttttctgtatttttagtagagacggggtttcactgtgttagccaggatggtctcaatctcctgacctcgtgatccacctgcctccacctctcaaagtgctgggattacaggcatgagccactgtgcctggcccagaaaattatttatttatttatttattattttcttgttctgtcttccaggctagagtgcaatggtgtgatcatagttcactgcagccttgaactcctgggctcaagtgatcccctcacttcagcctccttagtagctgggactacaggtgcacaccaytatgtgcgcctgtagtcctgtattcaaattttaagagcatgaaggagcatgttgtgggagagtttggggaagagttcacacaaaaggacctggaaaataggcaggagtttgcagagaaaggggaaaggacagcacatgcaatttcataacagcacattcaaaggctggagatgggcaacaacacagcctgttgggcaggggtaagcagctttgaggggctggagaatactggaaagatttcagaaacctgtggaggggaggctggagagggagctcagaagtgttactgttggaacaagctaaag

SEQ ID NO: 521235 - DNA, 514 bp, Homo sapiens
tgacatgcagtgaattgcccaagccacaaggagaggccataatcccacctgagcccaactttcaactcatccgaattcaggcatcagacatgtgagagaagaagcttccagaagattctttctctgaactcttgtagtcttcccagttgaggccccagacactgtgcagcagagaataamcatccctgctgtgccccgtccaaggtccaaagaatccctgagcacagtcaagcggctgttgtttacaccactacgttcagggtggtggttatgcaacaatagtacctggaataaaagcaatttctcttataaaaatatacacatttctggccgggcgcagtggctcatgcctataatcccagcactttgggaggccaagacaggcggatcacctgaggtcaggagttccagaccagcctggccaacatggtgaaaccctgtctctactaaacataaaaaattagccaggcatggtggcacgtgcctgtagtcccagctactcgggaggctgagg

SEQ ID NO: 521236 - DNA, 510 bp, Homo sapiens
aagcctggcctgggctcatagggttcctgactggtgcggtgcttctctgtgggtagagggattgggctggtttttaatgacctcgtccaggaagaaaacatcttggctttgggacctatgtgacttaaagaaaaggtttgctatctcttcactyaaaaggctcccttttattaaatctcctaccaccccctgtggactccaggcttgaaaatattttatttacaaagagattgcatgcattgagtcaccattaattttaatgaagaaatgtggaaaatgagaactatatagctgctgatgagactttctcatcagctcaggggaaccaacgtgagcacaccaggttggtagaacagaattctagtcaacagaaaaacattggaaatttcagttccatttcaattgaggcagacccgattcttctagaacttaaacaatattagcaatgcctcaagagcccccagtgaagttttccagaaacctggttagaatccttaggcaggacccacc

SEQ ID NO: 521237 - DNA, 519 bp, Homo sapiens
ggtgaggcacaagaattgcttgaacctgggaggcagaggttgcagtgaatcgagattgcaccactgcactccagcactccagcctgggagacagagcaagactctatctcaaaacaaaaccaaacaaaaaagagaccaaaacaaacaaacaacaaaaaaaaaaggaaaggattcctgaggaattaagagaagagtagtgagcaatctatgagaatagacaggtgttaaccaagacaacaatatttcaggcgagaggttttcagaggcagggggtctccccaaaaatctatgatgtgccttatgagaatcagagctagctgtaaacacctataaggctaagagagcatgaagcccattatgacagtactgatcagataagaamtttcctacaccactaacttttcttcccttatactttctaaccatttcagaggaacaagaaaaaagctaatatgttggagagaaagtgaatgaggaagaaagaagaatctgattagggctatgtctcgtttctggcag

SEQ ID NO: 521238 - DNA, 423 bp, Homo sapiens
tctgcaggccaagtagatcagggccttcatctgtctttgggaaaaaacacacgcatagagcactaggtatagatgaggcagaggtgtgagcacaggcatgggataagaagagagtgagtgggagagcagcccagagtgcttgctgctgggtttgatgctggaaccctgggagggaacagtcttgggagctggaggctactgaattgtaagctgaaacaagaacctgagccttgagactccagatcttgaactctttcccctttcatcccattctctgcaacatctgctgttggggtaagctcttggagtgtagtccagagatagaggagggaaagtactgtctttggagtcaggggctgcyggagctagagggaatgtctcctttcttcccatctccctgcccccatggtgtagtgcctagcc

SEQ ID NO: 521239 - DNA, 594 bp, Homo sapiens
ttttcagaataggaatcatggagtccaaaggtgtatacatttaaaattctgaaacatattctgggtggttttccaggaaggttgtacccaattagactcaccaagtgggtgtgagcttgtttcctaatatacatgacattcttgaccagacattattgttcrtttttagtcttggctaattggattgggagaaacctgtctcttgttttaatttgccctttttattattattagtgaggctgagcatcttttcacatgctcagtgtctggcagagttcaaaggcagatcagagaggcagaaagacccattttgagtctagtgcaccagccagatttccttaatcaataatgggttaaatgacttggctgattgcacacagatagcttgtagaatcaatcacctttacaaggttcaccttcactcatattttgctcatgtgtagctcaagtctctgccactggggtcaatgtcaactgatctctccagacacacccccttgtatgtgaacgcaaccactgaataaatcacctacacatggtttaaatatgtcaggggtagaaggacagcctgaatctgaaagcccagcttcacca

SEQ ID NO: 521240 - DNA, 594 bp, Homo sapiens
ttttcagaataggaatcatggagtccaaaggtgtatacatttaaaattctgaaacatattctgggtggttttccaggaaggttgtacccaattagactcaccaagtgggtgtgagcttgtttcctaatatacatgacattcttgaccagacattattgttcatttttagtcttggctaattggattgggagaaacctgtctcttgttttaatttgccctttttattattattagtgaggctgagcatcttttcacatgctcagtgtctggcagagttcaaaggcagatcagagaggcagaaagacccattttgagtctagtgcaccagccagatttccttaatcaataatgggttaaatgacttggctgattgcacacagatagcttgtagaatcaatcacctttacaaggttcaccttcactcatattttgctcatgtgtagctcaagtctctgccactggggtcaatgtcaactgatctctccagacacacccccttgtatgtgaacgcaaccactgaataaatcacctacacatggtttaaatatgtcaggsgtagaaggacagcctgaatctgaaagcccagcttcacca

SEQ ID NO: 521241 - DNA, 554 bp, Homo sapiens
gtgtgtgctttcctgggagaggctgcatttattgctatggggctgcaggtaatttgcccaaaccaaaatttgcaggtaatttgcaaactgaatctctatgctcctagagattcagtttgctctttctagatcaccaaagaggatgatgaggatgaaatgaggaaacctacagtcacgcaacaattatatcaagcacctactgtgtgcctggcactgggctaggctggggccacagtgatgagcaaatcaaggaaggtcccagcccttgtggagctcacagwctagcgagcgagagatatactaacctagaaatgaaaagattttatattgtaatacaattctgctgagaaaagtaaaacagagacgagagaggacgtggggaatgtgggcgaatctttgctttgaggggccagggaagggtcttagattgagtgccctcagaatcagaccctgaacgaggaaccagagggcagggtgcttatttgggaggtgatcccagaaagacgcagtggaggaatggggaagtgaggcggggaggggagaagccagtgaag

SEQ ID NO: 521242 - DNA, 576 bp, Homo sapiens
gggtttccacagaagtcattgggaccaaagcccccacaaattataaaatttaagtatgacctggcttgtccctggtgcctgtatctccaaggtgactttgcagggcttgtaggtgttgctccaagatttaggatgtcagggtccaggccaaatagcttcctaactcatcataactaatatggttaacatggaaaattgtgaaacaatttaatgtcaaaacataagggccagcgtggtggctcatgccygtaatcctagcactttgggaggctagtagggagaatggcttgagctcaggagtttgagaccagcctgggcaacatagtaagacctcgtctcatccaaatatcaaaaagttagtctggcatggtggtgtgcactcaggaagtggaaggaggatcacttgaatccatgagtttgaggatacagtgaactataattgtgccactgcactccagcctgggtgacagaacgaaaccctacctcaaaaaagaaaagaaaagaaacgaaacgaaacatagggagactggctgaatagatgaagttttgtgcaggcttttaaaataatgagtaaaa

SEQ ID NO: 521243 - DNA, 491 bp, Homo sapiens
gctccatgggcggggtggggggtgggcgtcagatccgaggtagggccccggaagcagcctgctgtaacagtctccccatcgagatgattgggacacagatggttctcagattgcccttgtagaaggctggcctcagatgttcatgaacttctgaaatatggcatgcacaatgttaagagtgtgcattgtccctaggagaggatccacaggcaccrtctgtcttggagtcacaacccatacaactttagaactgctgtcttcagggttgttttgcgcagttggagcctaacgtctagagaaaggtcaccagggagccaatggcagagctgggtggagagggctggtctctcatgcctctcagcacattactggctttgctgtgaaggtggtcagggactgtagacctgtccctctgtctgggcctcagttttcctagctgtaaaatgggggttggacaggataatcccaagtttccatgcagctttgatctg

SEQ ID NO: 521244 - DNA, 623 bp, Homo sapiens
ctgggtgcagtggggtgcacctgtagtcccagctactcaggaggctgatattggaggattgcttgagcccaagagttcaaggtcagcctgagaaacatagggagacccccatctcaaaataaaacaaaatatagtaaaataaaacatgcttattgtagaaaatatgtcaagtacagggatataaaaaagaaaaaatcattcataaactcatccagaggcattaatatatcggcatattccttccatttttttctgtgtgtgtttcttataatatttgagatcatattgcacattcagttaatttacctatttttcgtaacatctatgtatgtrtgtatgcatgtatgtatgtatctatccatccatccatccgttcaaggtacctttttccaaaaaaagatctaatgttcttatttaacattattcctaattattttcccatgttattaggatctctatacaagcatcatttccagagtcaaaaaagtatgtgcattttgcattttgatacatactgccaaaatagtttccagaaacattgtcccaatttcagttccaaatagttttagagagccccctttctcattatccttatctcttttctggtccatttctaatcattt

SEQ ID NO: 521245 - DNA, 637 bp, Homo sapiens
caacacaagtgtcaaatgacataatttacaacaaaataccttggattctattattgaatgtttgcacatctgttacagatttaattacttatgaccattcaacataytaatttatgctttttaaatttgttttgggtgtgtgtgtttatttgtgtgtgtgtgtttgtgtgtatgtgtgtgtgtgtttatttaaaagacacgtaactaaaggaccaggaatgaaaattatttttaaacgggcctttagctgtgtgtcgtggcatgcacctgtagtcccagctacttgggaggctgaggtcggaagaccacttcagcccaggaggcggaggctgcagtgggccaagatcacaccagcctgggtgacagagtgagactctgtctatataaataaataaaattcaaaaaatgttaaatgggcctttggtgttgattcacataatgttccatgatggtaatgatacaagaggtagagagaaattatttatgcagatagtgaggtcaaaagaatccttggtggaattacctttctaatcaaaagcagccccccaaatcatttattttctaacaaagagcagcctgaaaaatcaagctgcagacatagataagcaagctggaagcttgcacaggggaatgatgg

SEQ ID NO: 521246 - DNA, 613 bp, Homo sapiens
catactcagaggtgggctaccacggtactgttggttgtacatttgggctagaaatttccctccattccaataaaataacagaagttcaaactaagttcattttgctgaaagtgtcatatagacttaaggctctgtaaagataccagcctctgatcttacaccagtgcatcttaagttttttatgcctaaaatcacaaggagaaattgttaatacacagattcttcagcctgtttccatgaaattggttaactgggtctgcagtggggcatgagaaattgtgtttctaacaagttcacaggtcaaggaacattttcaaaggcagyctgagaatctcatatgtcatagaacttttcttgaaaataatacatataagtgtataccttcacccaaacataaaatttccatagattctaaagatcatctgtcaatccaaagatttagaaccctggatctaaaattacgtatatatttattatttctgtttttggcgttactattgccttccttgctctttggataaatttgctataaccagaagggtaatcaacgttctttcattgcatatggatagattcttaagagcatgcatatagttctatggaatttaattaa

SEQ ID NO: 521247 - DNA, 613 bp, Homo sapiens
catactcagaggtgggctaccacggtactgttggttgtacatttgggctagaaatttccctccattccaataaaataacagaagttcaaactaagttcattttgctgaaagtgtcatatagacttaaggctctgtaaagataccagcctctgatcttacaccagtgcatcttaagttttttatgcctaaaatcacaaggagaaattgttaatacacagattcttcagcctgtttccatgaaattggttaactgggtctgcagtggggcatgagaaattgtgtttctaacaagttcacaggtcaaggaacattttcaaaggcagcctgagaatctcatatgtcatagaacttttcttgaaaataatacatataagtgtataccttcacccaaacataaaatttccatagattctaaagatcatctgtcaatccaaagatttagaaccctggatctaaaattacgtatatatttattatttctgtttttggcrttactattgccttccttgctctttggataaatttgctataaccagaagggtaatcaacgttctttcattgcatatggatagattcttaagagcatgcatatagttctatggaatttaattaa

SEQ ID NO: 521248 - DNA, 423 bp, Homo sapiens
atatgtattaagtaccttcatgtactaggtaattaattactgtcattttattttaaaaaatttaaaaaattataaaattactgtgtaactctggagattagcttgcagaagggtaggtaaaaggagcacctgaaagcaatggaggaagttttgtcctacttagttccaaatatagtattaaacttttttatgatgaatgctatcatacataatatgaattaaatgatgggtttagctgtcttcatgtttgascgggactataagagtctgttgcacaaaagcagaacacgcatgaaggtgattcatagctttatgagaatgtttttttcagattattattgtgctaccctagaaactgtttggaaacagacattcagtctctgatagctaaacaaaccaaactgatgtgtcttctgctactgt

SEQ ID NO: 521249 - DNA, 365 bp, Homo sapiens
aaggcatattgttacccaatgtaatgaaatgcaaaccagacaggaatgagacattttcattgtacttgtcaatcagggctgtgcagacagatatatatacttgaacttcagagacataggctgaagtaaatagggctgaacttgaaggaggcaggcagggacttgaactagaactatcagaatccagtttggaattataaagggagtycctgaaatatagaaaatgcagtgaaccaccccacccaagtggtaggcagtggtcctcaggcaaatctgagtgaaaggcttatgacgagctgtggcctgctaggttctgctgccatggaatacctttaccgctctgggggtgactaggtgttagcccc

SEQ ID NO: 521250 - DNA, 559 bp, Homo sapiens
ctggttcagtggcagtgtacccaggaagttaggacaatagccaccaagaagggatccacaacccagggtatttatatcatagaatatccatgaaagatagcccccaaggaataagaaactactaaaagttatgaaatctatgagaaaatccagcaccatrtgagtgatacctcacaagtcccaacaaattggagaattccaacccagagaaatataactagagcaatctgaagaagactaaaataagaaacctaacagcattgaacaagtcaaacactaaaggaaaaaaaagaaaaagtcttcaaagatattaatgcattttaaaaatatatgtattcaacaaatatatattggcctattgtaggccaggcattatcctaagcactggaaatatagccatgagcaagacaaagtccttgcacttaaggagtttatatgttgagataaaacaggcaaataatgccaagtaaacatacagtaaatgtcaggcagataaattcatgtagaaaaataagaagagtaacagactaaagaaagatggtatagaagggggagtgtg

SEQ ID NO: 521251 - DNA, 559 bp, Homo sapiens
ctggttcagtggcagtgtacccaggaagttaggacaatagccaccaagaagggatccacaacccagggtatttatatcatagaatatccatgaaagatagcccccaaggaataagaaactactaaaagttatgaaatctatgagaaaatccagcaccatatgagtgatacctcacaagtcccaacaaattggagaattccaacccagagaaatataactagagcaatctgaagaagactaaaataagaaacctaacagcattgaacaagtcaaacactaaaggaaaaaaaagaaaaagtcttcaaagatattaatgcaytttaaaaatatatgtattcaacaaatatatattggcctattgtaggccaggcattatcctaagcactggaaatatagccatgagcaagacaaagtccttgcacttaaggagtttatatgttgagataaaacaggcaaataatgccaagtaaacatacagtaaatgtcaggcagataaattcatgtagaaaaataagaagagtaacagactaaagaaagatggtatagaagggggagtgtg

SEQ ID NO: 521252 - DNA, 559 bp, Homo sapiens
ctggttcagtggcagtgtacccaggaagttaggacaatagccaccaagaagggatccacaacccagggtatttatatcatagaatatccatgaaagatagcccccaaggaataagaaactactaaaagttatgaaatctatgagaaaatccagcaccatatgagtgatacctcacaagtcccaacaaattggagaattccaacccagagaaatataactagagcaatctgaagaagactaaaataagaaacctaacagcattgaacaagtcaaacactaaaggaaaaaaaagaaaaagtcttcaaagatattaatgcattttaaaaatatatgtattcaacaaatatatattggcctattgtaggccaggcattatcctaagcactggaaatatagccatgagcaagacaaagtccttgcacttaaggagtttatatgttgagataaaacaggcaaataatgccaagtaaacatayagtaaatgtcaggcagataaattcatgtagaaaaataagaagagtaacagactaaagaaagatggtatagaagggggagtgtg

SEQ ID NO: 521253 - DNA, 559 bp, Homo sapiens
ctggttcagtggcagtgtacccaggaagttaggacaatagccaccaagaagggatccacaacccagggtatttatatcatagaatatccatgaaagatagcccccaaggaataagaaactactaaaagttatgaaatctatgagaaaatccagcaccatatgagtgatacctcacaagtcccaacaaattggagaattccaacccagagaaatataactagagcaatctgaagaagactaaaataagaaacctaacagcattgaacaagtcaaacactaaaggaaaaaaaagaaaaagtcttcaaagatattaatgcattttaaaaatatatgtattcaacaaatatatattggcctattgtaggccaggcattatcctaagcactggaaatatagccatgagcaagacaaagtccttgcacttaaggagtttatatgttgagataaaacaggcaaataatgccaagtaaacatacastaaatgtcaggcagataaattcatgtagaaaaataagaagagtaacagactaaagaaagatggtatagaagggggagtgtg

SEQ ID NO: 521254 - DNA, 627 bp, Homo sapiens
cctaggaatttgtgcccagaagaccctagtgtggagttgctgaacagccactctgatttggcatctcctttggctgagttacagagcagtttccaggactgtgaatcgtagtccttcccttcccctttatttttggctttctcagaaatttttctcctttagggactcttaatgtttcctgtgggtggaggcagggacaggtctcccgtcagagaacccaagatggtagagaaacttattttcactttgatctcactttttctagtatagaaactgagttggggagaatttttccacacacttagtgcagggctgattgtggggaaaggggtgtataatggatatggaagtcagattcttctaccatctgtttggagttttttttacttgtctgtggccccatgaactgttgcatcttcctgtttgagttctgggatattgctggcaataacctctgtgctgtatatttgtttttggttttttgtgaagggkaagtgaagccagattgctactatgttgccattttggaaccaggagtctgctgttctttctggattatcattattctgtttctctttctttgcttttccgttggattctttcttattttatttatactgctttaaa

SEQ ID NO: 521255 - DNA, 320 bp, Homo sapiens
ggcctcacctccatcagcataggtctcggtgccatagccgtcttgcaggccattgttccaggtgccctcatacttggcaccgctgcttgagctctgccggattccgtagcgtcccttgaagccatgtgtccactcgcccttgtagagccagcgccccttggtctctatgcccagcccatgccgtttgccctggctccagtatccctcaaaggtgtttccgctgggccaggtrtagacacctgccacctcaaagccaaagttccaggagccagagtattcgccctggcccttggggcctgtgcacagtccatgcccatggg

SEQ ID NO: 521256 - DNA, 560 bp, Homo sapiens
taatgttggctctaatatctaaagaaaaagaagtatacttttttattattttattttattttgagacagagtctcgtactgtcacccaggctggagttcagtggcgtgatctcggcttaccacaacctccgcctcctgggttcaagcacttctccctgcctcagcctcctgagtagctgggattataggcgcctgccaccacgcccggctgatttttgtatttcttagtagagacatggtttctccatgttggccaggctggtctcgaactcctgacctcaggtgatccgcccaccttggcctcccaaagtgctgagattacaggcgtgagccacagcacccggccagaactatacatcttttatatgtatrcaaaaaagaaatgaatggaaacaaattttctagttatttatatacttccctgaaaaaccttgccctttttcctacttattcaatgcttcacacaaaaaggaaaaagtaaaacttgagtacggaaataaacaaaatccaaacacaaaattttaattgtaaaaaaaacacgctacaggagaacgttatga
